United States Patent Application Publication US 2011/0183924 A1 - sequence listing, part 242

SEQ ID NO: 668151 - DNA, 225 bp, Homo sapiens
tgggctaaaaatgagggtttctgttgaggcagcaggcccagaaaggtggggtaaggccaagctagtggggccagagcctgagcgtttaatttattcagtacctgtgtttgtgtgaatgcggtgtgtgcaggcatcgcagatgggggttctttcagttcaaaagtgagatgtctggagatcatatttttttatacaggtatttcaattaaaatgtttttgtacata

SEQ ID NO: 668152 - DNA, 2377 bp, Homo sapiens
  misc_feature (9)..(10): n is a, c, g, or t
gagcgtgannggggagagcggaccgacgcgacacgccgtgcgcctccgcggctgcgctacgaaaacgagtcccggagcggccccgcgcccgccgcacccggccctcgcccgcccgaagacaggcgccaagctgccccgccgtctccccagctagcgcccggccgccgccgcctcgcgggccccgggcggaagggggcggggtcccgattcgccccgcccccgcggagggatacgcggcgccgcggcccaaaacccccgggcgaggcggccggggcgggtgaggcgctccgcctgctgcgcgtctacgcggtccccgcgggccttccgggcccactgcgccgcgcggaccgcctcgggctcggacggccggtgtccccggcgcgccgctcgcccggatcggccgcggcttcggcgcctggggctcggggctccggggaggccgtcgcccgcgatgctgctctccaagttcggctccctggcgcacctctgcgggcccggcggcgtggaccacctcccggtgaagatcctgcagccagccaaggcggacaaggagagcttcgagaaggcgtaccaggtgggcgccgtgctgggtagcggcggcttcggcacggtctacgcgggtagccgcatcgccgacgggctcccggtggctgtgaagcacgtggtgaaggagcgggtgaccgagtggggcagcctgggcggcgcgaccgtgcccctggaggtggtgctgctgcgcaaggtgggcgcggcgggcggcgcgcgcggcgtcatccgcctgctggactggttcgagcggcccgacggcttcctgctggtgctggagcggcccgagccggcgcaggacctcttcgactttatcacggagcgcggcgccctggacgagccgctggcgcgccgcttcttcgcgcaggtgctggccgccgtgcgccactgccacagctgcggggtcgtgcaccgcgacattaaggacgaaaatctgcttgtggacctgcgctccggagagctcaagctcatcgacttcggttcgggtgcgctgctcaaggacacggtctacaccgacttcgacggcacccgagtgtacagccccccggagtggatccgctaccaccgctaccacgggcgctcggccaccgtgtggtcgctgggcgtgcttctctacgatatggtgtgtggggacatccccttcgagcaggacgaggagatcctccgaggccgcctgctcttccggaggagggtctctccagagtgccagcagctgatccggtggtgcctgtccctgcggccctcagagcggccgtcgctggatcagattgcggcccatccctggatgctgggggctgacgggggcgccccggagagctgtgacctgcggctgtgcaccctcgaccctgatgacgtggccagcaccacgtccagcagcgagagcttgtgaggagctgcacctgactgggagctaggggaccacctgccttggccagacctgggacgcccccagaccctgactttttcctgcgtgggccgtctcctcctgcggaagcagtgacctctgacccctggtgaccttcgctttgagtgccttttgaacgctggtcccgcgggacttggttttctcaagctctgtctgtccaaagacgctccggtcgaggtcccgcctgccctgggtggatacttgaaccccagacgcccctctgtgctgctgtgtccggaggcggccttcccatctgcctgcccacccggagctctttccgccggcgcagggtcccaagcccacctcccgccctcagtcctgcggtgtgcgtctgggcacgtcctgcacacacaatgcaagtcctggcctccgcgcccgcccgcccacgcgagccgtacccgccgccaactctgttatttatggtgtgaccccctggaggtgccctcggcccaccggggctatttattgtttaatttatttgttgaggttatttcctctgagcagtctgcctctcccaagccccaggggacagtggggaggcaggggagggggtggctgtggtccagggaccccaggccctgattcctgtgcctggcgtctgtcctggccccgcctgtcagaagatgaacatgtatagtggctaacttaaggggagtgggtgaccctgacacttccaggcactgtgcccagggtttgggttttaaattattgactttgtacagtctgcttgtgggctctgaaagctggggtggggccagagcctgagcgtttaatttattcagtacctgtgtttgtgtgaatgcggtgtgtgcaggcatcgcagatgggggttctttcagttcaaaagtgagatgtctggagatcatatttttttatacaggtatttcaattaaaatgtttttgtacata

SEQ ID NO: 668153 - DNA, 2741 bp, Homo sapiens
  misc_feature (9)..(10): n is a, c, g, or t
gagcgtgannggggagagcggaccgacgcgacacgccgtgcgcctccgcggctgcgctacgaaaacgagtcccggagcggccccgcgcccgccgcacccggccctcgcccgcccgaagacaggcgccaagctgccccgccgtctccccagctagcgcccggccgccgccgcctcgcgggccccgggcggaagggggcggggtcccgattcgccccgcccccgcggagggatacgcggcgccgcggcccaaaacccccgggcgaggcggccggggcgggtgaggcgctccgcctgctgcgcgtctacgcggtccccgcgggccttccgggcccactgcgccgcgcggaccgcctcgggctcggacggccggtgtccccggcgcgccgctcgcccggatcggccgcggcttcggcgcctggggctcggggctccggggaggccgtcgcccgcgatgctgctctccaagttcggctccctggcgcacctctgcgggcccggcggcgtggaccacctcccggtgaagatcctgcagccagccaaggcggacaaggagagcttcgagaaggcgtaccaggtgggcgccgtgctgggtagcggcggcttcggcacggtctacgcgggtagccgcatcgccgacgggctcccggtggctgtgaagcacgtggtgaaggagcgggtgaccgagtggggcagcctgggcggcgcgaccgtgcccctggaggtggtgctgctgcgcaaggtgggcgcggcgggcggcgcgcgcggcgtcatccgcctgctggactggttcgagcggcccgacggcttcctgctggtgctggagcggcccgagccggcgcaggacctcttcgactttatcacggagcgcggcgccctggacgagccgctggcgcgccgcttcttcgcgcaggtgctggccgccgtgcgccactgccacagctgcggggtcgtgcaccgcgacattaaggacgaaaatctgcttgtggacctgcgctccggagagctcaagctcatcgacttcggttcgggtgcgctgctcaaggacacggtctacaccgacttcgacggcacccgagtgtacagccccccggagtggatccgctaccaccgctaccacgggcgctcggccaccgtgtggtcgctgggcgtgcttctctacgatatggtgtgtggggacatccccttcgagcaggacgaggagatcctccgaggccgcctgctcttccggaggagggtctctccagagtgccagcagctgatccggtggtgcctgtccctgcggccctcagagcggccgtcgctggatcagattgcggcccatccctggatgctgggggctgacgggggcgccccggagagctgtgacctgcggctgtgcaccctcgaccctgatgacgtggccagcaccacgtccagcagcgagagcttgtgaggagctgcacctgactgggagctaggggaccacctgccttggccagacctgggacgcccccagaccctgactttttcctgcgtgggccgtctcctcctgcggaagcagtgacctctgacccctggtgaccttcgctttgagtgccttttgaacgctggtcccgcgggacttggttttctcaagctctgtctgtccaaagacgctccggtcgaggtcccgcctgccctgggtggatacttgaaccccagacgcccctctgtgctgctgtgtccggaggcggccttcccatctgcctgcccacccggagctctttccgccggcgcagggtcccaagcccacctcccgccctcagtcctgcggtgtgcgtctgggcacgtcctgcacacacaatgcaagtcctggcctccgcgcccgcccgcccacgcgagccgtacccgccgccaactctgttatttatggtgtgaccccctggaggtgccctcggcccaccggggctatttattgtttaatttatttgttgaggttatttcctctgagcagtctgcctctcccaagccccaggggacagtggggaggcaggggagggggtggctgtggtccagggaccccaggccctgattcctgtgcctggcgtctgtcctggccccgcctgtcagaagatgaacatgtatagtggctaacttaaggggagtgggtgaccctgacacttccaggcactgtgcccagggtttgggttttaaattattgactttgtacagtctgcttgtgggctctgaaagctggggtggggccagagcctgagcgtttaatttattcagtacctgtgtttgtgtgaatgcggtgtgtgcaggcatcgcagatgggggttctttcagttcaaaagtgagatgtctggagatcatatttttttatacaggtatttcaattaaaatgtttttgtacatagtggaaaaaatatcattatctttctctatttatctccttcaatccgcatcttttattaactctctctattcttatatctttctatctttttctcccctctcttctctgtatctcacaacaaaatttttgtgccccttctcgcccctactccttattattcttgtctatcttttttctcgcgccgcacatctcggtccctttgggtcaatcttccctcatagggggtgtgataaaatacgggcctcgctattaacaactttctccctcgggcccctctgtctttcctctacattacactcctctgcataatctcctttctttcctcctctgcgtaccatctaacacgccccctctccctcttttc

SEQ ID NO: 668154 - DNA, 883 bp, Homo sapiens
atggccgtcatggcgccccgaaccctcgtctgctactctcgtggggctctggccctgacccagacctgggcgggctctcactccatgaggtatttcttcacatccgtgtccggcccggccgcggggagccccgcttcatcgcagtgggctacgtggacgacacgcagttcgtgcggttcgacagcggacgccgcgagccatgaggatggagccgctgtggcgccgtgtggatatagcaggagggtccgggattattggcgacggtggagacacgtcaaagtgaaggcccactcacagattcaccgagtggacctggggaccctgcgcggttacgtactaaccatgagtccgagtgccgggttctcacaccgtccagaggatgtattggcttgcgaacgttgcggagtcggggacctggcgctttccttccggcgggggttaccaaaacatagtacggccctaacggaccgggcaaagggaatttacaattcggacccttgaaaagaagggaaccttgcggcttcttttggaacccggggaggtggaacaaatagggaggtccagaaccgaaccgaaaagcatcgacgtttgggcaagcgcagggccccaatgtgttgcccggagagacccaaatttgggaaagaaagcctatagccctgtgggaaagggggcacacgtgtttgcggtttgcaatgtgtggctactccctggaaatgaattaccctggtgagctaaacacggggaaaaacgttcgaagcaccgctgtgcaaatgggcgcaaccggggaaaggcgcccccctaaaaaataggcgcaattagtagatcttcaagccaaaggccgttggttcctcggttgacccaagttgaaagcccgaccccttga

SEQ ID NO: 668155 - DNA, 2095 bp, Homo sapiens
gtacaggcgctgcggcgtttgtcccgcgacgggaccgttccggcgtctttaaggtcgcccgggtccctccgcctgcaccatgcctcggggaagccgtagcgctggctccgcggccagccagcctgccgggccgtgcggttctggggctccggggaggccgtcgcccgcgatgctgctctccaagttcggctccctggcgcacctctgcgggcccggcggcgtggaccacctcccggtgaagatcctgcagccagccaaggcggacaaggagagcttcgagaaggcgtaccaggtgggcgccgtgctgggtagcggcggcttcggcacggtctacgcgggtagccgcatcgccgacgggctcccggtggctgtgaagcacgtggtgaaggagcgggtgaccgagtggggcagcctgggcggcgcgaccgtgcccctggaggtggtgctgctgcgcaaggtgggcgcggcgggcggcgcgcgcggcgtcatccgcctgctggactggttcgagcggcccgacggcttcctgctggtgctggagcggcccgagccggcgcaggacctcttcgactttatcacggagcgcggcgccctggacgagccgctggcgcgccgcttcttcgcgcaggtgctggccgccgtgcgccactgccacagctgcggggtcgtgcaccgcgacattaaggacgaaaatctgcttgtggacctgcgctccggagagctcaagctcatcgacttcggttcgggtgcgctgctcaaggacacggtctacaccgacttcgacggcacccgagtgtacagccccccggagtggatccgctaccaccgctaccacgggcgctcggccaccgtgtggtcgctgggcgtgcttctctacgatatggtgtgtggggacatccccttcgagcaggacgaggagatcctccgaggccgcctgctcttccggaggagggtctctccagagtgccagcagctgatccggtggtgcctgtccctgcggccctcagagcggccgtcgctggatcagattgcggcccatccctggatgctgggggctgacgggggcgccccggagagctgtgacctgcggctgtgcaccctcgaccctgatgacgtggccagcaccacgtccagcagcgagagcttgtgaggagctgcacctgactgggagctaggggaccacctgccttggccagacctgggacgcccccagaccctgactttttcctgcgtgggccgtctcctcctgcggaagcagtgacctctgacccctggtgaccttcgctttgagtgccttttgaacgctggtcccgcgggacttggttttctcaagctctgtctgtccaaagacgctccggtcgaggtcccgcctgccctgggtggatacttgaaccccagacgcccctctgtgctgctgtgtccggaggcggccttcccatctgcctgcccacccggagctctttccgccggcgcagggtcccaagcccacctcccgccctcagtcctgcggtgtgcgtctgggcacgtcctgcacacacaatgcaagtcctggcctccgcgcccgcccgcccacgcgagccgtacccgccgccaactctgttatttatggtgtgaccccctggaggtgccctcggcccaccggggctatttattgtttaatttatttgttgaggttatttcctctgagcagtctgcctctcccaagccccaggggacagtggggaggcaggggagggggtggctgtggtccagggaccccaggccctgattcctgtgcctggcgtctgtcctggccccgcctgtcagaagatgaacatgtatagtggctaacttaaggggagtgggtgaccctgacacttccaggcactgtgcccagggtttgggttttaaattattgactttgtacagtctgcttgtgggctctgaaagctggggtggggccagagcctgagcgtttaatttattcagtacctgtgtttgtgtgaatgcggtgtgtgcaggcatcgcagatgggggttctttcagttcaaaagtgagatgtctggagatcatatttttttatacaggtatttcaattaaaatgtttttgtacata

SEQ ID NO: 668156 - DNA, 2469 bp, Homo sapiens
  misc_feature (9)..(10): n is a, c, g, or t
gagcgtgannggggagagcggaccgacgcgacacgccgtgcgcctccgcggctgcgctacgaaaacgagtcccggagcggccccgcgcccgccgcacccggccctcgcccgcccgaagacaggcgccaagctgccccgccgtctccccagctagcgcccggccgccgccgcctcgcgggccccgggcggaagggggcggggtcccgattcgccccgcccccgcggagggatacgcggcgccgcggcccaaaacccccgggcgaggcggccggggcgggtgaggcgctccgcctgctgcgcgtctacgcggtccccgcgggccttccgggcccactgcgccgcgcggaccgcctcgggctcggacggccggtgtccccggcgcgccgctcgcccggatcggccgcggcttcggcgcctggggctcggggctccggggaggccgtcgcccgcgatgctgctctccaagttcggctccctggcgcacctctgcgggcccggcggcgtggaccacctcccggtgaagatcctgcagccaggtacgcgcggggccggcggggccggggccggggccagggcggggaccgggggcgccccgggccgcaccaaccccgcccgcgcctccctgcagccaaggcggacaaggagagcttcgagaaggcgtaccaggtgggcgccgtgctgggtagcggcggcttcggcacggtctacgcgggtagccgcatcgccgacgggctcccggtggctgtgaagcacgtggtgaaggagcgggtgaccgagtggggcagcctgggcggcgcgaccgtgcccctggaggtggtgctgctgcgcaaggtgggcgcggcgggcggcgcgcgcggcgtcatccgcctgctggactggttcgagcggcccgacggcttcctgctggtgctggagcggcccgagccggcgcaggacctcttcgactttatcacggagcgcggcgccctggacgagccgctggcgcgccgcttcttcgcgcaggtgctggccgccgtgcgccactgccacagctgcggggtcgtgcaccgcgacattaaggacgaaaatctgcttgtggacctgcgctccggagagctcaagctcatcgacttcggttcgggtgcgctgctcaaggacacggtctacaccgacttcgacggcacccgagtgtacagccccccggagtggatccgctaccaccgctaccacgggcgctcggccaccgtgtggtcgctgggcgtgcttctctacgatatggtgtgtggggacatccccttcgagcaggacgaggagatcctccgaggccgcctgctcttccggaggagggtctctccagagtgccagcagctgatccggtggtgcctgtccctgcggccctcagagcggccgtcgctggatcagattgcggcccatccctggatgctgggggctgacgggggcgccccggagagctgtgacctgcggctgtgcaccctcgaccctgatgacgtggccagcaccacgtccagcagcgagagcttgtgaggagctgcacctgactgggagctaggggaccacctgccttggccagacctgggacgcccccagaccctgactttttcctgcgtgggccgtctcctcctgcggaagcagtgacctctgacccctggtgaccttcgctttgagtgccttttgaacgctggtcccgcgggacttggttttctcaagctctgtctgtccaaagacgctccggtcgaggtcccgcctgccctgggtggatacttgaaccccagacgcccctctgtgctgctgtgtccggaggcggccttcccatctgcctgcccacccggagctctttccgccggcgcagggtcccaagcccacctcccgccctcagtcctgcggtgtgcgtctgggcacgtcctgcacacacaatgcaagtcctggcctccgcgcccgcccgcccacgcgagccgtacccgccgccaactctgttatttatggtgtgaccccctggaggtgccctcggcccaccggggctatttattgtttaatttatttgttgaggttatttcctctgagcagtctgcctctcccaagccccaggggacagtggggaggcaggggagggggtggctgtggtccagggaccccaggccctgattcctgtgcctggcgtctgtcctggccccgcctgtcagaagatgaacatgtatagtggctaacttaaggggagtgggtgaccctgacacttccaggcactgtgcccagggtttgggttttaaattattgactttgtacagtctgcttgtgggctctgaaagctggggtggggccagagcctgagcgtttaatttattcagtacctgtgtttgtgtgaatgcggtgtgtgcaggcatcgcagatgggggttctttcagttcaaaagtgagatgtctggagatcatatttttttatacaggtatttcaattaaaatgtttttgtacata

SEQ ID NO: 668157 - DNA, 521 bp, Homo sapiens
  misc_feature (23)..(23): n is a, c, g, or t
  misc_feature (34)..(34): n is a, c, g, or t
  misc_feature (48)..(48): n is a, c, g, or t
  misc_feature (82)..(82): n is a, c, g, or t
  misc_feature (86)..(86): n is a, c, g, or t
  misc_feature (139)..(139): n is a, c, g, or t
  misc_feature (183)..(183): n is a, c, g, or t
  misc_feature (201)..(201): n is a, c, g, or t
  misc_feature (214)..(214): n is a, c, g, or t
  misc_feature (234)..(234): n is a, c, g, or t
  misc_feature (269)..(269): n is a, c, g, or t
  misc_feature (301)..(301): n is a, c, g, or t
  misc_feature (355)..(355): n is a, c, g, or t
  misc_feature (434)..(434): n is a, c, g, or t
  misc_feature (492)..(492): n is a, c, g, or t
  misc_feature (514)..(514): n is a, c, g, or t
ggggggctttccctaccatcgtnaaaaaaaaccnttgggacggcaggnatggccaagcttcccggggaggatgccttgcccncggntaatgggaagcttgatgcttaggaaagatgagttgtaaaacccccaccaaggnttccagaccattttcttttcttgggagccagtggatttttccancagtgaagggacattctntacactcagatgnctctaccagtggccttttanccaagaagtagtacttgattggtcatttgaaaacnctgcaacagtgaacttttgcatctcaagaaancattgaaaaattctatgaattgttgtagccggtgaattgagtcgtattctgtcncataatattttgaagaaaacttggctgtcgaaacatttttctctctgactgctgcttgaatgttcttggaggctgtttnttatgtatgggttttttttaatgtgatcccttcatttgaatattaatggctttttccnttaaagaataaaatattttggncaatgcc

SEQ ID NO: 668158 - DNA, 2770 bp, Homo sapiens
  misc_feature (9)..(10): n is a, c, g, or t
gagcgtgannggggagagcggaccgacgcgacacgccgtgcgcctccgcggctgcgctacgaaaacgagtcccggagcggccccgcgcccgccgcacccggccctcgcccgcccgaagacaggcgccaagctgccccgccgtctccccagctagcgcccggccgccgccgcctcgcgggccccgggcggaagggggcggggtcccgattcgccccgcccccgcggagggatacgcggcgccgcggcccaaaacccccgggcgaggcggccggggcgggtgaggcgctccgcctgctgcgcgtctacgcggtccccgcgggccttccgggcccactgcgccgcgcggaccgcctcgggctcggacggccggtgtccccggcgcgccgctcgcccggatcggccgcggcttcggcgcctggggctcggggctccggggaggccgtcgcccgcgatgctgctctccaagttcggctccctggcgcacctctgcgggcccggcggcgtggaccacctcccggtgaagatcctgcagccagccaaggcggacaaggagagcttcgagaaggcgtaccaggtgggcgccgtgctgggtagcggcggcttcggcacggtctacgcgggtagccgcatcgccgacgggctcccggtggctgtgaagcacgtggtgaaggagcgggtgaccgagtggggcagcctgggcggcgcgaccgtgcccctggaggtggtgctgctgcgcaaggtgggcgcggcgggcggcgcgcgcggcgtcatccgcctgctggactggttcgagcggcccgacggcttcctgctggtgctggagcggcccgagccggcgcaggacctcttcgactttatcacggagcgcggcgccctggacgagccgctggcgcgccgcttcttcgcgcaggtgctggccgccgtgcgccactgccacagctgcggggtcgtgcaccgcgacattaaggacgaaaatctgcttgtggacctgcgctccggagagctcaagctcatcgacttcggttcgggtgcgctgctcaaggacacggtctacaccgacttcgacggcacccgagtgtacagccccccggagtggatccgctaccaccgctaccacgggcgctcggccaccgtgtggtcgctgggcgtgcttctctacgatatggtgtgtggggacatccccttcgagcaggacgaggagatcctccgaggccgcctgctcttccggaggagggtctctccagagtgccagcagctgatccggtggtgcctgtccctgcggccctcagagcggccgtcgctggatcagattgcggcccatccctggatgctgggggctgacgggggcgccccggagagctgtgacctgcggctgtgcaccctcgaccctgatgacgtggccagcaccacgtccagcagcgagagcttgtgaggagctgcacctgactgggagctaggggaccacctgccttggccagacctgggacgcccccagaccctgactttttcctgcgtgggccgtctcctcctgcggaagcagtgacctctgacccctggtgaccttcgctttgagtgccttttgaacgctggtcccgcgggacttggttttctcaagctctgtctgtccaaagacgctccggtcgaggtcccgcctgccctgggtggatacttgaaccccagacgcccctctgtgctgctgtgtccggaggcggccttcccatctgcctgcccacccggagctctttccgccggcgcagggtcccaagcccacctcccgccctcagtcctgcggtgtgcgtctgggcacgtcctgcacacacaatgcaagtcctggcctccgcgcccgcccgcccacgcgagccgtacccgccgccaactctgttatttatggtgtgaccccctggaggtgccctcggcccaccggggctatttattgtttaatttatttgttgaggttatttcctctgagcagtctgcctctcccaagccccaggggacagtggggaggcaggggagggggtggctgtggtccagggaccccaggccctgattcctgtgcctggcgtctgtcctggccccgcctgtcagaagatgaacatgtatagtggctaacttaaggggagtgggtgaccctgacacttccaggcactgtgcccagggtttgggttttaaattattgactttgtacagtctgcttgtgggctctgaaagctggggtggggccagagcctgagcgtttaatttattcagtacctgtgtttgtgtgaatgcggtgtgtgcaggcatcgcagatgggggttctttcagttcaaaagtgagatgtctggagatcatatttttttatacaggtatttcaattaaaatgtttttgtacataaaaaaaaaagaaaacaacaccaagaacaacaaacacgcgacaacgacgaagccaccaaaagcagggaaccgaaccgcgcaacacacgcgccaagacagccacgccgggacagcgacgacagcagacaaaaggggggcggggcagcacagagaagacgcaggaggggagacgaaagtaagggcgaggcgacgcggcgcacagcagaagggagggcaacagagagaggcggacaaccaggaaagaagagcagggcgcggagggagaaaggccagagacggggagacaacatgcgggagagagaaacgagagaaagagccccgcacgggggggggacataaggggcaaacacacacgaggagaaagcgcgagcagagagaagaccgagcaggatag

SEQ ID NO: 668159 - DNA, 183 bp, Homo sapiens
ctctctctccatggcttcacacctccaaccctgacctgtcacttcttctatttcagcctggtcttggagtccagaaatgagggcgtgagtgctggacagagattcaagttgcagctgcctcattttacaatgagaaatgaggaccaatgagggaatgactcactagtcacataggtggctgag

SEQ ID NO: 668160 - DNA, 137 bp, Homo sapiens
cctgaggatcccgaacgagacacaggtgaggagatgaaaactggagaccccaagagacctgcgctgagccagcatgcagccaatccagatagccgaggcactggcatcaccacccggcagcagcgcacacgggtctc

SEQ ID NO: 668161 - DNA, 2550 bp, Homo sapiens
  misc_feature (9)..(10): n is a, c, g, or t
gagcgtgannggggagagcggaccgacgcgacacgccgtgcgcctccgcggctgcgctacgaaaacgagtcccggagcggccccgcgcccgccgcacccggccctcgcccgcccgaagacaggcgccaagctgccccgccgtctccccagctagcgcccggccgccgccgcctcgcgggccccgggcggaagggggcggggtcccgattcgccccgcccccgcggagggatacgcggcgccgcggcccaaaacccccgggcgaggcggccggggcgggtgaggcgctccgcctgctgcgcgtctacgcggtccccgcgggccttccgggcccactgcgccgcgcggaccgcctcgggctcggacggccggtgtccccggcgcgccgctcgcccggatcggccgcggcttcggcgcctggggctcggggctccggggaggccgtcgcccgcgatgctgctctccaagttcggctccctggcgcacctctgcgggcccggcggcgtggaccacctcccggtgaagatcctgcagccaggtacgcgcggggccggcggggccggggccggggccagggcggggaccgggggcgccccgggccgcaccaaccccgcccgcgcctccctgcagccaaggcggacaaggagagcttcgagaaggcgtaccaggtgggcgccgtgctgggtagcggcggcttcggcacggtctacgcgggtagccgcatcgccgacgggctcccggtgagtcggaccgccgggcgggccgggtttctcgcgcgccttgcgcctcgcttggccggcctgacccccgcgtctccgcaggtggctgtgaagcacgtggtgaaggagcgggtgaccgagtggggcagcctgggcggcgcgaccgtgcccctggaggtggtgctgctgcgcaaggtgggcgcggcgggcggcgcgcgcggcgtcatccgcctgctggactggttcgagcggcccgacggcttcctgctggtgctggagcggcccgagccggcgcaggacctcttcgactttatcacggagcgcggcgccctggacgagccgctggcgcgccgcttcttcgcgcaggtgctggccgccgtgcgccactgccacagctgcggggtcgtgcaccgcgacattaaggacgaaaatctgcttgtggacctgcgctccggagagctcaagctcatcgacttcggttcgggtgcgctgctcaaggacacggtctacaccgacttcgacggcacccgagtgtacagccccccggagtggatccgctaccaccgctaccacgggcgctcggccaccgtgtggtcgctgggcgtgcttctctacgatatggtgtgtggggacatccccttcgagcaggacgaggagatcctccgaggccgcctgctcttccggaggagggtctctccagagtgccagcagctgatccggtggtgcctgtccctgcggccctcagagcggccgtcgctggatcagattgcggcccatccctggatgctgggggctgacgggggcgccccggagagctgtgacctgcggctgtgcaccctcgaccctgatgacgtggccagcaccacgtccagcagcgagagcttgtgaggagctgcacctgactgggagctaggggaccacctgccttggccagacctgggacgcccccagaccctgactttttcctgcgtgggccgtctcctcctgcggaagcagtgacctctgacccctggtgaccttcgctttgagtgccttttgaacgctggtcccgcgggacttggttttctcaagctctgtctgtccaaagacgctccggtcgaggtcccgcctgccctgggtggatacttgaaccccagacgcccctctgtgctgctgtgtccggaggcggccttcccatctgcctgcccacccggagctctttccgccggcgcagggtcccaagcccacctcccgccctcagtcctgcggtgtgcgtctgggcacgtcctgcacacacaatgcaagtcctggcctccgcgcccgcccgcccacgcgagccgtacccgccgccaactctgttatttatggtgtgaccccctggaggtgccctcggcccaccggggctatttattgtttaatttatttgttgaggttatttcctctgagcagtctgcctctcccaagccccaggggacagtggggaggcaggggagggggtggctgtggtccagggaccccaggccctgattcctgtgcctggcgtctgtcctggccccgcctgtcagaagatgaacatgtatagtggctaacttaaggggagtgggtgaccctgacacttccaggcactgtgcccagggtttgggttttaaattattgactttgtacagtctgcttgtgggctctgaaagctggggtggggccagagcctgagcgtttaatttattcagtacctgtgtttgtgtgaatgcggtgtgtgcaggcatcgcagatgggggttctttcagttcaaaagtgagatgtctggagatcatatttttttatacaggtatttcaattaaaatgtttttgtacata

SEQ ID NO: 668162 - DNA, 2790 bp, Homo sapiens
  misc_feature (9)..(10): n is a, c, g, or t
gagcgtgannggggagagcggaccgacgcgacacgccgtgcgcctccgcggctgcgctacgaaaacgagtcccggagcggccccgcgcccgccgcacccggccctcgcccgcccgaagacaggcgccaagctgccccgccgtctccccagctagcgcccggccgccgccgcctcgcgggccccgggcggaagggggcggggtcccgattcgccccgcccccgcggagggatacgcggcgccgcggcccaaaacccccgggcgaggcggccggggcgggtgaggcgctccgcctgctgcgcgtctacgcggtccccgcgggccttccgggcccactgcgccgcgcggaccgcctcgggctcggacggccggtgtccccggcgcgccgctcgcccggatcggccgcggcttcggcgcctggggctcggggctccggggaggccgtcgcccgcgatgctgctctccaagttcggctccctggcgcacctctgcgggcccggcggcgtggaccacctcccggtgaagatcctgcagccagccaaggcggacaaggagagcttcgagaaggcgtaccaggtgggcgccgtgctgggtagcggcggcttcggcacggtctacgcgggtagccgcatcgccgacgggctcccggtggctgtgaagcacgtggtgaaggagcgggtgaccgagtggggcagcctgggcggcgcgaccgtgcccctggaggtggtgctgctgcgcaaggtgggcgcggcgggcggcgcgcgcggcgtcatccgcctgctggactggttcgagcggcccgacggcttcctgctggtgctggagcggcccgagccggcgcaggacctcttcgactttatcacggagcgcggcgccctggacgagccgctggcgcgccgcttcttcgcgcaggtgctggccgccgtgcgccactgccacagctgcggggtcgtgcaccgcgacattaaggacgaaaatctgcttgtggacctgcgctccggagagctcaagctcatcgacttcggttcgggtgcgctgctcaaggacacggtctacaccgacttcgacggcacccgagtgtacagccccccggagtggatccgctaccaccgctaccacgggcgctcggccaccgtgtggtcgctgggcgtgcttctctacgatatggtgtgtggggacatccccttcgagcaggacgaggagatcctccgaggccgcctgctcttccggaggagggtctctccagagtgccagcagctgatccggtggtgcctgtccctgcggccctcagagcggccgtcgctggatcagattgcggcccatccctggatgctgggggctgacgggggcgccccggagagctgtgacctgcggctgtgcaccctcgaccctgatgacgtggccagcaccacgtccagcagcgagagcttgtgaggagctgcacctgactgggagctaggggaccacctgccttggccagacctgggacgcccccagaccctgactttttcctgcgtgggccgtctcctcctgcggaagcagtgacctctgacccctggtgaccttcgctttgagtgccttttgaacgctggtcccgcgggacttggttttctcaagctctgtctgtccaaagacgctccggtcgaggtcccgcctgccctgggtggatacttgaaccccagacgcccctctgtgctgctgtgtccggaggcggccttcccatctgcctgcccacccggagctctttccgccggcgcagggtcccaagcccacctcccgccctcagtcctgcggtgtgcgtctgggcacgtcctgcacacacaatgcaagtcctggcctccgcgcccgcccgcccacgcgagccgtacccgccgccaactctgttatttatggtgtgaccccctggaggtgccctcggcccaccggggctatttattgtttaatttatttgttgaggttatttcctctgagcagtctgcctctcccaagccccaggggacagtggggaggcaggggagggggtggctgtggtccagggaccccaggccctgattcctgtgcctggcgtctgtcctggccccgcctgtcagaagatgaacatgtatagtggctaacttaaggggagtgggtgaccctgacacttccaggcactgtgcccagggtttgggttttaaattattgactttgtacagtctgcttgtgggctctgaaagctggggtggggccagagcctgagcgtttaatttattcagtacctgtgtttgtgtgaatgcggtgtgtgcaggcatcgcagatgggggttctttcagttcaaaagtgagatgtctggagatcatatttttttatacaggtatttcaattaaaatgtttttgtacataaaaaaaaaaaaaaaaaaaaaaaaaaaaaaaaaaaaggggagagaaagcgagaaaaaaaaaaaaaaaagaaagaggacaaaaaagaaaaaaaaaaaacgcaaaaaaaaaagagaaaaaaaaggggaggacgggggggggtattccggggggcctgataccacagcgcccgtgtctccgtgggagaaaagacggggcaccaccctttggagcgacctccgagtgtgcgtaatagagagaacaccacggaagaccggggggcgcggtgagcaaaaaaaaatgtggcgaaccaagctgagctcgccaacagaaagcaagttcagtgcaggcctctacagggggtaagaagacacaacactcttccgcagggggggagaaacgcgagactcaatagacgcagccacgaaaatacggcg

SEQ ID NO: 668163 - DNA, 420 bp, Homo sapiens
aaactgccgggaggaaggcttaggttgcttccgcttttggatactgtgaatagtgctgctatgaatgtggctgtacaaatatctccttgaggggctcctttcttttggatatacagcccgaattgaaactgctggatcatgtggtaattccatgtttacttttttgaagaatcattatattgctttccacagcagctgccccattccacattcctatcatcattgcacaagggttccaatttctccacatacctgttagcacttattgtcttgtgtagctcactgcggcctcaaagtcctgggctccagtgattctcttccttagcctctcaagtagatgggactacaggcatgcgccaccacacctgtctagtttttttttttttaactttttgaagacataggggcccaccatgctgg

SEQ ID NO: 668164 - DNA, 206 bp, Homo sapiens
acctgctcccggtggccctgaggacgttttgtccatggtgtttccgaaattaggaagcggtttggagcagtctgcaggtcttcgggtctaagtgtcgctgcggcacctcgcgtcaagaatcctgaggggagacctcaaggataaggcccaggagtaattgagtccaagaggatctagctgcaaacaaactaatcggggaaaatgcc

SEQ ID NO: 668165 - DNA, 141 bp, Homo sapiens
tggccatgtcgcgactggagccatcgcagcagtcatgcgcgctcctgatcgcttcgacttcgctgtcgcgcgcaaacgcctcacgcaacaaggcgatgacgcgctcgggttcgaagctggtgaggatatccttgcgcaggt

SEQ ID NO: 668166 - DNA, 421 bp, Homo sapiens
gtaaatattgagagatgtgctttaaatccaggtgtggcacacaatcggcttggggttagaaagcacaggactgccacatgtcactccttcagagccaaaactgtatgagagtctggagcaatgactctgcagtcttctggcttctaagagaaaacttggctacgatttcccagtctgaagagaaaaaacactcaccttcataatttcttactgagtcttctgttcggacgcctgccatattatattggctgctcacagactgagaaagcatcccttctaatctctccaacgtggcttgcccttccgctgttaaatgggatagtccttcttcataggtataaaatgtagggatgtccccttgtccttgttctaaacaaacagaacacttttaaattattttattcaacaattggaaaaaaaa

SEQ ID NO: 668167 - DNA, 500 bp, Homo sapiens
  misc_feature (250)..(250): n is a, c, g, or t
  misc_feature (264)..(264): n is a, c, g, or t
  misc_feature (351)..(351): n is a, c, g, or t
  misc_feature (393)..(394): n is a, c, g, or t
cagggatgactcactcatcatactaatgtgattcaacaaagaaaggcatgttttctcttccaaatatgctgtgtgttcaagtctgagatgctccaggattcacaaagttcccacagcaggtgctcccgttcactctgggggcacctgccacagcagctcccatttagcgcacgaagggataccacgctgggtggctacccgcaaaacgggggcggaagtagtgctgcagtcgaaagcccttgcagggccngatgaccacgtaangcggccatcccttttgatgatgaccccttcccagatcatttctatgccggtactttcttcagctttccctccgggtaccttctttcntggggctgctcggctcggcgccggcttccctccagtggctcnngtagcagctcggggcaggaggggcgaaagtgcacccctccgcgcgcccggggtccccgggccccgctcgtccgccgcgctcgtacccgctctcggccgccgacatc

SEQ ID NO: 668168 - DNA, 231 bp, Homo sapiens
  misc_feature (33)..(33): n is a, c, g, or t
  misc_feature (141)..(141): n is a, c, g, or t
  misc_feature (151)..(151): n is a, c, g, or t
  misc_feature (168)..(168): n is a, c, g, or t
tagaggacccaggcaggtcagaaagttttgagngtcaaatccaataaaagccaacatgacaatgaagagaagacattcaatgagcaggctgatgcacacagaccaggataccaggatggatgttgtgatttaaggttagangaagttctancttttaaagtgttatcnattaaagtagatagagaagattttaaagttgatagtagatatgtaatacataagaatacaaat

SEQ ID NO: 668169 - DNA, 256 bp, Homo sapiens
tgctgcgggcgactccaaggatcccgctgtgttgagttcttagacttctaatattgcaaagaaaagctgcgtttaaggatttaaactggcattttagagctcggagttcacatgggccacataagcgaattcccttccggagcgcacagaggtgacgtgtatgaattacgcttatggacttattagtttctaatgaaagataagcaggtaccactcaagggccttctaatattaaccttccctgcccggcagaaag

SEQ ID NO: 668170 - DNA, 207 bp, Homo sapiens
gggaaaaggtatgatgccgccaccacctatgggcatgatgccgccgccgccgccgcctcccagtgggcagcccccagcctctgcctctggtcctcttgccgcatggccataacagcagcaggagcctccgccaccccctccgaccagcagcagtatggcttccagtacccccttggcatggcagcaaactacgacgtctagcaccag

SEQ ID NO: 668171 - DNA, 962 bp, Homo sapiens
gctgtctgggctccctggtgccagcgctatgaggccactcctcgtcctgctgctcctgtggcctggcggctggctcgcccccactggacgacaacaagatccccatgcctctgccctggggcacccctgtgccttccatgtgcaccgcctgtgggccaccatggcagccatgtggcttgcctgggccgcagatggccttgcgacgggccgcgacgtgctgctgccctggtggctcctggtggatgatgaaatggctaagggcgggagtgcctgggactgcctggggacctcgaagtgggaccccgggcctgcgatggagatgggctgggaccctgcgtgggcccacactgtggtcctgccgggggagttgctcgagtgcctccgcgatcctgccttcagcatgccaaggccgctccgaagatgccggggtgcctccgccgtctgacgcacccttgcccttccgaccgcgtgctggtgaactgagcagggacattactgacgccgtcaccgtgcaagttcacctgccagggtgccttggggtcttactacttcgccgtccatgccaccgtctaccgggccagcctgccagtttgatctggtgaacaattggcgaactccattgcctctttcttccagttaatcggggggtggcccaagccagcctacgctctcgtgtggggggccattgttgagggctgtgcgcccttgacgaaccaaagttgtgcgatggcacgtggagtgtgggtgactacatttgcgatctatgccagcatcaagacaggacaagacttctccggatatctggtgtattcgaactgacacagtacccagcttatgttaatgccactgaagttaactcatgactcactctagagggggttaggtgccaccggtgacacgaggctgcccctggcatggcatctggggtgcgaccgcctcgcttttgactaatgccggcagca

SEQ ID NO: 668172 - DNA, 235 bp, Homo sapiens
gttcttctctccacatccctctctgtacttacagccccaaatggccccaaaagcagaggcccaaggaagggtgatgccaaggagccccaaggcagctccagcttccgaacctccccctgaggcttagcgcctaaggaggtcgagtttgaatgcttcaagataagattgagttaaaacctagacgatttaggagttaaggaggccttaatctgtgacccaaaccaaggttagatag

SEQ ID NO: 668173 - DNA, 403 bp, Homo sapiens
aaaatagtaatcttaatatgagaagaaacgtcatctctccagaagcacactacataatataattcagcagcttaagaagtacatgaagtgatgtcacaaatgacaacccacttattcctccctaacctttacttttagaaactacagagagggaagggggaggggaagacagtaaaaagtagcttaaatgcaacagaaaaattcctcatagcctcactttactctttttaaacaaatgcaaaacaaagacactcattcattgctcccgtagtggggatgcttactcatgcatatctctatccacgactatgccaaagcccaatagataggaggcgccataattttccataacaaaacaaaataaagcttacctttgtatgtggttcctgtctcttaccaggca

SEQ ID NO: 668174 - DNA, 103 bp, Homo sapiens
agcccccagccctccccacccaggttttgggcccagtgaaaaggccactggccaggcctccccgggaggggttttatgttcagcaataaaggttctatccgta

SEQ ID NO: 668175 - DNA, 280 bp, Homo sapiens
gtgccgagagggagcattgaggtgacggtgctgaagaaggccctggatgaagagacgcggtcccatgaggctcaggtccaggagatgaggcagaaacactgcacatggctggtggagtgagctcacaagagcatgcttggagcatgttcaatgatgggccaatggctgaaccgtatgacaatgaactaatgcatgactgcttgtgagaaatgatgaactgcatgactctgtgcctgtgggagcttgcgtggtctctggtgccatgtgccaatgcagtgag

SEQ ID NO: 668176 - DNA, 228 bp, Homo sapiens
aacctgggccctctttccgaaaggcacatgccagtgctataccagtcaagagtagggtgcatggcattgaataagaggaaacagccgtcacccaacatttgcttttgctctgaggaggggcagatgccaacatggaagcagtcaaaggttcctgaccttgtacatgaacagcaggctgttgcattgtaacttgtggctgtgcattaagatgttgcctttcggagaaga

SEQ ID NO: 668177 - DNA, 415 bp, Homo sapiens
ttctcatgagttattttctgccctctgccctctgccttctgcccttttgctgtgggtcagctggagagctgagcaaagggcccgactggtggcatggcagtgctctgagacaaaagagcctccatctggagcaaagctaagctggtctgcacatctgctgggtccagctgcttcctgagggtgtcacagccttggggtttctcctggctcttcactccctgataccctctgagccaacctggtgcggggggaacaaaggcacaggatcccgaccatcccaagagcatttagcttggttagggcccccaggataagctgctctcaatttgattcaggaagagcatgtgtgtgtggtttggtttggtttggttttttagagacagggtccgactctgtcgcccaggctggagtgcag

SEQ ID NO: 668178 - DNA, 206 bp, Homo sapiens
tccatcatccatgataccttcacgccaatggcgcctcaatattctttatctagactctatcctacacatcgggcgaggcctatattacgagatcattatctactactcacgaaacctgaaaacatacggcaattatcactcctgacttgacaaactatagacaaacagactatcatagagctatagatcctcccgatgaggaacaa

SEQ ID NO: 668179 - DNA, 761 bp, Homo sapiens
  misc_feature (98)..(98): n is a, c, g, or t
  misc_feature (105)..(105): n is a, c, g, or t
  misc_feature (107)..(107): n is a, c, g, or t
  misc_feature (109)..(110): n is a, c, g, or t
  misc_feature (112)..(112): n is a, c, g, or t
  misc_feature (116)..(116): n is a, c, g, or t
  misc_feature (127)..(127): n is a, c, g, or t
  misc_feature (139)..(139): n is a, c, g, or t
  misc_feature (174)..(174): n is a, c, g, or t
  misc_feature (217)..(217): n is a, c, g, or t
  misc_feature (236)..(236): n is a, c, g, or t
  misc_feature (241)..(241): n is a, c, g, or t
  misc_feature (297)..(297): n is a, c, g, or t
  misc_feature (303)..(303): n is a, c, g, or t
  misc_feature (314)..(314): n is a, c, g, or t
  misc_feature (343)..(343): n is a, c, g, or t
  misc_feature (368)..(369): n is a, c, g, or t
  misc_feature (436)..(436): n is a, c, g, or t
  misc_feature (451)..(451): n is a, c, g, or t
  misc_feature (454)..(454): n is a, c, g, or t
  misc_feature (470)..(470): n is a, c, g, or t
  misc_feature (536)..(536): n is a, c, g, or t
  misc_feature (550)..(550): n is a, c, g, or t
  misc_feature (611)..(611): n is a, c, g, or t
  misc_feature (664)..(664): n is a, c, g, or t
  misc_feature (673)..(673): n is a, c, g, or t
  misc_feature (682)..(682): n is a, c, g, or t
  misc_feature (702)..(702): n is a, c, g, or t
tggcgtgttcagaggcctgcagtccatggtcggactctctgggcatttctgtggagtccccctccctgcaggtgaccccacaggcctgaggattcctntacagantntnncncagnatcatataccngatcagctcttncaagaggactccctcccatgtgctgacttgacttncctccgggcccccctggacatccccatcccgaccctccccccnaggatgatgagatggcacngatangccggagaagaaagagtccctaagtgtggatttctccctgggaatgagaaagtccngtcccngcttgcctggntaagcccgaagtctggactctccaagagnaatgcacttctggtgattacatggnngtcccacaccctgatcccccagattgaagatggaaatgattttggggtagccatcccggagaaggtnctggagagggtgatnccntcaagacccaagtggnagctttcccagacaaccctttcccagtacttctcagaacgtggggatgctgtggcccaggcctccnaggagactcatgtnatggattaccgggccttggtgcatgagcgagatgaggcagcctatggggagctcagggccntggtgctggacctgagggccttttatctgagctttatcatatcatcagcagcnacctggagnaaattgtcnaccccaagggtgaagaaaanccatctatgtactgaacccgggactagaaggaaaataaatgatctatatgttgtgtgga

SEQ ID NO: 668180 - DNA, 115 bp, Homo sapiens
ggggttcaggggcccccccttagttgtttcctttttgggggccccccccccttttggggaatttcttcccccccccccttttccaagggttcttttaatttccttccccccggga

SEQ ID NO: 668181 - DNA, 445 bp, Homo sapiens
aggagggcgaatatggacttcgatttcatatactgtagagacttagacaagatatacgccatcgccatgagaaatggtctgagagtccttatattcaggcttgcttcattctccgtaaccacccttctctcagccactcctgctctactttccaaatcctactcaccagctcaaaacctgactcatctcccgtcaccccacccacagacccagccgatgactcctcttcctttgagcccgtggattttctccctcctcgacagcatcatgatcctccaccagagcatcatgatcctccaccgtatgtccctgctccggctctacccctctcccccactctctccaaccaacccacttctgactctgagtcctctctgcctcctcccctcacccgctctcgggcccaatgtgctcagcaaccagctcccttgcttcctctccggga

SEQ ID NO: 668182 - DNA, 278 bp, Homo sapiens
aatacttccaccaaaagtgtgtagagagagttctgtgtgtaccacattctcatccacacttgatattgtctcttgttttcatgtcatccaattttaatttgcctttccctgatgactactgaggctgaacatgttttcacgtattaatcggccattgggatgtcatgttttgcaagctgctctttaagtcctctgcccatttatctgttgggtgtctgcctttttcttcttgacttttacgagatgtttatatattctgggtatgcgccctttgctgg

SEQ ID NO: 668183 - DNA, 175 bp, Homo sapiens
aacatatgaatcatctattggatcataaaatatgatgcaaataccttagctgcacaagagacagagagaacagaattatggatgccaaggaagagtgaggagatgggaggaatggagtgaaaggatggttttcacttaatgcgactgtaatatactaggatgtgtacattatacc

SEQ ID NO: 668184 - DNA, 348 bp, Homo sapiens
acatcatcagtctctgcaatttctcagatacttgtagatttatggggctagcctgggggccattttaagtcacttctgaaacaactttgttaataaaaagaagaaagcgtttgggaataaaagaaacaattgagggcatttttttttaaagatcagaggggtagaagaaggtttcttatcctacatgtttgttccataaaagggatctatatttctttagtttcatctcaagaagacaacaccttaattaaactccagtgggccagtttaattaaaaaatgtcagtcagatcctcacaggagaacaagatatccatgaaacagacggtctgcttcctttgtgattact

SEQ ID NO: 668185 - DNA, 1596 bp, Homo sapiens
  misc_feature (250)..(250): n is a, c, g, or t
ctctcgtccgtagtgcggtcactgtcgttgtgttgtcagtacgccgcctccgtaaattctgcgcgtgccgccctctaattctggctgtggtcttcgctggtgatgtgtctcctcccgcgcctctgcttttttgcagagtagcggtgtcttcggcgccggcggttgctacatttgtgctcccccccgccgctttgttgcccggatgtgagtgagtggtttgtttagtaccgccccgtgttttaaagcaggnccgctttgtggggcgcgggggaccctcagggggcttttcccccgggccgccgctgttttctctggtgtgtgttcgctgggtggtgtgtcgcccgcgcccgtgtgtcccccgcttttggacctccccctcgattataagggggacaacggggtctggttactgtgccttttttttttgtgtggcgcccccggtgtgtggcgcgtgtgtgcgcgctgtccctctcccggtctttgggaggagaagccgcgacctttgtttccgttctctctctgggggggtttctgaatgtgcgccgcctgttccgtataatcgcgtctttcctcggagagtgtttcccacgacgcgcccacactggttggaggggagaccccccttggtggcctgggggcgccccctgtttctgtttcccgcttccccccggggaaacacactctggaaaggccgcgccccaacaagatggtattactctcgccacgcccgctttgcccgtttctcgcccccatatacctcgcgttaatagcccccctgtaaaaaagggggggagaatatagataaaataagataatcgcctcgaaggggccgttttgttcttcgccacaaagggcacacctgcaataaggtgtctcccctccggaagatgttgaaatatgttaaaactttttgggggaaagcgggggaaggggtcgcgcgggaaagtttaaaacccccctctctcttctcttcgccgagaacgcgcttttctcttgtggtgttcccacggagaacaactccccgcgggaaaaccccacgaacctctctacacaactttcgcgggcacactctataaattatcacccccctgagaatttgtgttgagcacacaaaagagttggtaaggcgtagataccacacatttcacactctgtcttatgagtgtttcacatagattttgtgggccacatgattctaacaatgtggtttataatttgagaccacggggcgcttcacgaacgcccagagccacaatttcggcgcctttgcacactttttgtttgaaacccgctcttctgggctttggagatcccacccacacccgccaagagaattcctataacctaacgctttgataacccaaacgaaaggaggaaacccctgggaaccccctcacaatggtcacaatttaaaataaccacagagatggtgcacataaatccctataaaggagaagaactatagtgagccctatatataattataggcctagaaccctaatccaaccccgtattacccgatccccaatttaaacctggtagaatctaaaaccttgagcctgccattataaaagtttgccctgggaaattagtatc

SEQ ID NO: 668186 - DNA, 312 bp, Homo sapiens
  misc_feature (46)..(46): n is a, c, g, or t
  misc_feature (171)..(171): n is a, c, g, or t
  misc_feature (207)..(207): n is a, c, g, or t
atcacttgaacccgggaggcagaggttgcagtgagccaagattgtntcactgcacttcagcctgggtgacagagtgagactccatctcacacacacacacaaaaaaaatttagccaggtgtggttgtgcactcgtatagtcttagttactcaggaggctgaggcaggaggntcacttgagcccaggaggtcaaggctgcagtgagtnatgattgcaccactccactccagtctgggtgtcagagcaagaccctgtctctaaaaacaaacaatcaagtgacagtccctaggagagttatttccaggcaaaact

SEQ ID NO: 668187 - DNA, 664 bp, Homo sapiens
tcggcacgaggctgagactcgaccataactagaagcagtgctgccaacctgcaggacgccattgctgatgctgagcagcgtggggagatggccctcaaggatgccaatgaacaatctggaatgggctggaggatgccctgcatcaaggccaagcaggacctggcccggctgctgaaggagtaccaggagctgatgaatgtcaagctggccctggacgtggagatctgccacctacctgcaagctgctggatgtggtgaggagtgcatggctgaatggcgaaggcgttggacaagtcaacatctctgtgtgtgcagtccacctgtctccatgtggctatggctgtgtgccacgtggtgtcggccgctggcttaggcctggcgtgtgaggaagcagctactcctatgtgcagtggtcttggcgttggacggtgtggcttcatgttccacgcagatggcagacgccattgcgcggtggcctcagctctgttggaggcggcagttccaaccatcaagtacaccagcagctcctcctccagcaaggaagagctataagcactaaagtgcgtctgctagctctacggtccaacagtcctcaaggccctctctggctgcaagagccctactcctcaggttgactttcctctccatgagctcaagtctccca

SEQ ID NO: 668188 - DNA, 772 bp, Homo sapiens
tgcctcatcggctccttgctcgccggagccgcctccgtcgcgcgcctcctccgccgccgcggactccgggcgagctttatcgccagagtacctgaagtctcgcgttgctttttgaatacccctgcgatcggatcaccggcgtgccccaccatgtcagacgcagccgtaaacaccagctccgaaatcaccaccaaggacttaaaggagaagacggaagttgtggaagaggcttagaagaagtggtagagacgccccgtgctaacgggaatgctactgaggaaaatggggagcaggaggctgacaatgaggtagacgaagaagaggaacggaaggtgtgggaggaagaggaggaggaagaagaaggtgatggtgaggaagaggcatggggatgaagatgaggaagctgagtcagctacgggctaagcggtgcaagctgtactgatgatgaggatgacgatgtgatagccaagaagcagaagaccgacgaggatgactagacagcgagaaacagataaggtctcgaaggtgaaatgctgggggggcattagttcgcttcgagtggtccgcgccaaaaacccgcgtgtctatgctagatgggcgctgtggcgtgaaggggcgtttgtgcagtacgcatgtattctgtgagcgaaggtggcgaaatgagaggggagccccctgtgggggggagaagcatctgggggcctagcctgcggaacccgggtagaagcgcaccaagggagccaaccccggttcagggggccagggggcaaag

SEQ ID NO: 668189 - DNA, 373 bp, Homo sapiens
ctgaggcttcgttcccacggcttcactgctgctgcggaacggggaacacatctcgactgcagcccctgcctgtggccacggcaccctcggagcgccagcgccctggccccaccctgggatgcatgcgagcctaccagtgcgcgctccccattgagcccctgccatggctcctggccctggctccagcgcctccacgtctctccagcatggacgaggagcagcctggagctcggctcttgctagaacctacctgtgtcggcagcctgcaggtaaggctggagctgtgccttgtggcgtcctgggccgttggattccggtcttgagctagggcattgaaccctgctgccaagcatgacacgggtggaaccttgac

SEQ ID NO: 668190 - DNA, 250 bp, Homo sapiens
taactgtctggagaaccacgtactgaaaatggggtggtgaatccacgtgttgaacgttaccctctcagagctccaagatatggcagctaggcaacagcagtgagattgaaaatcagcagcagatgttggtagccacggaacagcgttcacattcagctaatagcaacgaggagcgccgtcagccagcagtctatttctagaacaatgaaacagctgtcagcaagtggaaacgaacgagttggaggcccag

SEQ ID NO: 668191 - DNA, 639 bp, Homo sapiens
  misc_feature (248)..(248): n is a, c, g, or t
ccagcatggcacatgtatacatatgtaagtaacctgcacaatgtgcacatgtaccctaaagcttaaagtataataaaaaataaataaataaataaataagaaaaagaaagccaggcatggtgacatgtgcctgtggtcccagctattagggaggctgaggtgggaggatcccttgaacccaggaggttgagtctgtagtgagcagtgattacgccactgcactccagcctgggcaagaccctgtctcnaaaaaaaaaaagacttagaattggtgatccaggccgcctaatggcatcaaataatttgttatatctttaatttattgaaggatcaccacatgcttttaaatagcatggagaaatggaaagaatagggactttttactcaggtaatacccagcctgctacctaacaggttgtgttgtactaaataaaatggtacataagaagaaacactgtaaattatatagtgcgaatcaaatattgttaataaaccaatatctgtatatcctatgtcccggattaatctttaatttagatactccttctagttatctaatacacagcagagtgagaagcattaaactaagtatgcccagctttggagagcctttttttgcttatcattaatataagccca

SEQ ID NO: 668192 - DNA, 503 bp, Homo sapiens
  misc_feature (230)..(230): n is a, c, g, or t
  misc_feature (238)..(238): n is a, c, g, or t
  misc_feature (241)..(241): n is a, c, g, or t
  misc_feature (264)..(265): n is a, c, g, or t
  misc_feature (268)..(268): n is a, c, g, or t
  misc_feature (372)..(372): n is a, c, g, or t
  misc_feature (376)..(376): n is a, c, g, or t
  misc_feature (387)..(387): n is a, c, g, or t
  misc_feature (389)..(389): n is a, c, g, or t
tagaggagtcccccggcgcagagtgagtcctaagcagccaggtcaagcaatccgtatacaaccgtatcggcgagtatcggggtcatcctcgccgtagcaggagttgtatcctacactccaacgtcagtgagacccacaacaaagtagcccgtgtcgtaacggcgtaatccaagcctcaccccactactaggcctcctcctagcagcagcaggcaaatcagcccaattagntctccacnccngactcccctcagcatagaaggcnnacnccagtctcagccctactccactcaagcactatagttgtagcaggaatcttcttactcatccgcttcaccccctagcagaaaatagcccactaatccaaactctncacnctactcctagncncatacctattcccccgagcagtctcagccctactccactcaagcactatagttgtagcaggaatcttcttactcatccgcttccaccacgaccaccactgaggcgctcgttacg

SEQ ID NO: 668193 - DNA, 296 bp, Homo sapiens
  misc_feature (39)..(39): n is a, c, g, or t
  misc_feature (45)..(45): n is a, c, g, or t
  misc_feature (80)..(80): n is a, c, g, or t
  misc_feature (111)..(111): n is a, c, g, or t
  misc_feature (121)..(121): n is a, c, g, or t
  misc_feature (142)..(142): n is a, c, g, or t
ccatccctaactaagtacaaagtgatatccttgtgtggntttganttgtattacctgatggctagtgaggttgagcatcntttcatgtgcctgttggccatttctaaatcntcagacaggnacctgtttaaatcctttgccnattttaagttggattattggtctattttttttttttttttttttttaaagaagccaggtcttgctatgttgcccaggctagatgctaacttctgggctcaagcagtcctcctgcctcagcctctcaagtagctaggactgcagacacatgccac

SEQ ID NO: 668194 - DNA, 177 bp, Homo sapiens
  misc_feature (141)..(141): n is a, c, g, or t
cagaagcggagagcgtgctgctggtgcatgcgaggcaagaagatgagttctgaagcagaagatcgagcaggagctccgggtcaactgctacattgccgggccaatggcgagacggtgacgctgcccacaagccccagcatncccgtaggcatctcgctggggctgctgaagcgggag

SEQ ID NO: 668195 - DNA, 1875 bp, Homo sapiens
  misc_feature (248)..(248): n is a, c, g, or t
  misc_feature (656)..(656): n is a, c, g, or t
ccagcatggcacatgtatacatatgtaagtaacctgcacaatgtgcacatgtaccctaaagcttaaagtataataaaaaataaataaataaataaataagaaaaagaaagccaggcatggtgacatgtgcctgtggtcccagctattagggaggctgaggtgggaggatcccttgaacccaggaggttgagtctgtagtgagcagtgattacgccactgcactccagcctgggcaagaccctgtctcnaaaaaaaaaaagacttagaattggtgatccaggccgcctaatggcatcaaataatttgttatatctttaatttattgaaggatcaccacatgcttttaaatagcatggagaaatggaaagaatagggactttttactcaggtaatacccagcctgctacctaacaggttgtgttgtactaaataaaatggtacataagaagaaacactgtaaattatatagtgcgaatcaaatattgttaataaaccaatatctgtatatcctatgtcccggattaatctttaatttagatactccttctagttatctaatacacagcagagtgagaaaaatcattatggattaggttctttagtaagaaacctgagatggacttctcattagcattaactagttattgcccagcttnggagagccttcttttggcttatcatttattataagcccagaaataggtgactaatcagagataaatgtatgggttgtctgtatctagttttatgccttttttttgcctaagacgtagtcaaattaatattttaactaatacatcttagcagagtttagttaagcacaaagttaacagtgggtaggattgaatcttgaaagtaatcatgtctgtaatgtttttcatgcatgcaaaaagcacagacaaaaccactcatgccctattaataaacaaaatacagatcaaagttttcaaaagtaatcactctatttattctaaatgtctgtggctttaggaaaataccaccagctagtacttacctatttaaagatgtagaatttattatcctctaatattcttatcagttgtttccacaactttagtttactattggactttcaaaaatttaaagaattacaagtaaaattcattaaacacttgtgtgtgaatagtaatacacagtaattagtacagcatgttgcttcttcaacaaattgagttttcagggaaatcagcaagtaaatgaaatataaatttttggtaaaagtatcaaacattcatcttgcccatttttcctcttaaactttattatctaatcaaacatagttttccataagatgtaataaaatatagataaggttggaatatttgaggatccatttgtggaactgaatttaatgagacttcattggtgatacactcaatttttactgggtaattagctaataatgttggtcactgtctcacagttcaagtagctttaagatgatgtggcaaggaaaacacaaagcttttgggtaaccagcgttcttaaatgtatggtttttgaccaggtgaaccctttagaagtgatttctgttttaaaagtatgtacttaaaatacctttggctgtgatgaatgtagatcccagcagaataccaaaatcctattttttttgactgagtatttgtagatgcttaatgactgaaatgaatttggaggcactgatgaaagtgatttttttaaagttctcaggtactgttcaattatttaatgttaagtttagtatcaagatacagttgtttttaaaatgccaaaatgctgtttattatacagaatattttattacatttgcaatatctttgtatatagtgatttttttcttgataataaatggaaaaattctaaaacaaaaaaaaa

SEQ ID NO: 668196 - DNA, 203 bp, Homo sapiens
cttgaggatccccttcgtacagcgctcgtaacagcgctctaacacgctcgtaacgagcctccgtaacagcgcctctaacacgccatcgtaactgtcgtaacagcgctccgtaacagccctactccactcaagcactatagttgtagcaggaatcttcttactcatccgcttccaccacgaccaccactgaggcgctcgttacg

SEQ ID NO: 668197 - DNA, 1841 bp, Homo sapiens
  misc_feature (248)..(248): n is a, c, g, or t
  misc_feature (656)..(656): n is a, c, g, or t
ccagcatggcacatgtatacatatgtaagtaacctgcacaatgtgcacatgtaccctaaagcttaaagtataataaaaaataaataaataaataaataagaaaaagaaagccaggcatggtgacatgtgcctgtggtcccagctattagggaggctgaggtgggaggatcccttgaacccaggaggttgagtctgtagtgagcagtgattacgccactgcactccagcctgggcaagaccctgtctcnaaaaaaaaaaagacttagaattggtgatccaggccgcctaatggcatcaaataatttgttatatctttaatttattgaaggatcaccacatgcttttaaatagcatggagaaatggaaagaatagggactttttactcaggtaatacccagcctgctacctaacaggttgtgttgtactaaataaaatggtacataagaagaaacactgtaaattatatagtgcgaatcaaatattgttaataaaccaatatctgtatatcctatgtcccggattaatctttaatttagatactccttctagttatctaatacacagcagagtgagaaaaatcattatggattaggttctttagtaagaaacctgagatggacttctcattagcattaactagttattgcccagcttnggagagccttcttttggcttatcatttattataagcccagaaataggtgactaatcagagataaatgtatgggttgtctgtatctagttttatgccttttttttgcctaagacgtagtcaaattaatattttaactaatacatcttagcagagtttagttaagcacaaagttaacagtgggtaggattgaatcttgaaagtaatcatgtctgtaatgtttttcatgcatgcaaaaagcacagacaaaaccactcatgccctattaataaacaaaatacagatcaaagttttcaaaagtaatcactctatttattctaaatgtctgtggctttaggaaaataccaccagctagtacttacctatttaaagatgtagaatttattatcctctaatattcttatcagttgtttccacaactttagtttactattggactttcaaaaatttaaagaattacaagtaaaattcattaaacacttgtgtgtgaatagtaatacacagtaattagtacagcatgttgcttcttcaacaaattgagttttcagggaaatcagcaagtaaatgaaatataaatttttggtaaaagtatcaaacattcatcttgcccatttttcctcttaaactttattatctaatcaaacatagttttccataagatgtaataaaatatagataaggttggaatatttgaggatccatttgtggaactgaatttaatgagacttcattggtgatacactcaatttttactgggtaattagctaataatgttggtcactgtctcacagttcaagtagctttaagatgatgtggcaaggaaaacacaaagcttttgggtaaccagcgttcttaaatgtatggtttttgaccaggtgaaccctttagaagtgatttctgttttaaaagtatgtacttaaaatacctttggctgtgatgaatgtagatcccagcagaataccaaaatcctattttttttgactgagtatttgtagatgcttaatgactgaaatgaatttggaggcactgatgaaagtgatttttttaaagttctcaggtactgttcaattatttaatgttaagtttagtatcaagatacagttgtttttacaccccgcaaggctgttcatgattcagaatatttaatatccttcgcaacataaaaagcatatactcctttttttcctc

SEQ ID NO: 668198 - DNA, 535 bp, Homo sapiens
  misc_feature (470)..(470): n is a, c, g, or t
  misc_feature (482)..(482): n is a, c, g, or t
cgtcggccagctctcccttccccggcgccccctctctctagtctctacacccgcaagcgtgctccgcctccccgctcgctgggctctctcccctccccagctcgaccgcgcctccaagccgagtgcctccagctgtagctcgtcggccacgctctccgactgttgcgccttccctcccggccagcatccgggtctccatctcaggccgtgatgcacaccgccacgcgcgagctggagtagtagggaggttgcgccgtgatatccgaatccgccgccttcctgcctcacctgccgtcgggaggacgacggagaggagcgccagttcgtccaccgcgtgggccacgcagctgcctcagcccagctcagccgcgaagccgtcgttcgccatctctctgccctgctcgagtgaaggttctgcaggtctttggtgagcgtgggccggcgaggtttttaagatccctgatttctantgtctctctttntgtttccttcgtcgcaccgccctcgcgtggcgcgcgccttgccccaagagagc

SEQ ID NO: 668199 - DNA, 840 bp, Homo sapiens
ggaggtcacctttcaaggacccagaagtacggtttgtgctaggtaacgggtgcgatcatgtggttcgatattctccccggtatgtctccgctcatgggcgtgtgcttgttgatgccaggattgggtactgtgtacagttcacagtttcactaaggggggtcaaggataaaacgggttgctcattatatgggtatcacgttgagatgtctgaggtggaaagagataggtgcaggtctctgagagtagagtcgatagtatgtgtcaaagggttgaagaaagcattgatgaagaagcatattgctgattgatgatataaataggtgagtatggggatctacccgctgagtagaaaggttcaccaggtgttatgtatgtagaccatgccaaggggtggtatatcgttagtcgcctgtcatgttgaatattaatccttggctggaaaagctcaagctggggggttcggctgcaaggcctcacgggaacaccaattttcctggtggatcaacctacagagtgttggtggcagccagagtgcctcaattaaaggttccctaatcctcgggcttaatgacgaaggcacccaaggacaccgtccgtgtaaaaagtgctgcaggtggtggcatgaacgtgtgtagaaatcaacaccctggggagtacccaggcaggcgttcacgaaaggcccgccgcaaggagggggtccctgggagcgtcacgagaggtccgcagacacaagcgtgggtccacagtgggtggcacgcaccaataaataactacccagccccgggggaattagcaagttgtggggggcatttgcctggaatcccaatatcagaaaggccg

SEQ ID NO: 668200 - DNA, 1048 bp, Homo sapiens
gggaagttgggctcgtacactctggactacccgggttgtatttggaaacgcggagtgatgtttttacgagctgtgtgggggttaggaagtggatagcgcgagagggacagtgaccattctaccgaaggatgcaaccaatgatatatatctagtggagagtgtcacagatgaacaatgaacataagaatctagggattcaatcagatgcagagaatagtgtcattacagatatataggtgtacacagcaatacaggcactgagagaagtgatctggtcgcttttagcatgcttctgcatgaatgcctgggcaattcagcaggcaatgtcgttcaacttatgactgtggattggcgtctcttccccattgtctgactcgttgtatagcatttcgtattgttgcttacagataggttccccctttatcttcgggaggatacgttcctacatggtcccccatggtgagactaccgtgcaaactcgaatacagtatacagagtacgtttaatacagcatgttgtatgcatacttatatatggcgtatgatagatgtgtagattgtatagacttaagacactaggaagagattgagtacataatgtaatagaacaagtgataacatactatttagtgcaagttatgtgactgtggatggtcacttgtagcaaagggaatgtcattctcgtccagcagtcatctatgtgagaactgtggttgacctacacggtaacgcgaagaccatcagtaacgggccaacctttggactgacgcgggggcacctactggtatcttacggaatacccatccactatatcatctggacttctcataactacagacaacgaggactaataaacgggcggcatgcaaaaacagtatacgcaggatgcaccgcgaacattctgggggacctgtaccgcggaccctccacgcaaaaagaggcaactacggtccaatcgcccgcccacagagacaggggcaaacgccagcgtccacgcgacccaccacgagacaaacgcacgaaccatctcgggcccctgtcaagcagga

SEQ ID NO: 668201 - DNA, 402 bp, Homo sapiens
cggaaagcacactgcaacatgcatgaaccttgaaaacatgatcctgagtgaaagaaaccagacacaaaaggccacatagtgtaggattccacttacatgaaatgtccagaataggcaaatccatagatagaaagcagattagtggttgccaggggctagaggaaggggagaatggggagtaactgtcaatgggtaaaggatttccatttggggtgatgaaattttggaactagatagcgggaagactccacaacagtacactgcattctgaatgtacttaatgccactgaattgtacattttaaaatggttacaggatgggcttggtagctcgcctctaaaagtcccagttcttcggaggctgaggcaggagaatgcagtgtactgttgcagtgtgcttccg

SEQ ID NO: 668202 - DNA, 681 bp, Homo sapiens
  misc_feature (224)..(224): n is a, c, g, or t
  misc_feature (316)..(317): n is a, c, g, or t
  misc_feature (333)..(333): n is a, c, g, or t
  misc_feature (335)..(335): n is a, c, g, or t
  misc_feature (353)..(354): n is a, c, g, or t
  misc_feature (380)..(380): n is a, c, g, or t
  misc_feature (401)..(401): n is a, c, g, or t
  misc_feature (413)..(413): n is a, c, g, or t
  misc_feature (431)..(431): n is a, c, g, or t
  misc_feature (449)..(449): n is a, c, g, or t
  misc_feature (451)..(451): n is a, c, g, or t
  misc_feature (459)..(459): n is a, c, g, or t
  misc_feature (463)..(463): n is a, c, g, or t
  misc_feature (625)..(625): n is a, c, g, or t
gaccgagtcgttggcgctgcatggcggggtgtgctgaagaagaccactggccttgtgggattggctgtgtgcaatactcctcacgagaggctaagaatattgtacacaaagattcttgatgttcttgaggaaatccctaaaaatgcagcatatagaaggtatacagaacagattacaaatgagaagctggctatgggtaaaagcggaaccgagatgttaaaaanttagaagaccaatttcaaggcggtcaattagaagaggtgattcttcagtgctgaacatgaactaaatctgcaagaaaattgagggaatgaannctatgggagccattantngaagagcctctgccgatnnagtggaaatggcaatataattataangtgacttggtgtgtcatgggnaaactgatgtanataaatattctgtatatnaaggagcgtgtcttatantngacatttngtantcaagaaaagtgatatagaaaatatgtaggagactgttagatagattggtgagttatggtaatatggtcatgtgaatcaagtttgatgatgttgataaagtactcacacggagttgttgcaagagattgatcattgctgtgaacagagaggccatgggaagntttggaagaggcattaacagaaaaattcctacagaattttcaaatgcagagaccat

SEQ ID NO: 668203 - DNA, 820 bp, Homo sapiens
tgacttagaattaaggtagaagaataccattggttgatatttaaataggaagcgcatttgctaggataatctaacatcgtgttgataagttaagtgttcattgagatgttcgctcatatccgtgtttaagggaaagaaatataacactttttagcaggaactgtgtaggaatcacatggggtcgtgagttttcagagtcttaaagtttactttgttccaagtagtgccagagtagtatatctgctgactttctaactttaagtacatctaataacgcacgagcgagatatcataccgtatttcttttgattgagatgaatcaagggaaagaaagaagacagaagaggaggaattaaattttaaggtgaagatattctggtgtcgcacatgggaagctagaagcatgaatgaattcggtgatattgtccttttgaatgagtttaagcgttctactgcctggcttgcatgccagtatctctcacatcttacctgggaaaaatttgattaatagaatttccccatatttagaggaaatcatgggactagagaaagcttctagtcacttgttccattgaagtgctttgcatttgccgtacttgaatttcagttgtttcccatgactgtcattgtccaagttaaacactttgagaatagtgctcgtattgtttcttcttcttcatcttgttagggctatctatggttggattactggatctgtggcaccaagatctctgactgtcactgtcctaagcttagtgcagcatcaacatcctgggttcaagtgttcctcctggcttgggctctgagtaggtgggacata

SEQ ID NO: 668204 - DNA, 438 bp, Homo sapiens
  misc_feature (416)..(416): n is a, c, g, or t
  misc_feature (421)..(421): n is a, c, g, or t
cggggccgggtgtggtggctcgcgcctgtaatcccagcactttgggaggccgaggcgggtggatcacgaggttaggagatcaagaccatcctggctaacacggtgaaaccccgtctctactaaaaatacaaaaattagccgggcgtggtggcacatgcctgtaatcccagctactcgggaggctgaggcaggagaattgcttgaaccccggagacggaggttgcagtgagccaagattgcgccactgcagtccagtttgggcaacagagcaagactcctcttgaaaaagaaagcaaagttgttcaacatgtgttttgctgagggattgccttagatattgctacagtgtgtctgtcaggggagcccttcctcctgggatgattgcagtgatttagctctcttggcttacagttganatatntggctgctgttctttcc

SEQ ID NO: 668205 - DNA, 603 bp, Homo sapiens
cgaatccaatccaaggttcccaaatcgcccgcacatccacactccccaacactcgcgcctagactcgctcacacgcacccacccaacccagaggccacaccaccacctcaaccccacaaggaccccaccacaccgtatcttcacctcccaggaaagggctgagagctgggactaagcgcccacccaccatagggactaataaggtacaggttatacgagggcgcccgcgtgcgaagagcgccgggaggagagggagcggaagtagccgaaggtaaagggaccccgatccgcctgggcccgctatattcgtctctaaaatcgtcacccaaaatagcgggagtttccccccaacaactacacgaataactcgccgaggaccacgtacctccgtaagcggacgtccttccccggaggcccgacgcgtccgacgaccgcacggatagacctaagatccgccgacctaccccgtaaccccaactctactacgcttaatgtttccctagcgagagaggccgacgatttcacccgggtcctgctctactaaagggtctggaacggggccggatactctatcctttaccttgcgtttccgtgtttggggct

SEQ ID NO: 668206 - DNA, 865 bp, Homo sapiens
  misc_feature (43)..(43): n is a, c, g, or t
  misc_feature (88)..(88): n is a, c, g, or t
  misc_feature (196)..(196): n is a, c, g, or t
  misc_feature (311)..(311): n is a, c, g, or t
  misc_feature (382)..(382): n is a, c, g, or t
  misc_feature (397)..(397): n is a, c, g, or t
  misc_feature (406)..(406): n is a, c, g, or t
  misc_feature (414)..(414): n is a, c, g, or t
  misc_feature (434)..(434): n is a, c, g, or t
  misc_feature (451)..(451): n is a, c, g, or t
  misc_feature (460)..(462): n is a, c, g, or t
  misc_feature (677)..(677): n is a, c, g, or t
tttctcttttttggggagcttaactgcttgttgctccctgtcntctgcaccatagtaaatgccacaagggtagtcgaacacctctctngcccctagacctatctggggacaggctggctcagcctgtctccagggctgctgcggcccagccccgagcctgcctccctcttggcctctcatccattggctctgcagngcaggggtgaggcaggtttctgctcataagtgcttttggaagtcacctacctttttaacacagccgaactagtcccaacgcgtttgcaaatattcccctggtagcctacttcctnacccccgaatattggtaagatcgatcaatggcttcaggacatgggttctcttctcctgtgatcattcaagngctcactgcatgaanactggcttntctcagtntttcaacctcaccagggctntctcttggtccaccccncgccccctnnnagtgccgtatgacagcccccatcaaatgaccttggccaagtcacggtttctctgtggtcaaggttggttggctgattggtggaaaagtagggtggacccaaaggaggcccacgtgagcagtcagcaccagttctgcaccagcagcgcctccgtcctagtgggtgttcctgtttctcctggccctgggtgggctagggccctgattcgggaagatncctttgcagggaggggaggataagtgggatctaccaattgattctggcaaaacaatttctaagatttttttgctttatgtgggaaacagatctaaatctcattttatgctgtattttatatcttagttgtgtttgaaaacgttttgatttttggaaacacatcaaaataaataatggcgtttgttgta

SEQ ID NO: 668207 - DNA, 151 bp, Homo sapiens
ttagagactgagtgtagctgtgtttctcaggctggttttgaactcctagtggtaatagaggcctcagcctctcaaagtactgggattataggcatgaaccaccacgcctggccagcgtaattattctgaggttcattcattttggcatgta

SEQ ID NO: 668208 - DNA, 131 bp, Homo sapiens
gagctgttctatgaggtatcccggttatacggagtatacttatctgtcgaccttgaaatgaagaaagagctcctgagtcagtctgactgatgtgcctagacaggtgtgacccacctcatgtgccatgcgtc

SEQ ID NO: 668209 - DNA, 264 bp, Homo sapiens
gtggtcgattcgttaaccactgaaccacgacgggaactccaaaacagtattctttagttgactcagtcaaacgatatttgtaatttgatatgctttaggggctaggtccacatctcctgaaaaacaaatactaagccatgttgtttttgcagatagaagaggcagatgattggctcaggcatggaaacccctgggagaaggcccgccccgagttcatgctgcctgtgcacttctatggaagagtggagaacgacgacgagacga

SEQ ID NO: 668210 - DNA, 975 bp, Homo sapiens
  misc_feature (975)..(975): n is a, c, g, or t
tgtttgctgtgctgcacgaaacgcgaggggtaccctccaggatctgggcctcggcacacgataattgcaggtatgtgtaattactgcacatgcgccacgaacagatcgagactatgggtggaaactcggccgtcttcgacttagtggccaggtcttcgagagacatacggtgcgtgaagtccgggaaatactacccctggactgtccaaaagtgttagtaccccagtttgctgcgtagcgacaaaagtggtactcggagattgtcccttccgtgaatccttggcatgagatttcactcaccactggtggttgttttacgtgaacccaccaggtctggtggacttgtagttgggcgacccgactcgcaactattgtaatagcattgtacggttcgaacgtccaataaaaaggcatggtcatacttcgtggcatccctttgacaacaattcgtcaggcggcttggaatctaaaacgcggggctgttgagggtggctcgtcattgacacggcgaggacactcgctccccactacgggagagtgttgccacaaagtttcttccggggttatgggcccccgcgcgagaaattctgatgcaggaaaatagtaattgttggcccattacacttacactggttaaattggaaggccatggacctggtgggtgtatcggcgtatcaccatacccctgtgatgaacattttttggtgtacacgacgccttcgcacacacggttaagcagaatgtggattgggaaacatactaaacgtaagcgagtgacagctccacgtcctcaaatagttaaagccttgtaaacatgtggcgtatacacgtgggtcttcacttcgacaagtcccgcgaggacccaacatgtgcgcgcgagttaccttacacacaaaaaatataccgagggctaaaacacccggaagttgctatggcaagttgcctggtgagacgggaggctatataccttagctn

SEQ ID NO: 668211 - DNA, 1231 bp, Homo sapiens
  misc_feature (1043)..(1043): n is a, c, g, or t
tcctgtatggcggccctcgcgttgcgtgtttgtgccaggttgtgtgtagtgcccatttgtctggtcggctgggggtttacgattcgttcgtgttttatccggggtgtccttgcttagcgtcgtgtcgctgttttgctcgctggtgggttgttgttgctgttgatttgggggaatgtcgtatatctctggcttggtggtgttctccggcttgtgtcgttgctgggagcgcagagcgaaaattggcacaatcatggggttacgttcgcaaggcagcatgttgcggggcaccacctatgtccttgatcctagggaggatcacggacatgggcttgcaagccctgttcgttcaatggagacgtgactcagcggacccaatgccccaagatgcgcctgccatgccacgtgccttgggccgatgctgcagtaccattcgggcttcgttgcatggagcatggtggatgaggtcaggtgttgcatggctcatgacagtgcatgttgtggatacgtctatccctgacccctgtgtgttaagcagcatgcgcggagaccgtaggtctctcggaccgtcggttttgcaagagtacttcgccctgtgtaggccgtacgtgtcctctacgctccccgaatagttgggtagatgagtcgattcaattcggcttgcaagggaactatagggttctacttgctcctagatgaatcatgttcaacgtgtctgcaactgttcatgagagtacctggcgtctgtactgcaggtgctcttctaaacctgcatccagaggctggtctgcatgtggatcacagcaacgcgtcggcatgtccctaggttaggtgaccgtatgacagcccccatcaaatgaccttggccaagtcacggtttctctgtggtcaaggttggttggctgattggtggaaaagtagggtggacccaaaggaggcccacgtgagcagtcagcaccagttctgcaccagcagcgcctccgtcctagtgggtgttcctgtttctcctggccctgggtgggctagggccctgattcgggaagatncctttgcagggaggggaggataagtgggatctaccaattgattctggcaaaacaatttctaagatttttttgctttatgtgggaaacagatctaaatctcattttatgctgtattttatatcttagttgtgtttgaaaacgttttgatttttggaaacacatcaaaataaataatggcgtttgttgta

SEQ ID NO: 668212 - DNA, 944 bp, Homo sapiens
gcagaggactatgatgcgggcgccaactgcttgggccgcagtggcgggaggcagctgcgggagtgtgggcgttgaggggccggctagcttggggctctggccttgcgtcttccgaccgaatcaccgtcctgagcccggtgcggggctgccgctatcgcctggccgtgggtgccggagcggtcgggttgcgactcagcgttcttgtggtcgggctgctgggctggctgtctccgcgtggggcatcccccgaggcctgccctcgggccatgatctgactccgtgaagctgcgccgcgacagcgcggggacttcttctcccactactgagtacctgtgcgcgctgcagaactccgtgcctgctgccctgccagtgctgcgcctgtctccgggagggcgtgctggatttcaatgccgaccgcctccgcggggtggactgtggcgcctctgctgagacaccctcaagatcaactaaagacctgacccttggtctccatcaagagcttcttccaggccctggctgggggaacacaggttctgacagtgactacattttgcagaacgtcgtgtccctgcgatacgatacaaagatgtgaccttccaggttgtgtaaacgctcttaaaggctgttccaagtatatcaagtgtgctacagaacctggagctaaagtggactaattctgagacgagagggatttaagtatatagcaaaggggattgactaaagtcggattgtttggtgaacatgtagtcttgaaagttgtcaattggagatgcgaggtaagcaaagatctagaagtctaaagagcaacgcattagcgaagaaaaacaagaagtattgaatgagggaaaaaagtggaaatccggatgagagaggggaaaattcttattaggaaagacggtaaagtagagaacatagaacaatttggtcattcagagagaagagta

SEQ ID NO: 668213 - DNA, 976 bp, Homo sapiens
agcggtgtggttgttgacggtgagtggtttcgatctcctgtttcactgggtttggagaggaaactgtgcatacggtgatgagccgcggtgcttgcaggtcgttgccatgaccatcctcactaagggctaggaggcgctccaagcagtgaagatgccattcgcagatgctgtggatcagaccctgcacagcctgtcccccgttgtgccatgctgaagaaacttcaccactatcattgagtcactgagctatagtcctttgtctgtggcctaccagattttgtgagaaggctggtagcctcacagtcatggggatggccgcggtatctcctggagaagataacgatagtgggcctccagagactgggcagtaaccttgctgggtatattagctgagccatggcagacagttggtctcatgggggtctcacggcagggaaggaatgaagggtcttaaagatggcgtgaaggatgggaagcgcgtcgaggacttggtaaggagtagaagagtcgtccgaatcgtgaagatgtgacctcttaccttagaaagaaggaagagcaaaggaggaagtgctacggaaggctgctccgccaggatccagtgcatgaagagctgtgctgggggagcaggtgacgatgaaggagattggtcctgtgaacgcgagcaagtgatatgggtgaactaaccaccatagatccccgagaagcagccggcgggattcatggcctcctaccagggcctcagaggccgctcagagaggacagggccagatggccctagtcgtggcaatgggtcggggaaaacacccagaaagaatccgggcaccgcaaagggagcagtcatagatcagtgttcacacaagacaatggccggcaatgtcattcttggtagccacgcggcctccggtgagttccccgaaagaaaggggaataacttggcccaaggtggaggaaacagatacaccaaaagtggcaccct

SEQ ID NO: 668214 - DNA, 475 bp, Homo sapiens
  misc_feature (87)..(87): n is a, c, g, or t
gcggaactgatatggagactctactactggtgggatgtgaatggtgcatgacgtgggaaatagtttggcagtctcgacatatacagntatcatatgatccagtaattctactcctaggtatataatgagagaattgaaacatatgttcacacaaaaacttgtacgcgactgttcatagcaccattgttcataatagccaagaaccagaaataatccaaatgtcccaatgatgtgtgaataaacaaaatggggtctatccatacagtgggatattattcagccagaaaaaggaacgcattgctgttatatgctgcggcatggatgaaccctgagagatccgctgattgcgactcagcagagagagctgaggatgcaagaatcagagctagcgctgtggtgttgagtgctccttctcctagttgtagtattcatagtaatagtgagcaagcattgctattgaacgcaaaggtgccgt

SEQ ID NO: 668215 - DNA, 745 bp, Homo sapiens
agcggtaaatatagccaaggcctaagggatcaaggaaaccaagagcaggatccaaatatttccaatggagaagaggaagaagaaaaagagccaggtgaagttggtacccacaatgataaccaagaaagaaagacataattgcccagggagcatgctaacagcaagccgggaggaagacgattcccaatctgatgatattttggaagagtctggatcaagcaaattccagttaggccagatggcagggaggatggaatttgatgccgggttaaccagagaaccaggaagattactccaagtgcagcaaatggaagagggaaatgccattcgaacgttccataagcacattcaagaaactgaatggcagaggtcacgaagggtatagaagctgggctagaaagctgatcaggcaaaccaccacaagacgacagaagaaaagactgtttctgaaggctctgcgtcatgggaacctactgatgatggtgataccacggcccagaaatccatggagttgatgatgcatggcgatgatgatggcgatgatggcggcactgatggtcccaggcacagtgcaagtgatgactacttcatcccaagccaggcctttctggaggccgagagagctcaatccattggctatcaccttctaaaattgaggagccaagagaaaaagtacatgactgatgaaagtataggtaccactgagcctggagagcaccaagaggccaagaaagcagagaactca

SEQ ID NO: 668216 - DNA, 1724 bp, Homo sapiens
gactttgttccagatgtcgcgttcctcgtatctcttgctgcatcaatccggatgtctgtctcttgtaaggttacatcagtcatgctcgggtgcgagagaatgctacctgcagtgtctggactctcagggactgaaaggcataggctgaacgagtaggtgcttgaagaggcaaccgtataaaggaaccggggccacagtctggaatttgcacgcgagcagtcgcctgctcacaattcctagtgagcgcaagaagcagaagaaaggccatatttgttgcaggttgtaccttatggatagcacgcagatggagccgcgtggcattgcttgcgcatctatcatctgcgcgccatgcgtgcgacaaggtagagtggactagctcgtcgtgtagaatagaaaggcatcgccataggaggtacctccccgccagaaggcatacgtagtggcccacttggagatagccttcaacattcgctccagagagtcaaaagcatggtgagcctcaccaaatagcaggggaattgatgggaagcatgaatcgttgcgtactctctcgcgtttgaccatggttggcacaacggtgcctttgtgagtggaatcacacaccataggagaaaacggtagtggccacgtacgtgtttggattctgtccctcatagtaagcccgaaatgatactagcgcttgcgcgtaccgtgggcggggccgaagaccatgtaacacagccaaaggtctccaaagggggacggacgccaaaagaccccccaaggggggcggggttttccgaccgccactggatggggcccacttggattccaacggactctccaagagcgcgttttacacccaggaaggactctaagctagaaccgtaatcggccatgtagcacaattgggggggccacgaatgcgtacggaccaccgggccagcggacagcgaggggttacattgaacgggggcacatggtccaagaaccagccctacccatcccaaaggcccaggaacaaagtgaaccccacagagatgcggctgtgaaaccgcccagaaagcaacgagggaggcgccaaaccccgaggccctggagcggggtgacccaaccgaaccctgggggcccccctttgggattcttggctgccccaaggttgaaagggagcttaattttgaagcaggcaccaccaaaggttaaagcaatccttcgtattcaactccaacctgtgggtgacggcgcaaaggaacctatgggcgtggccttgtagtacccggagacaacacaaacatccgggcgcggaccttcccctactatcaaaacatctagggtctttccatggttgggcggccgctgaacgggctcccgcagaggagaattactcactcactcggggaacacagcgccatttcctcccaaaggggattccacacaaagaagcggacaaggttcacagaagtggtaccctgtaagccgccttgtatggggtgcacccaaaatgtcccccaccgagcagcgagatgaatgataacccagcacaatgaaaccacttggtcccacaaaggccacggtggtgaacacacacagtcgtgcgggccccacagcagtgagtagtaacacaaggacaaaggcgcgagacgaaataatacacgggcaaacaggtgcgtaaagcgcacattatacaacacgcaagagaagactaacactacaacactgatggacgccggacatggaacggacat

SEQ ID NO: 668217 - DNA, 929 bp, Homo sapiens
ggacacttctgttataaataaaacacagtgttgaaaatacttgtggagaaagattcttccaaagatatacctcatattataccagatttcttatgatgttccttagacagtttgatagtaaatttgcgagaaaaaactcgaagtggtttttataatggtacacctccacagcctccgttcgaagatgtacatttgacaaattggtttaaaagttgagaaggttattataaaaagaattcacgaggtatgatgtgtaagtggtagattcctgtagggtacagtcattcttttatacttactcattccgtatttctgtgactggtaaatgtacgagagggaactaatattcatgtctccataatagtgagtgtacaataggttaagtgtttcatgggaattgagggaaacgtccgttgtatagttatcgagaggtagcaatgaaggtttccttttcacttaattttgggtcagtagagaaaggaaggagccattttcaagaatatgtgcatacattggaaatgtgtaggaaagtaattaatcactttggcaaaggattgaaaggggcccaattttaaaagactattgacgttagatacgactagattaaatatattatatagatcgctatattatcttggaaggtgtgtgatgaaaattagccaaggaagaccgttaacagtaatactttataacagtataatgccatagtattcagtctactgacgaattataaaagacgtaagaaggcgatgtacagtgctagcagcgtgtagaaagggagtttttttaggggagggttaaaagaataactgtttatggcgtgtttaattgggatatgcaaaaggttaattcaggtgttgccttgtggaagggaggaggtatccggattcgagatgtccgtgaatagcggttttggtgatatgtttcag

SEQ ID NO: 668218 - DNA, 519 bp, Homo sapiens
  misc_feature (446)..(446): n is a, c, g, or t
  misc_feature (470)..(470): n is a, c, g, or t
  misc_feature (489)..(489): n is a, c, g, or t
  misc_feature (515)..(515): n is a, c, g, or t
ttagacagagtctcgctctgttgtccaggttggagtgcagtggcaaatctcagctcactgcaacttccacctccaggattcaagtgattgttgtgcctagacctcccaagtagctgggattacaggtgtccaccaccacgcccagctgatttttgtatttttaatagagacagggtttcgccatgttggccaggctagtctcgaactcctgacctcaaacgatccacccaccttggcctcccaaatgttgggattacaggtgtgagccaccacacctgggcctgccctaagcctcttaaatagatggggattacaggtgcctgttgccattacctgttaatcccatcccaaatccattaaatttgctgttttttgaatttaaaacagcaaaataggatgtcagcttaaggtgtagtttttttaaatcagtataacttttaattggnacatgaaatatttcatttgattgnattatatttttaaaacggngttaattttttgttttaaaattaggnattg

SEQ ID NO: 668219 - DNA, 208 bp, Homo sapiens
ctgttacctgatcccccagcgcggtatgatgctggcgcggattgtcggcacattacctacctgtacgacgactccatgggcgagaaattctgtgccgtggcctcaagagcgagaagctcaactacgacttccacagcgtcgaattccagtgtggaaagctacctgctgttaccatgggcgaggagttctcggggcgtatcgacgccaa

SEQ ID NO: 668220 - DNA, 295 bp, Homo sapiens
gatccctatactgttgcggtaacattactcttttttttatatcctatgaatatcacattagagtaatgttcaccgccaacactacaggcaaatgtctttgcagcttatgaggccaaaagggaaactaactgctgtccatggtcttctacgctttaccgtctgaagatgatctagtaatttcctaatagtactagatatactcagacccatttcgaaaaaatggtgtagaacggtctctgttttctagttcagtcttacctttttccctatttcgctctggacttcctttatgcta

SEQ ID NO: 668221 - DNA, 395 bp, Homo sapiens
tgctgatgcgtgtagcataccaacactgattacttccctcgtccgctgagaattttaaaagaccacaatgatcattcagaaagaatgcatcgatgctctctctcggttacgtttggttgcttttcttaatatctcaagttgtctaagagtattatcttaatggattgctgaatccatcagccttcttccgagacgcaagcccggttctcattggccatagccttttcccttttttaaaaggcgcatgtttctggtctgtaaatctttacttcagctctccaggaaacacaagttaaggataacgcagatatgtatgtactttaggaagtaaagggaacacttaggaaagtgttatattgcagggttccaaaaaaattattacactttgtttacaa

SEQ ID NO: 668222 - DNA, 465 bp, Homo sapiens
gtaatattaatgttcataaaagatagtgatgaaaaaacggtaatgctgaaataaaggcgcttatagaaaatatttcaggacaacataaggtattaatataggaaaaaaactgtacatattttcaagcacaacactgaaatatagcagcagtgtttacctgaattgtttgacaatagtggtaattatactaccttacataccgttctaatatgtaaatctcttaattacaattggaatatacaatctgacttaccattagaactatgcacagttgccgaagcatatgtctcaggtttgtagttgcacaaaaattaacgtttcagttggtccttgatttggagtactataactacctggcagcactaagttttagacacatccattgatagccaacaaaatccttgacagagtgacaaccatcaagagtaccatgcgtgaaaaagcagctgtaccctccaagtgcat

SEQ ID NO: 668223 - DNA, 172 bp, Homo sapiens
atgatctaccgctattgtgctgctgtggagtgctctataacatagaggattggcttgagatagagggtgacaggcttttaagaaataaggaataggctggcacagtggctcacacatgtaatcccagcactttgggaggccaaggcagggggattcacttgagcccaggagt

SEQ ID NO: 668224 - DNA, 365 bp, Homo sapiens
cacgagggtatggccgagcacgctaccccacgcgcggatcagtggcgtgaagccgcgccgctcgagccctgcgagaaagagcagctcttccgatgtcgggagctccacgccgctcgcgccggagaggacgccgaggacgcccgtttcgggtgtgatgccgaggcggccgaagaggcgggcgccggccgctgcggcatcgcccgcccgccgccgcgtgctgtcggatacgacgtttgcgatgcgcgcgtagggaagcgcgccgcggcggcgcgcatggttgcttgcttcgagaaccagaaatgcgcccacgcttccgggcaccaatccaccgccttgctcgcggcgctgccagacagagcgatacg

SEQ ID NO: 668225 - DNA, 803 bp, Homo sapiens
ggatgccgacaggaaagaaggtcaaggtgaaagcaaggtggctccggtcccagctgtcgtgagagaagcaggaggctaagaatgtggtgaatcccctgttggatgaaaaggcctaagaattttggcattggacaggacatccgagcccaagagagagacgctcacccgctgttgtgaaatggtcccggtactagtcaggcttgcagcggcagagagccatcctctagtaagcggctgaaagtgcctcctgcgattaaccagttcacccaggccctggaaccgacgaacaggtactcagctgcttaagctggcccacaagttacagaccagagacaaagcaagagaagaagcagagactgtaggacccgggccgagaagaaggctgctggcaacacggggacgtcccaaacgaagagagccacctggtccattcgaggcaggaggttaacaccgtcagcacctgggaggagaacaagaaagctcagcaggtggagattgcacacgacgtggatcccatcgagctggttgtcttcttagcactgacctgtgtctgtaacaatgggggtcccttactgcattatcaagggaaaggcaagactgggacgtctagtccagaggaagaactgcaccactgtcgccttcacgagcagagtgaactcggaagacaaaggcgctccggcgtaaagctggctggcagctatcaaggaccaactttacaatgacagatacgatgagatccggcgatcactggggatggcaatgtcctgggtcctaaggtctgtggctcgaaatcgccaaagatc

SEQ ID NO: 668226 - DNA, 359 bp, Homo sapiens
aggtgtcccagatataaacagtacatttcatcggctcaccacatctgcaaagaggcacaccaatccaattttatgatcagggtgcatatgcctcctccataattttttagatcagccagattcataaccattcccgacagggcatctctccatgtactgtcaccacaactttataattgtgcccatggccatttggattgtgcatttccaacagtttcaagttttttcatcactaaaattactgacatcggtggctcgcgtgaagagatcgcggacacttgtgcctgcaggcggccaccaccttccgtgctcatttcccggccgtaaacaggtcggcggcctctccgccgccgcccccc

SEQ ID NO: 668227 - DNA, 338 bp, Homo sapiens
  misc_feature (52)..(52): n is a, c, g, or t
  misc_feature (64)..(64): n is a, c, g, or t
  misc_feature (89)..(89): n is a, c, g, or t
  misc_feature (206)..(207): n is a, c, g, or t
  misc_feature (230)..(230): n is a, c, g, or t
  misc_feature (321)..(321): n is a, c, g, or t
tagaggatcccgctccaccgagtagggtgggggtgtgtagggaggggggttnggctatgtagcnctgagctcaaagtgatccgctgccnctgctgccaaagtgctgggattacaggcctgcaccactgcacccggctgctgtaaagtcttatttcacacagctgagacatgttttaggaagtttgctaaaagacccctggagaccnnctcattgtgacctccctgttatngtgtttaatttgattgaacttttctgccctcctgcttttcagcttctctaatagtctcccattaaaccaattctaagaaccaccccgtcgngtggagcgggtaccgag

SEQ ID NO: 668228 - DNA, 171 bp, Homo sapiens
gggtggctgttctagaggatcccggaggtgggacacggggagaggtgggaggatcacttgagctcaggagtttgagaccagcctagacaacatactacgaccctgtctatacaaaaaaaaacttctctaaattagccggatgtggtggtgcatgcccgtggtcccacctct

SEQ ID NO: 668229 - DNA, 483 bp, Homo sapiens
ctggtgtcattcggatttcgcatttctctgatgagtgatgctatcaagcacctttgctgttgctgttggacatatgtgtatgttccctggagaagtgtctgtgctgagccttggcccactttttaattaggcgtttggctttttattactgagatgtaagagttctttatatattctggattctagacccttatcagatacatggtttgcaaatattttctcccattctgagggttgtgttttcactttatcgataatgtccttagacatataataaatttgtattttaaaaagtgacttgatttggctgtgcaaggtggctcacgcttgtaatcccagcactttgggagactgaggtgggtggatcatctgaggaggctaagagttcgaggtcagcctggccagcatagcgaaaacttgtctctactaaaaatacaaaaattagtcaggcatggtggtgcacgtctgtaataccagcttctc

SEQ ID NO: 668230 - DNA, 94 bp, Homo sapiens
tggcagatctagaggatcccgatcatacaaagggtaatatcacagttttggtgtgttaattatatgagtttgttttgttatgagacttttctcc

SEQ ID NO: 668231 - DNA, 235 bp, Homo sapiens
tccagtacccgagcatgcttgcctgcctgccggtcgacgtgtatacaccactgcggtgcatgcctcccttggacaagttccgtcgacacagtgagcgcgcgtgctgacctccaaatatcgttaagctggagcctggtcgacgtgtattcaccactgcggtgcaatgcctccctgtacaagttccgtcgacacgtgagcaccgtgctgacctccaaatatcgttaagctggagcct

SEQ ID NO: 668232 - DNA, 298 bp, Homo sapiens
actactaagtgactgtaggagcacgtctgacttgggacaccattgtgtctcactgcgggagattgctcaggtccctcccatcccaagaattttaatctcattgaatgctaaattattggggtccttgtaggttgattgtgaaatagtcaactccaagtggtttggagtgccagaacactcacataaaagcatatactatctaggcgcacagtatccttagtaagcccatcatccccagcaaacagtctccatttagcattcttggtacaccatctcagggcaatcaatcaagcaccaa

SEQ ID NO: 668233 - DNA, 308 bp, Homo sapiens
tttttagggtgggggcaatgaagcaccagatgttgagagacggaaccaggaacattgccccagggttaaatgaggctaaggacattgggtgtattatgacagagccaaaaagaagaggggagtgggctgaacacagcgactcgtgcctgtaatcccagggatttgggagtgcgagaaggacggattacttgagcccaggagtttgagaccacactgcttaacgtggcgaaaccccgtctccacaaaaaacacaaaaattagccggtcgtgggggcccgtgcttgaaatcccagctactcagcatgctg

SEQ ID NO: 668234 - DNA, 139 bp, Homo sapiens
cgaaagcctaattacgcatatatacatggaatactactcagacataaatggaacaagataatgccattttcagcaacatcgattcaactagagattctcatactaagtgaaataattcagaaagacaaacacaactacc

SEQ ID NO: 668235 - DNA, 536 bp, Homo sapiens
cggtgttgtgcatttcttaaaataagacaataatcagcttaccaaattgaccaactcttcatgagatatttctctgtagcatgagatgtgtttggtagcattttgcctaccatagaacttctttcaaaattcgaatcaatcttctcaaaccctgccactgctttatcaaacaagtttatgtaatattctaaattctttgttgtcatttcaacaatgttcatagtaccttcaccaggagtatattctttcttcagaaaccactgtctttgctcatccataagaagcaactcctcattcaacaaagttttatcatgagattgcagcaattcagtcacatctttaggctccacttgtaattctagttctcttgctattttcaccatatctgcagttacttccttcccgtgaagtcttcaactcctcaaagttaccaatgagagttggaatcaacttctttcaaactcctgttaatgctgatattttgacctcctcccatgaatcacaaatgttcttaatggaatccagtatggtgaatc

SEQ ID NO: 668236 - DNA, 594 bp, Homo sapiens
attctagaggccgaggcaggcagatcatgaattcaggagatcaacaccaccctggctaacacggtgaaaccccatctctactaaaaatacaaaaacttagctgggcctggtggtgggcgcctgtagtcccagctactcaggaggctgaggcaggagaatggcgtgaaccctggaggcggagcttgcagtgagctgagattgcgccactgcactccagcctgggcgacacagtgagactccgtctcaaaaaagaaaaaaaaaaaaaaaaatccagggggtactcagggggtaactttataattcactaaaatgggcccagagctcgggttagttggagtgaaccctggaccaggttatgtttggcccattgtaagtagcaccccaaaaaagtgtttggggccatttccttcagtgcagaaaggttcttttcgtgccggtactaagtataattccctcccgtggccccaatttacccgtggtaggcacgtactttctggatttttattcccacagaatatccatttaatcctatattttctaaatttatccttctaagatctcggggggaccgggatatatatttacattttcagt

SEQ ID NO: 668237 - DNA, 381 bp, Homo sapiens
  misc_feature (160)..(160): n is a, c, g, or t
  misc_feature (275)..(275): n is a, c, g, or t
tactctgagatccgattaggcgaaatatataggctagtaccagaatatataggactcagaaccaacacaaattcaatgaacaaaggactcacagacatttcttcaagaagaacgcagatggcaaagacaacaaagatgctccacatcatttagtaatcanggaaatgcaaatcaaaaccacaatgagagaacacacccatgaggatggctataatttttaaaatgggcaaataagtgttggtgagggtgtggagaaattggaaccctcatacatncaatggtggaaggtaaaacggtacagctgctgagggaaagtttgacagttcctcaaaaagttaaatgtgcgatttcaaacatgacccagcaactccactcccaggc

SEQ ID NO: 668238 - DNA, 949 bp, Homo sapiens
  misc_feature (226)..(226): n is a, c, g, or t
cgcgcaattccaatccgttccagcctgcgacctgcggagaaaaaaaccattacttattttcttgccgccgcatacataccttgaggcgagcaaaaaaattaaattttaagccatgagggaaatcgtgcactagtccatggctggatctagatgtggcacatccatggatcgtgctgtccaagcttcatggcgtagaggttggatcgacgcctgcatgaaccatggncaatctgacccctacccgtgacagtcatatccacaagtgcgcgcacacgcctgacactgtcgagcttggcaccgacattcttctggtgttatctactagactgagagccagcatgatggactaagatagtgttccatcgtgactcattccgctggtgtggattctagaaaaccatgggaacgcacatggagcctcttgtttctgactcatagtccatatttgtgcgctcagaaactcttttagacaccctagaatcaaacttttggtattttcgtggttccagttctggtgggctaagtgtaactacaacgtgggtcctaaaagcgacctatcatacctagccaagagggggacaggcctgcaggcgtggcttgcacttcttgtccttgtggatgctgtgtacgggcacacggacggcaagacgtagactgctgcacattgccctgcaagtggcctttccagtcgtgtacctcacttcagctgtgggccgcgtgagggcacagcgctcttgtgaactgggacagctctcccttaatcaagccaaagaatcccgagaaagaaataccactgattcggcatcatggaactacctttccagttgtggttgcctttcacccctccacgtgttctgaccagccggtggttcgaaaccccttaaaatgtcaacccgttcttcccccatcaattgggcaaagaataccggtggcaccctttgctttgcaa

SEQ ID NO: 668239 - DNA, 189 bp, Homo sapiens
cgctgggacgtgaatggcaaactggttgatccagagtagccgaattgatgcaatgaaccaagctgttgagcgcgcttggtcatgtttttgcgcgtttcgcgcacgcataagacactttgcagaggtgtgccttgcgggaagtgccatacctgatgcgaaatcctccggttcccagtcactgtgatcctg

SEQ ID NO: 668240 - DNA, 895 bp, Homo sapiens
  misc_feature (330)..(330): n is a, c, g, or t
  misc_feature (482)..(482): n is a, c, g, or t
agcggaagaggttgcagtgagctgagatcgtgccattacactccagcctgggcgaaagggtgagactccatctcaaaaaaaaaaaaaaaatgattggctttggacgtctaaggtggcaggctgtcccctccaggcaaattgcccttcaaaccgacgatcatggtgcccacttacccggggctgggagagtgggtgtcaggtccctacaggagatagctttctttcccttactccctatctaacactttggctctgcaggcagcctgtgcccattctctaagccgggcttagaaggcactggggaatgtccttgtagagagagacctagantggtcatgcaagtgagaaagacttctgaggaaattgggaagacctaaggcagacgggaaggaagcacaaaagacaagcttggggtcagacccataaaccacctcccaaaggcggtcatttcatggcactggaattgggctttatcagaagcnaggaagtaaggggagtcatggcctgtgggcctgggaatctaagggggagacaatattaattgggatccgattaatgggaagattactaactggtggacaaaaggtttatcttgtgcacaatcaataaaaagtggcatttttaagtaaattaagagcataaacaatatggctagaggtgccatgtttagtctaccaaaaacaatacttttcaggcactttagaaatatccttttagaagcagcgagttgcatgggctaaattatcctcgatctttatgtatttggctcacagaaacctctacgggatccttattggggacctttgggtacgacattagttggaggtactacctatgttcttgaaacattattacaggggcatttcttttggaacaaaaaaaaaatcctccgcgg

SEQ ID NO: 668241 - DNA, 281 bp, Homo sapiens
ctgctggtccccccgactagcccgacagccccatcacctctaatcagcaggcagtgcagcatgcaggtgggccttggtgcgccccccgagcatggtgcctggtgcttcgtgctcttcttgaccctcctctcaatgttcccttgcgggtcgggttagtcgggtggtgtcttctcacagtcgcatggccggtttgcgcgcttgggcctggctgtcgtttactgatgctctgtgcagtggtgggtgcgcccccagcttctctctccctgtcgggctagtcgggg

SEQ ID NO: 668242 - DNA, 443 bp, Homo sapiens
  misc_feature (30)..(30): n is a, c, g, or t
  misc_feature (38)..(38): n is a, c, g, or t
aaaaaacctacttttcccccctttcactcncccactcnaacacttctaaaaacagatgtggaggggtatttcccccatacacccaaccaagcaattctgcagaggacatcaactgggtgtcccctaattcccattcagttcaactgtgacactatctaccctggatatagtgtcaggtcccacagattaaaggctcagtcccacaagactgcacctacttcagatgccaatctcaagccctaggttatggtctgtgcttctgacaaactggctataaatcagggtccccactctaccctctcctttggtttaatttgctagagcacctcacagaagtcagagaaatactttactcacatttactgtttattataaaggatattacaaaggatatagatgaatagccaaataaaaataataaaaattttttaaaaagacaaaaa

SEQ ID NO: 668243 - DNA, 83 bp, Homo sapiens
ttgctccatatggaacctgctcgtttatggaatttgctctgccaccagtaacagtcaataaacttcaaggaaaatgaaaaaaa

SEQ ID NO: 668244 - DNA, 1115 bp, Homo sapiens
agcggatctgagtcttctgaatcccacttagaactgtgttgagctctcacccatcacgatgagcaacaacattcctgggcacctggaaacttgtctctagtgagaactttgacgcattacatgaaagctctgggtgtggggttagccaccagaaacactgggaaatttggacaaacccactgtgatcatcagccaagaaaggcgcatattaataactatcacgaactgcaaagtacctattaaaaatacagagcatctccttcaagctaggcccaggcaattagcaagaaaccacaagcatgacaatcagcacaagcacccaagcagcatcgtaacccatgcagaagcaggcatccactgacatccaagtgcagagcatgggcatggcacaagcagcacaaccaataaagagaaagcatagtgaaatgggaaaatgagtagcaggaatgtaaaatgaagggcgatggtgtgacacacagaatctatgagaaggtctgaaaaatacataatactcattgaagatggattattaatcatataatgatggaaatcaatatgatatccatagaaaacagatgaatacaatgcaaaataattgaaaaagataatagtattaatattacagatatgcaaagggcataaattgagacataatctaaaagcacagtggtaataaaaagcattttcaaatgtgacatgcatgctcaatattcacatcacagacaatatagtataggacacaacaacagaacagagagacagatcatacacatatcaatacaaaaatacaagtaaacgattagactatgcaaacagaacaacgcaccacataacacaggataaaaacccactacgatacaggtacaacagcggaacgggacacaggaatgcaacacacagaaggctaaacgcaccaaagagcacacattgacagtgcgaagctacgacctacgaactgaacgagaaaacgaggcactagaacaatcaacggacacgacgagcaacagcgacggtcccagcacccacgagacacacaatacgcacgacacaacgacagaaaaacgaacataaaaagaaaagatctaggccacacaacaccagcagcgcagatccaa

SEQ ID NO: 668245 - DNA, 315 bp, Homo sapiens
tctgcaagaatcgcaactgcagctggcctgtgacttgcataaaacttcctactccagtaaggttattaacagcagcttgctgagcacataaggcctgtgcttgactggttgaaccttgctcagaaacctagccccctggctgttcgaggactacaagttgtgggctgctgaggttggtcagtcggtgtaaacggggagagctgctgttgctgctgctgaacagtgttaaaaaataagtgaaccaccttggaaagctcggagtagatttcagggccccttgagacttgcactatttccttaaaccaaatgggaaca

SEQ ID NO: 668246 - DNA, 505 bp, Homo sapiens
tatcgggctgacgttgccagatattttcgttcaccgcgattcaggcgcctgaccgacatagtgccaccgatggacggggataattgtagctggtttcgcctgctccatcgcaattgccccttgtggtcgcagcgattggcggctttgtgcatgcccatgcagggttacgccgccgtcgtgcatggccctgcatttcccgactgggcagattctcgatcgcttggcgtgtagtgggaggttgaagtggcgacactggttatgaccgggttgggcacggcgattggcgggcccgtcggcggttgtgttggggccatgcttggccagcagctcgatcgcgctatagttggaaatggcccccgccgcgacggcccgcgcttgctggaactggaactgcaaacgtcgagttatggcactgcaattccagcgatatttggtacgatgagggttgcttgcacgattatatgggcgagcgatttgatcgaaaggcggactgtcacgggggtag

SEQ ID NO: 668247 - DNA, 901 bp, Homo sapiens
  misc_feature (275)..(275): n is a, c, g, or t
  misc_feature (490)..(490): n is a, c, g, or t
  misc_feature (529)..(529): n is a, c, g, or t
  misc_feature (553)..(553): n is a, c, g, or t
  misc_feature (612)..(612): n is a, c, g, or t
  misc_feature (643)..(643): n is a, c, g, or t
  misc_feature (646)..(646): n is a, c, g, or t
  misc_feature (669)..(669): n is a, c, g, or t
  misc_feature (691)..(692): n is a, c, g, or t
  misc_feature (694)..(695): n is a, c, g, or t
  misc_feature (700)..(700): n is a, c, g, or t
  misc_feature (709)..(709): n is a, c, g, or t
ggaacagtatctgaatagtgtgattgaaagccacagcggagttcatattttaccaccataaaggctcccttgaaaccatatgcagtttctccactcggataatcgtccttagttcatcgaaacaagacacgagtgtagaaagggatctgaactggaaaattacactcaccagaggatcttcccttacctggtcctgcttgtgccgtcactgtcaagtctctaagagcattgtgtgcaaatggcagtggaacaaggtggagatatgtgctcctggnaaaagtccatagataggtgacaataggttgggacctctttaaagctgagacgagtgttgtcactagcactctgtggtgtgcaaaaagatacaggagctggctgtcttccatgatgaagacagaaatacaaagaccaaatctgacttactgagtcttagtggagaaaacacgtttgtgtgagcctgcaggatcggctccctctctgatcaacagtnctagtactcttctttgtcagtatatcaacctacagctcntgaatgcaaagccacaagagtgtntaatggggacagtgggcactctcctgcttgaaaacccacttgggcagaatggactcacncaccaaggtcttctgtatgaagcagccaagngtnttggccttcggagcaggaagctnaagctgtttctgaatgagaccnnanncaggnaattacagnagaatcccgtgaagactttcgaatatgaagcctgtgtacatgtctgcgatggaccagcagcagcgagaacttctagcatgtactttatcaatattgttcggtcagcccttccctgatgacacctatccccgacacatacatgcacatagacacacacatgaacacacctgcgagatatttccttctgctcga

SEQ ID NO: 668248 - DNA, 886 bp, Homo sapiens
  misc_feature (37)..(37): n is a, c, g, or t
  misc_feature (69)..(69): n is a, c, g, or t
  misc_feature (136)..(136): n is a, c, g, or t
  misc_feature (147)..(148): n is a, c, g, or t
  misc_feature (155)..(155): n is a, c, g, or t
  misc_feature (159)..(159): n is a, c, g, or t
  misc_feature (161)..(162): n is a, c, g, or t
  misc_feature (165)..(168): n is a, c, g, or t
  misc_feature (175)..(175): n is a, c, g, or t
  misc_feature (204)..(204): n is a, c, g, or t
  misc_feature (223)..(223): n is a, c, g, or t
  misc_feature (238)..(238): n is a, c, g, or t
  misc_feature (280)..(280): n is a, c, g, or t
  misc_feature (308)..(308): n is a, c, g, or t
  misc_feature (476)..(476): n is a, c, g, or t
  misc_feature (499)..(499): n is a, c, g, or t
  misc_feature (525)..(525): n is a, c, g, or t
  misc_feature (630)..(630): n is a, c, g, or t
  misc_feature (658)..(658): n is a, c, g, or t
  misc_feature (660)..(660): n is a, c, g, or t
  misc_feature (696)..(696): n is a, c, g, or t
  misc_feature (706)..(706): n is a, c, g, or t
  misc_feature (768)..(770): n is a, c, g, or t
  misc_feature (797)..(797): n is a, c, g, or t
  misc_feature (804)..(804): n is a, c, g, or t
  misc_feature (868)..(868): n is a, c, g, or t
tattgaaacttatcatttttgatgtacattttctatnctaaacacaacagttaaaatgcagtgagtgtnatgaaatgtaataagctcctataaagaaacgattggggactattatttttgtgatttaacaacaganaaaatccaggnngaatganttgngnnggnnnnaggggtngtttatccctgctcatgcttaagattgangatttcgtgaaataaagancattatttgagaganaaaaactgattttttttaaagaaatcatcactctcatttganaggtttgctttcttatttcctgtaagtncatttcgtttttctaattcaactgtaacctcaggaccactgtacagcacttagtaaacctgtctttgtacatgcaatctagttcttaccaactgccttctcaaatggaatagaactataacacacaaataaaaggaagatgtacaagcacagggacaaaacaggaggnaaataaagactagaatgtgaatntcattttcaacaagtatcagcaaggnaaatgagaccctggtttcataattaattaaatctgcagaatgccaattccatttggtgttaaacagtaacccaatataaaccactgattctggaataagattaanaaaaaaatacctgagtgaatataacaananggatagaccaaaaagaaaaaaaatctcacacacttnggtcactgcnagaagatccacaggttatagaaaaataaaggaacttaatatccaaacattcagggtaaagannntggattatcaccattaagtgtaatcantcaggtncttacagtacagaaagtaaatctaattttgctattgcgagatgaaacattttaaaacttaattncttactgatataatacag

SEQ ID NO: 668249 - DNA, 740 bp, Homo sapiens
ttggcggctgcaccccggtttatatcagttataccgaatgttgactggagtccagggccacagatgagcgagaccgagagtccgatcgagagcggacgctgagtaaaatgcggtgatagctgatttctttcatggcattactgagagcaaggcagaggggaagagccccctgttaaataccagtacgatagtctcgtgagaactgtgccgctctactgtttacacagcatgggggaactgtctccatgttccaatctccttccaccaggtccctctctcaacacgtggggattatggggattacaatttgaaatgagatttgggtggggaacagagccaaatcatatcattccaccctggcccctcccaaatcacatgtcctttttacatttcaaaaccaatcatgccttcacaacagtcctccagagtcttaactcattccagcattaacccaaaagtccaagttcaaagtctcatccaagaccaaggcaagtcccttctgcctgtgagcctgtaacattcaaaagcaagttagtgacttccaagatacaatgggacgtacagacattggtaacatgttcccattccaaatgggagaaattggccaaaacacaggtgctacagtgccccatgcaccaactgcacatccactgtgcaagtctgaaacccggcagggcactcctataaattttacacttttaatatttcgctataggagtcttcgcttcttgttgcccaaa

SEQ ID NO: 668250 - DNA, 246 bp, Homo sapiens
agtaggtgggacactgggcagagaacacctatgtgcgggtgggctgtgtgggcacaccagcatgtcatggcgagtagtctgtgggagtgagacggagtgtgagggtggagtagtccctgggctgctgtggtctgagtgtgcagtgttcatgagctgggtcatgtgagtttgtagtctctgtgttgacgggtggatggattgttgcttagcaccgctggtggtgtgcactgtgtgtggctctagggt

SEQ ID NO: 668251 - DNA, 179 bp, Homo sapiens
agatttggttagttcacaaagaacagagtccagaagcgagtgcatctgtgataagtgtgaagtgtttgtacatcactttaaatatattacgttaagtatattctaaggttgctgtgttggagcagtaatactgtatgttttacaaactggcaagaattcacgacaaaccttttaactat

SEQ ID NO: 668252 - DNA, 402 bp, Homo sapiens
gtcaggctgatactcttcacaaaacatccaagaaaccacccacacaatagccatggtccaatggttggggcacaacccctttatatttctacaggtgctacattccaaaaaatgttttttcttataaagcatggcaagaattctacacttagggaagaaaagaggttaaagaagggccttatttttcccgggggagagaaaagactgaaacctctttcagagaggtttacatttttaaaatgtatttattttatcaaccacaggctggcaagtcaaacatctcctcaaagacatttggcagacagagatattctggaaacacactggaggcagcttatttatctgccgctattacaagactagcccgaagggatgagtatcagatgctatctcccactgaaa

SEQ ID NO: 668253 - DNA, 151 bp, Homo sapiens
ggagtcgagaggcgcgatgccggcttgcaccctccttgcgactggtccactgggtgatctgtcttcttctctgtccctatgcgactggagaaggacaggttctctgtcaacctggatgtgagcacttctcccgagggaactccgggttagg

SEQ ID NO: 668254 - DNA, 691 bp, Homo sapiens
atcttggcctgcaggaacatggcaagggcgagtgaagcagtgtcacgcattttagaagaatggcataaagccaaggtagaacaatgaccctggacctcgctctgctccgtagcgtgcagcattttgctgaagcattcaaggccaagaatgtgcctcttcatgtgcttgtgtgcaacgcagcaacttttgctctaccctggagtctcaccaaagatggcctggagaccacctttcaagtgaatcatctggggcacttctaccttgtccagctcctccaggatgttttgtgccgctcagctcctgcccgtgtcattgtggtctcctcagagtcccatcgatttacagatattaacgactccttgggaaaactggacttcagtcgcctctctccaacaaaaaacgactattgggcgatgctggcttataacaggtccaagctctgcaacatcctcttctccaacgagctgcaccgtcgcctctccccacgcggggtcacgtcgaacgcagtgcatcctggaaatatgatgtactccaacattcatcgcagctggtgggtgtacacactgctgtttaccttggcgaggcctttcaccaagtccatggtttcagactgcctggtagaaggaggtcacttctgattgtcagtgactttgagctgagtgctgaaataaaatgataaacaagtcaaaaa

SEQ ID NO: 668255 - DNA, 554 bp, Homo sapiens
tgtcgaccacgaagacggaatggggtaggagaggagagtctaagtggctcctgacaagtccaccattgtaagagaatcccatcccttgagacgtctccctctcgactcctccaaggccggtatcaacaaacattagaatcccgagacccgaaccgactttgtactgccataacgaaccaaagtccgaactgtgacggtccgcggataacgaactggagacaaatttactccctgaagttctgatctgtcgtaccgagaaaagtcaaataacgtacttcctcaatgtgatcaggttcaattttcgcctggggtttaccaatgtaatatgttcgacactccaaaaatttggacactgttccctctcttccctttaagatgagtaacgttcctttaggagtgaattcgaagtcactcggtgttcgtgaattttgggtacttggaagtcgactagcaggaatcggtcaggttagagatgctccttgaccgtatacaagaacgcaaccagtgggacatcgacttaatgaagaggtataaggcctacgagttaatgtcat

SEQ ID NO: 668256 - DNA, 130 bp, Homo sapiens
ttgttatagggatctcgtcttatctcgtacttttcagttccttttgtttacgactgtctctccctcctgtattctcccttttactcctttgacaatttcttcttgtcctatttcactactccttgtgttc

SEQ ID NO: 668257 - DNA, 154 bp, Homo sapiens
ggggggggtttggggggccggccctttttttttccccctggggggaatttatttggggggggagggggggggggggggattttccccccccccccctccccctttggtttttttaaaggggggcccccgggatttttttgcccggtttttttta

SEQ ID NO: 668258 - DNA, 215 bp, Homo sapiens
acgctcctcccatcttgtttcctttcattcctcttgacatgacaacaagagtatatgggaaaagaaaactgaaaggcaaattgaatacagacagagatatcaataaaagtggtccattgagtcttacggcgccggagagatacgctccatttacaatatttactgacagatatattgctgcctgtctatttttccatctcttgcctttcatcgat

SEQ ID NO: 668259 - DNA, 449 bp, Homo sapiens
aaaccaagaacccagccaatatccccagaaattgacaagatgatcctaaaatttatctagaaacacacgggacacagaacagccaagataattttgaaaaataagaacgaaggactcatacttcttgatttcaaaactgactacaaagctacagtaattaacactgtgtgagactggcataaggatatgcatatagattgataaaataaaactgagaagcccttgagaaataaaccttatatatatggtcaactgatttttgacaataatgacaagaaaattcaataggaaaagaagttatttcaacaaatggtactgggacaactggatacacacatgcaaaaggatgaagttggaaccttacctcataccatatgcaaaaattaatgctaaatgagtcatagacctatatataagaattagaactataaaacttatggaagaaaaaa

SEQ ID NO: 668260 - DNA, 208 bp, Homo sapiens
gtgtcgcgtgtacttcttattggggctgctttaggcctactatgggtgttaatttttactctctctacaaggttttcctagtgtcaaagagctgtctcttggactaacagttaaattacaaggggatttagagggttctgcgggcaatttaaagttgaactaagattctatcttggacaaccagctatcaccagcctcaacacaagct

SEQ ID NO: 668261 - DNA, 132 bp, Homo sapiens
  misc_feature (113)..(113): n is a, c, g, or t
tcccttacgactattgggctgggaacctgtctattcccattcaaagctcaccatgtgggaggactgcttgggcctgggaggttgaggctgcagtgagctgtgattacaccacnttcactcccagcctggagt

SEQ ID NO: 668262 - DNA, 223 bp, Homo sapiens
  misc_feature (33)..(33): n is a, c, g, or t
  misc_feature (52)..(52): n is a, c, g, or t
  misc_feature (179)..(179): n is a, c, g, or t
  misc_feature (190)..(191): n is a, c, g, or t
aattggcccccctagtttaccggaccggtcttncccgtccggaacgtctttnagggggagaaagctcgagtcatccctggggaagagaacaatttcaaaaccttcgctagtctccgtttggcccgttcccacccccggctcttcggcattcgggccaaaagaccccgggaaccccccgnacgggttgttnnaaaggaaaaataaaacccccctggggccttgg

SEQ ID NO: 668263 - DNA, 559 bp, Homo sapiens
gctctctgttctgcaagagctgcaaactccagtatggggtaaggaggctccacatcccgagcttgcgtagtggttctgtgtggcgctgagcgaatttggaagacctcaaatggctataactattacaatgctctcacgccaagttcctgccctcagagtggtcacattgctaagcaagaaccagtaccacagatgctagatcgctcaagaggtcccgatcagaacgcctggtcgcagaaagccagaggcttgtggattgatacttgaaaggaccacgagaataatctcaaagcgactgtgaccaagaagatctagaacagagactcgaggaagtccagttctggaagaaggagttagatgacaaacttgagcagcttgtgaatgtaactgatgatctactcatatataagatcagattggaaaaagccctggagacctggaaatgagcccttgtcgatcattcactgagacatgcctgggcatacagggagaagcgctattggcattgacctggtgcacgacacagtggagcatgagctgataaaggaggctgaggatc

SEQ ID NO: 668264 - DNA, 1199 bp, Homo sapiens
aaacattgggtggagactctcacttatgttaatgcaatcttgaaatgactgaaaggtagattgccagcacagctagagtttcccagcctgctcccccatccacacttggaacattgagggagcatgaccgctctctgacttcacatgttaatagaggatcagagcagagcttgggagctatattcggtcagcgatcatagagaacagaagcacaacagcttgctcagccatgagatggccaggtatccagtatttgttcaactctctattgggaattctcttttctcagccgtgttcactcagctatagtagccattatgtcatatatcgatttcgtattacaagtactcttcaagtatacttaagtactgaaggtactggctacttagtctaggtctagcctgcagggctgaaaactgccaactagatgaacttaattctacgctaaccataacaatatgcaatcccttgtcagaaacaatactgacttacctagcagatctacactcagagcccttgatgccataccaggcgttactcatcacacgcacgagtacaaccacacgaagggctcctcttagcgcgttctggaaaaacaataacacaggaccgatagttccacgggcacccacgaccctaattcacctcagtaaaggtaggtcacccaaaaaggccctgatggtaaccataaactgaccctgcaacgagcacaaaaataccaacacattaataaaacaagctacatcaaacgttaacaacccatccacataaactactccagccttattatccaaacaactatacacacattatatctcacatttatacaatatccacaaaccacacataaataaagcaaacaatatccaaaaaactagattatacaagcgccaatacactgtacacatacccatcataaaaccacacatgaaactgcctacttatcacaaaaatcatataccacacaaatacactacacacagagtcacactctatctattttcaaactccatcatctaaatatacaaataactaccatacacccacgtttacacacaagctaccataaaacatatgaacaaataaaaacaccacaaattgaagcaactacgaaatacacagaacactaaatgtatacccactaacatcaccatatctactctccaacaatagatcaaacataatgcgacactctatca

SEQ ID NO: 668265 - DNA, 4433 bp, Homo sapiens
caagacgtggcacgggtgggggcccaggacgcaggagcctgggctgggcaggcagctggctaagggcaggctgttggaataaaggaacacagatctcaggtgtgagctggtggtgttggcatctcaagcaggtctcacttggtgtgtcagggggcacctaggggtgtggggggccagcccacactgggtgaagggttgggcacagggctgactgtgggaggggacaactgcccttcagaacccaaggccaggcccacatggggtgtgctggaccgagcctcccaagctggagccagctccataggccctggagacttgcagtcccgttctgcttgctacacccggaccacccgggggcacggcgctttctaggcaggcctgcccccggcgaccggggctctgtggtcccaggcagatcctgagccctggatagcatagacctggaggaaaacctgcctctgagccccaggtggctgtgtgaccttggggagacagcatcctcctctgactggggctgctggagcactgacccaagtgttagggttgacctagccccaggcatcttccccagggatggccgcttcctcgcaccctgctgctggccttccatcctcatccttctttctgggggtctgcccgcccgtcatcactggcttcttcctcttggctggcttggtttcaggggatagggcagggctggctgccactcttttaatttattttatttatttgagacagagtctcgctgtgtcgcccaggctggcatgcagtggcacagtcttggctcactgcaacctccgtctcctgggttcaagcgattttcctatctcaacctcctgagtagctgggactacaggcacctgtcaccacatctggctaatttttttgtatttttagtagagacggggttttgccacgttggccaggctggtctcgaactcctgacctctggtgatccacctgcctcgacctcccagagtgctgggattacaggcgtgagccaaccacttgggctgggctctgtactgtcctgaatgacgggctggcactgtcctgctccaggtgcatatggccgggcaggagggcagaggctcagggctggtgtgacctcttcttccagacccagtcccccttctctgcctcttccctctccaatcccagagacttggcccctgtacctcatcccaggcctgcccagggggacctaggggtcagaggcggatggcctggctcctggcccctagtcttgtgtctgctggggcttcctgctcgtagcaagggcctgtgggttccagctctgcagcccaagcctgggggattgcatgcctcactcatgggcttacagggcccaacccctgacgcctgcctggcccctggtgccagctggacctgtgtccctggctgaagccgggctggcgcccacccagtcagcctgcactggcgttggcagtgctgaggcagcatccgggcgtcctggtctgcccttgtccctacctgccttgtagaggcggctcagcgaagcccaggcttctggcccctgggacccctgggttggggcagagcagaggctgccctggccccaggctgctcctgcccagtgcctctgtgggaccaccctctgtggtgggctgggggggcctggaagtgaggccccgccctctccccgaagctgtgtgcggcactggccaggtggactggggccatggctggcttccttccaaggtttctggagcgggagccgcccaaaacctggacctggcctacccaaagtgcctgcactccttctgcactcctgggatgggtcccagaaccttctggaatgatctgtggctggtatgtgagcagccaggtctgctgccgggtgactgggcagcgcccttggatcctggtggggcctcagcctgcagcctgctctccccttttagggcggtaagtcggggaggctggcagggaagtggagaccgcaggacttgggggtgggtgggagggggtggcgagggggtgtgtttgctcctcctctcctgcctgctcccacccctggcccttaccttcttgggaactgtggtgattgccttctgtcaggtgtgttgaagcggccgtacccatggtggaggcctttgctcttcttgtggcgtgctggggtgggcaggtgggctgcagccccagcaccagcctgctccagctcccacaccgcccacagacctccctgtcctcatattctctgaccgcaggcctgcctgcctctgctctgctccgccccagaggggctgggttggacctggtgttcaaggccattcctatctgccccccagcccactgctggagccccaggcccctgcagcctgctccacactctgggttcccgggggaagcaggggtagagtggggcaggattcaggtgtagagggcctgtccccagcaggggtccccttgccccgggcccagggtcactggtacagatagcccatgtgcgaacctgggaggccttccgtgtgtgggcagagcagctgctgtgtcctggccattctccagccgcctgtctgtgggcactgtgggcaggtacctttgtgcagggccatggggcaggcagggcggggtctcctggccctgcctgacccttcacttgggaatgtcaagtgtggctcagctctgccttctctgccacctgggtcactaggcagactcctcactgccttagggggtccctgaagttacaggggatgggttttccctcccccagagcctggcttgctccttcgtttggggcctccccgtccgcctgcagtccccggatacagcccgcattcagtgagggctgtggggcagaggtctaggcttgagaggcacctggacctgtccctgaccttgttggactggcagtggggctggtgtgggggacagcggatgtcctcagagccggggggcagctcttgcctggcaggcagggcctggccgtgcactggttgggggctgccctgcactgcagaaaggacaggtgggctgtggcgtccgcaccacaccagggtgccctgctcatcgctctggccagagaacctgggcgcaggcaggggagggctgcaagggcggggcgtgagctaggcgttgggccgggtgtcggcgctgggtccagctgtccatccgactgtctgtccatggggtcccgtgtgaggttctaggccagctgccgtttgccttccagctgctgcggactctggagcgtgagaaccagcgcctggaggctgtcctggcgtggcggcgctctgagctggtcttctggcggtggatggtgaggaagcccgcgcatccctctcccggcatcccttcccacagcagcccccaggtggggcattcgggatcttcctgttttccagacaggaagaggggcttttagggaggccacagacctagtgtaggctctttctaggacttccactcgccttctggggaggctcactgctgcccccgccctcagctccatggccttctagagtgtggcctttgtgcctccctggacgtcacagttgctgagatggtggcatccagcccgctgtgggacctgggggactaccactgccctctttgccctctgtccctctgtccccttggcttggtgcacgctgtctcacttgggtctctgtaggacacggtcctgggcacctgtgccccggaggtgcctgctgcagcctcacagcccaccttcctgccctgggtccccgagcgcgggggtggcgagttggacctggtagtgcgggagctgcaggcactggaggaggagctgcgggaggctgcggagcgcaggcgggcggcctgggaggccaaggctggaggctgtggacgggggccagagtggagtgccgcgcggcgggcctctcgggaggctgtggaaaaggagctgggagctctacagcagtgctgggagcgagacggtggcccggcccagccccatgggccacaccggctggtgagacgagaggatggggcagcaggggaccgggacctgcgggcagctgtggtgatcaggacgctgaggagccaggaggcctgcctggaggcggtgctacgtcgactacagggacagtgtcggcaggaactggccaggctggtgggagcccgccctggtctcatctggatcccgccacctggacgctgagggcctgtcgacgggccctcgtgtgggaagcctgccctggcccagcctggctgggtcttggaggagcagattccaaggccaggtggccgcagggacgatgcagatgcagagcccacgtcacatgctcgctccaggggtggggctgggctgactctggccggatcccaggcctgtggctagcagcactggggacaggaatggctggtcccttgaggaggtcgtgacaggctcagcctggtggtctggaggggactcggaaataaattgtagcagctttcctgcc

SEQ ID NO: 668266 - DNA, 710 bp, Homo sapiens
  misc_feature (295)..(295): n is a, c, g, or t
gatcaaaattaattaacatgacttaatctacaaatgacaaaattataatccaggtcttctggttgaaatccagtgctttcccacaatgcagataatttagcacctaacgttagccttttaaataaaaggacaaagagttcttggaatgctagcgtcttaaagatagtccaaaggaattttcaggtgtgctagcttgtccccttcatttcatttttttcccctcaactcttattcactgcatgaatgttaagaaatagcacagcagtaggggtaaagattttcatgtactgttctntgttatatcaagtattattttgtataattctttcaaattcttgtggataagcacataatcaagattcaatttggtattctgtgtattttatcaagttgaggaaattaacccaaaagatttaagttcctctgtgtttgtagaagaagctagtaatgacagtagtaccataagccagtctagtgctttctaccaaacagactgcctaagagaactatggttatgctgcattccctcgtagtagaagagtagcccagaaacacatggacaggccagatccttattctctgtaggcacattcttttatctatttatttattttacagtatctgagtgatcaatgtgtatattctggtctccatcaggattatcttggagtctgttcagagccagtgatcaaagacaatgtagtggaggg

SEQ ID NO: 668267 - DNA, 1695 bp, Homo sapiens
gaggttccagccggagcggtaactgggcgcaggtcccagccgccgcactaaacccggcccgtgcggtgattggacgcaggccccgggccgcggcggaggcgggcgatccgaaagaggctggtgctggctgcatggggaggcggcggcagcgggtggaccccgcggctggggcccgggccggggccctgcctgaggccatcgccgcgttgagtcggtcgctgccctcgggacccagccccgagatcttccgccgcgccaagttcgaccgtccggaggcgacctccgcgctctggcagctcctcttccgtgtgctctcgccactccctgcgggcaacgccttggcatcgctcgccctggaggtccaagcccgcttggtgaagtcagcactatgctcccagggctacccgaggctggcactggcacaactacctgaggatggctcgcagggcagtcgggagctgctgctggctctgtcctggctcttggcccgaggacctgtgcccgagcagatgctggcccaggcccgagtgcctctgggtgacgagatgactgtgtgccagtgtgaggccctggccagccctggcccacctgcaccccacatggaagcagagggtcctgtggatgtccgccatgtgcagtggctgatgggaaagctgcggttccggtggcgccagctggtgtccagtcagcaggagcagtgcgccctcctgagcaagatccacctgtacacacgcggctgccacagcgaccagagccttagccatctgtctgtcactgaagcagagatgctcagggacccagagggaggccagcagctgctgcggactctggagcgtgagaaccagcgcctggaggctgtcctggcgtggcggcgctctgagctggtcttctggcggtggatggacacggtcctgggcacctgtgccccggaggtgcctgctgcagcctcacagcccaccttcctgccctgggtccccgagcgcgggggtggcgagttggacctggtagtgcgggagctgcaggcactggaggaggagctgcgggaggctgcggagcgcaggcgggcggcctgggaggccaaggctggaggctgtggacgggggccagagtggagtgccgcgcggcgggcctctcgggaggctgtggaaaaggagctgggagctctacagcagtgctgggagcgagacggtggcccggcccagccccatgggccacaccggctggtgagacgagaggatggggcagcaggggaccgggacctgcgggcagctgtggtgatcaggacgctgaggagccaggaggcctgcctggaggcggtgctacgtcgactacagggacagtgtcggcaggaactggccaggctggtgggagcccgccctggtctcatctggatcccgccacctggacgctgagggcctgtcgacgggccctcgtgtgggaagcctgccctggcccagcctggctgggtcttggaggagcagattccaaggccaggtggccgcagggacgatgcagatgcagagcccacgtcacatgctcgctccaggggtggggctgggctgactctggccggatcccaggcctgtggctagcagcactggggacaggaatggctggtcccttgaggaggtcgtgacaggctcagcctggtggtctggaggggactcggaaataaattgtagcagctttcctgcc

SEQ ID NO: 668268 - DNA, 311 bp, Homo sapiens
aggactcctacgtaggtgatgaagcccagagcaagagaggcatcctgaccctgaagtatcccatcgagcatggtatcatcaccaactgggacgacatggagaagatctggcaccacaccttctacaatgagctccgtgtggctcccgaggacaccccaccctgctcacagaggcccgatgaccccaaggcaaccggagagatgacttagatcatgcatacagaccttaatgtcctgcatgtaagtgccatcaggagtgtatcctgtatgttttggggaaccaggatgctccggatcagggatggatagtcc

SEQ ID NO: 668269 - DNA, 171 bp, Homo sapiens
  misc_feature (36)..(36): n is a, c, g, or t
gtcgcctctacgacggactccccgtcacactgaccncactctgcccaaccgcgggcttaaccactcaacgaccctggacgcacccgacggacttcaacgctgacacactctgggactgtgggtgggggtacccgacgctcgacacttcgtacactcactggtcactacgcg

SEQ ID NO: 668270 - DNA, 2418 bp, Homo sapiens
gaggttccagccggagcggtaactgggcgcaggtcccagccgccgcactaaacccggcccgtgcggtgattggacgcaggccccgggccgcggcggaggcgggcgatccgaaagaggctggtgctggctgcatggggaggcggcggcagcgggtggaccccgcggctggggcccgggccggggccctgcctgaggccatcgccgcgttgagtcggtcgctgccctcgggacccagccccgagatcttccgccgcgccaagttcgaccgtccggaggcgacctccgcgctctggcagctcctcttccgtgtgctctcgccactccctgcgggcaacgccttggcatcgctcgccctggaggtccaagcccgcttggtgaagtcagcactatgctcccagggctacccgaggctggcactggcacaactacctgaggatggctcgcagggcagtcgggagctgctgctggctctgtcctggctcttggcccgaggacctgtgcccgagcagatgctggcccaggcccgagtgcctctgggtgacgagatgactgtgtgccagtgtgaggccctggccagccctggcccacctgcaccccacatggaagcagagggtcctgtggatgtccgccatgtgcagtggctgatgggaaagctgcggttccggtggcgccagctggtgtccagtcagcaggagcagtgcgccctcctgagcaagatccacctgtacacacgcggctgccacagcgaccagagccttagccatctgtctgtcactgaagcagagatgctcagggacccagagggaggccagcagctgctgcggactctggagcgtgagaaccagcgcctggaggctgtcctggcgtggcggcgctctgagctggtcttctggcggtggatggacacggtcctgggcacctgtgccccggaggtgcctgctgcagcctcacagcccaccttcctgccctgggtccccgagcgcgggggtggcgagttggacctggtagtgcgggagctgcaggcactggaggaggagctgcgggaggctgcggagcgcaggcgggcggcctgggaggccaaggctggaggctgtggacgggggccagagtggagtgccgcgcggcgggcctctcgggaggctgtggaaaaggagctgggagctctacagcagtgctgggagcgagacggtggcccggcccagccccatgggccacaccggctggtgagacgagaggatggggcagcaggggaccgggacctgcgggcagctgtggtgatcaggacgctgaggagccaggaggcctgcctggaggcggtgctacgtcgactacagggacagtgtcggcaggaactggccaggctggtgggagcccgccctggtctcatctggatcccgccacctggacgctgagggcctgtcgacgggccctcgtgtgggaagcctgccctggcccagcctggctgggtcttggaggagcagattccaaggccaggtggccgcagggacgatgcagatgcagagcccacgtcacatgctcgctccaggggtggggctgggctgactctggccggatcccaggcctgtggctagcagcactggggacaggaatggctggtcccttgaggaggtcgtgacaggctcagcctggtggtctggaggggactcggaaataaattgtagcagctttcctgccgctggccctccccctgccaccctgtcgggtttccctgtttgggggtgggagcgtggaggagcccctggcagtggtggccagtgtagggctggccaggtgctggaggacatgcataccccagcactggtgagtggcaggaccacggggaggtggcacaggcctccctggagcgggattatctcggcccgcccccttcatttgggctcccgctgtgggcctggcctgggctgtgagcacagctgcccccgctccggccatggctgtgcctggtgggtgcgccggatgggagcccggggctctgctccttcccgggaggtggtgctccgggtggggaggcacagatggacagaggggctttgttccagaggctgctcagaaagctcagtcatccctgacaagagcatctgtgtccgggggacgtgcctcagctggcggaggagggtggctcatggacccccccgcccgcacaagagacagcaggtgggctgaggctcaagcctgctgcttgcgggtcccctttttggggctgcgatttgactgagtggggccatgggtgtgggcactcaggctgggcagcccgggcagcgttcctggcatgctctggggttctgctggtccactggccccatgggtggggccgcagggactatcgtaggcggggcgcgcgacgggagcctagactctaggggtgcaggctccccgcggtcccctcggtgtgtaggc

SEQ ID NO: 668271 - DNA, 163 bp, Homo sapiens
tacatacaagatgtcttcagcttccccccatgactgtatggaggcttcctgccttacagtgccatcatctgtggagctgtactacatctttgccacagtatgggtgtcgggagcagtacactttgtacggcatcctcttcttttcatcaacaccaggaatttt

SEQ ID NO: 668272 - DNA, 1684 bp, Homo sapiens
gctgaacaaggcgcagagctgctccgccatctcccccacgcctcctgccaagttctgtggcgccgcggttccccacctcctgctcccatccccctggctcccgccgccctgtagctcggcagccctgccaggagcccggaagtgggtccgcacgagacagaatagactacactcaaactccagggaaccgttcattgggcttggacacgaaggcgggaccctgccgacgcagtgattggatgcatgtccggccagcgcggtgattggacctccgcgctctggcagctcctcttccgtgtgctctcgccactccctgcgggcaacgccttggcatcgctcgccctggaggtccaagcccgcttggtgaagtcagcactatgctcccagggctacccgaggctggcactggcacaactacctgaggatggctcgcagggcagtcgggagctgctgctggctctgtcctggctcttggcccgaggacctgtgcccgagcagatgctggcccaggcccgagtgcctctgggtgacgagatgactgtgtgccagtgtgaggccctggccagccctggcccacctgcaccccacatggaagcagagggtcctgtggatgtccgccatgtgcagtggctgatgggaaagctgcggttccggtggcgccagctggtgtccagtcagcaggagcagtgcgccctcctgagcaagatccacctgtacacacgcggctgccacagcgaccagagccttagccatctgtctgtcactgaagcagagatgctcagggacccagagggaggccagcagctgctgcggactctggagcgtgagaaccagcgcctggaggctgtcctggcgtggcggcgctctgagctggtcttctggcggtggatggacacggtcctgggcacctgtgccccggaggtgcctgctgcagcctcacagcccaccttcctgccctgggtccccgagcgcgggggtggcgagttggacctggtagtgcgggagctgcaggcactggaggaggagctgcgggaggctgcggagcgcaggcgggcggcctgggaggccaaggctggaggctgtggacgggggccagagtggagtgccgcgcggcgggcctctcgggaggctgtggaaaaggagctgggagctctacagcagtgctgggagcgagacggtggcccggcccagccccatgggccacaccggctggtgagacgagaggatggggcagcaggggaccgggacctgcgggcagctgtggtgatcaggacgctgaggagccaggaggcctgcctggaggcggtgctacgtcgactacagggacagtgtcggcaggaactggccaggctggtgggagcccgccctggtctcatctggatcccgccacctggacgctgagggcctgtcgacgggccctcgtgtgggaagcctgccctggcccagcctggctgggtcttggaggagcagattccaaggccaggtggccgcagggacgatgcagatgcagagcccacgtcacatgctcgctccaggggtggggctgggctgactctggccggatcccaggcctgtggctagcagcactggggacaggaatggctggtcccttgaggaggtcgtgacaggctcagcctggtggtctggaggggactcggaaataaattgtagcagctttcctgcc

SEQ ID NO: 668273 - DNA, 746 bp, Homo sapiens
  misc_feature (27)..(27): n is a, c, g, or t
  misc_feature (96)..(96): n is a, c, g, or t
  misc_feature (199)..(199): n is a, c, g, or t
  misc_feature (251)..(251): n is a, c, g, or t
  misc_feature (257)..(257): n is a, c, g, or t
  misc_feature (299)..(299): n is a, c, g, or t
ggcttaagtcctcggagtaaccatagncactcgagattacccagtaggcgcgtcgcacgaatttctcagtgtagaagcaagtgaacgctacgtacntatctagcatttagaaacacgtatcacgtagatgcactcgatggctacgcaacgaacgtgacagtacgttgctgagctgcgtgtgctcgacacatcgcacagncagtcccagatcgagcacgagtcgcacccacatctttacgtcttggcacacnctgagnaggagattcgatcaccgcaataccgcgtacaaaatcaatggnacgtgcaatatagatctaacacgctgcttgcgcgagcgacgaatgtatgatggatagagggatcattggttcgccgattgtgagcgaacttacgtatagcacaggtgacaatctccatatgagcgcatatttgaagaagaaggatgaatctcacgacggcagcagcaagtatctgcagtccatagaagagcagtgagaaacgtggacgggctctacgattgcattgctctgtgcctgctgtagcaccagctgccccagctactggtggaacggagacaaatatctggggcctgcagttcttatgcaggcctatcgctggatgattgagctccagagatgacttcacagaggagcgcctggccaagctgcaggacccattctctctataccagtgccacaccatcatgaactgcacaaggacctgtcctaagggtctgaatccaggta

SEQ ID NO: 668274 - DNA, 1676 bp, Homo sapiens
acggagggcgtgcggggagggagaggaggggcttgctggggggggggccccgaggcggggccgggagggccgcctggaagaggaggtcgggggcgaaggaggccgagaagaaagccctgccaggagcccggaagtgggtccgcacgagacagaatagactacactcaaactccagggaaccgttcattgggcttggacacgaaggcgggaccctgccgacgcagtgattggatgcatgtccggccagcgcggtgattggacctccgcgctctggcagctcctcttccgtgtgctctcgccactccctgcgggcaacgccttggcatcgctcgccctggaggtccaagcccgcttggtgaagtcagcactatgctcccagggctacccgaggctggcactggcacaactacctgaggatggctcgcagggcagtcgggagctgctgctggctctgtcctggctcttggcccgaggacctgtgcccgagcagatgctggcccaggcccgagtgcctctgggtgacgagatgactgtgtgccagtgtgaggccctggccagccctggcccacctgcaccccacatggaagcagagggtcctgtggatgtccgccatgtgcagtggctgatgggaaagctgcggttccggtggcgccagctggtgtccagtcagcaggagcagtgcgccctcctgagcaagatccacctgtacacacgcggctgccacagcgaccagagccttagccatctgtctgtcactgaagcagagatgctcagggacccagagggaggccagcagctgctgcggactctggagcgtgagaaccagcgcctggaggctgtcctggcgtggcggcgctctgagctggtcttctggcggtggatggacacggtcctgggcacctgtgccccggaggtgcctgctgcagcctcacagcccaccttcctgccctgggtccccgagcgcgggggtggcgagttggacctggtagtgcgggagctgcaggcactggaggaggagctgcgggaggctgcggagcgcaggcgggcggcctgggaggccaaggctggaggctgtggacgggggccagagtggagtgccgcgcggcgggcctctcgggaggctgtggaaaaggagctgggagctctacagcagtgctgggagcgagacggtggcccggcccagccccatgggccacaccggctggtgagacgagaggatggggcagcaggggaccgggacctgcgggcagctgtggtgatcaggacgctgaggagccaggaggcctgcctggaggcggtgctacgtcgactacagggacagtgtcggcaggaactggccaggctggtgggagcccgccctggtctcatctggatcccgccacctggacgctgagggcctgtcgacgggccctcgtgtgggaagcctgccctggcccagcctggctgggtcttggaggagcagattccaaggccaggtggccgcagggacgatgcagatgcagagcccacgtcacatgctcgctccaggggtggggctgggctgactctggccggatcccaggcctgtggctagcagcactggggacaggaatggctggtcccttgaggaggtcgtgacaggctcagcctggtggtctggaggggactcggaaataaattgtagcagctttcctgcc

SEQ ID NO: 668275 - DNA, 514 bp, Homo sapiens
  misc_feature (5)..(5): n is a, c, g, or t
  misc_feature (294)..(294): n is a, c, g, or t
  misc_feature (420)..(420): n is a, c, g, or t
tggcnttacttctgcatctgtgtgatgtcaatacaacaacctggcttacctggagccattcacaattcgtggagtcttaaacgaatatttccacaatgtctgtgaactggacctggtgttcaacttctacaaggtttacacggtcgtggacgagatgttcctggctggcgaaatccgagagaccagccagacgaaggtgctgaaacagctgctgatgctacagtccctggagtgagggaggcgagccccaccccgccccggcccctcctggactcgcctgctcgcttccccttncccagcccgtggccaacccagcagtccttccctcagctgcctaggaggaagggacccagctgggtctgggccacaagggaggagactgcaccccactgcctctgggccctggctgtgggcagaggncaccgtgtgtgtcccgagtaaccgtgccgttgtcgtgtgatgccataagcgtctgtgcgtggagtccccaataaacctgtggtcctgcctggca

SEQ ID NO: 668276 - DNA, 1743 bp, Homo sapiens
gctgaacaaggcgcagagctgctccgccatctcccccacgcctcctgccaagttctgtggcgccgcggttccccacctcctgctcccatccccctggctcccgccgccctgtagctcggcaggtgcagtaggcgctccgaggaggaggccccttagcttcaagaaacccgcgtgggcggagccctgccaggagcccggaagtgggtccgcacgagacagaatagactacactcaaactccagggaaccgttcattgggcttggacacgaaggcgggaccctgccgacgcagtgattggatgcatgtccggccagcgcggtgattggacctccgcgctctggcagctcctcttccgtgtgctctcgccactccctgcgggcaacgccttggcatcgctcgccctggaggtccaagcccgcttggtgaagtcagcactatgctcccagggctacccgaggctggcactggcacaactacctgaggatggctcgcagggcagtcgggagctgctgctggctctgtcctggctcttggcccgaggacctgtgcccgagcagatgctggcccaggcccgagtgcctctgggtgacgagatgactgtgtgccagtgtgaggccctggccagccctggcccacctgcaccccacatggaagcagagggtcctgtggatgtccgccatgtgcagtggctgatgggaaagctgcggttccggtggcgccagctggtgtccagtcagcaggagcagtgcgccctcctgagcaagatccacctgtacacacgcggctgccacagcgaccagagccttagccatctgtctgtcactgaagcagagatgctcagggacccagagggaggccagcagctgctgcggactctggagcgtgagaaccagcgcctggaggctgtcctggcgtggcggcgctctgagctggtcttctggcggtggatggacacggtcctgggcacctgtgccccggaggtgcctgctgcagcctcacagcccaccttcctgccctgggtccccgagcgcgggggtggcgagttggacctggtagtgcgggagctgcaggcactggaggaggagctgcgggaggctgcggagcgcaggcgggcggcctgggaggccaaggctggaggctgtggacgggggccagagtggagtgccgcgcggcgggcctctcgggaggctgtggaaaaggagctgggagctctacagcagtgctgggagcgagacggtggcccggcccagccccatgggccacaccggctggtgagacgagaggatggggcagcaggggaccgggacctgcgggcagctgtggtgatcaggacgctgaggagccaggaggcctgcctggaggcggtgctacgtcgactacagggacagtgtcggcaggaactggccaggctggtgggagcccgccctggtctcatctggatcccgccacctggacgctgagggcctgtcgacgggccctcgtgtgggaagcctgccctggcccagcctggctgggtcttggaggagcagattccaaggccaggtggccgcagggacgatgcagatgcagagcccacgtcacatgctcgctccaggggtggggctgggctgactctggccggatcccaggcctgtggctagcagcactggggacaggaatggctggtcccttgaggaggtcgtgacaggctcagcctggtggtctggaggggactcggaaataaattgtagcagctttcctgcc

SEQ ID NO: 668277 - DNA, 1598 bp, Homo sapiens
taccatcgggttataaggtagagaggacatggcgtggcgctggcgtgcagcgagggtggaccccgcggctggggcccgggccggggccctgcctgaggccatcgccgcgttgagtcggtcgctgccctcgggacccagccccgagatcttccgccgcgccaagttcgaccgtccggaggcgacctccgcgctctggcagctcctcttccgtgtgctctcgccactccctgcgggcaacgccttggcatcgctcgccctggaggtccaagcccgcttggtgaagtcagcactatgctcccagggctacccgaggctggcactggcacaactacctgaggatggctcgcagggcagtcgggagctgctgctggctctgtcctggctcttggcccgaggacctgtgcccgagcagatgctggcccaggcccgagtgcctctgggtgacgagatgactgtgtgccagtgtgaggccctggccagccctggcccacctgcaccccacatggaagcagagggtcctgtggatgtccgccatgtgcagtggctgatgggaaagctgcggttccggtggcgccagctggtgtccagtcagcaggagcagtgcgccctcctgagcaagatccacctgtacacacgcggctgccacagcgaccagagccttagccatctgtctgtcactgaagcagagatgctcagggacccagagggaggccagcagctgctgcggactctggagcgtgagaaccagcgcctggaggctgtcctggcgtggcggcgctctgagctggtcttctggcggtggatggacacggtcctgggcacctgtgccccggaggtgcctgctgcagcctcacagcccaccttcctgccctgggtccccgagcgcgggggtggcgagttggacctggtagtgcgggagctgcaggcactggaggaggagctgcgggaggctgcggagcgcaggcgggcggcctgggaggccaaggctggaggctgtggacgggggccagagtggagtgccgcgcggcgggcctctcgggaggctgtggaaaaggagctgggagctctacagcagtgctgggagcgagacggtggcccggcccagccccatgggccacaccggctggtgagacgagaggatggggcagcaggggaccgggacctgcgggcagctgtggtgatcaggacgctgaggagccaggaggcctgcctggaggcggtgctacgtcgactacagggacagtgtcggcaggaactggccaggctggtgggagcccgccctggtctcatctggatcccgccacctggacgctgagggcctgtcgacgggccctcgtgtgggaagcctgccctggcccagcctggctgggtcttggaggagcagattccaaggccaggtggccgcagggacgatgcagatgcagagcccacgtcacatgctcgctccaggggtggggctgggctgactctggccggatcccaggcctgtggctagcagcactggggacaggaatggctggtcccttgaggaggtcgtgacaggctcagcctggtggtctggaggggactcggaaataaattgtagcagctttcctgcc

SEQ ID NO: 668278 - DNA, 1795 bp, Homo sapiens
gaggttccagccggagcggtaactgggcgcaggtcccagccgccgcactaaacccggcccgtgcggtgattggacgcaggccccgggccgcggcggaggcgggcgatccgaaagaggctggtgctggctgcatggggaggcggcggcagcgggtggaccccgcggctggggcccgggccggggccctgcctgaggccatcgccgcgttgagtcggtcgctgccctcgggacccagccccgagatcttccgccgcgccaagttcgaccgtccggaggcggtgacgctctcgcggagggcaggcgggccgggtggggtcccgggccctcgcagggagttgggccggctccgctgacctgcccgctttttattttccgcagacctccgcgctctggcagctcctcttccgtgtgctctcgccactccctgcgggcaacgccttggcatcgctcgccctggaggtccaagcccgcttggtgaagtcagcactatgctcccagggctacccgaggctggcactggcacaactacctgaggatggctcgcagggcagtcgggagctgctgctggctctgtcctggctcttggcccgaggacctgtgcccgagcagatgctggcccaggcccgagtgcctctgggtgacgagatgactgtgtgccagtgtgaggccctggccagccctggcccacctgcaccccacatggaagcagagggtcctgtggatgtccgccatgtgcagtggctgatgggaaagctgcggttccggtggcgccagctggtgtccagtcagcaggagcagtgcgccctcctgagcaagatccacctgtacacacgcggctgccacagcgaccagagccttagccatctgtctgtcactgaagcagagatgctcagggacccagagggaggccagcagctgctgcggactctggagcgtgagaaccagcgcctggaggctgtcctggcgtggcggcgctctgagctggtcttctggcggtggatggacacggtcctgggcacctgtgccccggaggtgcctgctgcagcctcacagcccaccttcctgccctgggtccccgagcgcgggggtggcgagttggacctggtagtgcgggagctgcaggcactggaggaggagctgcgggaggctgcggagcgcaggcgggcggcctgggaggccaaggctggaggctgtggacgggggccagagtggagtgccgcgcggcgggcctctcgggaggctgtggaaaaggagctgggagctctacagcagtgctgggagcgagacggtggcccggcccagccccatgggccacaccggctggtgagacgagaggatggggcagcaggggaccgggacctgcgggcagctgtggtgatcaggacgctgaggagccaggaggcctgcctggaggcggtgctacgtcgactacagggacagtgtcggcaggaactggccaggctggtgggagcccgccctggtctcatctggatcccgccacctggacgctgagggcctgtcgacgggccctcgtgtgggaagcctgccctggcccagcctggctgggtcttggaggagcagattccaaggccaggtggccgcagggacgatgcagatgcagagcccacgtcacatgctcgctccaggggtggggctgggctgactctggccggatcccaggcctgtggctagcagcactggggacaggaatggctggtcccttgaggaggtcgtgacaggctcagcctggtggtctggaggggactcggaaataaattgtagcagctttcctgcc

SEQ ID NO: 668279 - DNA, 166 bp, Homo sapiens
tgctgtgattatggtcctgcattgtctatatgtaggctgctcatgtcacgtatctgtcattgctgtgaggtgagctgttacaagtgatgttgtctgctattgcttagtcgagtgggtggctgcagtcaagtgtcttgcattgcttggtggggtgggctggctataa

SEQ ID NO: 668280 - DNA, 101 bp, Homo sapiens
gtactttttttattttttaataggaaagtgatgtgcttcagagaggggttcctccttaatgttgaggttttttaaaaataaaaatcctgtttttaagctca

SEQ ID NO: 668281 - DNA, 1684 bp, Homo sapiens
gctgaacaaggcgcagagctgctccgccatctcccccacgcctcctgccaagttctgtggcgccgcggttccccacctcctgctcccatccccctggctcccgccgccctgtagctcggcagccctgccaggagcccggaagtgggtccgcacgagacagaatagactacactcaaactccagggaaccgttcattgggcttggacacgaaggcgggaccctgccgacgcagtgattggatgcatgtccggccagcgcggtgattgagcgcggtgattgggtacaggtctcgggagcgcggtgattggacctccgcgctctggcagctcctcttccgtgtgctctcgccactccctgcgggcaacgccttggcatcgctcgccctggggctacccgaggctggcactggcacaactacctgaggatggctcgcagggcagtcgggagctgctgctggctctgtcctggctcttggcccgaggacctgtgcccgagcagatgctggcccaggcccgagtgcctctgggtgacgagatgactgtgtgccagtgtgaggccctggccagccctggcccacctgcaccccacatggaagcagagggtcctgtggatgtccgccatgtgcagtggctgatgggaaagctgcggttccggtggcgccagctggtgtccagtcagcaggagcagtgcgccctcctgagcaagatccacctgtacacacgcggctgccacagcgaccagagccttagccatctgtctgtcactgaagcagagatgctcagggacccagagggaggccagcagctgctgcggactctggagcgtgagaaccagcgcctggaggctgtcctggcgtggcggcgctctgagctggtcttctggcggtggatggacacggtcctgggcacctgtgccccggaggtgcctgctgcagcctcacagcccaccttcctgccctgggtccccgagcgcgggggtggcgagttggacctggtagtgcgggagctgcaggcactggaggaggagctgcgggaggctgcggagcgcaggcgggcggcctgggaggccaaggctggaggctgtggacgggggccagagtggagtgccgcgcggcgggcctctcgggaggctgtggaaaaggagctgggagctctacagcagtgctgggagcgagacggtggcccggcccagccccatgggccacaccggctggtgagacgagaggatggggcagcaggggaccgggacctgcgggcagctgtggtgatcaggacgctgaggagccaggaggcctgcctggaggcggtgctacgtcgactacagggacagtgtcggcaggaactggccaggctggtgggagcccgccctggtctcatctggatcccgccacctggacgctgagggcctgtcgacgggccctcgtgtgggaagcctgccctggcccagcctggctgggtcttggaggagcagattccaaggccaggtggccgcagggacgatgcagatgcagagcccacgtcacatgctcgctccaggggtggggctgggctgactctggccggatcccaggcctgtggctagcagcactggggacaggaatggctggtcccttgaggaggtcgtgacaggctcagcctggtggtctggaggggactcggaaataaattgtagcagctttcctgcc

SEQ ID NO: 668282 - DNA, 1901 bp, Homo sapiens
gaggttccagccggagcggtaactgggcgcaggtcccagccgccgcactaaacccggcccgtgcggtgattggacgcaggccccgggccgcggcggaggcgggcgatccgaaagaggctggtgctggctgcatggggaggcggcggcagcgggtggaccccgcggctggggcccgggccggggccctgcctgaggccatcgccgcgttgagtcggtcgctgccctcgggacccagccccgagatcttccgccgcgccaagttcgaccgtccggaggcgacctccgcgctctggcagctcctcttccgtgtgctctcgccactccctgcgggcaacgccttggcatcgctcgccctggaggtccaagcccgcttggtgaagtcagcactatgctcccagggctacccgaggctggcactggcacaactacctgaggatggctcgcagggcagtcgggagctgctgctggctctgtcctggctcttggcccgaggacctgtgcccgagcagatgctggcccaggcccgagtgcctctgggtgacgagatgactgtgtgccagtgtgaggccctggccagccctggcccacctgcaccccacatggaagcagagggtcctgtggatgtccgccatgtgcagtggctgatgggaaagctgcggttccggtggcgccagctggtgtccagtcagcaggagcagtgcgccctcctgagcaagatccacctgtacacacgcggctgccacagcgaccagagccttagccatctgtctgtcactgaagcagagatgctcagggacccagagggaggccagcagtttctggagcgggagccgcccaaaacctggacctggcctacccaaagtgcctgcactccttctgcactcctgggatgggtcccagaaccttctggaatgatctgtggctggtatgtgagcagccaggtctgctgccgggtgactgggcagcgcccttggatcctggtggggcctcagcctgcagcctgctctccccttttagggcgctgctgcggactctggagcgtgagaaccagcgcctggaggctgtcctggcgtggcggcgctctgagctggtcttctggcggtggatggacacggtcctgggcacctgtgccccggaggtgcctgctgcagcctcacagcccaccttcctgccctgggtccccgagcgcgggggtggcgagttggacctggtagtgcgggagctgcaggcactggaggaggagctgcgggaggctgcggagcgcaggcgggcggcctgggaggccaaggctggaggctgtggacgggggccagagtggagtgccgcgcggcgggcctctcgggaggctgtggaaaaggagctgggagctctacagcagtgctgggagcgagacggtggcccggcccagccccatgggccacaccggctggtgagacgagaggatggggcagcaggggaccgggacctgcgggcagctgtggtgatcaggacgctgaggagccaggaggcctgcctggaggcggtgctacgtcgactacagggacagtgtcggcaggaactggccaggctggtgggagcccgccctggtctcatctggatcccgccacctggacgctgagggcctgtcgacgggccctcgtgtgggaagcctgccctggcccagcctggctgggtcttggaggagcagattccaaggccaggtggccgcagggacgatgcagatgcagagcccacgtcacatgctcgctccaggggtggggctgggctgactctggccggatcccaggcctgtggctagcagcactggggacaggaatggctggtcccttgaggaggtcgtgacaggctcagcctggtggtctggaggggactcggaaataaattgtagcagctttcctgcc

SEQ ID NO: 668283 - DNA, 123 bp, Homo sapiens
ggcgttccttgattcttacgaacgctgggtctatggctcatgtgataaagtagtcatgtgtaggtttatctagataggaattcgagcttctcagatatggcaaagcaagaaaatgagcggccg

SEQ ID NO: 668284 - DNA, 430 bp, Homo sapiens
cggactgattttcttcaaagcttctcttagtctcctttttttttttaagacagagcttcattcttgtggcccaggctggagtgcaatggcgtgatctcggctcaccgaaacctcctcctcccggattcaagtgattctcctgcctcagcctcccgagtagctggcactacaggagcgcgccaccacacccagctaatttttttgtatttttagtagggatgggatttcaccatgttggccaggatggtctggatctcttgaccttgtgatctgcccgcctcccaaagtgctgggattataggcgtcagccaccacgcccagcctgtttttcacgttcagtacagctttcaataattcacatgggatattcactactttattataagtataggcttggtgttagatgattgtaatcaactataggtaggct

SEQ ID NO: 668285 - DNA, 110 bp, Homo sapiens
cagggtctgatcttatttgtttgttacccaaacaatcttatttttggccggattcagacttagaagtagaagctcgcagagaggacagtctgcgtctattcgcaatttgt

SEQ ID NO: 668286 - DNA, 429 bp, Homo sapiens
atctggccccatgtggatcttggtggccctggcacttttctactctgagcccagccttctctgtgtgtaaaacacggattgtggtgcctacctctcgcgcttgccctgcagatgcgccggctgagccacaccacagcggctgggcaggttcagccccctctctcacctctgccgctcctccagcaccacgactcggttgggaacagaggaaggcgaggagcgccatccgcttcctgctctctgcagcatccggcatttcgccacatgctccctgatgccacggttctcaaagtgtggtccctgtccctggcctgggacgcatcagcttcctgtggggactctagacatgcaagttctccggccccacactagactgcctgactcagacactcggcgcgctggcgctctagcgatctgtgcgttaacacc

SEQ ID NO: 668287 - DNA, 241 bp, Homo sapiens
  misc_feature (183)..(183): n is a, c, g, or t
aggatcctttcccaccagcaagacaatagctttacctctaggcataggctgtgtgctgctgccagaccctctggccaggatgagggggtggtctgactcaacatgttacttgaacaagccaacttggtctttttctggactgaagcctgcaggagttaaaagggcagggcatctcctgtgcantggtgaagggagagccagctccccccgacgggtggggcaatttttggttgaaggggcc

SEQ ID NO: 668288 - DNA, 136 bp, Homo sapiens
acgcaggcggggttgtgctcaaatacatcgcgcgggccaaagcccggggtctcggcgtcatcttcatcacccacaacgtccaccacgcctaccccgtcgccgaccgcttcaccatcctgaagcgcgggacgagcta

SEQ ID NO: 668289 - DNA, 760 bp, Homo sapiens
agcggttcacggtgcccatcacggatgtgacggagaacgccctcaaggacctggacgacgtcatgaagaccaccaaaatcattatcggctgcttcgtggccatcacgttcatggccgtcggtgatgctcgtggccttctatcaatgctgcgctagagcagctgccagctccactagcaccacgggcccacgcgcaccgtggagatcatcaacgtggaggacgagctgcccgccgcctcggccgtgtccgtggccgccgcggccaccgcggccagtgggggtggtgtgggcggggacacgccacctggccctgcccgccctggagcgagaccactctctatcgacgctaccactacgtggctgccgccttcgatggcgcactacagtcgagcaacccctagctggcgggggctgcgggggcgaatggcccgcccctggtcctcaagtccatccagcgaaaccatctgcgtcttcaagagcggctccaaggagaacgtgcaacgagacgcagatctgatggcggcggggccgggcgggcgaggggcgtggagccccggcatcaggtcccaaaccggacgcagtacatgaccgggaacccctcccttcaccaaattcagagtgcagcgaactggagtaccgcgcatggcaagagtaggaggaagcgcatcttacataacatggtcatgcggatcgggtaaccgctaagcaagcgtatagacgcgaggatcaggagagagagcgacagggaatctgcgtgacac

SEQ ID NO: 668290 - DNA, 660 bp, Homo sapiens
agcggggcgggtcacgaggtcggaggatccagaccatcctggctaacacggtgaaaccgcgtctctactggaggtgcaagaaattggccgggtgtggtggcgcacacctgtagtcccagctactcgagaggctgaggcagtggaatagcttgggcccgggaggcggaggttgcagtgagcggagatagcgccactgcactccagcctgggtgacagagcgagactcaatctcaagaaaaaaaaaagttcttccagctagaacatttatttttggacgtacatctccacaaaatgggagctatactggttagccagtatcctaatagtatagtgcagttggcataatggattaccaagctgtgaaactggaaatgtcatatgcactttcgtgttgtatcaggcagatactaaacattgtcccctgtgagtcagcttacaatttttcctgtgcttttgaaaatctcacgcagttgtatactggagaaaaattagacgacggtagaagatattggtacttattagcgtatcatcagaactcagcacagtcggccttataagaaaccaaataattttgtgatgattaactcttggagatggtcacttctgggctcttcctggatttcccagccgtaacagtgggtgtaacgcacaaccttcacc

SEQ ID NO: 668291 - DNA, 339 bp, Homo sapiens
agtgatgtgcgcagtacacgaaggacggagctgtatcgcagtggcgtgtgtgctgaagattggggagacaccccacatcagaccgcgcgcatcatggaataatgccaatgttctggcccgttatgccagtatctgccagcagaatggcattgttgcccatcgtggagcctgagatcctccctgatggggaccatgagttgaagcgctgccagtatgtgaccgagaaggtgctggctgctgtctacaaggctctgagtgaccaccacatctacctggaaggcaccttgctgaagcccaacatggtcaccccaggccatgcttgcactcagaacgttttct

SEQ ID NO: 668292 - DNA, 306 bp, Homo sapiens
ccgactagacgtacacagacatggcttcatacgcacaacacattacacagacaactcaatgtcaacactgagtgaagaatatcaacaccaaatagtcaatatccatgacacattatagagaagctatagcacgacacatgcttcagatttgataaagtttctttatagatacaaacatagacatcccctattaatatcatataaaacactgacgcacaccggagcagacgccgaaatcatgatgatggttagagaaaaacaatctcacagctatcctaacaaaaccttgtgtactaccgctaggta

SEQ ID NO: 668293 - DNA, 433 bp, Homo sapiens
  misc_feature (244)..(244): n is a, c, g, or t
  misc_feature (426)..(426): n is a, c, g, or t
cagacatggtcctgcccttgtggagcttgcagtctactggtagctggtaagatgacaaaagttctgtagagtgaaagaatgagtgattgacatgctagaatactttccaggcagcagcaggtatttaagaaagtgtggttgaggccgggtgtagtggcttatgcctgtaatcccggcactttgggaggccaaggtgggtggatcacttgagctcaggagttcgagaccagcttgtgcaatgtgnagaaaccctgtctctaccaaaaatacaaaaattcattgggtgtggtggcacatacctatagtaccagctacttgggaggctgaggcaggaggatggcttgagcccaggagtcagaggttgcagggttgcagtgagctgagatggcaccactgcactccagcttgggcaacagagtcagaccntgtctcc

SEQ ID NO: 668294 - DNA, 295 bp, Homo sapiens
gtcagctctaactgttaaagaagggtctacaaacatgattctaggcacatattgcccatcaggtgataaattcttatcagtggtttcatgcataaggtttagcatgatgaacttattctgagccatttcttgtatttcttcattttgggcaaatactttctttagtgcttgagagtattgacaatcctccaggtgatgaataaccattattggcttcttttttgagcataaaagagaccttcttcataagtttgtacccaagtgatgtcatctccccatcctgacttggccagtg

SEQ ID NO: 668295 - DNA, 365 bp, Homo sapiens
gaagaaaccgaataggccaaagttttcctggcatcagatctactgcccatttcctcccttcagaaagaacttggtaagaaattagaccaggtgcggtggctcacgccggtaatcccagccctttgggaggccaaggcgggtggatcacgaggtcaagagatcgagaccatcctggccaacatggtgaaaccccatctctactacagatacaaaaattagctgggcatggtggtgtgtgcctatagtccaagctactcgggaggctgaggcaggagaatcgcttaaacctggaaggcggaggttgcagtgagtcaagatcgcccccctgcactccagcctgggcaacagagtgagactctgtctca

SEQ ID NO: 668296 - DNA, 1365 bp, Homo sapiens
ggacaactcgaggttccgggccctgatgctccctggagcagagttgcatgagacttcgtctgtggggacagcagtggtgccagcgctgagcacctggctgacaagcggtactccgtagcacaaatgtggacttgcccttctttcctagagagttatgttgtgagacagtctagctgtctactccgcgcagggaccccaaccatcacgcgtgtgggcgaatgacaacccatggtagttcgttcggggaacggcaatgtgtcacacggagttgggacctactctgctattcgaggtcgattaacgtacaccacaagactccacatgtgttggattcatgaccttgggggaactcccgccgttctcacgactgtaatcaaggacttactgggagattactgcatgcgacgtcttgcgcctactgaggagagaggttgcgctcataatacccaacgttgaggcaacttgggaagctccctggtgttgatcttgcaaagaatacggtggaagtacttatccgtgttgccggtagaagacagacatgagttatcccttgttaagcgcctatccgtgaatggaaaggaaccgaccgaatgagttgtccaagcgcccgagatcataggtacgcgagcgcctagtggaccttgagtcgtcctgtgagaccacttattaccccagggaccccgttgccccttatcgcgggtgccttggcataccgggggagcaccagtggaggacaggttgcttaagctcaatttctctgagggagctatagggcttggaacgggggttgacttgtttatcattattagccacacggaagctccagtccattgagattaggagacaaattggcctgaacaggccatccaaaaggtccattattgggatcgcagtcgcataggagcaggtccattgtcgagttcttgccgcgaaccaccgtttttcagcctttccgcgggacttaacgaccccgaaaaaaaagtcaaggacccttgggggctatgctgcaaccttggcacgagagtcgaaccaaagcagacacaccaagagaccacgcgggtttcccccaagcgcgttcggtttaggcgttccaaaccggggaactttttgtgtacagtataagcaagcgaaaggaactagagggtcgggcccggggggcaacacattgggggaccccatttccatcggacgcccgcaactggaggccaccaaagcaccacagtacaaaagcgttgggcacttatatatgtcgccaagggcgcgacatagcagaccaagagggaggtggagcagaaaagtccaaccggggcgccccaaggcgagaaggacgggcagacatcgcgcgtggacgcaagggggggacac

SEQ ID NO: 668297 - DNA, 617 bp, Homo sapiens
actgtagtggaagacagagcaaggaggtagagatggatatctaccccttttttttttgggtagagatgaggtctcactatgtggccccagcggctctcaaactactagcctcaaacaatcctccggcctgggcctcccaaagtgctgggaattggcaggcatgaaccaccgtgcccagccctgggacaactttttatgatgaattgggttatgtatagcataaatgaacctctacactcaggatgctccggcggtagtctggaaggggtgttaggctaacttacagggactggggagaggggggcacctctctttggaaagccggagttctgggcagctctggaagtctggatatgctaaccctcttcccggtgatcctcaaacctgggtaccagtaccaaagggtagagagcttgccttaattcatggtggcctagattctccaacagggtaataatcatttgggggcactcgtaaaacctacgaatgccaagatcccttcccgggagtattagatggagggcataggggtggcacaggatgtctgtctgaccaagtatctcactgctcttatagagagtgggcaacatacttagttgcgtggatgggatctctaa

SEQ ID NO: 668298 - DNA, 152 bp, Homo sapiens
agccctgccacacaacagtctgagcaagagacccttggcagcccctgtttcgtggcagacagcaggtgcctggctggtgacccacggggctcctggcttgcaggctggtgattggtctatagaactgactacaaatacacggaatggattga

SEQ ID NO: 668299 - DNA, 365 bp, Homo sapiens
  misc_feature (125)..(125): n is a, c, g, or t
ctgatggtggaaccaccctttcggagccctagccacagtagaacggtcgtgggaatgtcaaggtggacttaagtttccctctttgtgcctttcgggcgccagaccctattttccaagctgctcanacataaccctggcaaacggttgcccctggcggaggttgcagctcaccctggggtccgggccaactcaaggagggttctgcctccctctgccctttagcctgctccttggttttttgtccctgtcatttttcagtgttctttgtatgtctgtgtatgtgttctgagaaggggtgggaactggaaactattcctagctccagttctaggggatctgatctctcttctgacctctacaggcaa

SEQ ID NO: 668300 - DNA, 828 bp, Homo sapiens
  misc_feature (42)..(42): n is a, c, g, or t
  misc_feature (77)..(77): n is a, c, g, or t
  misc_feature (247)..(247): n is a, c, g, or t
  misc_feature (308)..(308): n is a, c, g, or t
  misc_feature (491)..(491): n is a, c, g, or t
  misc_feature (584)..(584): n is a, c, g, or t
  misc_feature (595)..(595): n is a, c, g, or t
  misc_feature (597)..(597): n is a, c, g, or t
  misc_feature (602)..(602): n is a, c, g, or t
  misc_feature (680)..(680): n is a, c, g, or t
  misc_feature (689)..(689): n is a, c, g, or t
  misc_feature (768)..(768): n is a, c, g, or t
  misc_feature (781)..(781): n is a, c, g, or t
  misc_feature (797)..(797): n is a, c, g, or t
  misc_feature (805)..(805): n is a, c, g, or t
  misc_feature (820)..(820): n is a, c, g, or t
ctcctctcgtatctctttcctaatggctcccagcagtccctnaacaaagcccctttattccccttcttgtgcctccncatgagcttaagtttaaaaaaacaattagctttgtccctccaaactgtgggagcaggactagactttcctggcaggaagaaagctcctcctcggccagtttccgagcctggcccaccactcctcagttcttcttgctcttggcttttgtggccttggcatcaagcgtgcnctgggcatgagtaaggggcttaaaagcatcaagcacaaggactccaggaagcaccagcaanagggcattaatgaagaaaaagtaaaaccagaagtagagagggtggcccagccctccgtgctggaatccgtggcggtgctctgtaaggaagtagagcacatccccatagatctggcccacagaaaccacaagctgtagaatgaagcggaggggatgctgggggagaaaggggataaccaccaanaggctgagtggtccccacaggcaagccgtaatggtttccatgcacactgtaaagttgtaacccaggatgtatcggctgtttcccttggcatantctttccagantngaganaagaaggcttggcctccaagcaggttttcgtagtagagaacgaacaagctctcgatcaccaggggaattaacccacanactgcaaancagcacagggacagttgccgccaagtccccaatgggacaaccgcagcacgacctgaaaacagcaatgtggtcacgactnaaacccctgttanaaaaaagaggccagcnagtttatnccagggggggcggtnataaggta

SEQ ID NO: 668301 - DNA, 388 bp, Homo sapiens
tgatgctactgaaataagccagacagatgaggacatacactgcaggatccacccatgtgaggcccctggagtagtcaatccacagagagagaaagtaaaatggaggtggccaagggctgagggaagagagaagggggagttagtgtttaacggggacggagttttggtttgggaagatgtggagacagatggtggtgatggttgcacaatagcgaatgtatctaatgccactgaagtgtacacttgaaaatggttggccgggcgcggtggctcgcgcctgtaatcctgccactttgggaggccgaggtgggtggatcacctgaggtcaggagttcgagaccagcctgaccaacacggtagaaccccatctctactaaaaatacaaaaa

SEQ ID NO: 668302 - DNA, 302 bp, Homo sapiens
cgcttgcataccctatcccccacagtgagcaggcgccgtacgagtaggtgaaatgcaacttcaatgtggcggaggccctgcgagagctgcggttcaacgtgaaggtagatccgagatagggctctgtgcttggagtgaagaggagtagcaggaactttgagcacggcttccgtatgcataggaaagaactttcacctgatccaggccaacaaggtgcgcacaccggtcagtgggcaagtgtagtcgagtactactcactagtgggggaaagggaatcgaattcctgcagcccggggaatcca

SEQ ID NO: 668303 - DNA, 208 bp, Homo sapiens
tcccccacaatggcagagtataacaagacttcgcagtatctattctgtgatatgtacaacgataaaacttaaataatcacacaataagatatatttatagaaaagtctatcgattgttattactctcgcttcatgcttactgctacctcttactgcttctgcggccgcaggcacatataatagcgcaaagaactgttccgggacggtg

SEQ ID NO: 668304 - DNA, 469 bp, Homo sapiens
actaaattccccgccggtcgacgtaaaacgcactgctaccagagatttcaactggcgtgaacctgcctgaaagagaatcgtgaaaccttattgaagcagacataccggcaaaaggcccgttaaaaacactaatggcataatgccttattgataggcaacactagtcaagcaggtccagttgcaagtactcggcgaccgcttcggcgctgggatgcttgagcttgggcacccttcccaggcatggcgcggggagtcgctcagccagggttgcaaggttctcttccagacgagaggtcttgggatcgatgatattggctacccaacccgccagcggcaaaccgtcccgggcgatggcttcggcggtcagcaacgctagactgatacaacacagtcgcaccgccaccaccaggatcaccggcagcttcagcgcatggggccaggttccacagattgtccgatccgccagggg

SEQ ID NO: 668305 - DNA, 276 bp, Homo sapiens
cctttggccaaaggttgggggtaggtggcccaagtggggtgctctttaggtaaacaacaggagtggtcagagttccctcaaaggatcctcccctccagagccccttaaaaggccgggaccaaaggccctgtgttatgtgtactccccaactgtttggggtgggacatttttgtacttttcgatttggttatgggtcagccattacctgggtcagtccatgattttgttgtaacagttttaaaagtaaataaataaagctgcctgatgtcccctcca

SEQ ID NO: 668306 - DNA, 427 bp, Homo sapiens
gtgtcacccacccccttcataaattgttcctgaaaaatttagtaaaatccagcattgtgagcaccctacgggtgtaattataaaggacgaacatgtgaaagaactctggggtgagcggaaaagaagctagcataatcagctttctaatgttcttgttatacttttacttagatctgtgtgtttctacagcaacatgtttctaaattgctacctcaattcactgaaaaataaacattcagcaagtctcttttttttctggagtgaaaaaacaacaacaatatttgtttaagatgtaagaaaatatccaaaatctatttagatatagttttgtcagaaagaatatcacaaaatagaagccaatattccatattaactggcttaatacaatatgctattctataaaacccaaaaacctattccataagga

SEQ ID NO: 668307 - DNA, 467 bp, Homo sapiens
  misc_feature (108)..(109): n is a, c, g, or t
  misc_feature (115)..(115): n is a, c, g, or t
gttctagacggatccctcaagacgtatcagaagaaaggctgggatggatatgatgtacagtggggaatgtacgacggacttagatatagcatacagattgggaaaaannggtggngaggtgtgaaggctatgagtcctctgaagaccagtatgtactaagaggttcttgtggttaggagtataatttggattatacagaacttggtctgcagaaactgaaggagtctggaaaggcagcacggattcgcctctttctcggattataattataggtggtcctcggtggattcctgtaacatgagtggattgattaccattcggggtactcctagggatcgcctttgtagtctataagctgttcctgagtagacgggcagtattctcctccatcgtactcatgtgtatcctgcattttcccaccgttaccagagatgcaccaattcagtaggacctcctcccccaggatt

SEQ ID NO: 668308 - DNA, 155 bp, Homo sapiens
gattgtagacattttttgtagaggaaaaactctgaagcactttcacactttgttcaatatcagggaatttatattgaagagaaatcatgcacactgtagtaaatatggcaagccactttttcaaaccctccagcttagagaccagagttcatcct

SEQ ID NO: 668309 - DNA, 914 bp, Homo sapiens
ggattgcgcttgatgtctcacagaaagtactcccggctcccagtacatgggtcccgtcggcttcctgccatcggaagcgcagtcagcaggcatcgtgggaatgtgaagagcttccctaaggatgacccgtccaagccggtccaactcacagtactttcctgtggatacagacggctggcatgactcacatcgtgcgggaagtcgatagtgccgggatctcccggttgaacagagaagggaggtgtgctgggtaaggctgtgagcattgtagagacacccaccccatgggtgggtctgtaggcgtcattgtgcggctagcgtggaaaatctccctgcgaggactcctctcggcaaccatttccacagtacctggtcctttggctgcagacaatacttcaccgatgcattgacatgacaacgaaagcgtgcgctgtgtctactggaggaaattcggcgcactgaaaaatcctaaagggagaggcacagtgccccgtgtttacccatagataactgccacaataagatgcgcagagggatggcaccggagtgggtagacgcacatgccaggtccttgtgccaggaaatgtgcaacgttttctaggggccaccgtcacctcgtaaagtacaagctcaccttggttccacagtcctacttctccggttggcttctaactataggccccaacatccaccaagaacttgcaggcacctttgggttgtcgcctccttgggagcccaagaaagccgacacgtgcctctacacgtgaggagtaaggaggaatcgcaatcgcgctaggaaactgcgatgaaggggatcgtagcttgtaacagaggcacacttcgttggaacctgggcgaccccagtggaagcaaggcatttaaaaccaccgaaagagttaccctaggttgacacc

SEQ ID NO: 668310 - DNA, 470 bp, Homo sapiens
tctaagccctcagcatctcttacctagtctactggaatggcgcataatttgtctctctgcatccaaggcgggtctctctcaaatccatcttattaggttgtccaagtgtcaaacatgcaaatctgatcatgctctttctatacataaaatccttccaaggcttttctatatggacatcgttggcatcacccacagggtaaaattcaagtacctgggcaggacatacatggctctccatcatctggcctccccatctccacacaccatgcctttctcacctccactgctgtgccctctgcctgggcacacattatggagctccataatgtgtgcccagtcacgagggtctcttttctgaacctctgcaatgaatctcagcactttcatcttgctagtctcatggtaggaacggaggccccagaggaactcatactccggggggttgctgttgggcactcgtctgtagtcca

SEQ ID NO: 668311 - DNA, 260 bp, Homo sapiens
ccctcgaaacccagtaacaaactgtgagagtcttcacgttatgtacctattactttaaaaacaaccaaatgatttgggatattcatttcatgcactgtctcacattaatagaacagtcaagcaataaaagggaaattagaagttattggttaacgggtagcatttctgtttggtgagatgatgagatcctaaagtatgatggtgttcatggttgtttaacaatgtgaatgtatttcatgtcactactgggtttcgacggg

SEQ ID NO: 668312 - DNA, 546 bp, Homo sapiens
  misc_feature (30)..(30): n is a, c, g, or t
  misc_feature (76)..(76): n is a, c, g, or t
  misc_feature (78)..(78): n is a, c, g, or t
  misc_feature (93)..(93): n is a, c, g, or t
  misc_feature (110)..(110): n is a, c, g, or t
  misc_feature (128)..(128): n is a, c, g, or t
  misc_feature (132)..(132): n is a, c, g, or t
  misc_feature (144)..(144): n is a, c, g, or t
  misc_feature (150)..(150): n is a, c, g, or t
  misc_feature (297)..(297): n is a, c, g, or t
  misc_feature (315)..(315): n is a, c, g, or t
  misc_feature (333)..(333): n is a, c, g, or t
  misc_feature (400)..(400): n is a, c, g, or t
  misc_feature (403)..(403): n is a, c, g, or t
  misc_feature (458)..(458): n is a, c, g, or t
  misc_feature (460)..(460): n is a, c, g, or t
  misc_feature (515)..(515): n is a, c, g, or t
  misc_feature (530)..(530): n is a, c, g, or t
caaaacaaccatcattctgtcattgcccangcacccagctggtcctctccccacatgtcacactctcctcagcctntnccccaaccctgcccnccccccccccctgcccnagcccagggacagagtcnaggnggagcctggggnagagcnggaagcaggaagagagcactggacagacagctatggtttggattggggaagagattaggaagtaggttcttaaagacccttttttagtaccagatatccagccatattcccagctccattattcaaatcatttcccatagcccagcncctctctgtcctcccccnactaccaattctttggcncttacacaatttttatccctcaaatattcatccctggcccaaccagtcccctgagcctccctctggnggngactcctccacccatgagctccccagagcatccaagaaagagtgcacagagaccngnggaaggaagctgaactttgcagagatgaggacaggtgcaggctagggtacagggnggtggtagaggaganaagttttatttccagg

SEQ ID NO: 668313 - DNA, 682 bp, Homo sapiens
gctttgggtgaggcggttcagccatgaggccttggctgtgcttttctcgggggccctgctgtggctactggcagcccagggacaggcaatgactgtcctcacaaaaaatcagctactttgctgccatccttcacggtgacacccacggttacagagagcactggaacaaccagccacaggactaccaagagccaaaaacaccactcacaggacaaccaccacaggcaccaccagccacggacccacgcatgccactcaacaagcccaaacacacaaacagccatggaaacgtcaacagttcatccaacaaagcaatagccctgccaccagccaggacccctcaattgccactcacagtcctgccacgcacatagtcatggaaattgccacggttcatccaacaaagcaaacaggcacttgccaccagcccaggattcaccagttctgcccaccccagaaaacagctccaaacctctccgagtcctagcccaaagctccaaggagaccattgggagactacacgtggaccaaatggttcccaagccctgtgtccacctcaagcccagattcaaattcgaagtcatgtacacaacccagggtggagggagagggctggggcatctctgtactgaaccccaaacaaaaacaaggtccaggaagctggtgagggtgcccaatcccc

SEQ ID NO: 668314 - DNA, 406 bp, Homo sapiens
  misc_feature (60)..(60): n is a, c, g, or t
  misc_feature (112)..(112): n is a, c, g, or t
  misc_feature (125)..(125): n is a, c, g, or t
  misc_feature (314)..(314): n is a, c, g, or t
  misc_feature (342)..(342): n is a, c, g, or t
  misc_feature (365)..(366): n is a, c, g, or t
  misc_feature (373)..(373): n is a, c, g, or t
  misc_feature (381)..(382): n is a, c, g, or t
agtatgggagaatgagtttttgtgtgtgttttggtgatgttaggtggaggaatattatgngtttcatattctgctattcttgtcctattttcctaatcatctttctatatgnatgactacataantctgagaataccaaaagagacagacacagaaccaatcggattcctttcttcttgaagcttctgcacagcaaaagaaactatcaacagagtgaacagacaacctacagaatgggagaaaatttttgcaacaatgcatgtgacaaagatctaatgtccaacactgataaggaacttaaacaaatttacaanaaaaaaaatctcattagaaagtgggcanaggacataaacagacacttcaannaagaccnatcggccnnaagcatatgagaaaaagctcatat

SEQ ID NO: 668315 - DNA, 473 bp, Homo sapiens
  misc_feature (25)..(25): n is a, c, g, or t
  misc_feature (375)..(375): n is a, c, g, or t
  misc_feature (433)..(433): n is a, c, g, or t
  misc_feature (438)..(438): n is a, c, g, or t
  misc_feature (460)..(460): n is a, c, g, or t
  misc_feature (463)..(463): n is a, c, g, or t
cagccgtagagagctcttgagccanagggaactgatggggttcacgcctgcattccatgctccttgcacgcagtacacgcagttcttaaggagttactggattctcggtgaggacatggcttgttgaaaggaggggagtttagaatggtgccactctctttcaaaattggcccctgcatcttgaggatttctgaaatagttgttcagatgtaaactcagggttctggacgggacaggagccaggcctggtgttgccttcccgtgattccagtgcttgtgggtcagaggaagagggagccagcctgggctacatggatagttctatttagcctgggctacacaagagattgtctttaaaaacaaacacacaaacanacaaaaaatctggtgcagtgtgcctagcccgagatttcactgcctgggtgtgactcantgggntgcacacatcccagtatgtccnagnccatgggttc

SEQ ID NO: 668316 - DNA, 995 bp, Homo sapiens
  misc_feature (701)..(701): n is a, c, g, or t
  misc_feature (714)..(714): n is a, c, g, or t
  misc_feature (903)..(903): n is a, c, g, or t
  misc_feature (931)..(931): n is a, c, g, or t
  misc_feature (954)..(955): n is a, c, g, or t
  misc_feature (962)..(962): n is a, c, g, or t
  misc_feature (970)..(971): n is a, c, g, or t
gcgtgagatggagtctcactctgtcacccaggctggagtgtagtgctgcgatcctgactcgctgcaacctccacctctggagttcaggtgattctcctgcctcagccttccgagtacctgggaatacaggaatgcaccaccatgcccggcgaatttttctattttcagtagagacggagttttgccatgttggccaggctggtctcgaactcctgaactcaggtgatccacccgcctcagtctcccaatagattacatatattattaatgaattgcttcctttaacaccctattcattgaattttccagtaaaccacaattactaattactcctgaaatcagaaaagaggttaaaaagattttataacagtatcctatgaaatctactactttcaagtaatagtagttgaattaccaaaacccgtcactcaagccaatgactacaattaagatatgagtaacatttcctagataaataaagtcaattaattatatttgcatctgggaaatagagaaagtacatataagccatgattttgaagtcaaaagagagagaatatttgccaaggaggggtgagttatagtatgtaattataacatacagaagttttttgtatgctggtaactaattttaatttcctacatttttatgtagatttctgctattcttgtcctattttcctaatcatctttctatatgnatgactacataantctgagaataccaaaagagacagacacagaaccaatcggattcctttcttcttgaagcttctgcacagcaaaagaaactatcaacagagtgaacagacaacctacagaatgggagaaaatttttgcaacaatgcatgtgacaaagatctaatgtccaacactgataaggaacttaaacaaatttacaanaaaaaaaatctcattagaaagtgggcanaggacataaacagacacttcaannaagaccnatcggccnnaagcatatgagaaaaagctcatat

SEQ ID NO: 668317 - DNA, 1008 bp, Homo sapiens
  misc_feature (714)..(714): n is a, c, g, or t
  misc_feature (727)..(727): n is a, c, g, or t
  misc_feature (916)..(916): n is a, c, g, or t
  misc_feature (944)..(944): n is a, c, g, or t
  misc_feature (967)..(968): n is a, c, g, or t
  misc_feature (975)..(975): n is a, c, g, or t
  misc_feature (983)..(984): n is a, c, g, or t
tcctgtgagtttaaacgacccccaagctagccctaacactcagcctggcgttcatccggggggaaaaagactcgctgcaacctccacctctggagttcaggtgattctcctgcctcagccttccgagtacctgggaatacaggaatgcaccaccatgcccggcgaatttttctattttcagtagagacggagttttgccatgttggccaggctggtctcgaactcctgaactcaggtgatccacccgcctcagtctcccaatagattacatatattattaatgaattgcttcctttaacaccctattcattgaattttccagtaaaccacaattactaattactcctgaaatcagaaaagaggttaaaaagattttataacagtatcctatgaaatctactactttcaagtaatagtagttgaattaccaaaacccgtcactcaagccaatgactacaattaagatatgagtaacatttcctagataaataaagtcaattaattatatttgcatctgggaaatagagaaagtacatataagccatgattttgaagtcaaaagagagagaatatttgccaaggaggggtgagttatagtatgtaattataacatacagaagttttttgtatgctggtaactaattttaatttcctacatttttatgtagatttctgctattcttgtcctattttcctaatcatctttctatatgnatgactacataantctgagaataccaaaagagacagacacagaaccaatcggattcctttcttcttgaagcttctgcacagcaaaagaaactatcaacagagtgaacagacaacctacagaatgggagaaaatttttgcaacaatgcatgtgacaaagatctaatgtccaacactgataaggaacttaaacaaatttacaanaaaaaaaatctcattagaaagtgggcanaggacataaacagacacttcaannaagaccnatcggccnnaagcatatgagaaaaagctcatat

SEQ ID NO: 668318 - DNA, 585 bp, Homo sapiens
gcgtgagatggagtctcactctgtcacccaggctggagtgtagtgctgcgatcctgactcgctgcaacctccacctctggagttcaggtgattctcctgcctcagccttccgagtacctgggaatacaggaatgcaccaccatgcccggcgaatttttctattttcagtagagacggagttttgccatgttggccaggctggtctcgaactcctgaactcaggtgatccacccgcctcagtctcccaatagattacatatattattaatgaattgcttcctttaacaccctattcattgaattttccagtaaaccacaattactaattactcctgaaatcagaaaagaggttaaaaagattttataacagtatcctatgaaatctactactttcaagtaatagtagttgaattaccaaaacccgtcactcaagccaatgactacaattaagatatgagtaacatttcctagataaataaagtcaattaattatatttgcatctgggaaatagagaaagtacatataagcctgttcattgtcttttatgtgagatccttcaggaattgcttctacacccttctcat

SEQ ID NO: 668319 - DNA, 1941 bp, Homo sapiens
cccacgcgtccgaacagcccaactactctacaatcaaccaacaacgtcatctattacccatcactgctcaagcccaaccacaggcactgctcactaaggacaaggtctaacacacacaagctaacaaggaactcggcaacactcttaccccgacctgctttaccaaacaacactcaccgtcgtagacactcaccagctatctagaggcaccgccatgcccagctgacacactgtttaacggccgcggctacccctacaccgcctgcccacacacggcgctacgccactaatctccacctatgctctcccattaaactctagggaaccatgctactgacactgcgccctccaccgcacgcggactctcaccgcctgcatccatccatctaaccttctctctacatgccccacgcctgcacaatccattagaaccctctgcccaccgcgctgcaacaacgcacgcgcccaggagacaacgtgcaccagccaagcccaacaacgccaccggcaacgacacaacgtaaccacccgaataaactgcgcaagacctatctacacacgtccgaccttcacaccttgactacgacaccaacgcctcaccccctaacacccacacacccacaaccacgcgcatcccctacaacccctaacccaccacaccctcctggcaccctcccccccaccacctcccccgcgcctctcgccgccgccccgaacgccgtatcgtacgcaaggcccaccgcacacccagcccacaacaccacatcactgtcaacgcccaacgcatagccacacctggcctctacacaagaacgacttctcaaccccccacgcacccttccacaccacgcccggcacacaccgtagcgactaactaagcctcccaccccctctggtacactccaccacacacttacacacctcctgcgacccccaaacccggagctaccagcccacacgtctcaaccccgcctactggcgaaactacccaccaccgcacgccataacacttccccataactcccctaagaaccaccttccccacgtcattccccacaccacaccttaaggcgagacacaacaaccacgaacgcaccatccgacactacctccggaacacatccacgacagacacaaacatccctcaccaaacgacgcctgcccaacaacacgccccaacttcaccacacgccataccgagccactggcacaccaacaccgacacacacaccaacgtacccagcacagacattacactcctgccacctccccaccacccgacaccgctaacgtcccacacgagtctcgcgccacgcccaaacgacacctacgaaaaacttcgccctgcacagcccacgaaacaggagccaccaaacaacacatcggtcccactaactcaccatacaacgcacattctccgcccgcataactgaactatcaccaccgcacacctcacacccacttaatcagccgaacctcccccaactcagtcacacctacgccaacagcgctatccacacaacacaatacacactcccccagcacgacacccatcctagcccgcgcccacacctagacgctaccaccaaccacccactctccacaacctcatcttcatctcaccgctccctcacctcctcactacctctccgcgccacctcccacacctcgccaacgcatgccttcaccccaccctccgcgacaccaccgccacaccccgctccaacttccacgccgaccccgaccactcacgaaccagcccaacacaccacgcccacccaacccgaccgcccccaccccaccgcgaccaccccacaccccacccctccgcccagcacccgcccctcgccacccggtccaccctcgccccctcctcctcccgcagccccccccaccccccacccacccccccccccccccccccccccccccccccccccc

SEQ ID NO: 668320 - DNA, 476 bp, Homo sapiens
taaaatctagccagataaccagcttcatgaactgtatgtatggcagcccatgttctctaatgccactgctctgttttaaaaactcaaaggcaatttttacatatcagataattgtttttcatcacatttgttgtgtttcccatgcaaaccatttgctatgcgatttcattcagtgcaacaacacttgaatttccccaaccagagtgcaactgcaaagtgttcattttcaactcattcataccatcaatcaaagcatccatgacctcatcacggcacattagctcaaaccttcaaacaatagttttgcattcaatcgaatcacaattctatccattgcattccattgtgccccaagttcttggcagtttggttgcacctttcatctaccaattcattcattttcaagtgctgtgcccagttgaacttgcttgcttcaagaaagtccccatagcccaagctcttgaaactattcccga

SEQ ID NO: 668321 - DNA, 469 bp, Homo sapiens
  misc_feature (11)..(11): n is a, c, g, or t
  misc_feature (19)..(19): n is a, c, g, or t
  misc_feature (37)..(37): n is a, c, g, or t
  misc_feature (60)..(60): n is a, c, g, or t
  misc_feature (468)..(468): n is a, c, g, or t
aaacaaaaaanggtggtcnacccttggaaaattaaangtggtcccccaacagcccatgtnatcctccaatgttgtacctccaaacattggaactttttcctactcccccaaagcccagacccacactcccccatagccatggtgcctctgtagaagacaggcagtttaaaaaagacttccagaggccgggcacagtggctcactccctataatcccagcactttgggaggctgaggtgggcaaatcacctgaggtcgagagttcccagaccagtctgaccaccatggagaaaccccgtctcctactaaaagtacaacattagacaggcgtggtggcgcatgcctgtaatcccagctacttgggaggctgaggcaggagaatcacttgaacccaggaggtggaggttgcagtgagctgagatcgcaccattgcactccagcctgggcaacaaaagtgaaattccgtctna

SEQ ID NO: 668322 - DNA, 155 bp, Homo sapiens
ccttctactttttcttcttctcctttcctctttcttcttcttccttctcctcctttcttcttcttattctcctcctccttccttctccttcgttcttcttctccttttcttcttccttcgtcttcttcttcctcctccccttctgtcgtcttctc

SEQ ID NO: 668323 - DNA, 499 bp, Homo sapiens
  misc_feature (158)..(158): n is a, c, g, or t
  misc_feature (166)..(166): n is a, c, g, or t
  misc_feature (200)..(200): n is a, c, g, or t
  misc_feature (223)..(223): n is a, c, g, or t
  misc_feature (249)..(249): n is a, c, g, or t
  misc_feature (253)..(253): n is a, c, g, or t
  misc_feature (461)..(461): n is a, c, g, or t
  misc_feature (492)..(492): n is a, c, g, or t
  misc_feature (499)..(499): n is a, c, g, or t
gactttggatccttcctgaggacgtggagaaaacttgctgctgagaaggacattttgaaggttttgttggctgaaaaagctgtttctggaatcacccctagatctttcttgaagatgtgaattagattacagcgatggggacacagaaggtcaacccnagctctgntattttgcaatcacaggttgctacaaatcgggcncttttccaaattttgggctaccnacacttgggggtcatcaatgctcctngagnaagatcataaaggaatttatcaataaaactttgacggacaagggaaatgccccaccctctgaggtgctgctcacgtctctctggtccttgtctgtggccatattttccgtcgggggtatgatcgggctccttttccggtcggactcttcgtcaaccgctttggcaaggcgcaattccaatgctgattgtcaacctgttggctgtcacngggtggcttgctttatgggactgtgtaagtnacctaan

SEQ ID NO: 668324 - DNA, 1091 bp, Homo sapiens
taaattccaatcgggaatcaagaaagcgggggattctgggcaaatgggtgccttgtggccctccccatctcatccctgggtctgggtcccctgttggcctatagcccttataccctgagcaccaccccaacagatctgggggaccagccccctcgccgtgccgtggtgttcttcttcccacaaacccctttaaatgtgggagagggagaaagagagagagaaagggagaggggagaccgtgcccccttccatcaggacattcgtggagagggcccgtcccccagtgggctttttaccctttccgcgtgggggacccttcttccgcgcgaaaacatttggcgttaaaactcaacaccgtgagattaaaactacagagttttacatatgtgaagagccccccaaaaaagaaaaaagaacaaacaaaagaaaaaaacaaacagaagaaaaaaaaaacaaaaacaaaaacacaaaaaaagaagaggggcgccgaagcacaaagaagaacaacccaagagggcgacacaccaaataacgcccccgcacgcaagataatagagaaaaaggccgccacaaagaggggacaacaaacaaacagacacaccacacagacggaggggagagcatcaaaaaaggcatagtaaacgagagaaagaacaacgcacccacacggcgacgacaaacaagaaagagcgcaacgacacaacgcgaggagggggagacacaaacacgggcgaccaaacacaaacaagaaaagaaagagacgcagaagggcaacaacaagaacagaacgcagagaggtataaacaggggaacaaacaagcgaaaagagagatggacggaagacaggctacaacagcaatcacaacagaaccaaacccgggggggcacacgacacacgaaaaagcaaccgaaacgagcgaaccacaagcaaggaaggagagggcgagagaaacggacagacgaggaggcggagcgcccaccagacaaacacaaaaacagaaagaacaagaacacacgcagcgaagaaggaggaggaaaacacaacacaaaagagaacgaaaaaggacaagagcgaacgcaggaaaagacgg

SEQ ID NO: 668325 - DNA, 724 bp, Homo sapiens
agcggggctgcgcgggatgggccgggccaggccaaggccgaggcgggagcggctgcgagaggcggtgggacgatgacggtccctcagcccagtcaccatgtagcacctagagcatgatcgagccttggcgaggctattcttatgcatggtgtgtgtcgggaaggaagctcaggtgcctagttctcacattgacttggtaaacagaaatgccgttccatacatctgcataagtactacctagaagggctgactgttggctatggaattcggatgtcacgtactagtgaccacacgaggtccctacatggctgcgaagtcatggaggtgcctgtgggcgagccatggggcacacgagtgtgccctccccaggcttgtccacagtgctcgagcctccttccgagggttcatcgtgctagttccattggtgaacagagttaaacatcaagcatgaaaacccgggagagaggcagttgacacaaggaggagagcagttgagattcgtatacggacgacgcagagaattcctcgtctgggcagtgtgcttgaagaggtaacgattcgcaaggcacggaagcaaatggtgattgaagtagatcgcagggctaagtctgtcaggcggaaccctcgctaggcaccgaagacccacacgaatggatgaacgtccgcaatttaccatacgcgtgggtatggccattcgagtggagttgggtacctttggacttga

SEQ ID NO: 668326 - DNA, 180 bp, Homo sapiens
accgcgatcgaaccttatttcgcgtctggatgcgacatctgtttacaaaaatcatcatctctgaacattcaggaccgcgcttgaggaaaaatattgtccatccagcgcgccgccgccccatcccccgtgccaccaccactgcctccatatatatgcgaaccgagcccgactgggcggccg

SEQ ID NO: 668327 - DNA, 760 bp, Homo sapiens
  misc_feature (439)..(439): n is a, c, g, or t
acttcatgaatcagtctggggcagctcccgataatcgccgacttaatatgctgcaacaaaatgtagaatggtcagacagaatgaatacgtatggcctacgtagcccataatgggtccagatttgctgcccagatgcgtatgccaccaacttacacaatctcttcgttcgcagagctgttcagatgtcgaaatgtggcatagggaatgatggacctctagtagctgagatgcaagaccctaagaggaagtctagatcttaatatacattcgctctcacatgtgacagctgtcccatctgctcatttggttggcactagactggtggcagaggcttctagctgactcgctcagggattctcacaatagccgatatcagaatgtgtgctgaaggaacgtgtctcttcatctcatatgatagcgggcaaaggagaggaacctnctgcctttagacaatataagtaaagtgattagagtgctcgcgttaccttgacacatagtttttcagtctatgggctcagttactttagatggcaagcatgcagcttatactaatagtaatttgtaaagttggttggataagctatccatgttgcaggttcatgcattacttctccataaaacatatgtatttaccacaacattttgtgacattccttctcccatctcttccgtgccatgcattgtaaataggttcttcttgttgtgagattcaatatggaatttctcctatgctattgtcaataaaatattattgcgctaa

SEQ ID NO: 668328 - DNA, 116 bp, Homo sapiens
tcgggggatgtggactaataggagaaatgcactacactgattcagcagcttctaagcaacagagaaagggtaaggagctatgatgagttgtgggagacagaacacataatggggta

SEQ ID NO: 668329 - DNA, 541 bp, Homo sapiens
  misc_feature (518)..(518): n is a, c, g, or t
  misc_feature (525)..(525): n is a, c, g, or t
gaacgggtgatgcggttggccggatcagatctttgaaaatctgtttctgaatgcagttcctggcttgtgccaagggaatcctcactagcggccccaactcctctgttatctccaagtcccagttttcccctgtgatctccaatgctgagcccagagcacagagagagcccccatctcaccccttgctagccctggagggtgagtttcctggggcttgaagggcgtgtttctggctctactcagatttctgggagaacacaacaagccgatgcatgaaaaagtcccagggcaaggaagacaccagcaaaggtaaggcatttaaagcagtttctttctctttcttttctttctttctttctttctttctttctttctttctttctttctttctttctttctttctctctcttttttctttctttttttttattatggttagctgtcacatacaacttttcttttttggagatggggtctcgctctgtcaccaggctggagtgcagtggcgcgatctcggntcactgnaaccgcatcacccgtt

SEQ ID NO: 668330 - DNA, 855 bp, Homo sapiens
  misc_feature (614)..(614): n is a, c, g, or t
  misc_feature (648)..(648): n is a, c, g, or t
tcaaactgtccgaagaactcaggctgtcattgaagatgctgtggtacctcaggcgtgagcacgctcagttctactgtgtctcatgattcccagagtgtcaccggtcactgaattgtacagtctgggaaggatgaaattagaacccaagtagattactgggaagaatgtgttcggaaagagaaagatttacaagcactcgttcatcgagctatggaagaaaaagacgcaagaaatttaaacacctgaagtttaagtcccaagccatagaaattcgtgaatgggctgtatttcatctaaattcttgtgcacaaatagtgaagattctgaatataccgatgctgagagtgaatggagctgatgaagacactataagcgggttttgtgaagattatacactatggatgtctctactatgtacaggtgatgacttaaaatgcttgagactaaggggagggatgctgtgcccttgtgaaaggctatcatggatttcgaaacaaacagattgactgtgctcaatctaatcttcgatggaaattctaacaattatacgagagtgatcttcttgggggtggcaaaatcgaggaagggaagacagcgcgtgcctttacatccangattggtgactcattggtaaacacacaaaacctncgacacaccttggagttgctcacacccaattctataaataaagagctaaagaggttaaaaaatccggaattaacccctgtggagagtaccaccgcgtttggaagattaatcgcggtttggtcccattgtttcacacaggtattctttttcgccccgaccaagtctgcttctgttctgttcgacatgcaacgacactagatgttggcg

SEQ ID NO: 668331 - DNA, 127 bp, Homo sapiens
cgctcatctggaacttttgtagacaagatggcagctatgggtggttggaggaggaacatataggaaaaatcagagccaaatgaaccacagccccaacaggcacagttgaacaatggactgattccag

SEQ ID NO: 668332 - DNA, 113 bp, Homo sapiens
ccgtgttctgtagatttggctctgctggagcatgtctcgggatatgtacaggagcagatcctcagagtcaagccacaccacggtataagattgagatactctggtactcaact

SEQ ID NO: 668333 - DNA, 104 bp, Homo sapiens
  misc_feature (4)..(4): n is a, c, g, or t
  misc_feature (84)..(84): n is a, c, g, or t
gagncaccaagacggcccagtcacagaggaaaaacccgaacacgacacagaacatagaaggagagtccaggccagggacaaggngggggccacccccgcgggcc

SEQ ID NO: 668334 - DNA, 651 bp, Homo sapiens
gggacaagtcgccggcggcgcccgacggagcaggtaaaatgtggataatacggccgggcgcggtggttcgtgcctgtggtcccggcacttgggagaccgaggcgggtggattgcctgaggtcgggagttcgagaccagtctggccaacatggtgaaaccccgtctctactaaaaaatacaaaataaatttgccaggcatggtggcatgcgactgtaatcccagctactcgggaggctgaggcaggggaattgcttgaaccaggaggtggaggttgcagtgagctgagatcgcaccactgcactccagcctggatggcagagcgagactccgtctcaaaaatacataaataagtaaaaaaacaaacaaaaaaaacaaaaaaaaaaaaatttgtgggggggcctcgggccccgaaaaaagctttttgaaaccccaatggcgcggtggggcgcggcgggcccccgtggtgttaggtcgcacagtgtcgccacaacggccgtgtcccaggagaacacgcgggccagaaacagatcgggcggggttctccacccccaagaaaaaaggcgccgggggcaccccggcgtctctggacacacatcccgagggaggcgggcaggccacagggggcacacaaagagcgccaggaggccata

SEQ ID NO: 668335 - DNA, 869 bp, Homo sapiens
gaggacacagtggacgcagtgagtggaatgcattacaacacagatggcagtatgctttctcagcagtccacagataaaaccgtggctgtgtgggatagtgaaacaggtgagagggttcaacaggctaagagggacatatcttcctttgtgaatgtcctgttatcgcaggccaggaggaggccctcatgacttgtctgcagctgtgcggtgagcgatggcaacagttagagcttagggactatccggaaggaagagcaggcatccagacatttcagaattatcgtaccaggtgttagctggtgaccttcaatgacgcaagtgatcagataattctggtggaatagacaatgatatcaaggtctgggaccgtgcgccagaacaaggtaagctacaccatgagaggccatgcagattcagtgactggctgcgtttaagtcctgacggctcttatctttgtccaatgcaatggacaatacagtcgtgtctgggatgtccggccatttgcccccaaagagagatgtgtacagatattcaaggaatgtgcaccaatttgaaaaagaaccttctgagatgtcttggtcaccctgatggaagcaaatagcagctggctcagccgacaggttgtcatgtgggggataccacaagcaggagaatatggataaggctggccggcatgctgggtccatcaatgaagtggattcacccagatgaggcccatcatatcccagcatccgctgacacaacggaatgggggagaccagaaattggctgaagcccaagaggggtcagaactagacgtactagcccatgggccggtaaccccgaaactggcgaaaaggggcatcaacctgcgtccagaaggccggaac

SEQ ID NO: 668336 - DNA, 815 bp, Homo sapiens
tcatcatggtgtggagtgctgcacatacacttgtcttcgagccaccattctggctccgacgctgcttttctgcactggagtatcgagacggtgtggtcagtgttagtgcctgggatcgttgccttccgtatggtaattccaatcccttgacgctggtaatgtgagctgaactcaccatggcctcgcatgccgctacagatcttcactgcgatcaggcgtggccgctcgttgtagttgtcactggagtatgtccgtggagagaatgcctggacatgaaatgcatgtctgcgaagtgctcaatgtgtactctctcagactatgtaacttttgtctgaggttttgattatcctcaacatatcaactgagtgtgtggcggatcatgcgacaggttgtttggcaccagtgacgtgattgtgagatggtgctggatgctttatttggtagggtatacaataactgtggtagttgaagatgggatgtgattgcactcttagcacgtcgtgcttgggtccaatgacggattaaggctacacacataaaggaaggtaaatatacatgagtaaagtccgtgtggtgatactagcctaacttctctagaagtccacaacgggtttatcttaacagagatacaatgtttgtaggaaaaaggttggagaggagtatatcataaattgagaggaagaaatacggaatatgcctggtgcgttaatgaggtagcctccagatggttatgagatcactgtattaataaaggattttgtaactaggccttaaatataagtctctaaaagagacctattatcacgatagattgc

SEQ ID NO: 668337 - DNA, 519 bp, Homo sapiens
aatccaaagagagtcacactgggaggctatgagagcacttatcgcactagacgtaatacttaccgtcattccaagacaggtaggacgccttttcaccaagtgaaagataatcaagctgaacaacctaaagatcactattctcattcggaacctaaaaacgctggctttgatgcgtctgaaggctacaagaatacccgaatgaagtctgacatcattgagcacaccatatcacgtacctgaggcacgtgggaaaggtcagataagtcggagggatgctgtatacaaaggccgctgaccacagcacggcgatggttaaaaggccttgagatgccttgaccatcatttcccaacccatcaacacgccatgggctgtattcaccaggacgcactgtctgacaaagccaccctgtatctgtacttgcagtgctgggcacggtatccatatcattgagaacggctgagctatcacacatacagaggaatgagccctaccactgttcgcacatgaatggtaaagga

SEQ ID NO: 668338 - DNA, 714 bp, Homo sapiens
ggagagaactagtctcagtttttctatgtatatttttctaatttttttatttattttattattatttattttatattttttttttttaaaaaaagtccccttttttttaaaaaaagggcccaaaaaaaaaaaaagcattctctgaagaacgaagagcgcactctgacgcgccaccacccccccctgcggaacgtctggcggaaaccaccaacgccacggcgcgcacgacagtcatcagtgcgtcccctacactgcgcgagccggcgaggagggaggggtgccacacaagcaaagccacactcactaagaagctgaggcactgcctgttactctgatcgagcgcgacacctactgcaacaaaaacaccgtgagagataaactatatgatggatagaccacgccacccaccaccccttcttatacacagagagcaacaacaaggcgagtgcccattctcaaccacttcctacacaacgacgacgctcctactgggtccctaaggacgagcaggggtgacatagcgtgcggacacaaaaaaattatcctctttgttccaccccccagcgagcggcatggcccatttttggtgcttataaacatgctataaagagaggagaaagaagggcggtgtgcactgggggggctccggcagaaaaccaagcccctccacgacacaacagtgtaccccattgcgggggcggctgctcgtttaat

SEQ ID NO: 668339 - DNA, 238 bp, Homo sapiens
tgctgggattacaggcatgagccatcacgcctggccatccttcgctttagatctaaagacaaaaaaggttgaaagttaaataatggaaaaagatcattccatgtaaatagtaacctaaagagaatttgcctggatatattaatatcagacaaagtaaacttgaagtaaaaaaactgatagaagagagagtgaatgagagtctatactgctagacggtacccttcatcaagaagataaa

SEQ ID NO: 668340 - DNA, 416 bp, Homo sapiens
gcagtcaatcacagtctgaaaattgtgcagtattttgagagagagaccacattgacataacttttattacagtatattgttataattgtcctattttattgttattgttgttacttttactgtgcctaatttataaattagactttatcatgctttgggaggcagaggcagaaggatcacttgagcccgggagttcagccaagaccagcctgggccacacagcaagaccccatctctacaaaaaaattaataaaagtaaaaaattaaccaaatgtgatggtgcacacctgtggtcccggctgctcaggaggctgaggcgggaggatcgcttgagctcgggaggttgaggctgcagggtgagctgtgattttgccacagttctacagcttgggtgacagaggaagaccccatctcaa

SEQ ID NO: 668341 - DNA, 210 bp, Homo sapiens
gtgctggtgatctagaggaccgtatgtatcccacacgaagtaatgcgtgttggcataaaagagatggttcaaatgaaaatataggctggggcagtggtcatgcctgtaatcccagcactttgggaagcagaggcaggcgtatcaacttgaggtcaggagtttgagacccagcatggggccaacaatggcaaaaacctgtctctacttaaa

SEQ ID NO: 668342 - DNA, 278 bp, Homo sapiens
  misc_feature (145)..(145): n is a, c, g, or t
aaccatccctttgtacacagcttgggggacagctggcagggaaaacggcaccttttcattatgtgtagctactgcagcacagatctgtactccctttggtcggctgttggctgctttcctgaggcttccatccgtctctttgctnccgagttggtgctggtactgtgttatctccatgacttgggcatcatgcatcgagatgtgaagctggactgtgctgctgccgagaccacgccattgcactccagcagccagggtgacagtgagagtccgtctca

SEQ ID NO: 668343 - DNA, 432 bp, Homo sapiens
agtggatgatctcagctcatcgcaacctctacctctcagggttaagtgcttctccggcctcagcctcccgagtagatggaattccaggaatgcaccagcacaccgggctaattttggtctttggagtacagatggggtttcagcttgctggccaggctagtctccgacccctgacctcaagcaatccatccagcttgacttcccaaactgtggggatcataggtgtgagccaccgtgcccagcagtgggtgactttcagggtccctgttggggctcaacattggtaacgctctgcaggcaaatgtgccgatattcattccctcccttgctctctcaagacgcgtcagaataggaggaccagaggcaaatcagaagaagccatctagttcccctcccgtgttgcgactgggctcaggatcgaatatagctccc

SEQ ID NO: 668344 - DNA, 160 bp, Homo sapiens
acacaccccacatgcccacgtggcccacacgtgcaagggtggggttggctgtccttgcccctgcgtgcactgcagagaaccaatgcctgggactctcctggggcaggcaccctgcatgggcctgcaacacctacctctgcttttttggggggcaggggat

SEQ ID NO: 668345 - DNA, 135 bp, Homo sapiens
tacgattgatcttatttagcaaatgcaacagacaagaatatcaccttgatatatataaaaggtagacttaatccaaaagtgtataagctcacagaaaaaatgcaaactgtcaattaatatatactatagtaatat

SEQ ID NO: 668346 - DNA, 432 bp, Homo sapiens
aaacacttacaatggctatatgtgcaaatctgtaggtgagttatttgggattccttcatttaaataaaaatgcaaaaaaacttcatgacttcctttacccccttccattcaaatttttaaagttatttttctatacaaggtaggtacatgggctatacaaagttaaatatacatatttacagtcccacttcttaagcacattatttttttttttttttttacagatcccagagagacggcaaaagatagggagttgggggctggcctttaccgggaagctgggctaatatatcaaatggtgtggcagggcatgccgccagttagtggcactggctattaataaccctgtttaaacatttcagcataaaaataggtactttatatcactaacggtctgaagaacacagagcactgggaaatctcggtttctgg

SEQ ID NO: 668347 - DNA, 488 bp, Homo sapiens
tgcgcctcgactcgccaaagctctacgctgttcctcccaccgtgcactgagaagtgctgaggatttccgaacatcaacctcctctaaccctctgtatgggaattagatttttatcatcctgactgttggggctctctagagctcaggcaacttgcccctgggtagggatgtagcctgcctgcgacctgtgcgaatgaggcttctgttcgtctgtggcttgtatcatctgtgggagcaaacttcagaatgcagtagattccaggtgcaacatttggtgcccggacaagttgtaaaacctgaccttgaggcactgtgaggaccaggtcaccgcgaggaggaggaggtgctcccagaaagataggttttgaggtgagaggccctgctccagagcgcagtgctgggcagctatgcaggtgccagtcagacctcaggttccagctgaggctcaagagggccatgagccccggagtgcagggagtggagagatc

SEQ ID NO: 668348 - DNA, 262 bp, Homo sapiens
  misc_feature (70)..(70): n is a, c, g, or t
  misc_feature (122)..(122): n is a, c, g, or t
  misc_feature (172)..(172): n is a, c, g, or t
  misc_feature (222)..(222): n is a, c, g, or t
  misc_feature (246)..(246): n is a, c, g, or t
  misc_feature (255)..(255): n is a, c, g, or t
cagcacccacttgaggaggtaggaggaagtcagaccgcgagggctggagcgccaccttgtggccagatgnacccttccccggaattgtcagaccattctacagaagttccagcctctgatgncctacagtctgtggtgccagaggagcttcagctgcattataacacaattngtctaccatgaagtgtcagggaccaagtatatgactaatagatgcttggnaggttctgagtacttcagaacaangtctactgnatcctct

SEQ ID NO: 668349 - DNA, 411 bp, Homo sapiens
cccccagaggaaaaagggggggtttttttttttaagcccccaggatgccccctttttcaagaagcgcctttttttttttggggtatccccccgaggcctttccctttttttttgggagcccctccggggtcgggggtttccccccggatctttcccttttttttgagggaaaagtttaggcggccccccccaaaaaaaaattttttttttttttttttaaaaaagggggggggccgattttcttgtgcccccaattttggcttttctttggggagaggcgggcggccctttttccccttggggcccccgaaaggggggggggggggaccccatacaagggggatgggcccccttttttttttaaaccccccccccactggtttttttgaaagaattataatggataaaggg

SEQ ID NO: 668350 - DNA, 610 bp, Homo sapiens
cttgacggtgttctggttgtactcactgttctgtggctgttctcctcagtaaaggccgactcaaaagccattacaacctcccttacaacaaaatggttttccactccattgttgttagaagccagtgagtttttagcagaagacagtcaagagaaattttggaattttgtagaagccagtcaaaatattggatcatcagatcatgacggtaccgattattcctactatcatgcaatattggaggctgcatttcagtttctgtcacccctccagcagaatttgtttaaattttgtctgtcccttcgttcttactcagctacaatccaagccttccagcagatagcagctgatgaacctccaccagaaggatgtaattcgtttttttcagtgcatggaaagaagacttgtgaatctgatacccttgaggctcttctactgacagcctctgaaagacccaaacctttattgttcaaaggagatcacagatatccctcgtctaatcctgaaagccctgtggtgattttctactctgagattgggtctgaggaatttccaattttcaccggcagcttatatcaaaagcatgcagcaaatcaatatgtttcgaatt

SEQ ID NO: 668351 - DNA, 380 bp, Homo sapiens
cggtaccgcactgcatgccagctgggacacacagcaagaccctgtctcaaaaaaaaccaaaacccagcactttgggaggccaaggcaggcggatcacctgaggttagaagttcgagaccagcctggccaacatggtgagactccgtctctactaaaaatacaaaaaagtagccaggcgtggtggctcatgcctatagtcccagctactcaggaggctgaggcaggagaatcacttgaacccaggaggcagaggttgcagtgagccaagatcgcaccactgcactccagtctggttgacaagaacaaaactctgtcttgaaaaaaaaaaaagggccgggcgcggtggtccacccccgtattgccagcctttgggaaggcgt

SEQ ID NO: 668352 - DNA, 902 bp, Homo sapiens
  misc_feature (25)..(25): n is a, c, g, or t
  misc_feature (135)..(136): n is a, c, g, or t
  misc_feature (142)..(142): n is a, c, g, or t
  misc_feature (237)..(237): n is a, c, g, or t
  misc_feature (357)..(358): n is a, c, g, or t
  misc_feature (381)..(381): n is a, c, g, or t
  misc_feature (493)..(493): n is a, c, g, or t
  misc_feature (503)..(503): n is a, c, g, or t
  misc_feature (543)..(543): n is a, c, g, or t
  misc_feature (568)..(568): n is a, c, g, or t
  misc_feature (577)..(577): n is a, c, g, or t
  misc_feature (584)..(584): n is a, c, g, or t
  misc_feature (599)..(599): n is a, c, g, or t
  misc_feature (605)..(605): n is a, c, g, or t
  misc_feature (612)..(612): n is a, c, g, or t
  misc_feature (759)..(759): n is a, c, g, or t
  misc_feature (768)..(768): n is a, c, g, or t
  misc_feature (772)..(772): n is a, c, g, or t
  misc_feature (779)..(779): n is a, c, g, or t
  misc_feature (806)..(806): n is a, c, g, or t
  misc_feature (812)..(813): n is a, c, g, or t
  misc_feature (815)..(815): n is a, c, g, or t
  misc_feature (819)..(819): n is a, c, g, or t
  misc_feature (877)..(877): n is a, c, g, or t
gaaggccacacaggggggagaaaancagaaaatgcaaagcaaaaacaaaaggtctggagtcttagcatcagaagggcaccatatatacatctacagttggtggccaatacaagtcattgccagacagtccttggnngcacanaacagcctagacccagccaagctctaggaactcacggtcccaaggagtctagacgcttgttctgatgctccgaccgtaagaaaaatgtgggagtnatgaaggctttatgatttactcattatagtaataatagcagcctagctaggtacaaaagcagttataaaccatttatattacacagaattattcaggtctccattctatcttatgttgtnnaatttttaattggatttccagtnagttgtttagatgattagtgataataaggaatggtaaatccatagcaccatttcaaagacttgttgtcactgatttctcatttagatgtgtgacgaagatactccacctgtnagggcaagtntgccaatgccacaagccgtgtttttgcaagggctccagtntgggcattttgtccgtgtgcgcgtnaagcttcanacaggtncgggcagcggctgtntctgtnggatgcnctgggtcacccaccagaaaagggcttttggacatttggggtttctacccacactttggttttctaaatgaggtggactgggagggaggtatcttctttcagatgaaagggaaggggcgagatggagttatcttatttctgggtaaanaaaacaaanaaanaaaaaanaaaacaaaaatactgagctggattatnctgttnngntgtnaagttccttagctacttctttaaggctcaacacgaggctgaatggtcaacataaaaancaaacaatactatgtacatatatgt

SEQ ID NO: 668353 - DNA, 820 bp, Homo sapiens
  misc_feature (25)..(25): n is a, c, g, or t
  misc_feature (135)..(136): n is a, c, g, or t
  misc_feature (142)..(142): n is a, c, g, or t
  misc_feature (237)..(237): n is a, c, g, or t
  misc_feature (357)..(358): n is a, c, g, or t
  misc_feature (381)..(381): n is a, c, g, or t
  misc_feature (493)..(493): n is a, c, g, or t
  misc_feature (503)..(503): n is a, c, g, or t
  misc_feature (543)..(543): n is a, c, g, or t
  misc_feature (568)..(568): n is a, c, g, or t
  misc_feature (577)..(577): n is a, c, g, or t
  misc_feature (584)..(584): n is a, c, g, or t
  misc_feature (599)..(599): n is a, c, g, or t
  misc_feature (605)..(605): n is a, c, g, or t
  misc_feature (612)..(612): n is a, c, g, or t
  misc_feature (759)..(759): n is a, c, g, or t
  misc_feature (810)..(810): n is a, c, g, or t
gaaggccacacaggggggagaaaancagaaaatgcaaagcaaaaacaaaaggtctggagtcttagcatcagaagggcaccatatatacatctacagttggtggccaatacaagtcattgccagacagtccttggnngcacanaacagcctagacccagccaagctctaggaactcacggtcccaaggagtctagacgcttgttctgatgctccgaccgtaagaaaaatgtgggagtnatgaaggctttatgatttactcattatagtaataatagcagcctagctaggtacaaaagcagttataaaccatttatattacacagaattattcaggtctccattctatcttatgttgtnnaatttttaattggatttccagtnagttgtttagatgattagtgataataaggaatggtaaatccatagcaccatttcaaagacttgttgtcactgatttctcatttagatgtgtgacgaagatactccacctgtnagggcaagtntgccaatgccacaagccgtgtttttgcaagggctccagtntgggcattttgtccgtgtgcgcgtnaagcttcanacaggtncgggcagcggctgtntctgtnggatgcnctgggtcacccaccagaaaagggcttttggacatttggggtttctacccacactttggttttctaaatgaggtggactgggagggaggtatcttctttcagatgaaagggaaggggcgagatggagttatcttatttctgggtaaanaaaacatcccgggaatccggaccggtacagcgtgcttttttgtacaacttntctatagtgt

SEQ ID NO: 668354 - DNA, 922 bp, Homo sapiens
ggctcagtagaattagaactgactttctgagggccagaactgtccaccactggaatgggctggctatgaaggaggtgattaccttgtcacgcagtgaggtatgcaagaatagcagggattgacttgccacataggcagagtatgtatgactgacgaagcaaacctcaaactattctactagcttggtctagaactaggcagaattgagttcctatccttactctgtttaggttataggtcttagtttcggttttaaatacagatgtggtctcactgtgttgcctaggctggtctcgaactcctgggctcaagcaatcctcccgcctcagccttccaaagtgctgggattacaggctcctgccaccacgcccggctaattttatgtttatgtatagtatggagacagagtctcgctattgtcaccagggctggaatgatttcagctcactggaaccttcgccaactgggttccagcaattctcctgcctcaggctcccgagtagctgagattataggcacctaccagcacgcccggctaaattcgcgtattctgagtaggagacgggggtttcaccagtctcggccaggctgggtctcgaactccttgaccttaggtgatccaatcgccttcattctcccaaagtgctgggattacagcgcggtaagccaacgctgcctggccaggcccaactaacttagcgatttacgtagcacacacgggttacaccaagtagccaggccgcctctgacattctggaacctaagggtatcgagctgcctggcctccaaacgtgtgggactcccgcgttgagcacacagcccgacaatttctcaacatgacactgctcatgggaaccttcggcccaccaattctgtgccacaccccagttcgccctaaacttactgcgagcgaagagctaga

SEQ ID NO: 668355 - DNA, 673 bp, Homo sapiens
  misc_feature (318)..(318): n is a, c, g, or t
  misc_feature (426)..(426): n is a, c, g, or t
ggaaaaaagagaaggcgctgtcccgctcttgctacggtggcctggaggagtggcgaaaccggaacagagaatttatcacttctgggactcacagtcgtgatgtctttcaagagggaaggagacgattggagtcaactcaatgtgctcaaaaaaagaatagtcggtgacctcctagccagttacattccagaggatgaggcgctgatgcttcaacatggacactttgcttgtgccatctgcccccatcaaccgatactgtacaccctgaccatgctgactgcccaccgtgcatgcaataaacatctgtccagcttgcancttttctatgacaataagcatccatgaaaggaaagaaagcataatccaaaacatcataatgaattgataatgtaataaaccaaatcttaaactcctctactaactcanacactacttatcacccagagtactctacacagaactccgcactataacacgtactaccaccttaaatacacttattttacgtcaaaaccgagaatactaatactcataatgagacacatggctctaaaagacttgtccactctacattcttactaatactactcttctatatatcttacttaagacttgcatggaaactttagttcgttcatcacttgatatgactcatctctaccaacttacgcct

SEQ ID NO: 668356 - DNA, 344 bp, Homo sapiens
  misc_feature (53)..(53): n is a, c, g, or t
  misc_feature (100)..(100): n is a, c, g, or t
  misc_feature (240)..(240): n is a, c, g, or t
  misc_feature (277)..(277): n is a, c, g, or t
ccgatgcgctggaaggcaaacatccggctgttccggttgatgtggtgcatcgngcgctgcgtgaaatccacgagcgcgccgatgccgttcgtcgtcagcntttccaggcgatggctgctgaaggtgtgaaatacctggaagaaaacgccaaaaaagaaggtgtgaatagcaccgaatctggcctgcaattccgcgtgatcaaccagggtgaaggcgcaattccggcacgtaccgaccgcnttcgtgttcattacaccggtaaactgatcgacggcancgtgtttgacagcttccgttgctcgtggtgaacccgttgaattcccggttaatggcgtgatccctgg

SEQ ID NO: 668357 - DNA, 858 bp, Homo sapiens
ggatgtgaagtcagtttcttcaattgttgtccaggccaaggtgaaagttccccctcacccttgaaaaaatcagctcattagctcattggctgggcatgattgctcatgctgtaataatcatagcactttgggaggctgaggtgagaggattgcctgagcgcaggagtttgagaccagcctgagcagcatggtgagatgctgtctttacaaaggaataaaaaattgcctgggcgtggtggtgtgcacctgtagtcccagctgaggtgggaggattgcttgagcctgggaggtccaggctgcagtgagccatgatcatcatggcactccagcctgagcaacagagaccttgtctccaaaagataatcaactcattcacaaggccaggttcagtggctcacacctgtaatcctaatcccaacactttaggaggccaagatgggaggatcacttgaagccaggagttccagaccagcctgggcaacatatcaagatcgcgttgcttacccaaaaacacaaacaacacacacaaccaaaccaaccaccgtgtgtgtggggcgcgccgtgggccccccgggagaaggtttttgaagaccccaacgttgcgatgtggggcgcgggggggccgcccaagagggcgtgattgaaaccacgggggcagcaaccgcggtttacccataaaggaaaacgccggggcacacgcgacatagcgggtgtgcgattctcctccaccaagataaaaaaaaggcgccggggggaccacagccactgtttggggacaaacaaccaagaagagagtccgagaggcaagaacagcggcatgtaacacaggggcgtccaaagaggcccgaaattaagttc

SEQ ID NO: 668358 - DNA, 106 bp, Homo sapiens
gctttgcatttatactgatgtgctcagcaaagacagtcttgaaggtcggaggctcgaggggtttccacgtagcccacaattgcccacaaccaccatggttggtgtc

SEQ ID NO: 668359 - DNA, 192 bp, Homo sapiens
gctcggtacagactgtgtacaacgacactttttttttttctggggacatttggagcaatcagttgcagacatttggatggtgttttctctgaacacggcaggtgtctttaaaaacaaagatgacctacccccgttcgtcacccccagagaaggaatttatattcacagacaatagtcgtggttacacattcg

SEQ ID NO: 668360 - DNA, 274 bp, Homo sapiens
tcgccgtaggtcatcagcaagtagttgccgacccagacctcgacctggtcgccggtgaccgggtgcgtcacgtacaggccggtgggcaggccttccttttcacgcgtggccagttcggcttcggtggtgccgcccagcttgcactgttcgatgaaggcggccagcgccggattcgactgcgcggcgtgggtggccagggggtgttccggcgccacggcgcagaaggtcacgcccatgatggcgtcgacgcggccgcgaattttttcgcggccat

SEQ ID NO: 668361 - DNA, 335 bp, Homo sapiens
  misc_feature (4)..(4): n is a, c, g, or t
tccnaaaaattacccttttgggcccctccggttttgggccttttcccccctgttttgtgggaaatgtttctgggggaataggcccccccccttttggggggggtccttttttttgggagggaggccccaaaatcctttttccccctggttctgggaagggcccggggccaaattgggggggttttttcctttttggatttttccctttttaaggggttttttttttttccccgcccaatttttttttaaatgggggggggaccccggtggccttataaagcgggtccttttttgtccccggttgcggggggaaaaaaatttttttttttaaatta

SEQ ID NO: 668362 - DNA, 266 bp, Homo sapiens
  misc_feature (254)..(254): n is a, c, g, or t
caggcaggtgtcagactggctgaagtccacatgaaaaaaaaaaaaaatgtcagttgttcatgtgaccgcctgcacacttgaaaaatcaatatttccaaaacactcttccatttaccattttaaaacagcaaaagaaaaaaatcaaccacctttgacaatgcttttctccaattggtttggcccctttttttttggttctctaaacatttattttaaattcgaaagttccaattttaaaaccattattttccagnttaatttttcca

SEQ ID NO: 668363 - DNA, 985 bp, Homo sapiens
caggtgtatatcgttcagggcacttgttacagatttgagggcgctggagcaagtggacatggggatagtggtgttggaggtctctcttcccaaatatgtaaatagtctataccagataagttgaaataggaaatgtacttgctgcttcatttttgattatgttcattgtgtgtatagcaagccttgtcaccagaagttttttttatatcaacttaaatcgctgctctttagcagccaaacaggagcaaaatgtaaaatttttaaactcgttatgtttaaaggtcacttgttagttgatagttaatgttaaaagttaatttatgaacccacacctgttctgtactgcaccagaggcggccgtgagagggatgcagtgttctgcattctttgaagggattctcctggtgtaaagtgggtgcgcttgttgtcttcattgtcgtgttactttttaataatagacacctaagctgccatgtgttactttttgatggtttttgaggaagagcacagaacaaattttcatttcatattcatagtatgaaagtggtttctatttgtaatgctgcaaatacctaaaggtacattgaacacttggaagggaacactttttgatgctgattctgaactgtttctgattcaggagaaaagatcaatctgtggattttctcccttccggtccagtagctaggcttaatttaccattaggagattgatactatgtgacgttccaattttccctgggaatagctttcgaaagccgcgctttttcaaatggtgctcgcctgcacactcctggacttcgggattctgggtcccctggggcgcgtgtgggtgccctggctctggggggtctcccgtggggcacccctggagttggttatgggcgcccgcacacgtggttggggggcgtcatcgcctcgtgggcgaagcttcgtgggtcggcaacttcctttcgctatctcggctctgtcgcttttttttcttg

SEQ ID NO: 668364 - DNA, 803 bp, Homo sapiens
ttaaaccctgcgtggcgatccctgacgcaccggcgtgatgcccaggtaagacagggcgaccgtggcagagtccatactacttgccttagggatcatccaactataggatgattagtccgcaaatgtgttccttggtgaggcacgcctagatcgataatgtgcggcttcgcatacgacaggattgcagtcagggatcccgtctagtgctcccctatccgtcggcgcaagagctcgtgagtcggctgagtagcggcgaagtaacatccatgattgcgcaatggccactcgcgagggccccctggcataagacaacaccacgctctggcacgacaagcctggcctgccctcagatagatccggcggcgaagctgctgcgcgcctataccgtgatctcagccaacgaggatgcgaccatcaggcatgagagcacctcacgggaacagatgttctgcgtggctcacaccgaaacggggtgtccaggcatgcatgctcccggcttccatggggtgaccaagtgtgctccctaatggtgaacgctccacgtgtgtgccgagccccgcagccaagcaccttggtctgcaggtgcacctttgcagcaacagacccctccgatttttcatccccagggcctttacaggaggtaatgctacccgagcgttaacaactcgtcccccaggggtgcgaccccatacgcagacatccccttagaatctcgacccgtcgccatctgcatcgatcccagacgcacgttgggacggaccaaccacgtggctgaaggcccaagcctgaatgtccacgcctgg

SEQ ID NO: 668365 - DNA, 381 bp, Homo sapiens
aaaacttaaagggggaccccaaacccaaattccccctataccaaaccgatttacaatcaaatacccttcgtttaaaaacatgtaaactaaaaaaccctaacccttcccaaattaaaccccctaaaaacaaatcccctttaaccaatataacgaaataggaaaaaaccccgtcccaatcacctttccaaaaaatttccaaccctaaaacggaatatggaaattttaaactttaattttttgtaaaaattcccttaaaattttaataaaacaacttaatttttaaaccaataacccaaatatccgaaaatcctttataaatcaaaatattctccccaattaaagttcaatatttgcccaattaaaaccaaaatgcccttttaa

SEQ ID NO: 668366 - DNA, 246 bp, Homo sapiens
  misc_feature (38)..(38): n is a, c, g, or t
  misc_feature (54)..(54): n is a, c, g, or t
  misc_feature (169)..(169): n is a, c, g, or t
  misc_feature (190)..(190): n is a, c, g, or t
  misc_feature (226)..(226): n is a, c, g, or t
ctggctgctgctgctgctgcttcgcggaggagcgcagncctggagtgctacacntgcgtgcagaaagcagatgacggatctcccgaacaagatgaagacagtgaagtgcgcgccggcgtggacgtctgcaccgaggccgtggggcggtggagacatcacggacaattgngctggcagtcggggttcggtncgggactcccggcaagaatgaccgcggctggatctnacgggcttctgcgttcatca

SEQ ID NO: 668367 - DNA, 364 bp, Homo sapiens
aaattccccggatttaaaatgggtttttttacttattgaaaggccttttagtgggggttatggggaatattaaagatttttccacccctttccccttttacaggtttataaggtcccatgcttttaaaataggagccagtttaacttccctcttgaatttttttccatttaagtccaacttagttataatttagggttgtcttttaacagcccttcagaaacaaaactgtagaactggggatttgattgggaatggggcttttgcccactttaaaggatttaaggaacggagatataccccaatttttaaattatgggtggtccccagactaaaaataatttaaaaaaaaacccccggtcctta

SEQ ID NO: 668368 - DNA, 638 bp, Homo sapiens
  misc_feature (255)..(255): n is a, c, g, or t
  misc_feature (304)..(304): n is a, c, g, or t
  misc_feature (346)..(346): n is a, c, g, or t
  misc_feature (380)..(380): n is a, c, g, or t
  misc_feature (382)..(382): n is a, c, g, or t
  misc_feature (384)..(384): n is a, c, g, or t
  misc_feature (387)..(389): n is a, c, g, or t
  misc_feature (392)..(393): n is a, c, g, or t
  misc_feature (395)..(395): n is a, c, g, or t
  misc_feature (398)..(398): n is a, c, g, or t
  misc_feature (400)..(400): n is a, c, g, or t
  misc_feature (576)..(576): n is a, c, g, or t
ttatcccagccgggtgacagagtgagacccgtcttaaaacaacaaaaaagtagcagctaacatcaactgaccttttaccaggtgcctattgataccatagtttaatttcttataactgtttcttatttcacttaccaactctgtcttcagttactcccagatttttactgtgtgtgtacagatgaccttttgcttagattgaattgtctccccagaagtaagattactgtgagtcatggtgaatggacattctcnttacccttgatgtaaattgacagggttttgggtgcctcccagctataancttagcactttgggagctaagagaggaggattgctgagccangagttggaggaggcagtatgcagtatggtgagtncntntcnnnatnntntananaattgacaggctttaccctggaaggcttatacacaatttaaacacccctcatagtataagaaagtgcccatttcactgcacctttgccagcacagggtattataatttagtaagtcatttttggtttgattattttacatagataaaagaactcatattactttacttgtcacatntcaacatctttcctcagcttataagctctatttcttttctgtctgtaaatagttatggggga

SEQ ID NO: 668369 - DNA, 1121 bp, Homo sapiens
cgaatagggttcttttatcttgtcaatgcaggttgctcggctcggatcctacgggctagggagctccttgggaatccttgacaacaagaaaggacatgaagtttaggtagtcctagtattatgtgtgccccacgaggaaactttgctcatagccccttagcggcaagaaagggcctaacaagggcatttgctggaatttttggaacccttgaaggaccaagttgttgtttgtacaaggggtaagtccagtttgttagatagtgaaaggtatacgttacgatttgaaaaagggggtataggacgagatagtgtttgcttcattctgggtgtttgttgtcctttagcctccctcctggatgctgcacgagactaatgcgtccgtacacatggatacatgacccttgcatctgtcactataagacgccgttagtaggcctaggtgctacagcagagaccagcgtgctagtagctcctacgctgatcaccttcgacctctacaggcaggctgtgcgcattggcgattgcacgaagcagaggggctcgacgggcgagaacggggctttacaggagagtggattgtgttagtaatcgctggcttgtcaccagggggacataggaaaaatttgtgtacatgctggccttccggtgcactataattctctatcacacgcaatgggcgccaggctaaattcacgcgcgtctctgcaacttgcctgtagtactagaagtagtaagaggttcaagggactgtctgaacacagacgcaaatcacatgggggcgtaacgtgctcgggaagcacgtggggcgtgtgtgtatttcattcgttataacactagtatgttagtacttagcgtgaaacgaaccaaagtctaccctccacggccgctgaggcccttaatcagtgtcgcgacgtgattaaaaacctttgctacattccacggactgttaagcgccggtaggaaagagagaggaggagggggaagagagcaaaccatcggttcttacaggccctggacgtgctcctatgggctagggccaaggtttgtatgtaccacaccatgcatgactacagatgccctcaggtccctgtataacatccgtaggatactgcattgtttgg

SEQ ID NO: 668370 - DNA, 988 bp, Homo sapiens
cagcctgcatcgcaagcacacaccctgcgggccttcaagtctcactgttccgtatgaggaaacagacagcggactgaggaagcgatggccccagagaaagggcccctgtagcctggctctcacacagtattttatctttgattctgaataaatatttttgtggggtttttttttttttttggggggcagttgttggtttaaaactgaccatttggaagaaacacctgggttatcgggggttttcatgcctggtccctggcctctacccccacccctttggagtcggggtgactcatttttcggttgtagagactcgggggcccaggcaggaggtgaaagcagccatccggaaggcccgggggaccctggtgctgtggctcgccttcaggtcaccagctgagcgtgcgataggaaaatctgatggaggcagcaaacgggcaaaaaaaagattccccaccgggcctgggtgcatatgaagtcttcttccccgacaatctggaacgagtgatgatatcagacgaagcatggatgtatgggaagaaggaaggaaaaacaaatatttttatatgtgtgcaagaggcagacaattccaggggtgtggggtacaggagtgtggattgagattccagaaaaccaattccggtgacacaggtaagctcgaccaagggactttggggagccgggtgtgtagcatggtgtgggtgtcccaagccctgttccggggaagaatctgggtgcagcaattcttcagtgaacacacgtttggagcaaggaggcctaaggaatggcttagcgttactgtacggagcaagttgcggtgccgggtttccgaatgtactgtgcctggttggaaacacggccagagaggtatcaacacggacgagtgcgggacacgggggtgccaagaggcgcgaggcccgtgggcctacggcgccagtgaggatacaggtagggtgaccgcgtgtgcgcgctacgggctcaatatcgc

SEQ ID NO: 668371 - DNA, 991 bp, Homo sapiens
ggatgtgactgctgcccgagctgctcggatccagcgacatgtggcgtcctggacattgtcgaccatatcctggaccgcctggcgtaaccttcattattcacggtcgaataggttggcagggtgatgtgtgtcccgctagcggtatcaatattcaaagaggcagaaagggcaatcgaaacgagctagtatggagccgggcgcgtcgtctgccacaaccattgagagttagcagtctcgcacgcgtatgggagatatacactgcaacatgaatagcagtgctaacatgcgtcacatagatcattccgggcaggcactcaaactcatcttgtgaatatacatcatgagcctcgatgaatgcactctttgcatactaaaatagcttgtacacgtaatcctatgagtagtggttcgagaggctttgtagcccgaaatgcggatgagatgctgcaagctatgcgcgagttgcagactggttgtccctatgggccaggtacgcgctggttgcgtataccaatgtattactccccccaactggctcaagagatcgggcagcaacaatctatagtcggtcgccgttcctggagcacgtacgcgaccgacatgcccccgatgatacccaagtagtgagctagcaattcttgactattcaagttaacttatctaccgaagctgtcgacatactcaattaacaacgagcaatacaagcacttgtagtttgtgtaagatcccctgcgcagggaaggaaattagtccatgaaaaccagagtgatatcgccacaaagtggattccttaacagtaagatccctggcgcagtgtgcactgcgtggcgtgggtttcgtgcgtggaccggggtgtactcatgcgaatgtacgaagtctcagattccgtttatggcatgtcctgtgagcaggaggaaggccgggttaccgggggacgtacggtccgccgcctctgccgaagggagactgtggaccaatcacccgggccaaa

SEQ ID NO: 668372 - DNA, 171 bp, Homo sapiens
  misc_feature (27)..(27): n is a, c, g, or t
  misc_feature (77)..(77): n is a, c, g, or t
  misc_feature (98)..(100): n is a, c, g, or t
atttcaataaatctctaataaatattnatatgttttgggtttttttcttcaaaatggatgataacttttgggtaatntgtctttatgttttttatatnnntttttttttttcccccttttatttaaacttttaatcttgcattactttcatgtcttggtggaattcttttt

SEQ ID NO: 668373 - DNA, 243 bp, Homo sapiens
tgcctgactatttgtggtgctgctgacttttaggttgtggctgtgtagagacaggagtctcactccattgcccaggctggagtgcagtcgtgcatcacagctcactatagcctcaacctcctaggttcaattgatcttcccaccttagcctcccaagtagctgggaacgcaggcatgctattggatctatttcactccactaaaaaaggcgataaaaggcaagctggatgtctaagcataaac

SEQ ID NO: 668374 - DNA, 515 bp, Homo sapiens
ggggtcccccccggggggggccgctttagaaatagtgggtcccccggggtgcaggaatttggcccgaggttacctttgttgttttgggggtgaagaaaaaggggccacccgctttcctttatttaggaccctgcccccttattactgcccccgttgttgcctggagacgtaaggaaatgaaaaagttttggaaagggtaccgctttccgatgatgggccctttgggttgggccccaaaagaaaaaaaccctgtgatatttggtgaacagattgtccccccataatattatgggggaccgctaaaaaggggccttgattttttccaaaaagacttcgactttttaaattggcttttgaattgcccatttgaaaaagttttcaatgatatgcttgcaaaaaaatatttttatgagctggggctgcccgttccctcataaaaaaataaaaccctttgcttttaatgttaaaattgggccttccccttaaataaaacaaatggtttgggtagtttccca

SEQ ID NO: 668375 - DNA, 150 bp, Homo sapiens
aatcccggtatagtgtgatcaccttgctccagtcaacggttaccacggatgatcaacactctgtcgagattgcaccatgaagctttgagtgaagctcttcctgagtacaatgtgggctttactgtctagactgtgtctgtcatggatgtt

SEQ ID NO: 668376 - DNA, 494 bp, Homo sapiens
tcgatctaagatcccttgggcccatcagggcactcggcctagttgtgtacacagcggtgatggcatgcagggcaagcggggtgggtcaatgggctagagagaaataacctcatttgcatattcttactactggccttgggaataaagggtatctctctgggcctgggttcctcccacttgatattcacaggtctctgagcagtctatcctctctccttcctggccgggggctctgaggagagtgcacggctggtaggagggccccctaatgtcttgccagggcagtcagtcaataaagaccgggccacttcttggggaaagtcactcctcctgaacctgaatgcacattcaggcacagtcactcagtttaagcacaagcatgtacaacaagcgcttcgggagtcaggggcagtactggtcctgtctatcagaacacggtctgatcagtaagtcttctggcctccctttggagtctagaggctgccatcgtgggt

SEQ ID NO: 668377 - DNA, 926 bp, Homo sapiens
gcctggatccaggcggagggagcacgactccgtgtgtcgaggctggtaggggagcgaggagggccacataagtccagattccatcagctcggctagtaccacaagtgactgaacgtacttctataagctcgccgtgcacttgttccccatacgtacgagggtgacccgccaacgaagctgctacaacgaaggatgctcaggtattcggatactattccagtacagagctgtgtgtggtcccgcgaacgcggtgttgtctggtggtctgctcctgatcctcgcgagctacacgtgtgcactttggccgtggctgtgaaccgtacggtggcccatcacttccctcggttactctacttcactgggcagcaggggggcccgggctccagcagggatgcaggtggtgtctcatggggatgagcggcccgcctggctcatgtcagagaccctgacgccaccttcacacacactttggggccgactacgactggttcttcatcatgcaggatgacacatatgtgcaggacccccgacctggcagcccttgctggccacctcagcatcaaccaagacctgtacttaggccgtggcagagagagttcatatggacgcaggcgagcaggcccaggtacatgtcatgggggctttggactacctgttgtcaccggagtctcctgcttcgtctgcaggcacatctggatggctgccgagagagacattctcagttgcccgtcctgacgagtggcttggacgctgcctcattgactctctgaggcgtcggctgatgtatcacagaccaagggcagcagtatcagctcatttagaactgggcaacaatagggaccctgagaaggaacggagctcggatttcctgagtgccttcgccgtgaaccctgtactcgaagggtacctcatgtaccggttcccca

SEQ ID NO: 668378 - DNA, 242 bp, Homo sapiens
gctacacagccaacgaacttgatagaatgctgtggtgcagactgtgtaaggcatcctacgtcgcctctaccaaataccaaaagtcacaggctatggcttccctacaaccttccgtgctgtgtcatgcgaagatgtaaggcacctagagaaataagccattaggtgtagacaattgagacgttcaattatctacacatacacaccctgcaaggctgagagactataagtatcggcgcaactcg

SEQ ID NO: 668379 - DNA, 702 bp, Homo sapiens
gtgggcaggggtggcagaggaacacgagcagccatctgcccgtacccccttgtcctctctgtgaagcccatggccccgttgtttcccagggaacttgtgagccttcttccgctgtgaacggtcctacgtctatacttgccaatcctctccccctgctgtatgcagccccttccccggggagtttggtgactttcgtctatgtcaccatagtgagactgtccagggggagggaggagaggaaggagcgggatcagagctgtcccaaagagggaaagcggtcgagctattgaggaggggcagaagcagggccggcaaaggtctagctaccttaactaacggtcggtatggagcggagttggggtcaggccctgaacatcgtccgtactctgagaatctgtacaggggaaaaagtacaaggggagcaggaggaagagccaggagggccagaggcagacgaacgagatggagtcattaggggaccagggctgagcgaggcggctaccagggcactagaggtgcttcttgggggcgggggaatgcagccagatgtccccctcccctcttccaccccagctccagcctggtcttgtcttttcatccctcttccccacgacagaagaagcttgtggcccatggcactgtcatcgtgttcctgtgtcccgtgcatgtaccccacaatccacccgttccttttgccggctg

SEQ ID NO: 668380 - DNA, 349 bp, Homo sapiens
cccggggggggggcccaaaacccccttccctttccaggcaaaggtggattttaaccctttgaacccgggccaaaaaaggggaaaaaatcctttttttttcccccatttaaaaaactgaaaaagggggggtttttttttgcgggaaatgaaaccccctttaaccaaaaatggttccccccccgggggggtttttttttttcccccccccttccggaaaaggggttttccccccgaaaggccgaaattttttttttttccccttttttttaaaggggggttttaaaaaccaattttgggaaaatttccccgccccccccttttttttgggggggttttttaacccccttta

SEQ ID NO: 668381 - DNA, 1023 bp, Homo sapiens
gcctagcgtgctcgctcgctcatgctttccttccctccctcggtcttccttcgcacgctgttggtgatgtggcgctcgcgaacagacagggaggcggtggcagaggacacttgtcatggccgcctctaaacctgtggaggcagcgggtggtcgcagccgctgtaccgagctccgggagtggggtgggcggcgggcgggactgttggcaccgggcacgggggggctgccgcgatggcagactggctctggcggtcggggcacccctgctgctgggcgcgggtgccatatacctgtggcgtcggcagcaacggcgccgggaggccagaggacggggcgacgccagacggactgaaaggcgacaacaggaacggaagaacccggagggcagggccaagtccggacccgggcagcaggacaccctgaaggtcccggtgctcacttggacactgacactctcttgatagagaccaaagcagacaagaataaaggcacttacactctttaaagcaggaaattatgaccaagctattcagatgctatactgaggtacttagcattgtgcctacagagaagaatgtgacttatctacatggactcaaacgcccgagcagcatgccttaggaaccagatgcacacaactggaacgcacgggcgcgcagacaggtgcagaacgcgatgaattaagaccgcaactatggtgagaggctcaccttagaaccgggccagaggcccaaggagaaggcggaccagacacgagggcagggagccgcagatgacaacgggagggagattgacgaggggtacaaaccacaccaggcgggggataaggcggcaaagacctcacgaactgaaaccaaggacacgcaaggaacgacagcggccgatgaagacccacgggcgagctaagcggatcacacagagcagagagcgaaacagccagggagacggaggaaacagggaggcaaaatcaagagaacagagacgaaggaaccgccaggaggaggcaggcaggacgcgacagca

SEQ ID NO: 668382 - DNA, 529 bp, Homo sapiens
  misc_feature (415)..(415): n is a, c, g, or t
aaaactttacctttttaacagggggcctcccatatgcccagcaattcccttcctgggtttatatcaaaaagaattaaacgcagggctttaaaaggtgcttataccccagtgttcataccagcattattcccaatagccaaaagttggaaataaccccagtgtcctccaatggatgaatggatatccaaattgtgatatccccatccaatggaatattcagttttaaaagggaatgaagctaggtgtgatggctcgtgcctgcaatcccagcactatgggaggccaaggtgggaggatcacttgagcttaggagtttaagaccagcctgggcaacatagtaagccctcatttctactaagattaaaaaattaccaggtgtagtggcatgcatctgtggtcccagctccttagccgntggggcagaagggctgcttgagtccaggaggtcaaggctacagtgaccataattatgccactgccctccagcctgggtgacaaagtgagcccttgtctcgaaatcaattcgaat

SEQ ID NO: 668383 - DNA, 407 bp, Homo sapiens
aaggtagtttgatttttcattgaattctacaagctaatattgttccacgtatgtagtcttagaccaatagctgtaactatcagctgcaataccatggtgaccagctgttacaaaagattttttcctgttttatctgaaacatactggatttatatatgtataagcgcctcaatggggaattagagccagatgttatgaattagagccagatgttatgatttgtttgctctttttcttttatagttatagcaaaaatatggataatttttagtgaatgcataaattaggttgcgtttcttattttgctttaaatctctggtagtttttccacccctgtgacacaatcctaatagacagtgtcctgtaaatggacacaactcaataaagtcaagttattattgctgtta

SEQ ID NO: 668384 - DNA, 268 bp, Homo sapiens
  misc_feature (42)..(42): n is a, c, g, or t
  misc_feature (67)..(67): n is a, c, g, or t
  misc_feature (126)..(126): n is a, c, g, or t
  misc_feature (143)..(143): n is a, c, g, or t
  misc_feature (202)..(202): n is a, c, g, or t
atcggaaccaatgagccagaaaccagagagagcaggataaanctcaagtccaaagaggagaaaaggnctgccttaaattagattggacctaaacctgggggtttctcaaggcaaaactctcttganctttggggccagattgnccttgtctgtggggctgtccctgtgcgttaatggtcttgtttaggcagcaaccctggtncctggcccactaagattgctggtggcacccaaaccaaaacgctcatttgggttcccgatggggtac

SEQ ID NO: 668385 - DNA, 355 bp, Homo sapiens
gggggttttgggccccccctttgcccccccggaggaaatttccccgccgggggggggtttcccccccggcccccaatggaagctttcccggtgggccccccccctggggggggccccttggggtagggtgggggttttccttagggccccaaaccccccccccctttgggggttttgggctcccttgggtggccccccccccaagtttgccttccctttcctggtcccccggggtttatttttttttttttttaaaaatcctttttaaggttttttttttaccttaaaggggggcctggccccttttttaaaaaaagtttcccttgttttaaaggggttttaaggtccccaggga

SEQ ID NO: 668386 - DNA, 662 bp, Homo sapiens
  misc_feature (523)..(523): n is a, c, g, or t
  misc_feature (531)..(531): n is a, c, g, or t
  misc_feature (567)..(567): n is a, c, g, or t
  misc_feature (625)..(625): n is a, c, g, or t
aagctttcagccctggaatgctcagcatctgccatctaacttccatttaaaacgttttgagcatttgctgatacaggttcctctgtcctttccccattattttcagttccttggccttgcccatagtgatctgtggatattgtctgcatactcttttttagaaacctagagcatcgcagtgtccttaattttcctcttcaaactctatatattcctgagctgatcatccctactgctgttcctacagaactgtgtgactaatcttctatatatgtccctacatctagccatctaggtggagatctaggtacctatctccctaaaattgtacttggtatccacattgacctcaggacagtatgtgataggctcttgtgccttttcgactaggagtttgaaaacatccactcttcatatttattgtcacatttgttgaataatttgggctcttgtccattatgtctcagtcagtggagcccagggtgggcctgagccagagtgtttgtgtccctagttctctttnggttctgntacagctctcagtgacagtgtcattgaggctaacanggacagagtactgctttcagccaccatttgtccaatgagtggctgatcttccagcctnttgctttgagaacatctgtgatatctggcagcatcct

SEQ ID NO: 668387 - DNA, 215 bp, Homo sapiens
  misc_feature (153)..(153): n is a, c, g, or t
  misc_feature (167)..(167): n is a, c, g, or t
gatagatcgagctcggtacctttcttcccacaacactttctcgtgcctatctggaatgccccgatgttactctggactacccctgatgcatacaccacatgaaacatcctatcatcttgtagtgctcattggtgttcctgatgggtggatccntctatgagtctgancctgcatgtgcatgcaatgcttgtgcacttggcctgtctgttattaca

SEQ ID NO: 668388 - DNA, 1436 bp, Homo sapiens
  misc_feature (954)..(954): n is a, c, g, or t
tgttttggcgtcggggtactcacattctgtctgtgtgttctcccccgatggtcttgccgggtgtgtttggtcgcgctttctgccgcagtctgtgtggtggctctttgtcccccgggctccggccttgggcccagggatctgcgcgggtgttcgctgtgtcgcgcggtgtgcccagatcacgctcaggggcccaaggcggcgaattagttgtccggggatgagcccttcgagcgcgcagctctcgggccccgtttatgtggcctgtgggctccctatcgggccgctgtccctctggggttcgtgatgcccctgggggatttaggggcttccggctttcggccttgctgggagggcaccaagggggcatcagccgcctgtggcgtgtgcatgcccgatggcaaccgcttcttgctccaggatgcccgcaaggatgctcgagctgcctgttgctgggatttccggcagttctggttacgcccctgtggtcccctgggttgaggaggtgaccccccatcgacgcgcatgttacttcgattctggacccgaccgggcagttcctaagtgaatggcagcaccgatgccgcgggctgttcttctgtgtggggacaccggacgggcctggcaatagatgggaaagccggagcccctgttgagtttttctggccccacgagaggactgccccacatggcgtgagcctgcacccctagcctgcctttcctggccacgctgcctccggttacgcgtgtgtttcctgaggcccccacgaggaagtggggacgaaggaagaggacctgggccttcccttgctctccaccgcgccaccgtccacaccttgaaatgtcggcttcagcttctggtggtgtgggggggccccagactccacgcatccctgatgatcaccagggcgagaaagggcagggaggaacggagggaggtgtgggtgagctgatatnaaaaggtttttatgataaaaaaaaaaaaaaaaaaaaaaaaaaaaaaaaaaaaaaaaaaaaaaaaaagaaaaaaaaaaaaaggaaaaaaaaaaaaaaaaacaaaaaaaaaaaaaaaaaaaaaaaaaaaacaagaccagaaacgagaacaaacaagcaaaaaagcacagggcgcggagggggggggcgggagggcgccagaaaaacaggaggaaagaggagagaggggagggagagcacaaaagaaaagacgcaaagaagcacaaagggaaaagagaacagacggaacagaagacacgagggggcaggaaagaaagaaagaagaaaaggggagcggggggagagaaggggagaggggagagaaaaaggaggcgagcggagagggggaggacgggaaaggaggagaggagcagagaccggagggacagcggagggggagaggagggggaaggaaaggaacgggcgggggaggcgggggggagaac

SEQ ID NO: 668389 - DNA, 180 bp, Homo sapiens
  misc_feature (118)..(118): n is a, c, g, or t
  misc_feature (132)..(132): n is a, c, g, or t
tacgcgtattgcaagctgcgctgacttcatcactctgcgccttccacctggcttcccctgtcaaaattgagattccccttttccacgtgctcaatgccctgtcttcaaggtggatccntctatgagtctgancctgcatgtgcatgcaatgcttgtgcacttggcctgtctgttattaca

SEQ ID NO: 668390 - DNA, 314 bp, Homo sapiens
ctagctaatattctgctccagtacatgtaccccgttcttctgatacttcgtgggggagagtgcttgagactcagcaccggggcccggaggccaggtgatcgacatgattgacaactaccccgatgtgagacggccagaaggtgcttcccaaggatgacattgagtgcccactgcgctggaagtgggaacatgaggaatggtccacagacctctataccgagctgtctatgaccaaggctgcgagtatagcatcaccatccccccggagcggaagccgaaccactgggtccccgctgataagatgtactacacac

SEQ ID NO: 668391 - DNA, 572 bp, Homo sapiens
taagctcatcagctatggttagtgtaagtgtatttaatgtgtggtccaaaacaattcttcttccattggtggaccagggaagccaaaagattggacacccctgtctagggcaaggattccaaaagttattgttctggtataaaacttgcttttagattccaggaacactgtgtttcaaagtgcaaatttccgtggctccaaattcttcaaagattcagctctctcgtgcacgtttgggacatttttataacaagcaacccctcatgtgattttaatgactccttaagtttgtgacaattctcatagggcctgtggctcttcaaaatgtgacacatgtgcattaccctttgaaaacacaccaacatttttcccatgtgggggtaaggattacattgcattagctctatgtggaaaccaactttaaaaagtgttccaatttttccattattgttgtttgctccttaaaattatgtggtgcctctgagtgagagccccctttcagaattcttacacatttcctcttttaccttccctttttcaaaaaacagccaaatacctcccttatcctttcc

SEQ ID NO: 668392 - DNA, 258 bp, Homo sapiens
cccgggggggggggcctgggggggcccctttttttgtttcccttttttttgtatcccccccttggcgggccccccccccggtggggtggggggttttgtgataattttttctttttttccccgggggtttgacgccaggtttgggggcccctccccgggggcccccgtgccccccctccttttttttttaaaggtttttttttttcccccccgcgagccaaagaaaataaaattggtggtaataatgacattattata

SEQ ID NO: 668393 - DNA, 697 bp, Homo sapiens
aggtcagcactgtgtggcacgtgttccggggcacagggacgcccagcgcatccgccggtaggtccagatggtgtgcccggccggggcaggcgccctggagcctggcgccgcaggcagctggtacctggatgcagggctgcggcgggcctgtcgggaaggaagtggcggcgtgagctagctggagctctgctcaaggcccggccgggagagggccagggcttggtgccatgctaggggctctcccatcaggatgcgatgggccttggtgaggcactaaggtcaggctgtcaaatcatggcaccgtgtcccattctctgcgcatgaaggaccatcgtgcacgctcgtcatttgacatctaagaacattccgtgtgtcgccaaacaccaaaagcggggaccactcaaagggcacaatgtccacgcacacattgaacatggcgcaaccttgctttataatgccgcagataggacacttgtgagcctgttgtgtccaaagcaaggtgcaaggttggccagtggtcgcacacttgctaggggatggccaagatacgaagggattgcaaaagtgacgggcgaatcagagagtggggacacaaggtcacagcacggtgctacagcccaggccccaacttcagcagggggatgacgcctagggagactaggagatacatgatcaccccacaagcacattctgggaa

SEQ ID NO: 668394 - DNA, 229 bp, Homo sapiens
agtgagcgagatcgtgcactgtaccccacctgggggacagagcgagacttcatctcaaaaaaaaaaaaaaatcagttgggcttggtggtgcacattttatagtcccagctatgtgggaggctgaaacaggaagattgtttaaacccaggagttcaaagttacaggaagttaggatcacacaactgcactccagcctgggtgacagaatgagacactgtctcaaaaaaaa

SEQ ID NO: 668395 - DNA, 345 bp, Homo sapiens
  misc_feature (7)..(7): n is a, c, g, or t
  misc_feature (20)..(20): n is a, c, g, or t
  misc_feature (54)..(54): n is a, c, g, or t
  misc_feature (64)..(64): n is a, c, g, or t
  misc_feature (75)..(75): n is a, c, g, or t
  misc_feature (82)..(82): n is a, c, g, or t
  misc_feature (88)..(88): n is a, c, g, or t
  misc_feature (100)..(100): n is a, c, g, or t
  misc_feature (103)..(103): n is a, c, g, or t
  misc_feature (119)..(119): n is a, c, g, or t
  misc_feature (158)..(158): n is a, c, g, or t
  misc_feature (187)..(187): n is a, c, g, or t
  misc_feature (249)..(249): n is a, c, g, or t
  misc_feature (275)..(275): n is a, c, g, or t
  misc_feature (295)..(301): n is a, c, g, or t
  misc_feature (322)..(322): n is a, c, g, or t
  misc_feature (341)..(341): n is a, c, g, or t
  misc_feature (344)..(345): n is a, c, g, or t
aaataantgacaatatgaanctatacatagaacttaggaagtctcatcttcctnaaaatgactntgtggatcccncccaaanccaacncatcctggtttnctncacactggttcatcancagaaggttaccgaggaaggaactaaaggtgtttgcacntcatgttactttttgagtttataaacatnaaaacagaatttactctgttacagaacctagttactgggaattcattacttgccatggactncctttgctaagaaaagtctgaatganaagatggcaggacgtctgannnnnnnagttataattaataaaatctncggagaattgtaaaaaaanccnn

SEQ ID NO: 668396 - DNA, 1039 bp, Homo sapiens
  misc_feature (504)..(504): n is a, c, g, or t
gatgttaggacgaaggggaaggaggagaagcgcttaaagcggtgcggtggtagctgggttgttcgggatgaggggttggtacccagggctgagtgcagtgcccctgacctccctcccgcctcagtggatcatgcccagaggcgagcagcggcgtgacggtagcggtgtgggcaagtgactgtggcggtgccttgccaccaggagacgatgccagtcgtgcccaagtttaccaaccacaaggggaatcatcaatgcataacgacaatctcggccacaaggaaagcccacgttatgggcacttcacctttctcactatcagggctctaggcacgccccccaaagggagaacttgagctggcggtactttaacaacgacgaaagcctatctttggacgcacagttgcaaccagcccccctttcggcggcgcctcacgcaggcacacgcacgggcaccagcagcgcaaacctcgcccaagccgccccacgcaatctcacccaacaccnctctgggcggcaacaccacctcaccacattcaaccccttggtgtcacaaccagcagcctgctcattaccccgcacggcacacattccatcttggaccacagcccagcagccaacactcgtctcccgcgcgcacatccttgcctaccatcgccaacacattgctctcgccccagagggaacaacaacactttccgaccaccattttcggggaactcttctaaccgcacattcccagcgacactgcaccaatccaccaccaccagcggtcgccctcccacttcatcgcacccgccacttcgcgcacgtatatctccgccaccccacccaacacacttgttccgcactaccgaacacgttgcacaccttactcacacaccccttccctctcccatatttccacttccccgcgtctgcacaacttccaccaccggggcacccacacacgtctacaaaacacattctacacccacaccccttatcctgcacgaccacccacccccttacactccacccccacacatacaatttcacacag

SEQ ID NO: 668397 - DNA, 442 bp, Homo sapiens
aaattcggccattatggccggggtatttaaaactcagatgggccacataatggccacggatttccgaagtttggatttggattaccattgccgggattactgggggttaaattttttaaaacctgaccactgggattatggggtttggaaatttagcagaactttaactggtggaaaaaatagacctgaattatgggaaacttttggaaaggttaaatcggatttcaaattaatcatggaaatccaattccatggtaaggttgtccagaaggttttagagattatatggggatgctggaacttgaagtgagacacacatcattgggcatttgagttgaagggtaattaacagtattgctgccgttgttcggaacttaaggacactggacctgttgggcctgtggccacttctgaaagggaaattctttgtggcagataactg

SEQ ID NO: 668398 - DNA, 141 bp, Homo sapiens
  misc_feature (32)..(32): n is a, c, g, or t
  misc_feature (42)..(42): n is a, c, g, or t
  misc_feature (93)..(93): n is a, c, g, or t
caggcggccaccaagtacacagacggggcccngggggcaagntacacaccatcccagcacgctccacccacctcaagaccccggccagtgggntgcagacccccacaagcacaccggcgcctggttttgccacacgcaccc

SEQ ID NO: 668399 - DNA, 112 bp, Homo sapiens
ttaaatagagacggggtttacgccatgtaggaccaggctggtcttgaacacctagacctcaggtagatcctaccctacttaggcctcccacagtagtgctagggattaacca

SEQ ID NO: 668400 - DNA, 320 bp, Homo sapiens
aagaggggggaagatcaggtcatactatctactctcctcatctctgacagttaaagacaacaattacatctaattaaaatgctgagagatcctgagcgtgttagacgcatgaggagagtagatagtatgaacccgatcttactgcctactgtgtaaagccggatgcatcgtagttaaacaaagtagacaacatcattagagcgaggcgtggatgggtgacgcgcctgtagatcccaagctactctgagagcgctgaggcagggagaatggcgatgagacctggaagtgcggagtttgcagatgaggctgaggatggtgcc

SEQ ID NO: 668401 - DNA, 251 bp, Homo sapiens
ctgctatagtgtgtcatttcaggctcccagattggtcatagcaacatgagcggcgaatgtcaggggttacagcattctgatcatagccgtcaatcttgaagtctgccaggtggtgatagaaagtggagcataacggatattggccctggctagtgcgtacatacgacggttggtgaccgctggaatgatctgatctaaggcctcatcgtagggcactatatgctacgcgcaccggtgtatgaacagcgtat

SEQ ID NO: 668402 - DNA, 567 bp, Homo sapiens
cgcgagtgtcctaaaaagttttttcagcacgtcgaacaatcaacttcttccagcccccactctacatcaaaatgtgcagctttgacacgacaggttacgcagtattttttttttcttcagggtccacgagggatagatttatgcagcatctcaaagtcctcttcatgtgggctaatggatttcacattaacctgaactcgggatatctggatggtgggacctctccttttccctggtccttttccctcgcgggcattttctttacagctgctcttcgtataccggcatggttgacacacagatgtggtggatcagttacacccaggcgcttcagatctgccaccgacttatctaccagctcagcatcaggtgctaatgaacttccagcggttcaagagggagaccaaacttcttataagccttgatgaaccttcggatctctgcatcagtaaatccctccacgaggtccttcggaaaactcctcggacgccctctgcgcttgggattcttgtaatcatcagagtcttcggtttcactctcggaagcagaggatctctggggctgcct

SEQ ID NO: 668403 - DNA, 1827 bp, Homo sapiens
ggagacctccacaggggagctgctgatccgctgcttcaactccttcaatgaccgtcaccatggttctggtctcctggcatcatggtggattcgcacccttgatggccagtcactgtgccgtggctggtgtggcgaaggatcgtggagcatggaggatgtggggctgacatcgtttagacccgagcttggagaagctatcaatttctgtgacatgaccatgactggtggcatcaggtctgaatccgaatgggacatccgtggctagctgcctccttcattcgtatgttgccatgcgttcacatccgatgaataagaggcctcatagccgtcgtgtgctgtgatgggacgccactcgaatgaaccgtcgacgtgggcccatcgtgtagcattttgaggaacccatacgtaatccaagctgtcgccgttgcaacagtcgtcgacatcggcatggcattcgcagtgcataggatggcggatgcggcatgggacgaaacagtgatactgggggtgtagagacgcacgagggcaacgtactacaagtggcggcgtcattgagatacccatggcaccggaatcgaagaagagatgcatcccgttccaagccagtgtgaatgagggtggaacgaggagaaaagaaattatccagttgtaggagatgagtaaacagacaaaagttggactatcaaatttagaaaagataagaaggattaaggaccaaagaccaaggggaccaattatgtagaagcaatgtgaggcaatttaaggggaatccaatttgaaacaggaatagcgaatggggtaaccgagtggagacaccatcgaagaggagaagcgctagatgaagagatagtgaagtggtgcctaaggacagagtgagcaaaatagctaaagtgacgtggaagaacggagttcggtgtcgaataacaagatgcactggggaagcagagtaataaatgctattgagaaatagatacagtaacggaatagacataatatccatgggaaaccagaaaactacaaaataatactattatattttagacataccaatatgaggaacgatgatagaggaagaaatggcggcataaaagttttgggagagcacggaggaaggaagtggaaaacacggcagaccgacaagatggtagtcgaacaagtgatgaaaccacccaccgtagagagggggaccaagtaaacaacacctgaccagagaaaacgtgacacggatggagaaccagcacacaacgggaggcgaccagacatggacaacaggacgacgaataagcgaacgacaggaagtgagcaacagcaccagaagtgagcaaaaaacgagcgaacgatggggtacacgacgagaacacatagacagacggacgaaaaaacagacaagcaagagacggacaagagacaaacgagacacgagacgccacgacagcctatacaagaaggtgtgaaacagtagaagcgaaacagcaacgagaaaaaactcagaagaaaaagaaaatcaaagaacacatgcacgccgcaaggaggcaacacttacagctgcgatgtgcgccggagaatcaatagatcaagcatggacgaaagaatcaagagcagacacgagggacatagatgggaacagcaagcaacgcacacatgcagcatgagagacaacagacagagaacgacgaccgccaccacaagagacggagcaacatagacacaaacaagacggcggacggctgacgaaaacacacgaagacacaagaaaagcaagaagctcatcaaagcaggcaaataactaagtaacatgagcgctgccaacaccatgactaagagaca

SEQ ID NO: 668404 - DNA, 233 bp, Homo sapiens
  misc_feature (157)..(157): n is a, c, g, or t
gacatagagatcagtgtgaaggagttgcggacaatcctcaataggatcatcagcaagacacaaagaactgcggaccaagggcttcagcctagagttgtgccgcagcatggtgaacctcatggatcgtgatggcaatgggaagctgggcctggtgganttcaacatcctgtggaaccgctagcagaatgaccttccatgcttccggaattgactaggacaatgcggcagcagga

SEQ ID NO: 668405 - DNA, 924 bp, Homo sapiens
gcgtcgcgctagtctcacttctaggattactagtatatcggtcacgcctcatatcctccctagtatgcctagaaggaataatagtatcggtgttcattatagctactctgcataaccctcaagaaccactccctcttagccaatattgtgcctatggccatactagtcttcgccgtctgcgaagcagtggctgggcctagccgctatatagtctcactgctcgcaagcagcagtagtgggcctagaacgtacgtgacaataagcctaaagcctactccaagtgctatgagacataactcgctgcgcaaacaagtatgagtattaactatccagctggagcagtgtacgttctccaaaagaacagcataattgggaatcaatggcaggcacccacaggcctaattattagcatcagtccccttcttacgtaatcttctgctaaacgcatatatctaacaaactaactcttatttacgcgtggttcctcgcaatacgcattttttcgcttgcctgactcgcctctaacaaacgcgccaccgtccgttaaatacgtagacttacacttggactgtacgtacccgccgtcacaaaagtcgatgggcaaagctcaaagggcgcatctttaatcccaggtgaggaccggctgatgcaacgataagaatcaacgtactacctgctgctatatctaatcttgcctatcaaagtctgcgcttacagtctataacgattcactagtccacaagagctagtcattatatgaatatgtatctttgcgaaagcatgacttatgccccatcatttgggtatcaacacccgatgaggcaaccaggcagaagtcctgaagtgcagcacctaattgctatgctaaaccgtagaaggtccttccctaacgcgtggactaattaactccaaccctaggtccta

SEQ ID NO: 668406 - DNA, 150 bp, Homo sapiens
gagcaatgacatcacgaagggacagtcaggcgaatgttatacacaagctcatcgtctgtcatctccgcgtgagcaacagctacagccagacataacagcttcttcatttggcacttgattgtggacttcacctcatccacgatgatctct

SEQ ID NO: 668407 - DNA, 402 bp, Homo sapiens
gcgattctcctgcctcagcctcccaagtagctgcgactacaggcgtgtagcaccacacctggctaatttttgtatttttagtagagatgaggtttcaccatattggccaggctgttctcaactcctgacctcgtgatccgcccacctcagcacttaggctaaggcaggcggatcacaacatctagagatcctggccaacgcggtgaaaccctgtctgtactaaaaatacaaaataactgggcatggtggtgtgcacctgtgggaggctgaggcagaattgctggaacccgggagatggaggttgtactgagctgagaccttgccactgcgctccagcctggtgacagagttaagtctcaaaatctaggtaagcactaagtgggctttaatacagcatattcc

SEQ ID NO: 668408 - DNA, 106 bp, Homo sapiens
taaccatcacactccatcacactccatcacactccatcacactccatcacactccagcctagtgcaaaagagcaagagtctgtctcaaaaaaaaaaattgtcttac

SEQ ID NO: 668409 - DNA, 313 bp, Homo sapiens
  misc_feature (223)..(223): n is a, c, g, or t
  misc_feature (249)..(249): n is a, c, g, or t
  misc_feature (270)..(270): n is a, c, g, or t
  misc_feature (274)..(274): n is a, c, g, or t
cgtctacgccatgtggtcaccgtaacaccttttctcttcaacagctggctcctgtactttacgaaatagttgctttgtgtataacctcctttgcatgccggagtcctcgtacacaggcactctctgttgggggctctggagccgggtggagacaaaatttcatcaactaccggcccaccccaagggttggcgggcatcagcgggtgaggtccgagaggcgggncaccattagcgggaaggggtcggctntggtgattaggagtagttccncttntcgttcactccagcgtgctgataccagggtaccgagctc

SEQ ID NO: 668410 - DNA, 273 bp, Homo sapiens
ggatttagataaaaaagaaaatggattacgtgatatttagctgttcttcctatgaaaagggatgggtctttcacatgtgacatgcccagatcaagaaactggaaaatgtgaagccatctctattgagatagcctcttagtgttttagagaaatcaagaatttttaaaaccaagaatatccccctttggttttgggtataagtggggtttgtattaaaaaactttttcaatgacctgtataaactatgttttttttaacccccatatatccgta

SEQ ID NO: 668411 - DNA, 943 bp, Homo sapiens
gacgagtgtggcacgtcccctgaaaccacggggaggggagacccatctctaacctcaatgtgcagggaatgcggaacccctgagagtgatgtgcgcccccggaatttctgtcttgaaagacgcacgtcgccaccaggctcgtttaggggacattgtttgggagaacacgccgccaataatttatgatgattgtattcgcagtgcgttgaccaacaccatccggcctgaccacccgtgaggaagcattttatcagtccgtgccgatccgattgtacacactggggccacacaccccacatgcccgagaaggtactcccctctcggggcgaaatttttaacgccgaagtcttctactcaaggttgggagaccgaacttctctctaagcagcaattattgaaggtatagggttgtttcctgctccccccccaatctggtgagcttcacatgggaccgcgttggttcacccacatttcagtcgcggggagttgacacacaggccgccggagccgtctgtatttgtttgagcatgaatgtattatggaatggaattgtgtccagcaatcattttaattaggtctctcccccaccggcagaccaccccactcagggggtgcactcctgttcggcccgacaaccctcggacaacgcgcgcttaatgaatgtcagcaacaatttgttgctccacgttgacgtgtttctgagtatcccagcgcagtggctgatgatatagaggagcgtcctaagattcttgagaccctgaggtacaccagactattgtctttttgtcgaagaatgttctcccgcaccggggcgcacgccaggaggtggagagaaccccgtgttggcaccccacctactctgggacacctgtggctaaaaacccaacaagaggtgtaactgccacgccctggccaaaaaagggaacccccctttaacaaaaca

SEQ ID NO: 668412 - DNA, 141 bp, Homo sapiens
gcccacccagggtgataacttggcccaaggagagaccggccacagttacctgaggagcagacatcatttgggactgtaaggagtttttcacttcgtacccgtcaagctgccaagtgccaggcccttttttttgggcggttt

SEQ ID NO: 668413 - DNA, 1100 bp, Homo sapiens
tgagaacggacagactgcctcctcaagtgggtccctaacccctgagtagcctaactgggaggcacctccaagtaggggcggatactgacacctcatacagctgggtgcccctctgagacgaagcttccacaagaaggatcaggcagcaatatttgccgttctgcaatattcgctgttctgcagcctccattgctgatacccaggcaaacagggcctggagtggacctccagcaaactccaaccgacctgcagctaagggtcctgactgttagaaggaaaactaacaagcagaaaggacatccacaccaaaaccccatctgtacatcaccatcatcaaagaccaaaggtagataaaaaccacaaagatggtgagaaaccagagcagagaagctgcaaattctaaaaatcagagtgcctcttctcctccaaaggaatgcagcttgtcaccagcaacggaacaaagctggccgggaaatgacagaagtaggcttcagactatcagtaataacaaacttctccaagctaaaggaggatgttcaaacccatttgcaaagaagctaaaactcttgaacaacagattagacgaatggctaactagaataaacagcataggagaagaccttacatgacctgatggagcttgaatgaccattggccctaagaactacatggacgcatgcacaaactttcaattagccgattcaatcaagtggcaccaagggattcactgactgcaaatccctgcatgaactgacccgaaagacagtcgccttatcactttaacgggcgaaacccttccacacgccacctgggccgcactatcggaatgccgaccaccgcaccacgcacaccaccggcacactaagcaaacctcacagggtgcagacaccgaggcggtggcactaaccacgcagcgacacggggtcaaccacccgcccgggcgacggcgcacactcaggcatccccgaccgagggcgtaacaggacacggacagaccacgacagcgcgcgcccacgcagccgcgaccggcgcccgaccccacgtcgcggccgacccgcgcggccacgaaaccaaaaaaggagcgagcccgctgcgagcac

SEQ ID NO: 668414 - DNA, 288 bp, Homo sapiens
atggactgactggagcatcctcctcttggtggcagcagctacagtcacccacgcgagttccgtctgaaacagtctgggggtgaggtgaagaggcctgggactactgtgaaagtctcttgcaaggctctgaatacacattcactgtctactacgtccattggctgcgtcaggcccctggcaaagggcctgcatggctgggactcgttaatcctgaagatggtggtccaatttattcaaggatcttcctgggcagactaaccataaccgcagtacggcgggttaccgagc

SEQ ID NO: 668415 - DNA, 503 bp, Homo sapiens
ctctagaggttaccagctatccaagtagagccaatatattagcattaattttgttactttccttttctactcagctctctggtgaggccatggttggaataaaaagctaaaagtaacactcacggaataaaactatgacctttctgaaaactgcactgtgttccaactaattcaaataaatatttcactgaagggtctttaagaaataactatgggctgggcacggtggcttatgcatgtggctcacacctgtaatcctagcactttgggagactgaggtgggaggatcaacctgagctcaggagttcgagaccagcctggccaacatggtgaaactccatctctactaaaaatacaaaaattagcggggcgtggtggcgggcacctgtaatcccacagctactcaggaggctgaggcaggagaatcacttgaacccaggaggcggaggttgcagtgagccgagatcgtgccactgaactccaagctggacgatagagcaaaa

SEQ ID NO: 668416 - DNA, 396 bp, Homo sapiens
cacgaggattcctcagaaaatgcagctcaaaatctacgttgggtctggaaaacagatcattaacaggtccaaggatgggactgaggacactttctacagtcacacgacaagcctgcagctgattaagtcacagatatttctgaataagttggtggtcttggaggaacaagataaagaaaagatactgcgaccagcatatgtttttgctgacaccactttgagagaaggcttctgacaactcctgcagtagatgaagaacatgcactcaaagtaaccggtgcccgacatgatgaccatcttcatcagcacctggaagatgtgtaacgccccccctctcagaaagatcatgtcctgcattctctccatcgggcagggaacgacgcaggacgactctgc

SEQ ID NO: 668417 - DNA, 504 bp, Homo sapiens
  misc_feature (46)..(46): n is a, c, g, or t
  misc_feature (108)..(108): n is a, c, g, or t
  misc_feature (152)..(152): n is a, c, g, or t
  misc_feature (230)..(230): n is a, c, g, or t
  misc_feature (240)..(240): n is a, c, g, or t
  misc_feature (375)..(375): n is a, c, g, or t
  misc_feature (498)..(498): n is a, c, g, or t
taagtctccctgtctacctgcagcttccaatataatcccttcctanaagcacatggatgatctgcccaatatataatgtaaaaattattttaaaatgtactccctcanacttagtttccccggtctgcgaaatgatgtcagtccctcagatntgaatatatatacatacaagtacacacatcatgggactgtgggtgcaaagagtcaaaccttcagccaaggccggacanagtggctcanacctgtaatcccagcactgtgggaggccaagacaggaggaccacctgaggtcaggagttcgagaccaacctggccagcatagagaaaccccgtctccactaaaaatacaaaaattagccaggtgtggtggcgcanacctgtaatcccagtttcttgggaggctaaggcaggtgaatgtcttgaacccaggaggcagaggttgcagagatgagaccacaccactgcactccagcctgggatacagagcaagactccatntcaaaa

SEQ ID NO: 668418 - DNA, 147 bp, Homo sapiens
acgaagaagaggaatggaggagcaacccactgtcctgggcccaaactgtccactttccatttggcaagaactaagaaccccacctgactgcaagggatcagcgaaatgcgttcaccagtcaggaggccacatagccatctactgggt

SEQ ID NO: 668419 - DNA, 746 bp, Homo sapiens
accgaatgggtgttcttcccctctcggggggacaaagcccctttctggaaagtaatcttttttggcccccacccccttcgtggaagctcttatatccgcgcaaaggccgcatctcactacgctgtatgtctgtccacatacacgccttaattgagagggggagagtctttccccgcgagagagcttctcaccccggccgggagaaattcccacttgggagtctctcccacaacgggcggaccactcaccaccccctctctctatacactctcgcgaggtgtgcgcacagactctgtagaccacgcctgggtgaagaacacatccgcgcactcggcgtcaccgaggcgcaccgagaatcttccacggtggcgacaccgccgccggtgtgtgctacgacaccccctgtgggggtgtgatagcagcacacacagagaccaccttcgccccacagagaaattccctcctcacagagaagagagaggagcgccgccacagtagataattcctgggtggggagaagacaacagcagcgccccccagaaaagaactccttgctctcgtcaccgccgaacaggagaagattatcagaaatggtcgttgattgacgggcccacgcggggctccccgcgccacgcgccccacgtattccctcatcggccgctcctcaaggagtcaccacagcattggtgagcaccgccggcgcccctcccctataagagaagtttttgaggctccaacaaagaaac

SEQ ID NO: 668420 - DNA, 863 bp, Homo sapiens
aggatagacaatatcagattgatgctgctatcgtcagaataatgaatgatgagaaagactcttggtcataatcttctagtttcctgaattatataatcagctgcaagatttccagtaaagcctggagatttgacaaaagagaattgaatctctgatagacagagactatatggagagagacaaagacaatccgaatcagtaccactaccgtgggcctgacgctatctgctagacggttccccttcatgaaacactagtaatgtaccctcagagcaggaagcacacctgtgccatttctgggactctgattgatccagctgtggtacattggcaacaggcgaaggaaagggaggtggctcctgggtcatctttcacaaggctcaagacttcaacctgcagatgtatctttttccctccagtctttcctctagttcttctgaaggcatttacattgttgctgtttactctgtgcaaaaataactttgacgattggacgaaagaagatgttactaacagagcaacgttcctttaaaaggtctgtgctgtgtgtcaaaaagctgcaagtcggtcgttctcgtgtgtgatcatgaggtgcacaaatgaagaagaccctagatgcttgcattttgtaagctctgaagattccttaggtatgcctgaagacagatcgctcagaatgatcaggattagagggaaacaagggccttcatggcgtgaacattcgaagagcccggtcaagctggcgaaaggttaagccctaaccctggcctcctgtttctggttccccaagtggacattggggggttcgaaacagggacctggaaccgcaagggggccggggtgggcccccacaaaggtgggcc

SEQ ID NO: 668421 - DNA, 227 bp, Homo sapiens
actactctgttggtgtgtgtagtcttactttgtaatttctctgtgtaaaaccagtgaatataactaaagtgttagtggatggattaaaagaaacttattaggcaagaacaggtaatgtagttatccactgactaccttttaacccatgcagacataataactattctgtgaggtttataggctcggcagccttcagccttttttcagctggtatttcagtgtaaggc

SEQ ID NO: 668422 - DNA, 146 bp, Homo sapiens
ctgaggaacggagctgatgacctaaccagattatgcgtgagacagaaatgaactttgctgggaggagccctgagataagggggtttgttgttgtggcagctagtataaaatcatcctgactggctcactgcctctgtccaaggcct

SEQ ID NO: 668423 - DNA, 185 bp, Homo sapiens
accccggccaattcctcctcctctgtgagactcccacctcagcctcccgagttgctgggattacaggcctgagtcactatgctcagctgctttatgccgagtcctaagggaaaagcgagaggtcaggtgcaacaacactggcaaaagccaggagaacatcagctctaatttcagctgcatcaagg

SEQ ID NO: 668424 - DNA, 276 bp, Homo sapiens
gggggggggtttggggtggggggtttttataaacaaggtttttttttttacccctcagtttgcttgggaacccccccccccttttttttccccccttaaaaaaccccggggccgttcccccccccgggttttaccctgggccgggggggggtttccattttttccccggaaccagtttttcccttttggccttttccaaaagtttttttggtgccctttttaagggggcccccccggggcccggtccggattttccgggttgccccccgggtccca

SEQ ID NO: 668425 - DNA, 250 bp, Homo sapiens
tatgagacagggtcttgctctgttgcccaggctagagtgcagtggcacaatcatagctcactgatacctctgactcctgggctcaagcaatactctgacttcagcctcctcaatagctgagacaataggtgcaagccaccaagccaagctaatttaaaataatttttttagagatgggattttgcagtgttgccaaaggctggtaactttggcctcaagtgatactcctgcctcagccttctgagtaatt

SEQ ID NO: 668426 - DNA, 179 bp, Homo sapiens
aatcagtgtcgtcatgctgctcataatgagatataccctagactgggtaatttataacaggacagtgggaagagtcacagttcctcatggctgggctggcctcgcggaagctacaatcattgcagaaggggaagcatacacattcttcttcacatggcaagcagatcaggtggtggttg

SEQ ID NO: 668427 - DNA, 94 bp, Homo sapiens
tatggggcatcctctttttccaacttggctgcaggaatctttaaaaaatgcttttaacagagtttgaacctattttttaaacccttgcacccta

SEQ ID NO: 668428 - DNA, 1907 bp, Homo sapiens
  misc_feature (1616)..(1616): n is a, c, g, or t
cttctgttgcgcatcttgtagttgtgtgaacaagcagtcggggtgcgtttgtgtatattcgtctgtttatgcgcagcccgccgttccgttatgttggtgttcatgtggggagctttgttcattgggggtgccttctgtggtgtgctcttcttcgttgttgctttcggagtgggtcgttgtttctactggggtgtatgctcactcctgttgtttccgggcccctcctcgaattacattgaggtgtcctctgttggtgccgcacactcactggcgctgtctccccataagataagtatggttctccctggtggaagtcgccctcgggcgggttcacatgggtgtgttccgaccatcactactcgttctcttcggggtgggagtttcctttgttcgttgctggcacaacgaacacaaggcttgtcgcccatcgccctccctcttgtttaagtagaggggggttccgctcgcatgtgtgtttgtaaaacgcccttgtgtcgcatcaccaatggtgcgtgttggtgttatctaagtcgccgttcgccggtggggagaaatatctggggggggtactcaaacacccctgttcttcttctctgttttgtgagggaaagcacgtgtcaaccgactggttgttttcttggtgaggggatttctcctctctgtaggggtgggatctcctcctgggcggcgccttctccacaaatctttcaacgggcgcgggtagtgagtattaaaatccctccggcgggggagggcgggcctccccccctcctcgttgcaacataaacaccacagcgccgcgcggtgggtacttcatcccctcggggggggtctccccgccggggagaacaaccgcggggacaacaacatggggtcaacaacacacccccctcggcgccgtcgtggttccacagcatatccccttcgggggggtgtgtctcgcagagagatgttctctcatagcgggaacacggccctccctggagagcttattaatagggggaacagtggtgttgtgtttttagaggggcgccacaccacgggtgttttctcctcgagataaaaggcgcctggggggagagttctactagaggacgtttctcctcgcttcgctctcatcttgcgctactagaagagccacaacagctctttgtgggggggcgcaccacaacatgggcgaccccacaggggagaggggggagatatgaacagcgccacttttctctcactaacgcactctttttcccctcgttttatccacggcgggcttccctctctggtttcttcttgctgcgctatgtaccccctcggggtgtccctctggggcggcgcgagactcttcacactatatttgtggagacatctcggggtgtgttctctctttcacagagagattattctctggggcttctcacggggtgcctcgcggttgtctgagagggagagctctaaaggggagaagagagactgtgtccgctgctctcgggggtgtgctctgtttctctctctcacagtgtttgtcgtgcggcgttgtggcgtctttctcccccgtgtgtcagaccgcacacacagtggagacgctctcacacacagagagagaggcgcctctctctcgnccacacacacacagaggtgcacatgtggtggtgccccaacccgccccacactctgttgtgagaggtcacctcgagaccgctttaacacagtgaatttaataatttgttgagaaattttcttatacccctcacactatagagaatgtaaaacttccactgagaaggcacacacagagacttttgtttgtttttttttttatttcctatgaggtaaagagccacacacttgagaacctgggaatatatatgtatagactggttaaattaaaaaactcctctgtcacaatgaga

SEQ ID NO: 668429 - DNA, 436 bp, Homo sapiens
ccctagggctaaccagtacctggcgtaacgctcctctaagaatggtatcgatgttgtctgaagcctcctccgaagagttccccaactccaggatccagaacatcagacagtagctgcctaaggaaaaaagaacaattattagcattatatttgcaagtgattccaacagtcaggctctgaagcaagtgaacctttaacatttaggcaatggctaaataactacctaccatattcttgctgactacatacgaattatacgctggacaatttcctctttgtcgcaccatatgagtagtatactgaacacaaatgtattttattcataaatgtgatagaaataggaattataaatacgtggaaagagttaaaaattatgatacattgacaatcatcctatcatctgcctgaaaataataaaataaagacaacaatatac

SEQ ID NO: 668430 - DNA, 373 bp, Homo sapiens
aatttatgccctttttacatgacatgcaccctaccttttcagtctgaagcaagtttcactcctggggaggaatgagactggccccatcgctgcggctaaagcaaactgggcttgaggcatattaacatggcaacacaagaatataacagaaccggtttgatccactcatatgcacagtgggctgtccctgatcattttttatgtgttgctactggagccttcatgttcagattaagaaataatgtgtgagaggaagggcgaaagagccatcttcagaaagaaaaactgtgggccatcctaccttggttgctcgctgtgtgaccacggtgattcggttgcattgtcgtcgaggtggttgcatattacggtgggt

SEQ ID NO: 668431 - DNA, 794 bp, Homo sapiens
atttaccatctcacttctaggaatactagtatatcgctcacacctcatatcctccctactatgcctagaaggaataatactatcgctgttcattagtagctgactctgcataaccctcaagcacccactccctcttagccaatattgtgcctatgccatactagtcttggccgcctgcgaagcagcggtgggcctagccctactagtctcaatctccaacacatatggcctagactacgatacggataacctaaaccgtacgtccaatgctaagaactagatcgtcccaacaattatattactaccactgacgatgactttccaaaaaacacataatttgaatcaacgacaaccactccacagcgcgtaattattagcatctatccctctactattttttaacgcaaactcaacaacaagctatttatgcttgtgtccccaaccttttcctccgagccccgctaagaaccccgcctcctaagtactaactacctggactcctacccctcaacaatcatggtaaagccaatcgccacttatccatgtgaaccactaagtcacgaaagaaagtctctacctctctatactaatctccctacaacatctccttaattatggcattcacagccgcagaactagtcatattgcatatgcttcttcgaagcacacttatgcccacttggttatcatcacccgatgaggcagccagccagaacgctgacgcaggccgtacttcctattctaagcctagtaggtgcccttccctatcactcggctaatttccctgcgaaacc

SEQ ID NO: 668432 - DNA, 157 bp, Homo sapiens
  misc_feature (112)..(112): n is a, c, g, or t
  misc_feature (150)..(150): n is a, c, g, or t
tattaaggatctcggcggcggtgggagataatcattctcatggctcatgtgttcagcagctctcagatctgtgggggcactgagtggctctgcggttggtctagggctggcnaactcataccaattcctctctggcttcatctcctctgnctcacct

SEQ ID NO: 668433 - DNA, 141 bp, Homo sapiens
tagaggatcccgtagatctagcgaggagagaggctccaagactcattaataattaagagcaccccatctgggaagagttataatgatttgtggccaccgggcatgggaagtatgatgaaggtgcttgtggaagggagtgct

SEQ ID NO: 668434 - DNA, 516 bp, Homo sapiens
atgtctccaaatctaacaatgttgaattaatccgtcttttaaatagtcattggtgtgtgtgtgtgtgtgtgtgtgtgtgtgttaattatatctcactatggttttaagtttttttgagagtcagggtcttgctctgccacccagggtggagtgcagtggcgtgatcatagatagtccagtgcagtctcaaactccgggacttaagcaatccacctgtctcaacatcctgagtaactcggaccacaggcacacaacaacatgcccagataacttgtgtatttcgggtagagatgaactcttactatgttgctcaggggggtcttgaactcatgagctcaaaagatccttccatctcagcctccctaagtgcggggattataggtgtgggccatcacacctccctcattgtggttttaattttcatttccctaatgactaatgaatgatgttgaaccaccttttcatgtggtcatctgccattcatacattctctttgaagaaatacttttttattat

SEQ ID NO: 668435 - DNA, 245 bp, Homo sapiens
tcattctccgttactcacctgcagttcactgcactgggtatcacccaaatagcccatcagagctctttataatttctgaaagagagagaaggaactttttaatgcacagtcgaaaataccattgctgatatatcagttctgaagcatctgtgtccagtgtgcacagcatatggtcttttggtccatagcatttcaataaaatgtagcgtaaccagccaggaccaagagtcctgagataagggtcc

SEQ ID NO: 668436 - DNA, 106 bp, Homo sapiens
gcgttaaagtagacatcatctcaggttcgccttccatatagggatatgctctgtatttgtgctatgtcatcttttgtgctcatctgctctgaagatagctggctgg

SEQ ID NO: 668437 - DNA, 145 bp, Homo sapiens
tgaacaatcacttacaataattccaagtaagaatattaagaacaaaaagtaccataataccactaaaatagctaaaatgtaaagacagaatcaaataactgatacacacaacagcatggataaaatatcaaaagctataattata

SEQ ID NO: 668438 - DNA, 343 bp, Homo sapiens
ctcacctgggctgcagggagaaccaggaaggacgctgagtccccgtcaccttcgggctctgaaatttacgatgtgcttccctacgtgttcactttgctcttcctttccaccctgaagggaggctttcctcaatgccagcctctttggaagcaggctttcaggggtgcaagaggaaagttatcttgattcaagaggattccaagaagcagaggcagtgacacacatttttaaagtttctgtggtacctttgggctttgagaacttgatatagctgtgaagaacaagggctttggattgagatggatttgggtttgaattccagttctacttgggagctgtgggg

SEQ ID NO: 668439 - DNA, 441 bp, Homo sapiens
acggaatagatacgaatgcgtcacatgctacacataggtacaaacgcagagctactagtaagggtctaacaaagatcatcatgcttctgagggaacaggacaaagggcaaaagcagacctactgggaagtgtccagcaaagatcacaaagcaaaggacaaaagcagaaccactgataagggtctatgtacattcacgcatgtattgtcttgataaacatcttaaacaacagaaaacagggttcaagagcagagaaccagtctgaccacagatatatcagggcggaggttttctccaccctagtaagcctttgggtactgcaggagaccagggtgtatctcagtccttatcttaaccgcgtaagacagacgttcccagagcagccatttatagaccttcccccaggaattcattcctttcccagggtattactattaatata

SEQ ID NO: 668440 - DNA, 753 bp, Homo sapiens
  misc_feature (431)..(431): n is a, c, g, or t
  misc_feature (471)..(471): n is a, c, g, or t
  misc_feature (478)..(478): n is a, c, g, or t
catatattaggtaatacatagaggtgaatatatgtaaaatcaggattctaggcccaaggcatatttattttcaacatgaacaaatactgtaaaattattctacagaacaattgttccaagttgtacctccaccagcaatgagtaatgacttcaatttgtgtttccaaactcatttaccaatttaataggtagaagtggcatctgtgacagacacagacactgtatatatactgaccccatctttatttctaaaactttaaaaattcctgtctccactatggaaaccttaaaaggtcgaaagtttattccctaggagaggaatccaagtttccagataccaatcatgggccagtcttgcaaggaggcctttgtaaggatagccatctcaagcctgatatgttaactcttttctgcatggtccactcccttgncatttagccaaggtaccttgacagctaagccttttagagntccagantgtgtccagttataacaaattcaatgttaataaaggctatcatagaaagcagttgctttccgccttaagtttttgaatttaagttccgttttatcgtgcctgaagataatttggccaggacatatcggttaagttgatcatcaagttttaaagcttttaaagcgcctgatattcaggttccacatgaagggagcgcttttccaggggcccttatagtcctgaattggtctggatctgggctctaccctttggtggattgcaccctacagttcccg

SEQ ID NO: 668441 - DNA, 281 bp, Homo sapiens
  misc_feature (50)..(50): n is a, c, g, or t
  misc_feature (84)..(84): n is a, c, g, or t
ggtagaattcacaattttttgcaagtacacaatgggaatattcaccaaanataaaccattacctgatttataaaataaactaancaaactggcttctctcacttagcaatatgaatttaaatttcccccatatctcttcatggctttatacctcatttccttttattgctgaataatgtttcattttatggatgggccataaaatgtttatctatgcacctatagagggacatcttggttgcttccaagttttggccaatattaataaagctgttataaac

SEQ ID NO: 668442 - DNA, 1394 bp, Homo sapiens
  misc_feature (367)..(367): n is a, c, g, or t
  misc_feature (379)..(379): n is a, c, g, or t
  misc_feature (389)..(389): n is a, c, g, or t
  misc_feature (402)..(402): n is a, c, g, or t
  misc_feature (426)..(427): n is a, c, g, or t
  misc_feature (453)..(454): n is a, c, g, or t
  misc_feature (495)..(495): n is a, c, g, or t
  misc_feature (507)..(507): n is a, c, g, or t
  misc_feature (545)..(545): n is a, c, g, or t
  misc_feature (550)..(550): n is a, c, g, or t
  misc_feature (552)..(552): n is a, c, g, or t
  misc_feature (564)..(564): n is a, c, g, or t
  misc_feature (575)..(575): n is a, c, g, or t
  misc_feature (578)..(578): n is a, c, g, or t
accacgcgtcgggagattagccagatgtgacggcacctgtggtcccagctgctcgggagactggggcgggagggtcgcttgaacctgggaggcggaggttgcagtgggctgagatcgcgccattgcgctccagcctgggtgacagagggaaaacttcgtctcaacaacaaaaaaaaaagaaaaagaaattacagtcttggccaggtgcgtggttcgcgcctgtgatcctagcactttgggaggctgaggggggcggatcacctggggtcgggggttcgggaccagcctggccggcatggtggggccccgtctctgctaaaagtgcagaaaagttggccgggcgtggtggtgcacgcctgtggtctcngcttcccgagtngctgggactncaggggcccgcancacgcccggctaacttttgtgttnntagtagagacggggtttcaccgtgtnngccaggatggtctcgatctcctgaccttgtgatctgcccgnctcggctcccanagtgctgggattacaggcgtgagccaccggcccggggngaaanangatatgtactancatcttaattngtnataaaatctcacaaaccccctgacatagtctcagagatctgtagggccgaggttacatttggagaacccgtactctagggccaaatccattcttcttgccctggctcacttgtcccccccacgccccgcgctggagccactgctagttcttcagcctaaatggtgctcgccagacctcctctccaactgctcatcacacacagggctcattcctttccctccaatgcaaccaaacgccctcccgccccaccctcccaggctccccactccctcatgtccccctttgccatggctccaccccttgccccctcccctggcgtcgcccgcacgcaggtcgcgcctcgctccatcccccgccagaccgccgcgcgtccctcttgtgcggttcaccacagttgctatttaagctgatcgctgctgcagctccgtcgttccaactgcctgctctccccgccggcatccatggcgctcctcgaggaccagcggaccggcctgtctgctccacctcgctgtccaccccccgcgccccggcccctcccgcgccaccctacaggccccaccccggcccgcgccgcctcccactccccacgctaccctcgctcgcgattccccgacccaaaccgacacccccgcgcgcccagcctcaccgccactcctccgacctccccgccccgcccgcccacacccaccgccgctccacccgcgcctctccccctcctcgtacgcgacctaaccgctgcctcccacccgctcccacccacccccccccccccccccccccccccccaccccccccccccccccccaccccccccc

SEQ ID NO: 668443 - DNA, 778 bp, Homo sapiens
aacgaatactatgcggcagtactcgttgtcatttaagttacagggccgggtttacattgacttaagctggccgtcgtctgacgaggagcctcccggactgtacccctcaccccaactccatcagcatcgatgccggtccccggcaggcccccaagattgcccagatcaagcgcaacctctcctatggagacaacagcgaccctgccctagcacgcgtcctcgcatgcccccacccagaccccctgagctcgcgacctcctccagactccccagcagagccaggcacagcccaggggccatagccgccgagacggccaactggtaccctaaacgctactgcagcgcacacaacaagagccggcctggaacgctgatgctgccacgactggacaccggagaccaaacgatgaacaacctctctgaagaagtctctaggcacgccatgtcctcagtgctgtgcgcgcaggtgcccaggctactgagtgtcccagaaattccagcagttccggggccctctggtgaagcaaaacttgaaccctgatgccaacccacgccccaaagccccaggacctggacagggctcctgaggacctgcctacagccttgtccatcgacggatatcagcatgaagtccgatgaaactctaccaactcaaggccaacagctggcagctaggtgaagacccccgagaaagaggaaggaagagaagaaaccagccctacgcacccaagaagccagcaaaccaagcggcagaagccgcacaaagctaaagccgcac

SEQ ID NO: 668444 - DNA, 432 bp, Homo sapiens
  misc_feature (270)..(270): n is a, c, g, or t
  misc_feature (299)..(299): n is a, c, g, or t
  misc_feature (303)..(303): n is a, c, g, or t
  misc_feature (335)..(335): n is a, c, g, or t
  misc_feature (364)..(364): n is a, c, g, or t
taatttcggtttggggtttcggtctgtacgccaggaagggaggccaggcctgccccaggggagaaaagaggaagtgaagttggacctttatgcttctgagtgggttgagaggctcaaaaggaaactctcggccggggcatctcacagtccctgcaggcgtcaccagcacctggcactgagagggctctcttcccgttcaacagaagcagcccactctgaaggccagacccagatggtgcccactgtggaacactgagctagccagggctnggcagctttgtgcctatgatgctgtaggncctngtgccctgcagccagcagaggacagctctctnggctgggtataaacctccaggagcttctngagaaagccccatgtgccaggactgggcaccaagaaatggaggccaaggtcacagggacggtggaggg

SEQ ID NO: 668445 - DNA, 1251 bp, Homo sapiens
  misc_feature (224)..(224): n is a, c, g, or t
  misc_feature (236)..(236): n is a, c, g, or t
  misc_feature (246)..(246): n is a, c, g, or t
  misc_feature (259)..(259): n is a, c, g, or t
  misc_feature (283)..(284): n is a, c, g, or t
  misc_feature (310)..(311): n is a, c, g, or t
  misc_feature (352)..(352): n is a, c, g, or t
  misc_feature (364)..(364): n is a, c, g, or t
  misc_feature (402)..(402): n is a, c, g, or t
  misc_feature (407)..(407): n is a, c, g, or t
  misc_feature (409)..(409): n is a, c, g, or t
  misc_feature (421)..(421): n is a, c, g, or t
  misc_feature (432)..(432): n is a, c, g, or t
  misc_feature (435)..(435): n is a, c, g, or t
caccggttaggcaggatggtctcgatctcctaacctggtgatccggccgcctcggtctcccaaagtatgggattacccgcgtgagccacgcgcccggtgcaataatctttctttgtttctgagacagagtctacgctctgttgcccaggcttggagtgcagtggcagcgatctcgggtcacggcacgctccgcgtcccgggttcacgccattctccgtgcctcngcttcccgagtngctgggactncaggggcccgcancacgcccggctaacttttgtgttnntagtagagacggggtttcaccgtgtnngccaggatggtctcgatctcctgaccttgtgatctgcccgnctcggctcccanagtgctgggattacaggcgtgagccaccggcccggggngaaanangatatgtactancatcttaattngtnataaaatctcacaaaccccctgacatagtctcagagatctgtagggccgaggttacatttggagaacccgtactctagggccaaatccattcttcttgccctggctcacttgtcccccccacgccccgcgctggagccactgctagttcttcagcctaaatggtgctcgccagacctcctctccaactgctcatcacacacagggctcattcctttccctccaatgcaaccaaacgccctcccgccccaccctcccaggctccccactccctcatgtccccctttgccatggctccaccccttgccccctcccctggcgtcgcccgcacgcaggtcgcgcctcgctccatcccccgccagaccgccgcgcgtccctcttgtgcggttcaccacagttgctatttaagctgatcgctgctgcagctccgtcgttccaactgcctgctctccccgccggcatccatggcgctcctcgaggaccagcggaccggcctgtctgctccacctcgctgtccaccccccgcgccccggcccctcccgcgccaccctacaggccccaccccggcccgcgccgcctcccactccccacgctaccctcgctcgcgattccccgacccaaaccgacacccccgcgcgcccagcctcaccgccactcctccgacctccccgccccgcccgcccacacccaccgccgctccacccgcgcctctccccctcctcgtacgcgacctaaccgctgcctcccacccgctcccacccacccccccccccccccccccccccccccaccccccccccccccccccaccccccccc

SEQ ID NO: 668446 - DNA, 514 bp, Homo sapiens
ggggtcactagcgggtagcaacgctctgacttcctaggtaccaggatatccaggtctgtgagcatctcatatatgggaaaagttgtgcatttcactctagataggaaacacttaagtaaatttcattatccaaaccaaattcagccttctgggacatacctatccctatcctgatataggtggggaaataggattcctcgtaatggcagcccccaactgtaggtgggtgcaaaagtaatggcagttatggccatatggatgcaaaagccgcacttacttttgcagcaccctaatatcttccagactaggaggccaaggtatacagggggctcaccagggggaaaacctctacccttactcaccatttaggacttgaccactatagtggagctgccatccccaccgtggataatagagctgttcctgcttaggccactgcatacaacctacccaccaagtttaacaatctgtcctactttgtttaccctttgtcctactaggccttatggcctta

SEQ ID NO: 668447 - DNA, 1398 bp, Homo sapiens
ggcggagcacggagatctcgccgggttaacggttcacctcggtgtctgcagcaccctccgtttcctctcctaggcagacgcagacccagatggttagagacgttcaccatgtctatctctcactgatccatggccagggagatctctggagtctcgcggcgaatcccactgtctgcatcgttcgatctcgttggacctcgagacaggtctctctcacgagcttgctgtgcccacagttgagtgcctttcaacactggtactctattgagcgagcctaacagctaccggggagacactgactatacgacctcgctagtctcgggggaacgggtggtatcacaacggcatgtatcgcgtagcccatcagggttaagataccctgctttgccacgcgcttgtacacctagaggctctaacgacagaaggacgacagggtagcatcacggattcgagccgagggacaccagacgcaaggacaggacttttgacccataagagcccttgcggttgactccgaagcaacttggcactgggaagcacgacaccactaaaacactacctaacagcctaaatgcgattggccgagaatccgccgcaataccctgggtgcgcgaatcggtccacccgttgacccaggtccattgcgctagacagcctgtgtgctcggtccgagagtgacattcaatgtagctacctatacaccactacctggatcaccctgcccgaaccaattcgcacgtaagaacacactgagcggcgcagagcacaagcgtcatttgacgagagatacactacgaaatgaccatatgtatcacaactgaggaggatgtcggcaagggctccaaaacatactagaggccaggggaaacgaccaattcgtcaatgaccagaaagaaaggcgtaagggcaaacagtacagaacggagcgtccaaacagagtagcgctacccacagagtgaggagagcgccgtgcacacaccatctataaggggcacaggaccatagagcgcaaagtgtgggacagcgcggaagcgctaaaccagagccacctcaggtaaacgcaacaagagtcgtccggagaggcacacacagctctcatggagcaagagacacaagacacaagccacccgccaggacaagtagacacacaacaacactagcacccccccgcaggtccagcgacaaaatgcgcgacaacggcaccaggaacacgccgaagggcagtagcaggggcaagatgagagaaacgcggcgaggcgaggagacgacccgaatagacgcggaagcagtgggaaagccggcacccgaggaggcgggtcagaagacgcactcgacagtacaagcaacaaccggctacgacgacagcgagagcaagaaacaagcaagactcgtaaccac

SEQ ID NO: 668448 - DNA, 86 bp, Homo sapiens
tgggcgcgacctacatgaaaagcagaaatcggttgctgttttgcttctttttccctcttatttttgtattgtggtcatttcctatg

SEQ ID NO: 668449 - DNA, 155 bp, Homo sapiens
  misc_feature (130)..(130): n is a, c, g, or t
  misc_feature (135)..(135): n is a, c, g, or t
acctgccccactgcttcttcgcttctctcttggaaagtccagtctctcctcggcttgcaatgagccccaactgctcccgcgccgctggtgtctcctgcacctgcgctggttcctgcaagtgcaaagagtnaaatnatctgcaagaagagctgctg

SEQ ID NO: 668450 - DNA, 179 bp, Homo sapiens
ggtgtgggaacgccaccttgactccaggctcagtagatctcccacttcagcctcctgagtagctggaccataggtgcatggcaccacttgtggctaattaaaaagattatttgtagagatggggtctccctttgttgctcaggctggtcttgaattcctggcctcaagcagtcctcctc

SEQ ID NO: 668451 - DNA, 403 bp, Homo sapiens
  misc_feature (30)..(30): n is a, c, g, or t
  misc_feature (78)..(78): n is a, c, g, or t
  misc_feature (82)..(82): n is a, c, g, or t
  misc_feature (109)..(109): n is a, c, g, or t
  misc_feature (116)..(116): n is a, c, g, or t
  misc_feature (120)..(120): n is a, c, g, or t
  misc_feature (135)..(136): n is a, c, g, or t
  misc_feature (150)..(151): n is a, c, g, or t
  misc_feature (154)..(154): n is a, c, g, or t
  misc_feature (156)..(157): n is a, c, g, or t
  misc_feature (202)..(203): n is a, c, g, or t
  misc_feature (205)..(205): n is a, c, g, or t
  misc_feature (208)..(208): n is a, c, g, or t
  misc_feature (212)..(212): n is a, c, g, or t
  misc_feature (214)..(214): n is a, c, g, or t
  misc_feature (217)..(217): n is a, c, g, or t
  misc_feature (220)..(221): n is a, c, g, or t
  misc_feature (225)..(225): n is a, c, g, or t
  misc_feature (229)..(229): n is a, c, g, or t
  misc_feature (231)..(232): n is a, c, g, or t
  misc_feature (234)..(235): n is a, c, g, or t
  misc_feature (237)..(238): n is a, c, g, or t
  misc_feature (242)..(242): n is a, c, g, or t
  misc_feature (244)..(246): n is a, c, g, or t
  misc_feature (250)..(252): n is a, c, g, or t
  misc_feature (254)..(254): n is a, c, g, or t
  misc_feature (260)..(260): n is a, c, g, or t
  misc_feature (264)..(266): n is a, c, g, or t
  misc_feature (322)..(323): n is a, c, g, or t
  misc_feature (336)..(336): n is a, c, g, or t
  misc_feature (341)..(341): n is a, c, g, or t
  misc_feature (365)..(365): n is a, c, g, or t
  misc_feature (367)..(367): n is a, c, g, or t
  misc_feature (391)..(392): n is a, c, g, or t
  misc_feature (398)..(398): n is a, c, g, or t
  misc_feature (400)..(400): n is a, c, g, or t
gtctctcttctcccatttcttccataaganaggctccttattctctctctcactctaatgtaacatatcccaaatggnaggncagttcatgctcattccccccacccanttctacnagtntctctctcttcttannggcgaagccagacnnggnannggagacttgggaaggtcctttaaggcaaaactgtggagtcctagnngngtntgtntnaangcnncgtntctncnncnntnnccanannngcannncnccctangctnnnctacgagttaagagtactgtctaaccagtctggcttcttccttcttccagcagccnnccctccccccccnttacngttttactcccccatcctcaaaancncctaacttgaactttgtctaaatnntctctncnact

SEQ ID NO: 668452 - DNA, 432 bp, Homo sapiens
tctagagtatccccctcgggctctttattaaaaataaaaaaaagaccactagggaaatgtgcgtgtggactatcattattccagtaattttagatgttatatgtatttgaccatggtattgaggtattgtagagaaatgcatatttacttagaaaacctattcggaagtatttatggcaaattcccatgatgtcagtagcttgcttttgaatagaccatcataacaacaacaatcatgagtgcaaatatagcagagtgttctcaatcaccctgaatagccaacacagtcttgaagaagcatgaagttggaggattcccatgtctcaatttcatattttactacaaaggtacagtattgaaaacagtgtagtggtactggcaaaagaaaggagatacagatcaatggaacagaatcagagtccagaaataaac

SEQ ID NO: 668453 - DNA, 262 bp, Homo sapiens
  misc_feature (17)..(17): n is a, c, g, or t
  misc_feature (175)..(175): n is a, c, g, or t
  misc_feature (199)..(199): n is a, c, g, or t
  misc_feature (220)..(220): n is a, c, g, or t
  misc_feature (239)..(239): n is a, c, g, or t
ggtggttgtcgggtgcngggttttcgggtctatagccccggggtaaaaggagcactgcggatacatggagtacacttctgaagggctcaatgccaggaagctcccgtcctaaacagcgtttcgttcttgctgggccatggaagcagcgagagaaggagtgccctcacagcaccangtaccctctttcatcaaccatccntggtatgtggccagattcgcntctcaagttggcgtggcanggtggtgccaggtttgagtactt

SEQ ID NO: 668454 - DNA, 1165 bp, Homo sapiens
tgggtgctgatgtgcctgtgtgctgtgctgagtgagctgctggacccctgtgctgctcgtgctccctgtgctgctcatgctgatgtgtgtgtgctctgtgtggtgcctgctgtgttgtgtgcctgtgtgctgctcccctgcctgtgagtgtgtgaacccacatccctgcccccatgggccacgctgcagtgactgcctgacacctacccctcagcagactgcctggatgatgaaatgagtagcaacaaagagcagctggtcagcagtgttcgtgatcctcttttgccctcatcaccatcctcatcctctacagctccaacagtgccaatgagtgtcttccattactgtgctccctgctggggccgtagcctgcctgaccttgtcaacctcaatgaagtggagcatcactgactggctatgtccccattctctggcaacaatgacactgcgcctctcggtgccaccatgtgtgtgattgtcagcagctccagccacctgctgggcaccaagctgggccctgagatcgagcgggctgagtgtacaatccgcatgaatgatgcacccaccactggctactcagcttgattgtgggcaacaatgaccacctaccgcgtcgtggaccattccagtgtgtaccgtgtgctgagtgaggcccaggagtttgtcaagcggaccctgaaacgttgtcatcttctgggggcccccgagcaacgatgcagaagcgccagggcaagctcgtacagtgtgatccagcgagctgggcctggtgttccccgaaattggaagcatattcctgtattctccccggacgcatgctgcaattggcgacctttaccgggtgttgagacgggccatgaccacgcgacaaagttccatacggtggttgagcaccatgttgtttaacaatgatgatccagtggaaacttgaagtaccacggtgcaaggttatcggcgtggggccccccaagatagggtagccaagacggcccgctccacgtaggccgaacgagtgcacccactgtgctctctaatgttccattcaggatgagcacccaggacaacgcataatacgaagtgctttctggcaccggtagagtacatacactggtcacagccgtgagtccgatgtagactcctgatagcaataatgtgttctccctgattt

SEQ ID NO: 668455 - DNA, 642 bp, Homo sapiens
aatatgttttctcttatgacgttcttaataacattttcttttctctagcatactttattgtaggaatacagtatgtaatacaactaacatacaaaatatgtgttaatctactgtttatgttagcagtaaggcttctggtcaacagtaggctattagtagttaagtttttgggggtcaaaagttacatgtggatttttgtctgtgcagaggtttggtgtccctaacccccatgttgttcaagggtcaactgtatacaaaattactctatattgtttaagcataacaactccagcttcttcatggtgttcatactattttttcttacctttaatggttctttttttgaatgaatatttcttttggtgaagagatatttaaagtttagcaatttctttatatttcagattcttatgctttagttaaattcaagtaaaatcaaatttaatacttattttgtaaattgcatgtaactatgcagaggcagatgttgagaactgtgtcttaagaatgttcatatgatttctgggtctggaggggtggcacttggggagatttcttgccttcttctctgaaccctctatgttgcttaaatttattttaaaaagcagcattttttcattgtggtggggatcctgtagagca

SEQ ID NO: 668456 - DNA, 515 bp, Homo sapiens
  misc_feature (274)..(274): n is a, c, g, or t
gcgagcagtgatgacaccttagcgggtagcaggagaggaagtgcagctcttcactgtatgaacgcccgggggggggcagtctaggtgcaacagacacttagattaatgtggggataaacaatgtagcaatggactccattacctagttatttcttaggactaaatctctagaagtaagattgctagttaaagcgtatgcacatgtttgaggctttcgatgcacaggaacatacttccctccccagacgtcacaccagttgcctttcctcttagnggcctgcgaaggtgagagaccagactccatgaggataggaagtgcaagtcccagattccccacactgctctgccaagtccagggacatcatctggaaatccccagaggcatcagcacatggagcacatcccacgcagggcatgcaggggaaatgtgatcataccctgtgaacatacccagagacagcgaggaagacttttggcacaggagccagcctcggagatggtgagttggggaaagc

SEQ ID NO: 668457 - DNA, 1024 bp, Homo sapiens
ggacccttattaagttagaggaaaataagtttaaagggtaaaacttcttttgcgagaaaccctcattgccacaggcagcggagttggcaaagcgacccctgaggtcaggttctgatttcaaaaccaggcaaagcacagagcaagcggcactcaagtcttcccagtgaagatgcttttggttgcaaggagcaaaaactctctcactgagctggagtcctgaatcgttatgatatcaggtgtcagggaaaccaggccaggaagaatgcccccagtctttcaatgaagcaccagtacagaatttatggacgccaatacctatgaccctcttttctcctatccttttccctctctctttccttctacacctgctctgtgccccgaggtcccgagtctcccagcggtgagtgcctgtgttcacatgtcctccaccttgcggccaaggtgccgaggcccattcctgggggttcttgatttgggcccaggctcgaagtcagcgtggtcccatcccaccggggtccatctcaggattttacgcacatggggtggcccgagggcccacgctctacaaaaccttgggttcgctttaggggccctggtttggtgggccccatggggacaatttgttggccacaggtaccccgggcttgatcctttattctccctctgcgggttcgagggcctctgccctcctttcctaaatgaattatagaggggtggttttaagggcccatgacagcccattgtgagtaaagtttgcccgatgggggttcaccctcatttggccccccttttaatagaaagccccctgttagggctggaagaacttaaaagtgtgtatgtcccagcacaaaaggtgtgtgcctttgatatcccccgaagggcctatccggtgagatagaaatagggagagccgaagattttggcacagagacgaccccaactgttgttgtggtgttcaaaagagatatcaccgcgggatgattgtgtggaacaccatattcagcacccagaggggggctctctg

SEQ ID NO: 668458 - DNA, 164 bp, Homo sapiens
atatgcatttgccaccctctttatccttaaagaccatgcacatcagtgtaagggtatttccagtaattactcacagcacttagttaaagttagcaatttcttcagccatttaataatatctttctgtgaaggaaacttagctgagttaaccataaatgttcatt

SEQ ID NO: 668459 - DNA, 194 bp, Homo sapiens
ggagtaagcatacagaattagcttcagagggcacaggaaggaaaagggacatgtgaccctcccagcacactcagagccagacagaccagcagcagcactcaggtcagactgggtgccctgccagtggccagtgtgaccgcagacaccaggagtccaggcctagttgcatggggaccccctatggagggcgcgga

SEQ ID NO: 668460 - DNA, 331 bp, Homo sapiens
ttctcacgcattaactggcgacacagtgctagagtggcggcagctctacatgagatcccgggcggcgcgctgcccgagggaagcaaggccagctttgcagtttctcctggagtatcgctgaggagcagctgcgagccgagcatgtcttcatttgcttccacaagaaccgcgagaacagagccgccttgctccgaaccttcagcttttcgggctttgagattgtgagaccggggcatccccttgtccccatagagacccgacgtgttaagcaatcaatggagataccgatctccgaaattccgtcactcatggtccttgctgtgaccacagg

SEQ ID NO: 668461 - DNA, 317 bp, Homo sapiens
cattgtgccacacccgccggggtcctaccatcgactacactcagtaaacgtcacactggtgttggtaaaaagcctacagcttgctcagcttccgacaatagagcggattcacagatccgttcgagtctcagagaatgtgggtggtgcacccacttcatggggtcaaccccactaaaaaagaaaaggcaagcagcaaccatcaaaactaagacaaagagcataataccatgcaaccccacgattttagagcaatactcatggctcgtggtcaaatagagtaattgcttatcaaactgtatcgaaaaccttcaagatca

SEQ ID NO: 668462 - DNA, 849 bp, Homo sapiens
acccacgcgtccggagttgttttcaggatatttacattaggatttcacattaaaagggatattttacattttcacatataagccataatatttgtgtctaaagtcttggtacttggacttggtatagaaacttcaagggttagttaaaacaacagcaaaaattctgaaggggattccttcattaatcaagatactataactcttcattgtagctgtcttgtgtttttatttctgtggtgctggagttggagcccaggcctcaggcatgctaagcagtgcctctaccacgtgagcttatggagttactgctcagactggccgccgcctctctagttcagtgagtactagtgtgcaccactatagctggcctgtccttcatggatttacttgtgatataattctgtctcatttttgtttgtttcaaagcatcataacctaaaaaaagacaacccaaaataacagtgttccctaatttgtggaatatccttgatggttctatttcatttttgttcattaagcttagaataataaaattggcagacaaatggtaccaacctggtgattccagcacacgaggggcctcaggtcagaggattcagtttgagggcagtctggggtaaacagcaaaatcctgtctgtcctccttagtctcccaaaggtaagataatcaacgggttttcacttatggtcacaactttttatggaggttttgggccggcctgaaatacacaagtggtccctatgggaaccccggcggtttactgaaacagcaacaccagatttaagaacaaaaaacttatgtctgccattgggcccaacttggctaaatttaacagtgtcccaaaaagt

SEQ ID NO: 668463 - DNA, 161 bp, Homo sapiens
cgtgaatggctatggtctgcccagcataccatttcactgagaaaatcaaagccaagtaccccgactacgaggtcacctgggtctaacgactggctactgtagcactcccacgcccgggcgcctgcgtgcctccacgcggccacttcaagcgcctccggggc

SEQ ID NO: 668464 - DNA, 418 bp, Homo sapiens
tcacctgggtatactatgtagtgagagaataagatgtatgaggaaaagacagacgcctaatgtattactccagacgtactttttatcttctgactatcatagaaacgaatgtcattgctccaacttctttaggggcatccagttgcccagataaagtccaagtgattgtaaaaaggaatctccttgatggtacataagattggggagtaatggaagcaaaatgccaacatctatgggggtcagtttacaggtcctcgcctacgtgccacactgcaattggtacattcatggctgtcacattgtagtagggaggttgggacagatcatagtccatcctatactgaactgggcttccccagtcataagctaggaatatcccagacttaacagcctggatccaatggaacatgtgatgaac

SEQ ID NO: 668465 - DNA, 169 bp, Homo sapiens
  misc_feature (84)..(84): n is a, c, g, or t
gctctggatgcagatatgaccttgattcgcccttcgagttcggtacgcggaggcgttgaatggccggaggcgttgaatggccgnaggcgttgaatggccggaggcgttgaatggcccagaactccagggctcaagcgatcctcccacctcagcctcccggccatggggg

SEQ ID NO: 668466 - DNA, 470 bp, Homo sapiens
agaggatccccattcggcgaggcagtctcgaggggcggcggccgcgctgctccctgtgaacgggtcccgcagctgcgcaggcagtcggggtgagtgtcgcggagccatgaagctgacagactcagcgtcctctacaaaggcgaggccaaggtggggctgctcaaagccgcatacgatgtgtcttccttcagcttttgccagagatccagcgttcaggaattcatgaccttcacgagtcaactgattgtggcgcgctcatcgaaaggcactagagcttctgtcaaagaacaagactatctgcgccacgtgtacgtccggaatgatagtctcgcaggtgtggtcattgctgacaatgaatacccatcccgggtggcctttaccttgctggagaaggtactagatgaattctccaagcaagtcgacaggatagactggccagtaggatcccgtgctacaatccattacccagc

SEQ ID NO: 668467 - DNA, 165 bp, Homo sapiens
tagaggatcccgcaaggtccggtgttctggcggccccccaggctctcgaggatgagacaaccactccggcccggcggtacttcttccttttagcccttatttatggtcggtctgcccaggggacggggagccgcccactttggtcctcaataaagtttctaaagt

SEQ ID NO: 668468 - DNA, 553 bp, Homo sapiens
gttcaggagactttacaaacctttgtttcaactttcttatctggaaataatatcatttataaagggacactttatatgtattcccttttctcatgtcggttgatataacacaaagagatatttaggaaacatgcttattggatgaggttaactctatctgtttttaaagcaccgaggttgcattctagataaccttgtttcattaagcatggcatacttttaatcattatttgagactgtcctgtgcctgattattttagctaaacttcagggacgattgcgtgtgggcagcgacaagcatgctcttgacaaaactttctaaccagcggttatttacagcataatctgaaaacatctagcccaaaggtaagttcgctattttcatcacagttgcctatgcccagggaatacagatgtatctttcataattgaattgggtttttcccacgtctaactggaaacaaaacagaaggggcgtcgatacattgtgaatatggcagaacattactgggttctcagcatacgtgtaatcaaaaaggaggaaatttcagtg

SEQ ID NO: 668469 - DNA, 1196 bp, Homo sapiens
gctgagacctgtatccccaaagtcaacgtgatgacgcatcctcccgtacatctaccatgctgtgaactgtcgatctcattccaagtggggcatgcgaggtgtccagatgggctatgcctgctggtaactcgtataggttgtaccatgggattcagccagatggtgatgttgtccagtgacaagaccagttggattggaggcgcgtagcaacatccccttactatgcagcattaccttcttgctggaaagcatagggtgtcttggaccagacacagtactcgcacgaggcgcgtttaagtgggctctggatcgctacgtgtctattgaatcgagactctcgatattctggcctcgatatctctgcaccgtcttcttcactacccagagtcaactcatcacgtggagtaatagcaggaatgcatgcacaactaacgtaataccgctgatgggtctgcatagtatgcaattggcaaaggagagtcaattgacccgagttgcgtggatcggatcacgataagctgtcctgacacaggtgcacaggactttcgatggtgcttctctggatgttctcacaatgctttggtggggggcactggctctggcttcactctccacttccttgtattggagcggatcgtctgtttgactatggccaagaaatccaagctggaattctccatctacccagtcccccaggtgtctacagccgtggtcgagccctacgaactctatgctgacacccagaggcagcctggagcactcagactgtgccttcatggtggacaacgaagcgaatctatgacgattgtgccggcgaaacctaagacatctgagcgcccaaactaagcaaagctcaatcgcctcattaaggcaaattgtctcctccatcacaggttctctggcgcttggaggggccctcaatgttggacctgacacgagtccagaacaactgggtggccttacctctgagtcacattccccccgtggcacactattgaccagtcattctctggagagaaggcgtacccagagcaagctgttgggtggcagaaatcacccatgctgtttgtaagccgtgccacacgaatgggtaagtggtggatcccgggaccgggaagtactgcggaggcgtggagtgttacagcggagaatatgtgtcccacgagtagtatagagtgcaatgtgggagaaaaaag

SEQ ID NO: 668470 - DNA, 181 bp, Homo sapiens
cccccccccccccaagggttcagaccttcccctaaaactggggccaaaaggggggggaacctttaaggggcttggggatttcttgggattttaacctttaaaaagccccccctaaagggggaaaagatcccccttaatccagggttttttttaaagaaaaaaaaaaatttggtttttttga

SEQ ID NO: 668471 - DNA, 325 bp, Homo sapiens
acagagtctcagtctgtcaccagggctgggagtgctgtggtgcaattgtgggtcactgcaaccctcacgtgtgagattcaagcgattctcctacctcaccctcccgagcagcatggctaacatggcaaaaacacacctctcctaaaaaatatagaaattagctgggcatggtggcacacacctgtagttatggctgctcgggaggctgaggcatgagaatcccgtcagcccaggaggcggaggttgcagtgagctgagttctcaccactacactccagcctgggtgacggagtgagactcttatctcaaaacaaacaaacaaaca

SEQ ID NO: 668472 - DNA, 606 bp, Homo sapiens
aatcggtcgatgcatgccttcgagatcatacagcctgctcacagtgccgagaaccccgtctgcaggtcctggtgaaggcgccatcgatacaatcgagtggtccccgggaaggagcgtccactatcgcattggtgcgcgaccgggaactgttgagactgagcagggctgtggagtgtgtcccgccctgcgcctgctgctgaacgaggctccatcgtggcatgctgtgctacgaggggtcgcgtggaggctgccttccggaacacttagaggaccactatggtgaagtgtgccgtggccagagtggaggctcatccaactgcttgccgaaggggctgtccatcggaaagtccctagtggccgatatgaaggcaaaaacggtaagaagggggaatcgggaaaggggccgtcggggggtaacggaccggttttggtttggggacggccacaatgcttcgcgaaaaccccgtcggtaggaagtttgtgtctcgcatggtcgtagacctcgtctctcgagaattagaccaccattggtgctggccgcttttgggggaggcgaggccgcgcacgacctatacaggacaacaaagacacacatgtgtgtggcgc

SEQ ID NO: 668473 - DNA, 329 bp, Homo sapiens
ttttttggggttaaaatggggtgggcccccccccccccagggaggggggaaacccccctccagggaaagggggccccctcagccctggggttaaacccgttgagggttttaaaaggggggtcctttttttgttcccccccaaccccctgccctgaaaccccggggggcgggggggggtttgggcctcttttcccttttgggggtgggtcccaaaccccgggcccatgggaggggaagggggggggggtccttgggggcggggggggggttgttcctcggctcccccccccggcccggcccctttgggaaaaaaaaatggccctttttta

SEQ ID NO: 668474 - DNA, 146 bp, Homo sapiens
agcccaagccccatcaggaggaggctaaaaaaaaggcgggcagggaggaaggggcgttcccagctccaaggttccttaaatgtcccagtgatacttgtgtagggggacatgtactttatttgtcaataaacgtatctgtcccctga

SEQ ID NO: 668475 - DNA, 1033 bp, Homo sapiens
aggatttgaaacgcaatgagttcacatggtgccagagacactcccaagccattatggccattcccctggttcgctggtcccgaagggcacgatcgacaccctcccttcacccgcctactgttagtctacaattctcgcaactatcatcctttcgcaccagcgtggaccctcctactgccgtagcgtcattcccactgtaaggggcctttccaggcgtgtagaccccggcaacaaggacatagaacatcctcattgtccgggagaacacagatggcgcgagtacagcagcctggagcatgagagtgtggcgggactggtggagagccttatagactcagtcaccaggccaagtccctgcgcatttgccggatgtactgcctttcaagcctggctgcaggacgattcgggcagcaatgaaagtgacggtccggtggcacaatggccaacatcatgataatctgggctgattgggcttttcctccagtgctgcatgggagtgttgactagcctcgctacccctcagatcaccttcgagaacatgattgtggatgacaccaccatgcacgtctgtgtgtcccggccccagcagtttgactgctcatggtgaatgcccaatcgtcatatcggcaacatcgtcaacaatgtctgcagcagggactggtcgggtggcccaggccttgtgtgctggggccaactatggccactgtgtacgcggtgtttgaaacagctacgaggaacaccgtgcaagagtatcgccaataagaacatcggccaaccctactggccaccctgctggccagctgcatgatagctggaccacctcatagctgcactcctatgccacctccatccgtataggctgtccatggcagtccatggacaatgagaatactgcacactccggacatcgggggccagggcacaacatctgaagccatccacggacgtcatccgccacatccgcgtcatcaacggccgggccgtggaggcctaggctggccctaggaccttcttggttgctccttgacacccc

SEQ ID NO: 668476 - DNA, 96 bp, Homo sapiens
  misc_feature (82)..(82): n is a, c, g, or t
attcctgtgatttttagaattttcacttttcatataaagttgcattttatcatgaggaaatgttttggctgaaaaacatatncccccaaaaaaaaa

SEQ ID NO: 668477 - DNA, 171 bp, Homo sapiens
atgggtgctccatcccccggtgtgtgtgtgtgtgtggaggaggcgcggcccttagatcaccttcttgagctcgtcgtacaggaccagcacgaaggcgccccccatgccccgcagaacgttggaccacgcaccctttgaagaaggccttgcccccccatcatcttctgaaag

SEQ ID NO: 668478 - DNA, 1462 bp, Homo sapiens
  misc_feature (367)..(367): n is a, c, g, or t
  misc_feature (373)..(373): n is a, c, g, or t
  misc_feature (657)..(657): n is a, c, g, or t
  misc_feature (1040)..(1040): n is a, c, g, or t
gtctgtgtggggcgctcggccggtgcggccgcggcgggtgttgtatccccgacgttgtttgtccgcaccccccaccggtggtgtgccccctcggccttgttgtggtgtccgcccctattgtggggcccgcctctgattattttttgagtgtggcgacccccccacgctgtttgtggaggcaccccaggagtgttgttgttgcaacacccgaacaaagatcacctcacaggcggcgcgttgtgtggtttgttgcccccgcgtggttttctccgcggggggattttttttccccccccgggcgggggagtttatttttgcttttcgtcgcacagcaccccaccacgcggcgttctcgtcctcgccggcncttctnagagaggtggtgtatatctctatggtggggaaagaatagggggtgtttcctcgccgcctgtgatattctcgcccactgtgtgggcccctccctggtgtggtgtcccccccccccccctccgcggtgtgattctctgatcgccgcgcgaatttcgcacagagagaggtgtcccgcacgtaattattattctttggtgtgctctccacactgtttgtatgagagagacaccccctctcctctttgggaatcttctgtctctctaccgcgcgccctctcacaacagnggtgtatacagcgcaataatatagcgcgcgagatatagccccccctgcgatgatttatatcttgtagagagagatgattttccacctccttgtcgcgcgcgagagacccacgtgtgtgtgtacccacactcttcctagacacgcgtgtacacacactcatgtgtgtggtggaggtgttttgcgcacgacgagttgtgtgtgctgcgcaacacgcgcgcacacacgcacacatgtgggggtgtgttgtggacacacacacacacgtgtgtctcgcgtgtgtgcgcgctcacacagagagagagtgtctgtagaattttttttttctgcgcacacacatcggtctttataaagcacgccgcgcagagagagtgatatatattctngagagactctatatagagggtgtttatagagatatgtaagagtttctctttgggtgctcttggagagcacacattcccacgtgtggaccacacacgcgcctctctaagaatggccgcccccccggagacctctcacacgaggcgtctctctctgtgtgtcggggtgtataacccacacacacactcgagagtcgtctcttctcctctcccacacactcttgagagagagtgatctcctttccgggaaaagggacacacagagtttgttctctcttacacaccacagagaagagaggagaggtgttccccacagagaagaaataaagtatatctcccacagagaagaaacttgaaagaacacccaaaacatttttggccccgggggttaatttccccctttaaaaaaaaggaatttaaaggga

SEQ ID NO: 668479 - DNA, 370 bp, Homo sapiens
agaatgtatgtagaaaggtaagctacgagaactagttagtgtattataaaatccctattgcaagcctaacactagacctcgctagataactcttaaggcaatacaagacggaacatgtgtttagagcaccacagatgcacagaatcctgccctcccctcaacctttgttcatcctaacagaccaacctggctcctgcattaatatggagtaggaggagaacagcaaaacaattacaatagatatgtacaaaaagacaattcagtgcaaacctagaaacttctacttagtcaatagtttccaattttactgagaacgaagatctatgctccatcacccaggccggagtgcagtggcacgatcctaactcta

SEQ ID NO: 668480 - DNA, 837 bp, Homo sapiens
  misc_feature (687)..(687): n is a, c, g, or t
tctcatctgcgcgggacctctcatttttggaggtggcaaacgtcgcccgagtgtgccggcgtgcttactctgcgattcttctcggcgggtttacgccctaacaagctgtagggcattccagcacacaggactaggagtgcccccccgctgggccccccagtgttaaacgtcccctggggttggtttagaccatacattgggggtcccgagtctggcgccctctgttagactctgtgtcgcggtggccccacagcaccagtggcccaaaggacatttaaccagggggagaattttgtgcaacttccggttattgggcctcccccccttgggagtcccacttgtgtcagaaccccttgtggccgcccccgtccccggtagtttttgcttctggtgtggccccccgacttcccttggtttggccccccgccgccgcccgatgttgacctacattttccggctaggcgcccagcacacatctggggagcacctgggcacttaatttgtcgcgccccgctgttttctcctcccgggtgtggccccaatcacatgttgtggacatctgggctcatcctgcctctcggtcgtttcaagttgaatctccctttttcgcctctttcactggcactccttgggccggtgactctctctccccgtgtcaccacgccgttgatttgtgtaagtgtagangcgcgtgggtcgtgtacgcctcgccgcgaacaggtgtgtgcggtctttcccccccttgctggttccaattgccgcccccccgagggccccccccccccccccctttttcccccttttttttttcccacacctttgtttcccccaaaaaaa

SEQ ID NO: 668481 - DNA, 239 bp, Homo sapiens
ctccccgttactgacttgacgccggctgagaccagattgatttattttttttttttgtggagtcccaaccccaaaaattattccaggacacaagatagggggcaggcggggctgggttctctgggcctaccgtgggggagacatgttattgtaggacgttgagaaactattacgtccgcgcgcgtacgtccggtggtacccgtaaggttccagtacccatggggtggcgccaatgtgga

SEQ ID NO: 668482 - DNA, 332 bp, Homo sapiens
gccaggtagattaggaatcataacaagtgttttattgcatatacttgtagtctgtctaaatgccttctagcaggaatatagtaatgtagtgcttattctgtgaatattaacatggattttttaccactgtacagtatagaaaacacaggttaactccgaagtggcaggcatgctccactacaacagacagacaacttttgctgtaagcaatacctagtggtatgagaattctttttcaagtcctaaaatatttcaacttacagcttgtgtggaaaaaaatttccatttttgtaaaaatgtatgtttcctgattacctcttgctaataaatct

SEQ ID NO: 668483 - DNA, 346 bp, Homo sapiens
tctcttctaactgcatgtcatcagggtgagcctacctttcctatcttcagacctgccacctcatgttcacacctatctttctcaccttttttttgagatggagtctcactctcttgcccaggctggagtgcaagggcacgttctcagctcactgcaacctccgcctctggggttcaagcaattctgctgcatcagcctcccgagtacctgggattacaggcatgtgccaccacgcccggctaattttgtatttttagtagagacggggtttggccatgttggccaggctggtctcgaactcttgacttcagatgatccatctgccttggcctcccacagtgctggg

SEQ ID NO: 668484 - DNA, 1164 bp, Homo sapiens
  misc_feature (113)..(113): n is a, c, g, or t
aatttctatcaagcagtaacaacaacaatatttatagactacaattaattttcctattatcgatctcaccactacttctccatatctccctacacaaccaaaaatgcagtgcngatatgttattgtctttattaatagatcaagaagagattctttgttccatacgtgctacattaacacataacgtacataatcacaaccaacaaaatccactaaacatgtatctctactatactcctcccaccatacagcaacacaccatctcaatcatcactccatcctccctcttaccccacacactgctctcgtgaccttttcgtatcgtagtatacgtaaaaatatagacaaacccgataccgatttccatcacttaacacacaacaaatcactaactcaaaggacatgaataaatcctccctaacgacgagctagcgacacaggacaagcacgggctgcgcactccgctctggctccagcatccctccccactatcatcacctgctcttcttacatcgtgtgatctcgtaatgatcagcaaacacacagacatgaagaaacaaaaaacaccacaaaaatcttatattatatatttgtgcgtatgtctactgtctgtaccgcctaggctatctatattctcttccttaaacactatttttattatattattctcttcgcttgagccaatttcttcatcgaactatcgttcttcctctctatctcacagacgtcgatcacctcctggagatcatcacataattacatttatcctgccacgtatcctcattcagccgatcttcagtcctgctccttctcacttctacaatgtaggcattggtagtgcacctcgagcctacattagccctaacttgaataacagctcaatagcttaagctataccctaatatctctacttatattatatgttacttaaatatccaatttaatctggtatctatccaatcatgtacacccaagagacgttcagattcaaccacacagtgctcttctatcgatgcctctctcgcatcttatctccaactcagagatcatctaccaattataacacagaccatatcgctcgacacgctcaacatctacatacctcttaaaaaatacacgcaatatcatactctcacatataacgatcagtttaatttattatat

SEQ ID NO: 668485 - DNA, 100 bp, Homo sapiens
tacgggcagcagagttcactgctggcctataatacaacctcccacaccgaccaatcctcacgattgagtgtcaaagaagacccttcttatgactcagtca

SEQ ID NO: 668486 - DNA, 378 bp, Homo sapiens
gtagtcctagtaaatcattgtcaatctctgcctagtcacacgtagtgttcccctgatatagtccaggtaatcatcctgaatctgaaagaactctttaatctccagcatgatcttcttggcactgatgtgctcattcttggtcttccattctttgacatgtgcatttgtgctgtgccttcaggaagtgttgtccgagctgaaagcctgtcttgtccgtcagcaatgagatttgttgtcctcttttcgcgtgcctctgccatgatccatcattgccctcggcgcgtcgtgattcggttcagggtctgatcggtctcagtctgatccgcattctgctgcccccagctccatctggttctgctcatatggctggtcccggcg

SEQ ID NO: 668487 - DNA, 347 bp, Homo sapiens
gcccaacactaggaatacccaaatgtcctgtaatggtgaatggttaaagaacctatgggacatccataccatggaatacgatccagccataaaatggaacaaacctttcacacaggcaacaacttggaagaacctcaaggaaattatgctgagtgaaaaaaaaaaaaaggccagtctcaaaaatggggcatacgacatagttctattaatgtaacatccaaaaaaataacatattaacagagatgaagaacagataagggattgccagaggttagagatatggagagagcatgattgtggctgtagagggatagctctaggaagctctgtgctgatggaagtatagt

SEQ ID NO: 668488 - DNA, 329 bp, Homo sapiens
caggtagactaaccatacagcacagaccaattagccagaatgcaagaataaagtagattcttaccacaactatcgctataaatcactgcaactatgctttccaaaaggaccctaatcttatgtgaaaacacctactgtgggggaaccagaaacctagctacctggccgaaaggaatcaaatagcgattcgagtggttatttggtgatggcaggatatgtatgcccttgactgtgctgctgttgctgctgttgttggtgcttttgttgctgctgttgctgctgcggccggtgctgctggtgctgctgttgctgctgcttgggtcttctta

SEQ ID NO: 668489 - DNA, 84 bp, Homo sapiens
cggacgcgtgggctataaatataagtggcctttccagtacagattggattttatgcaaccttttttccttgaattaacagcaat

SEQ ID NO: 668490 - DNA, 110 bp, Homo sapiens
ctttaatttaatgagttaaatttatggattatgctttttcagtcttgtggtttttgttttcggacggggtctcgcaatgtcgcccaggctggagtgccgtgattttgaat

SEQ ID NO: 668491 - DNA, 268 bp, Homo sapiens
tcccaaaattttttttggggttttttttaaaaataggggaataagccctggtttttttgccgcccaatccccttttccctttttagatttggaggtggggttttttttcttgttattagccggggggttggttttttcctttggggcccttttttagggttttatggtttcccgggtatgggctgggtttttccctggggggttccccttggggcctttggggttttggcccctttttggggtttttaaaagttttgggtttttttta

SEQ ID NO: 668492 - DNA, 398 bp, Homo sapiens
  misc_feature (32)..(32): n is a, c, g, or t
  misc_feature (70)..(70): n is a, c, g, or t
tgaggcaggaggatcacttcagcctgggaagntgaggctgctgcgacctgtgattgtgctcctgcattcntagcctgggtgacacagtgagaccctctctttcaaaaaacacccaaagtgctatttttaaaataaggtataatataaatatgtattactggtcattcttcagaatatctgtttatagttcagatgtaaactgatctagtgtgatatgctaggcttctgtttttagcatgttttatttattttagcgtattttaatgagaagttttcaagatgctgaaaacagttattttgatctttgatagtgtctgcaacattcagaaatttaatttataagttaatacattatttgaagcagcctgggtaacagagcgagactccgtctcaaaaaa

SEQ ID NO: 668493 - DNA, 162 bp, Homo sapiens
ccgccatatacgtgtcgctgcggaacagttgcccttgttccgcgagagaccatgatcactagcggccgcgagcgcggctcaatcggcgcgattgcgaggtgccactccggtttaacatgcatcttcccatcctccctgtgtgtattaatttttgtcctacaa

SEQ ID NO: 668494 - DNA, 341 bp, Homo sapiens
  misc_feature (136)..(136): n is a, c, g, or t
tttttttaaaaggccccccccaaaaaggattctttctgggaaaggaagttcggtaaggaaatgtcaaatttggttttttaacaaggtccccccccgcaatgaaacccccccttcagccccaaaagattttaaaaanttatgtggccaaagggcccaccccctgtggccccggggttttgccccccccccccccccatttggttttggtaaatgtccccaaacggggtgacccctgggcaataaaaacatagatcctaaagggtcctttggaaactgttttttttgaattaaaatttcccaattggccctctgttaaaaaatgttttttttggggctggcca

SEQ ID NO: 668495 - DNA, 129 bp, Homo sapiens
agccactatgctgagcattgacagaacagctgcaccatgtaccccaccttcagtttataagaaaaaaaaaaatccctttcactcctactgggaggtgggacccctttacattttcagtggttgctacat

SEQ ID NO: 668496 - DNA, 694 bp, Homo sapiens
  misc_feature (189)..(189): n is a, c, g, or t
  misc_feature (479)..(479): n is a, c, g, or t
  misc_feature (588)..(588): n is a, c, g, or t
  misc_feature (591)..(591): n is a, c, g, or t
  misc_feature (594)..(594): n is a, c, g, or t
  misc_feature (602)..(602): n is a, c, g, or t
  misc_feature (607)..(607): n is a, c, g, or t
  misc_feature (660)..(660): n is a, c, g, or t
aacactggtgctagtatacatcaccctggtgcgcaagagcaggcatactcagcccactgcagccgactgttgggacccgaagactggaccgtgtagtatcccaagttcctagcaaagcttcatcacactttgtcactaagcacatcctaagccactgagaaaatcacagacaacaatgatgctgtttanacagtggaagaaatctatacagtgattacactactgcactagcagccaggaatcagaaggccaagagcatccatacccaagtgaagcacgtacgacatagcagttttccaggaacggagtcctcgcccgtagtgataacgcaagagttcaaacagagttgagaaggaagcaacggagttaccagcaaagtatgcgacacaataaccaaggtgctaacggaaccaggacggatgtactagtgaaagaatgcgaaggggacacagaaacagtatgtaacatgtctcatatgncacacaggaatcgcacagagtcgactataattaacactgttacgaagagagtcagctggtcaaacacagagatgtcgcaatattatgtggagccgcgtagcagtaacgncantgngctgcagngtccnggtgccagtttggctggccttgcactgccatgctaatgttccgcagtcaattnttgggggaggccaggatgggcagggcaattatgc

SEQ ID NO: 668497 - DNA, 381 bp, Homo sapiens
caaaaaagggagaaagcaaaaagttggaaaaaacagaagtcaaataaatagctagacgaccttggcgccaccacctggccctggtggttaaaatatcaataatattaacccctgaccaaaactattggtgttatctgtaaattccagacattgtatgagaaagcactgtaaaaactttttgttctgttagctgatgtatgtagcccccagtcacgttcctcatgcttacttgatctattgtgactttttcacgtagaacccttagagttgtcagcccttaaaagggctaggaatttctttttcagggagctcggctcttaagacatgagtctgcctacgctcccggtggaataaaaaaacctcttccttctttaaaaaaaa

SEQ ID NO: 668498 - DNA, 384 bp, Homo sapiens
aatcttcctctgaactaggtatgattttcaatgaacgtgatcaggaattgagagacctgggctaccagaagcacgcctttaatatgctcattagtaaccgcttgggataccacagagacgtgccggacaccaggaatgcagagtgtaggaggaagtcctacccgactgacctgccaactgctagcattgtcatctgtttctacaatgaagccttttctgccttactgcggactgtgcacagtgttgtggaccgcacaccggcccaccttcttcatgagatcatccttgtggatgacaagcagtgacttttgatgatttaaaaggagaactggatgagtacatccaaagatacctgcctgcaaaagtcaaggtcataagaaaatt

SEQ ID NO: 668499 - DNA, 864 bp, Homo sapiens
gtctgaatacaggagtagggggggtgtgggctgtgtaaccagagaccgatgagctatgagtggggtgtgcctcgtgtgcgtggattcgtgtgtgtgtgtgtgtccttgtatatgtgtgcgcaagagtgcatcattttcagactctactattaccgtcaagtgttctgtatatgattcttgagaatcatctcaggatcgggagttcgtgttgtaagagtgtttcgtgggccagggatccgggcccctgccctcctctggacctgaccaacactccctactcagggcatagatctgtggcttcccgagagcatcttctgagtatgccgttgcaggagagggctgggtggggcagaggacagggaggggagctggtgtgtcaccgtggacagccgatcgtgggtcagtctcgctcagggcgaccctggacccatatgtctagataggttacggttatgctagctgtgcgcgaggttcgagcgcaagcatgttcgtccttgtctggaggcgtcgatcgggcactagatgggcactgtggtcccaaaggtaaggtcagaaggttgggggtttgctcgacacatcttggggtgcacttgttggggacagatgagtgagactgggctgttcgaagatcatcgccctgccaaggggagctagtggggtagcttcgagagcccatgccgcgggtcgtcaggggccatcgaaggtatgggcgaaagcccgggccgaaagaggctggagagagcgaaacagcccctgggtaccaggggggctgggaacacaactaccagacggaagctcgggcccccggtggcgacccaaacaaccgcggggtggcgagaagcaaacaaaggggagggcatgctc

SEQ ID NO: 668500 - DNA, 384 bp, Homo sapiens
aggcacaagtagagaaacgccccagtcacaacgttgataaacaccacccagaccctgtgcactaccaggcatccgttaccacatcacgtacctggtcagaaagctgtttatgccatcagcccctacctcttttatgataggatatcctcaagggctcctgtttggacctcagatacatccttgcctgaaagcagaagctagacttcttgggctcctgaacaggggccttgctggaatctgtgaaacaaaataagttcttgaccctaggcctctgacggagtacaaagtctatgtgagtgctggggctgcggttgcaaggaaagtgacgcaaccagattccatgtggacatgatcaggcgtgacatgtgaggcaggaagagggag

SEQ ID NO: 668501 - DNA, 983 bp, Homo sapiens
  misc_feature (394)..(394): n is a, c, g, or t
  misc_feature (405)..(405): n is a, c, g, or t
cagaagctgctgaatcaggtgggacttcctgtatctgggaggtcactcgaccacaaactgcacgagctgcgcgtgctgcggcgttgccggctgcagcggtgggaggactacatcggacgacgtataaccgagctgagccgagccagtgcggtgaagcgtgtgcagcggacgtcgcttgtggctgaatcgtgcaccagtaacagcagaccagattcgcgtcgtgcggcgctttcgggctctggtctgaatggtacaagctgtgtatgcgtcgtcgggcattggatgctcctacagctgcggatgcgcatgagagcgtctgcgtagttcagtcagggcgctcgctcctatctgctcgtctgccgcactaccccaccctgtgctcactcagagtcgntgcgcattggncgtcgatggaaccattcagggtcttgctctgtgtgcgcttttgattggaagcaacgcggcgacgtaacagctgtggcgacccatgatgtgtggttgaccgagccctcggacttacacttgtcgatcgctgcgagcatggtagagacgtttcgtacagcttgtgcgtggacatcgtgccagagactcaacgcgtgcacagtgtctaggagtaacaattgacggacgcgcgaaatgacattcgatctgggaagcctagctggatctcccatcgtttgcatggtgtgttcttttacacgatgggaaaactgaggcctgatgctggagattctatgagggtgctctcctcaagggtatcagacggtcgtaggttcttaagaatttgattcatcagtggcaggccatgcatagagccacggggaggtgcgtccttggttttccaggaaatgttcttagaacgttggactacgtgattattaatttgacttgtgccttggggaaacagtgggaagtaacttggtgcagcactggggtaattggttggatttcttgtgttggaaactttgttactgttaaacgga

SEQ ID NO: 668502 - DNA, 233 bp, Homo sapiens
tctagcggatctcaattctgccaccacagcctcccaagtaactggggcacaggcgccgccacacgccggtaattttttgtatttttagtagagacggggtttcaccgtggtctcaaccttctgatctcatgatccgcccgctcggcctcccaaagtgctgggattacaggcttgagcaaccatgcccggcctcctttgttctcttaactgcagaattgcctgtgggtggattg

SEQ ID NO: 668503 - DNA, 632 bp, Homo sapiens
gggtgacgggcagataatggtgcaaaagcattcttcccaggcgaaaagtgtatcatgcatcactgcagatttaagtccttcctttgataatacttcaaaagcatacacagctttgcttactgaattatattagcaaataatacaaggaggggaaacgtaacttgtatactagtgttgtgaagtgaagtataggcgcttgggaacattataaagaaaagactggtcattcagaatagttatcgggctgtgggataatttacgtgaaaagtgagatcagtaagtgagctgtgttgttaaaaaattattatctggtaataataccatgcaatatatgcgttgtataccaagcgttagtgcatttagagtactgtacttaacatatgcgagatacttctaatgcctctctaagacattaaagtattgagataaaaagtataggtttattcaccttgtaggctttccaagtgagatgtgactaatgttgcttcaatcgttacgatagatctttgacccgattagacatgtattacgtagatagattcgtgtaatgccttaggttattatacgtattaatttgtaaggtatacatgggaaattacaagaatggtacattgtggttggtatcccagaag

SEQ ID NO: 668504 - DNA, 978 bp, Homo sapiens
tcctaccaggcttcgcgacataatctcccagtaattgctaaacttacgtactccggaaaacaaaacgaaccagttctgagactacaatacggctattgcgctcctgagcttagtgactatcaactctgcgcttccatagcggctttatcgatgtgagcacaccatactatttacagtaggaatagacgtagacacacgagcatatttcaccgtccgcgtaccataatcatcgctatccccaccggcgtcaaagtatttagctgactcgccacactccacggaagccatatgaaatgatctgctgcagtgcctctgagccctaggattcatctttcttttctcaccgtaggtaggcctgacctggccatcgtattagcaaactcatcactagacatcgtactacacgacacgtactacgttgtagcccacttccactatgtcctatcaagtaggagctgtatatgccatcataggaggcttcaatcactgatttccccgtattctcaggctacaccctagaccaaacctacgccacaatccattgcactatcatattcatcgcgcgtgagagtctagcgtgtgcgttccgcgctatcacgtgttcctcggccctctgccgtgcctgtcctcgaacggttgcctcgggagtagtcccgatgcgtaccccgactctgacccagtgcgactccagtctggttcgggctccgctctccttctctgcgttgatgagcggggcggcgtcctccctgtgcgtctctctccgcagtggatcttctgggcgggcgacgcccctttgcggcgttgctgaaactgtcctgcatctgaggtgccgtttcatttacgtcaggcatgcgatccctgcccttgcgtctttcttcgcctcctcggggccggttgcacttcgatgactcggggctcgtgcccctcccgtgtccccgcttgtctgccgtcgctctttcgcatgtgatggcctggata

SEQ ID NO: 668505 - DNA, 120 bp, Homo sapiens
ctcacaagaccctgtccaattgggaattctgaggggcagaagcaggaagcagttgtgttgtgccaatggtggagaagaaaacttcggttcgctcccaggaccccgggcagaagcaggaag

SEQ ID NO: 668506 - DNA, 251 bp, Homo sapiens
tactccgtacaaaagaaagagagtcatctattcctccatttagaaacggaatttatacaaaacccacaaactcccatattggtgcactacgaacatgagataagattatgagccttcatcacagccccaggggttctgaaggccagctctgttcctgtttcccacaggaagccgcactgtgtgacctttttggggggaaacttggaagaggttgagggtagggcagaatttgcatatataatcatcatttt

SEQ ID NO: 668507 - DNA, 177 bp, Homo sapiens
gacgcttatgtgggtctggagaggcgccttgaggttgccggcctctgcctccctcatggcggctctgcaggccagctgttcctcctggctgcatctctcggccagctcctgcctcccagcaggcaagctcttctggctcagctccctccagcgtttgtagaccccgaagtttctgca

SEQ ID NO: 668508 - DNA, 102 bp, Homo sapiens
accggtgctcatggtgcaccgcgcgcactgcctccacggtcagatgactcacggccttgccccctccctgcctggagcatcggtgggcaagctcggggcata

SEQ ID NO: 668509 - DNA, 827 bp, Homo sapiens
tataaataattccattttaaattctctgtacaaaacttctcaatctatgaaaataaagtttggcaaagggcaaagtagcacaggagcctcaggtcaggaggctaagcacgctgacctacacttatgtacactgtttctctcccacgacggagagagaggcctctggggcaagagccctgtcttgcagtccgggaaagccaatgttgtggcttctccgtcagcacagggaaagtgtaccccttctctttcccgtgttacacaggaggaaaaaagccactaagggtgcctgcaaagcaaggaggggggccccccaaaagtggctcggccccttgaaggtgccccgattgggccaccagaaggctcagccaccattcagtggccgcgcggctctatagggctcaaaactcgggccccttcgggcgcttccaccggaaaggcacacagcagccgacaggctcaaacttggtgggagcgcccaaagctcctctttgccacttgcctttcggcctttcaaaagctttcgaacccgaggacaaaaacgctgcccggggaaccaagaggggcttaaacgaaccaggggtgctgaggccggggaacacggggtccatagcgtggaagtgtgaccggtgggacaggtcagccgcaactcttctttgggcgtccccagccgagccaaatcgcctcagaccccagtggggaacggtgcaaggctcgcgagttcccgcggcattgggcccgcatatggggcgccttggtccccagggcttgctttacactctggtccagtggcctctcgttgccttcaatggaccccttcattgccctca

SEQ ID NO: 668510 - DNA, 174 bp, Homo sapiens
  misc_feature (158)..(158): n is a, c, g, or t
gtggcgctatggctgcactggcgacatcgcgccagtaagttttacattgtcagatgcggcctgaaacgccttatctggcctgacattcctgtttgatcactgtttcatacaacgcgcccgccgttcgtctacgcgcttcgaaaccaggccgtagtcangttgcggggtgaattt

SEQ ID NO: 668511 - DNA, 239 bp, Homo sapiens
ttttttttttttggaagggaaaattggttttatttacaatttatttttattgtccaaaaaactcaaacagtttggttaattctaaaaactatgagaatattatgtattccaaaaaaagtattctgagaaatttcttttctgggggagaaatggacgggtcactattaatctcaaatatgggggatgggtggtatttaaaaacttttggattttggattaataaaaagaaagtgtggaag

SEQ ID NO: 668512 - DNA, 376 bp, Homo sapiens
tcgcccggccagcctcccaaagggctgggatacaggcgtgaaccaggcgccggcctcattggccattcggagcgtaaaatcgaaacctagcaaagtggggcactagtcgccactgagacttgagagaaatctgcttatcctggaattactcttctgggagtgctgcgggaagcacggcagtggggaggtacttggtctaaaaagagcttcatttgcataaaatacattggggatggtttggttggctaaggactcaattgagccctagtaattgggtgaggtcgagtgggtagaaaataaaaagaagcattcctttcttccccaaccttcttttcctcaccacaaccttcaccattacggtgttacttcataacat

SEQ ID NO: 668513 - DNA, 361 bp, Homo sapiens
actagcattccagaggcagagacaaaaagcagcaggcccaataatcctgatgcatgatgcagacaatcaatggagataagacaaactgacattaactaatggcaagtacagcaagttgtatccacattctgttctgactctgcttccactgctaactggtatgcactaattacactctccaagctgaagagcaagctcaaaacgatgctcaggatctgtggatactgtaagagcttgatgatagaagacctgcttttccaaaaagtgtgcaactctggtcctctgttcttatggaatggtaggaaggaccttatcagccatgctaaagtccctccgcatgacagctgtctgatattccagg

SEQ ID NO: 668514 - DNA, 678 bp, Homo sapiens
gggtcgcggttcctgcagtgtcctggacttggccccagactgccggcaggctcgtggccagaacgccggccggtgaccatctgcagcaggcgctcgacagtctccataggatcgctgctggccattgcacgacaatgttcgaacagaacgcggctcccagttcacaccaagttcacgcacacatgatccagtgtagtctctgctagtaatgagccccttgcctttgcttcctgtggcacagagggatttcgggaactgccaaggaagggcacatggcagtcgcatgcacaggacagcaggcatacgccgcagtcggcgatgacgctaaacaacaagggcgttgatccacatccgagtttgtggtgaaccggcctggtggcctagtgatcgcttgtctgccatgcatcggactgatcatgggcggcctgtgaagtgatctcaatcacagacaacaccccaatcccagcactaacggactgccgacccaggaaggctcggaagctgtgatgggagaggaggcctgcacttggacctgacctcaaagcctcagcgtccagtgggaccttgtagaaatgctccctgtcagagctctccagaatatgcttgtttggagatccttcagcgcagtaagggagactttttgcctcctttacacagtggccttttgcttgcacctcc

SEQ ID NO: 668515 - DNA, 145 bp, Homo sapiens
ctagaggatcttccgcactgttgtcgtcagagcgctccacatacgctgccaccaagatctgattgcccaggtcatagacctgcccataggccagcgttccaacggcattggacggaacttggacaggcttgccattgagcgacag

SEQ ID NO: 668516 - DNA, 155 bp, Homo sapiens
acccggttgttcacgttcgccggctccgtctactccggactcttcatcggcctcggctgcatctggcggccgcctgagactggcgccactcgacatacgcgtaccgtcgcgacgcggggaccactgtaccacgacgctcgagcacgtacctacgt

SEQ ID NO: 668517 - DNA, 86 bp, Homo sapiens
ggagagagagagaacaggtacggtcgaatggccagtgagtccaggccgatgcggttgagctgaccaggacttgactcgggtacaga

SEQ ID NO: 668518 - DNA, 815 bp, Homo sapiens
agattactgggcttcctcatcctttaaatggtaactctcctttgctttctgaacacctaggaatttcctgatgttatgttttgtggattccagactttatgtgtttctagtctgcagctgagctctggtgcctgttcttggtccaccccctaatccctaactcttccctcagcatcacagggcttcactgcacacactgtgttcagggcaagatttcatcatttactgactgcatactcgatatgtgttttgtaactttagccaaaagaaagtaacctttagtggcaggcatataaaaaatgctcaggctcacttgcagatattttatttttaaactttttttcttttttcccgggaaaacttcctgtgcagaaaagggtgtatactttagaatacctgaaggcttctgggctcttccactttccttattcctcctcttcctgccactcttttggtcccttcggtcttccggctcatccttatggggtatcagcaggtgtcagttgaggagggactttagcctgaggttaaccctctcttcggggattcgcactcgcacatggagggcccgggaagaatctctgagacctcacaatcaggtgaagctaggaacgatgggcgctctccaggagcagggccagggccctgagtaggaccgtaaccgcctccgtgcgtggcatatggtccctgcatgctgtcgctcggtatagcactaacgatccgctgaggctaagaggcccaggtgccgggctcgtgccctggactcccggatctccgccagcgcactcgaacgcccgccacgggcactcacacgg

SEQ ID NO: 668519 - DNA, 101 bp, Homo sapiens
  misc_feature (88)..(88): n is a, c, g, or t
gcagttggcaggtgcactatcccagatgggccactaatagaaagttccgcaaatgcaccccgttcccctgtgcgagatcgtttgaatnagaccagaaactg

SEQ ID NO: 668520 - DNA, 130 bp, Homo sapiens
gccttggcaaaagcaccagcatgtgatttacagcagtggcgtgccgggtaacgcgtcatcgtgttcttttcccaggccttcagctacaacgcctctggggtcaccgcagctcgcaattcgtcaatccatg

SEQ ID NO: 668521 - DNA, 132 bp, Homo sapiens
gaggctcttccatttagattcagaaaagttgagcatattttattaccaatgaattttgaaaaccagggctttttttttgttctggggggtacttaaaacaccaactccccccccacccaaatttttttaaaa

SEQ ID NO: 668522 - DNA, 849 bp, Homo sapiens
  misc_feature (312)..(312): n is a, c, g, or t
  misc_feature (635)..(635): n is a, c, g, or t
cgcccgcatctgcgttttatttaggttccagcattacacatagtgcccgtgcctgatgtgtctaatctcgcgtgtgttgctgttggcaaatcatggaaatcaagagagatcagcgtatgtaatccccaaggagtgattagagtctccttcatctatgtctctgacagctgggtttaagtgcatgtcataacctacgcttaagtcttgaaagaatctgatagatcattcttttggctggtaagtccacgatcaaggtgctggcggattcactgtctggtgagagcccatttcctggctcatagatgtgtcctnccaaccattggggtaagaaaaggcgctttttctggggggggggggtggccaacccatattagggttattgtatgaattaaaaactattacggtgatcgctgttttgaatgtgagggatgctgtacttactttcttgttgcgctcgttatctttcttatgcgattttacgacagtgagtattagcttatgtagtattgaatacaagcatgcaagaacgcccttttgcatgtttcgttaacattgatacccggtcttctccaaagtcgtgagatttccataggatgttgtagagtgattcagtctgtaaggacgggaggtgtatngagtgggcacaccccgccccgtctcgttcagagccgtcattcattcgccgttgcctctttaatcgtattcgtgcctatgtttactcttcttatttgtgagaacgtgtggatcttgctcctgtattagtgccggatatgttattcccgatttcacgtgtaggtgttccactgatcatcttcatgcctatcacgtccacttatttgtcactcatct

SEQ ID NO: 668523 - DNA, 305 bp, Homo sapiens
gagcggtacccgccacagcttctctaccatcctttggctatagggtattttaaacatacagatttattttccttttctatttacagtttcctttgggtgagaacggagtgagttggttatgaccgggggacctgagtcacaccactttgattaatgccagctccaccacgcactagctgcatgactttggacaaatttcttactttcttgcagttctgtttacccattggaaaactgaaataataaaaagaacaagcttacgtggttggggagaagctgtggcggccgagaagctgtggcggccg

SEQ ID NO: 668524 - DNA, 575 bp, Homo sapiens
ggcagtgtcccatccgggttgtggaaccaaattttgcttgtgaacagaattccaccagtgtaaggcccaaagccgaaaggttcctccccccccctttccgcccccgggtggtgatttggcaaaggtggccctggtggcattcggggaggaaaaggtggcctcatggattgtggtggtcccggtggaatgttcaaaggtggccctggtggaaccaaaggtggcttccgtggtggccggggcatggaccaaggtggctttggtggaggaaaacaaggtggccctggggggccccctggcccttttatggaccaaatgggaggaaaaaaaggaggccgtggaggccctggaaaaatggataaaggcgagccccgtcaggagcgcagagatcggcccttctagatgcaaagaccccccagaggtgccttggctccccgatttttttttttaacccgaaaatgtttttaatttataattccctatttttaatgttggccccccccttttgatttttccttgtttggactttagtatttttccccctttgtgaaaaaacctttaaacaagtttaatggtta

SEQ ID NO: 668525 - DNA, 352 bp, Homo sapiens
ggacccccaaaaccttcttttttgggggtttttgttcgggggaccgggttaaaaaaacttttgggggggaatttccattttccggtttaaaaaatttccccccaccttacccattttttgaaggtcattttttttaaggggttaaacccttttgtggggcttgagggcaggggataaacttccaattgggcctgggctttgggaagcggggggggggggcccttttgggcccaggtgcctgaaaccagccggggaaaaataaaaaatccgcttaaacaaaaaaaattttttacccgggggggctgggagctggtaccccacttccaatggggggggtatgtttaggcctggg

SEQ ID NO: 668526 - DNA, 111 bp, Homo sapiens
tcccatcagattcatattacaagtatattacttgtaccaatcattactttatatacttaaagttacacaatgttatatatcaattatactgatgtggacgaacgactgcgt

SEQ ID NO: 668527 - DNA, 1048 bp, Homo sapiens
cagatttgcaagtgagctattcccaggactgctctgagactttcatctgtggggctatctggctctttcctcagactgtctgaccttaagcaggtctgaacaaacgcaattcagtgtggcttcaaaagtccctgaattaactgcacaaatatagtccagattagcactattcgtctcgtgcagcttaccgttgctgcgcgctagcagaactacaaatactacgaaccaggctaaaaccgctcttcacggctcaacactcacctgcaactagcgcaagacactgggccctctcactctcctcacactcacggtgcctcaactccatggctctcaactgctcaccaccgtactctcagctcacaacctccttaccaacacgggctgctcctgcacttcggctcacactccacggggcctcccattagcacccttacccttggaccgcgcacacaactcctttgaaatccacacctccccactctccccccacacttacccaccccgtggaacgcgtcccactcactccacgctccccttaaccacttagcacaccctggcgcctcgccaaacctctcacccacagcccaaccctggacgcggagcaactactcgcacactcggccccaccctctccccgaccgacaggcaattgcacactttctcacagggggcacccctgggcacggctcgacgcaactcccacccttacgcccgcctctccggccacctaaccctccctccaccgacgtcgctccccaagcgccaccagaccccagccctccgcgggacgcccaaacgcgcgcacctcgagcccccccaaaccaccgcgcctacaccttaaccgtcgcgcaccgtgggcacgccgacgcccccgcatccccatacacaacggcgcaccacgcgggcaaccccgcgctgtccaagccccaccgggccgcagcaggcgcccacccaagccccgccgccgccccaacgcggcaccgggcaacaaacaacaacgaggaggaaccgagccacgacccggcgcgagcccaccgcgcaaagcgca

SEQ ID NO: 668528 - DNA, 606 bp, Homo sapiens
atgacccaccaatcacatgcctatcatatagtaaaagcccagcccatgacccctaacaggggccctctcagccctcctaatgacctccggctagccatgtgatttcacttccactccataacgctcctcatactaggcctagctaaccaagcagcagcataatccatagtaccaagtgatggcgcgatgtaacacgagaaagcacataccaaggccaccacatcgaaccacctgtccaaaaaggccttcgatacgggataatcctatttattacctcagaagttattggtcttcgcaggatttttctgagccttttaccacgtcgcagccgtagtcccctaccccccaagttaggagggcactgggaccccaaagcaggtcattcaccccgctatatatcccctaggaagtccccagctcctagaatgagcatccgtattactgcgcagtcagggagtatcgaatcaccctgaggcgtcaccatagtctaagtagaagaacaagcgaaaagcaatgtaattgcaaggactgctttttacaaagttcactgggtctcgattttaccctcctagaaggctcggagtacttgcgagtctgccctttcac

SEQ ID NO: 668529 - DNA, 172 bp, Homo sapiens
tggtaaatgagagatccaaacaccaagcgctccagggctttgggatgcacatatgccactgtgaggaggtggatgcagctatgaatgcaaggcacacaaggtggatggaggagttgtggaccaagagagctgttccaggagattctaaagccaggtgccactaactgtgaaa

SEQ ID NO: 668530 - DNA, 384 bp, Homo sapiens
ctaatgctgcctatataaccgcttctcatatgctaatgttgcttggatcgatatctgacttctgactcgtggcattactactggattgtgggttatttattcaactgaagccagcactggtaacatgtgtcgcattagtacactcaatgataccacacttcaggtgctaaacacttgcgtataccaagcagttataaaccatctgcttctaacgccttcatggtatgtggggttctgtatgccacccgtactatgaacaccagaacagaagagattttttactattatgacacaaacacagggaaagagggcaaactagacattgtaatgcataagatgcaggagaaagtgcagagcattaactataacccttttgaccagaaa

SEQ ID NO: 668531 - DNA, 166 bp, Homo sapiens
catggcccaggtcaccccccccctggtccccatccctgaggaagtagaaaaaaacaggcccaagatggcgagccttaaaaaattgcccagctgcctggaattaggcctaaaccacaattttctcttcctaataaacagcctcctaaaggcccccttttattcttta

SEQ ID NO: 668532 - DNA, 111 bp, Homo sapiens
gatttggatggcagggaggggccagccttcaccttggcaccgagacaaagaacttcacggcatcgcggtgcccatgaagcatagctgggcctgggccatggagcagtaggg

SEQ ID NO: 668533 - DNA, 231 bp, Homo sapiens
agtcgctgaaactgacgctcacttcagattcagcagtccgccagaagaggctgagcacatactgagcccaggagcaggttcctgtggcggcagaaccccagaatactcgaactataagcaaaagaacaaattcagtcccttctccattaaatggtacacgcagaaatatgaaacctgagcattgttaccacagtgaaagcagaacaagtcgttggccagtttcatctgact

SEQ ID NO: 668534 - DNA, 298 bp, Homo sapiens
catgtgaacgttgtcaagtacaatcgaaggctgcagagaccaatttgaggcacacctgtaaacggctcatggacatggtgagcaaccagcaccccatggtatggcgcacgtaaggaagctcctacgagcgcaacaccgtaggaaatcccagatcagctacctcagttatggccgagccacgcaatcaagggaaaaccagcaatcacggaaacatccatttcaattataagcaaaattaacgacgtccaggcttgactttcagaaaccaggacctttctccctcttgacgctcgtagga

SEQ ID NO: 668535 - DNA, 194 bp, Homo sapiens
ttcactgttgccattgtgtgccactggtttagacactggttgctgccgtggacgacagtacggggacacagagaacaagattactatcactaatgacaagggccgttggaacaaggaatacattgaacgtatggtccaggaagccgagatgaacaaggctgaagatgacaagcagagggacacgggagtcatcc

SEQ ID NO: 668536 - DNA, 1077 bp, Homo sapiens
  misc_feature (268)..(268): n is a, c, g, or t
  misc_feature (365)..(365): n is a, c, g, or t
  misc_feature (562)..(562): n is a, c, g, or t
  misc_feature (581)..(581): n is a, c, g, or t
gaagacacagagggacattcatcaagagggccatatgatgacctctgctagcatgctgtggctagcagaaacactccatcttagcttcgtatcgtgactagctagtcgtatgaccatctcagagtactttgaacgcgctttagtgtgaaggctggtcgcagaacagctcattgccagcaacgtgccgatccttgggaaaaccatacttagagtatcctcttataatcgaaatgtcaagtgtatctgcaacagaaggctgtgttactcntgtgtggatcgttgtgcaggcgagaacatcatacgattaggctagacaggaccagctctccaccatgctgagccatcatgcccaagtgcgtctttgntaactttctgcactggtggacaagtgaagtctggactgccttgggtaatggtggatgtgctcattgttcatactcagtgggattagagagcggaaggaatggaagaggtggaaaggtgcattaatgcagcaaacgcatagtcgtaatgggcaaattcactcgaaagtcgtggcagagtacagtcatccaaaactagnttccttctctcaatctgtnagagagggcacgcgtagacctttaacagtctcgtttgggcaagctggtggtctggctaattcctagagggtaaagaaaatgcgttgtagatacaggaaataaggttgtcaaatgaggaactaagcaacgttcgcactgggttatccgggaagaaggactagtttgcatgaggggtttaaggaaggtgaggttgtggactatactgcaccaggaagctgttggtgcaccgagaactagttgcgctccagtctggaatagcgcttgatcacacaatgggcacgccacggaatacgccatctaagtctgaatcccagcggtcggggctcctgtgccaagctttactcttcactccagggtgcggaatgccacgatgcttacaggaccatggggagcttggtgctagtggaaaacctctggtgcctggtccactaaagaacaagggggaaaacttccccaattgggttgaaaccccttcaactggtggttgtcaacctaa

SEQ ID NO: 668537 - DNA, 371 bp, Homo sapiens
gctcaaatgaatcttctcttcagtttttttgacaagagttgaaggattcgtgttaattcttctttaaacgtttggtagaggccggacatattgcctactcacaatctgtaatcccagcactttgggaggccaaggcaaacaaataacgttgagctcaggagttcaagaccagcctgggcagcatggtaaaaccccatccctaaaaaaaaaaaattaaccaggtgtggttgctcacacaagctactcaggaggctgaggctggaggatagcttgaagtccaggaagcagaggttgcagtgaactgagactgtgcccctacacttcaccctgggcaacagagtgagaccctgcctcaaaaaaaggaaaaaaca

SEQ ID NO: 668538 - DNA, 113 bp, Homo sapiens
atgggcggtgagagagattcatgcaacgaaaggatggcagcatggcagacatgggagattaagcacatatggggattgatcaaagtagtaaatatattaaggataacaaatta

SEQ ID NO: 668539 - DNA, 124 bp, Homo sapiens
gggtttcctctttcacaccttccctgtcatgggcttatcctacggtatacagacgcacacagagcattatgcgtgggcatgagaagcgcgaaaagcgaggggtgaggcggtgggcgactgaggg

SEQ ID NO: 668540 - DNA, 136 bp, Homo sapiens
aatactgtagaatacatgtaggagaatactgtaggagaatactgtaggagaatacatgtaggagaatactgtaggagaatactgtaggagaatacatgtactgtaggagaatacatgtaggagaatactgtaggag

SEQ ID NO: 668541 - DNA, 563 bp, Homo sapiens
ccggctgaagctgctgcccaggctatcctgctccaccccctgccccagcctggcctccgcgtcccgttccccgttctaggggcacacgtggagccatggccctcctccaccaggcatgcgccctccagcctggcgtcaggcgtctctgcttggctcccccaggccccccaaactggctaggggccccgccacacaaagtggggacaccccgtggctggagccctgctgctgctaagaaacagacccccagacccctgcggctgggcaggcctcgagggtggcacgtggacagtagaagaatagatgggccccccactgctagccgcgggtgccccgggccccctgagaccgcagcaccagatgtcgcttcccacagtccatcagaatggtaacattcccacattcatattcctgaggtgcagcggggaggagcagatagagctgggcagtggcaggtgtgggtggagcctgaacctggaggggcactgagctggaggcccctgcaagggtaggggacaaagatgtaggctccagactacccctcagacctcctcatctcatga

SEQ ID NO: 668542 - DNA, 314 bp, Homo sapiens
cattcctgtgctttctgcattatacttggaatctttggatactctcctttgagcttccgggcctccttctgccatattcaccaacaccaccattgttgaggagtaaatgatagctggaaaaagcgtttcatttctctcctgagctgtttcaacacatcatatcaattggacctttcggacacaaaacagccactaaatcatatactgaaatcacaaccatgatgagccacgcagtccattcagggagggacttgattaacaccatagtcatgagggcacttatcataatgagatttgcctgctggaatcaaaat

SEQ ID NO: 668543 - DNA, 132 bp, Homo sapiens
cctcgacaaggaagcggatagtgaagtgttctcgagcccgctgctctgcagggcctgcaggtcctggcgggcagctgggctcagcagctccagattcttcacttccacttcgttcacttaatgccgctagcg

SEQ ID NO: 668544 - DNA, 779 bp, Homo sapiens
tagcacctccgcgccgtcgccatgtctgcggtttttcaccaccgtgttctggacagctgagtcctgagtcgtccttgtcctgtgtggagtgatgctcgtcaccaaacctgtctggagtgcaactatgtgcaaacatgccattgtttgctgctgctgatggattgaagaatgataccaagagatgtttgtcctgcatgtgccaatggacaagatgtgttttgatgtgatgctgaccaaccttgctcctgtgaccatcctgtaattgccattgaagattctgttgattgtcagccaatgttgccttggacagatgttttgatgcttcctgtgtgacaaatggcatactgtgtgcaatgtgcgcaagaatgccatttgttgtgacaacatgcaatgtgttgtaccacccttgtgtatctactatacctgcattccttgtgcttgaccctaagatgtggactcatcattaatttgatgactatgtgtcggaatggcataatgtgacactgtgtgaacgactcgcaatgactagaacaaatgaaacaaattgccaatcggctcttgaagcagcctctgctgtacagcaatgaatcctgagaaaattacgagaccggatgaatattcagaaggtcaccgataatacaccaaagctaacaaaggcatagaaagcgcctggagccatgtccttgctgtgattgcagacttgcttgatggaaacatcgatgcgaggatttcatgacaggtctcttcaagaattgagggattggcggtgatgacgggag

SEQ ID NO: 668545 - DNA, 160 bp, Homo sapiens
cagccgggtaatcgggaatacttgcctcacaggttctactccaaagaccacatcatcgaaaccgcatacatatcatacacagacgcctgagccctatctattactctcatcgctacctccctaacaagcgcctattgcactcgtaataattcttctccac

SEQ ID NO: 668546 - DNA, 202 bp, Homo sapiens
tagtcggtaccctcataatgtgtgccagcatgacaacatggtgaaactaataatacaaaaattagctggccgtggtggcgggtacctgcaatcccagatactcgggaggctgaggcgaggagaatcgcttgaatctgggaggcggaggttgcagtgagccgagatcacgccgttacactccagcctgggcaacattatggag

SEQ ID NO: 668547 - DNA, 121 bp, Homo sapiens
gccggacctactttccacagggattaagtattatctctacctccaattcccccccagctcaagcttcctatttacactttaaaacccaaaaccttaatctgtgggtttaatatggatctaa

SEQ ID NO: 668548 - DNA, 400 bp, Homo sapiens
gtaccccccacccaacccagctcctgctgctgtcccagtcttgagctggggcctggaaagaggaagaggctgcctgaggctggccagcccgctgtgcactttgaccccagttccttgccgcacggctgctaacagactgccactgtgagatgcgttgcaggcactcccagagcagccatggaaggagctggccatcacaccatccacatccacaatacctcatggccagctgcccacaccagtgccaggtgggagagggagcagaacagccagaccccttccaggtggcagtcggaagggttattgttataatttctgttgccattagagtaaatactagtatttttggaaaaaaaataatgtaaagatgatatatataaaaactctgaattaataaaaa

SEQ ID NO: 668549 - DNA, 186 bp, Homo sapiens
  misc_feature (155)..(155): n is a, c, g, or t
ggatttgctggtgcagtacaactaggcttaatagggacatgttttaatttctagctttttatttttgtgtgtttgttgtatgttatttttgatttgaggttaccgtgaggcttgcaaatgatataactcattttaaactgctgacagcggaacantgattggataaacaaacacatgagcaagaga

SEQ ID NO: 668550 - DNA, 1114 bp, Homo sapiens
  misc_feature (290)..(290): n is a, c, g, or t
ctgctcgcatctgctattctgcgagtgccggactcgacgaacaggttgaacagtctaccctcccttagcccgggaactactcccacccctgtgagacctccgtatacctaatctaatcattcatcccttacatacttaggcttgagtaatcctccgatctattctttaagtggggtccatcacattatcaatcagctagacgaatcttaatcacatataaaaaccccctctgccataatccccaatctaccaagaacgccctcgtcttcgccgtcgtagatccaggtccntacatcacaagctacggtccatagcctttctctcgtagtcgtcatcccctgagtataccataagacctcgccatggggccattcgacgtaaataacttgaccttgacacctacgatcactggcagagcgccgtgccaaatcgatcgcgagcccttttcgtttgctggaccacccccggacgcgaggagagcaggtgcaagacgcacgcaattttactaagtaccacctagattcagccctgagtctccctgacttgggttgccgcgatgttcatgccttgcacaccgatgctactaggttggcttctatttgcgctacacaccatgggtgctattccgcgcaaactgaatgttcctacgccaagtaagtatggtcatactctgttttgatcctacgcgtgcccgcggcgaaatacaaagagaggaaaacccatagtttgtggcgcactcacccactttagcacattcatttgttgtctacctcggaacgtccataaacattggatctttactcccaaacggtttgccgacctcttcccccttaaggaagaaggttctctaacttccggttggcgttggactggcccaacagacgttcgaaagtcaccttacctttctagtcgccgagggactaaaggggcaaaactttattgcagcggacttacgcaaaacctaccggaaccagacgcggcaaagttcgttgtgttcctagcccccgtcccccggaccttacacaccaagatatactttccacctctcgccgcttttatttcccctcataacgccgggcactggttctacagcagcctaagttcaagggcctgg

SEQ ID NO: 668551 - DNA, 271 bp, Homo sapiens
  misc_feature (22)..(22): n is a, c, g, or t
  misc_feature (42)..(42): n is a, c, g, or t
  misc_feature (228)..(228): n is a, c, g, or t
aatggcgggctcaaagtttatnaccccagcacttctgggagnccagggtgggaggatcacttgaggccagaaattcgagaccagcctgggcaacatagggagacctcaaatcaatgtttaatgacctgggtgtggtggtgcacacctgcagtcctggctactcaagaggctgaggtgggaggatcccttcagcctggaagctcaaggctgcagtgattatgccaccanactccagcccacatgggtaacagagcaagaccctgtctctaaa

SEQ ID NO: 668552 - DNA, 580 bp, Homo sapiens
ggacgtgctcatactgggcacgcgtccttctggccacgctccttctggccacgctccgatctggccacgctccttctggccacgctccttctggccaccccccctgcatcgcctgcaagaccgttattcgttgcgctgcgcgccacatgtgctcggtgtattggcggacagcctgaactggctgcgctcgtccatcgagatcgaactgaacagcgccaacgacaacccgatcatcgacgccgaagaagaacgtgtgcctgcatggcgggcacttctacggcgggcatatcgccttcgccatggacagcctcaaggaccctggtcgccaacgttgccgacctgctcgaccgccagctcgcactgttggtggacgtgcgctacaaaccatggcctgccgagcaacctctcaggcgcccccggttgaccgcgccatgatcaaccacggcttcaaggccgtgcagaatcggcgccaggcgcttgaaccgccgaagcgctgaaaaacaccatgccggccagcgtgtactcgcgctccaccgagtgccataaccaggacaggtgagcatgcgtgccagaaggggta

SEQ ID NO: 668553 - DNA, 100 bp, Homo sapiens
ttctctgggcacagtcctgttcagctaccttgcttcgacagcatctggtttggctgccctgatgggatcatagtgagtgctttgctatcggtgttcgaga

SEQ ID NO: 668554 - DNA, 657 bp, Homo sapiens
tagggacaaataatcatttgctcggcatgttaaatcaagctataaaaagtattgagaaaataaactagtgctgtgtatagctaataggttaaagaagtctagtatctagtagataaatataccagttttataaaaacagatgctagatgtgcctcatatcatcgcagtacattaattatctcatgtaaaaaacagatagctactacaaatttgtactcaagcctaatatggtaacctgaagtttatatcatggcatagaattcattataggtgatacaccatatgtagaattcagacacatttaagagacagtattctaccattcagtaattatggttaatagatttaaaacacttctcagtgtatttaattacaaattagttttattcattggttatatgctgctattgtaaggacagatgtgtatttgaatgtaccattataagaagaattctatgtatcttaaactatgatcttctaaaattttattaccgtaagtacttctgtggcctaaagtattttttaaaaggctcaactgtaaagcctcttagccagttggataaatatttggggtcccctaggcattgaaagcagaaagcagagtgacacgctatcacttcaagagccatgaaaacattctcaacaggaaatcctctt

SEQ ID NO: 668555 - DNA, 1155 bp, Homo sapiens
acatgacaaaacctcgtctctacaaaaaatataaaaattagctgggcatggtggctcatgcctgtattcccagctatttggaggcctgaggtaggaggataacttgatcctgggaagtggaggttgccgtgagctgagatgccaccaccgcactccagcctgggcaactgagcaagaccctgtctcaaaaaaaaaagaaaaagaaaaaaacgtttttgaacccggcacagagagctaaatgcctgatagctctcagcattttggggagacataccttggagggatttcgtttgagcccaaagaggttttgagaccagcctgtggggcagacttgggcagaaacttcacactctctacaaaattttccaaaaatttagccaggcattggtggtgcattgcctgatgttcccagcatactcattgaggctgacggcagaaaaattcgctttgagcccgtgggtatggttcaacgggcttgctgtggcaacccgagtatcaacacccagggcaacttgtttgccccagggttatactgtagttggaaaacccccattttcaagatatgataaaacacacataaaagaacaacaccgcgggcgaatgtggtggtgagtggagtcacccagtgtggtggtcaccccaagttgtgttcacggagacacattacgtggttgggcagaggattttgcgtttttaaccccccccagggagtttttttagaccccccagtgcttgtgggcgcacaattattgtgggtagagaggacccccccgtatttatttcttaccgacaagaagaaactatacaatcactacagacatcactctgccacgacaacaatatcataagacagaatagcgaagaataaggataagaatcgaagagaaagaaccacaactagaaaacaaaacaaacagtccgacagaaaaacaaaacaaaaggaaggcgggcgagcccaataaaacataatgagcggcggaggagcaagcacaaaagacaggcacaaccagcctaaacagaggagaggggggcactaagggagacgcgcacaatatacaacgcgggcgcgccggcggacaatcagaaccgcagggtgagaggagcgaaagcacagcgcgagcacaactgagcgaggaacaccatacctggaaggag

SEQ ID NO: 668556 - DNA, 361 bp, Homo sapiens
ggatgttctacaccttttcaaggggtgagatgccattttccctcatgtagatactctatgggagaaacatgcaagagaaaaaagaaaccttcatgttgggctttctttttgctgacaataagatcatgcaacaatatcctatttgcatgaaaatgtagccatcttacaacaggaactatacattcataagcatacttttgaatggaccatttggaaaactttttaggcacaatcgaatttatgcagtatcaagagatacaactataaatggcctgatttttgagtctaggtacgttttgggattaaacactgttcctaaacactggaagaggagaaaagtaaagtttaaagagagcaatta

SEQ ID NO: 668557 - DNA, 262 bp, Homo sapiens
gatcaggtgaccatagatcttcaaatgtgttatgtgaccctacttagaagtctggggctgagaatcacttcgctaagcatgcgcctctcaaggttcactacgcatacatatcattgggtatgctgggccccctctaagtaatgtgattctgcaggtagggaaagtttccatgaacgggcttcttaaacaaggtccccggatcaaggctgactgtggctcctcctagacccccttactcaattacgcacctcagactagacgg

SEQ ID NO: 668558 - DNA, 277 bp, Homo sapiens
aggcattggtgtaacgcctgtaatcccaacactttgggagaccaaggcgggcagatcacttgaggtcgggagtttgagaccagccaggccaacatggtgaaacttcatctctactaaaaatacaaaaactagccaggtgtggttctccatgcctctgatcccggctactcgggaggctgcggcacgagaatcacacgaccccgggaggcaaaggtcgcagcgacctgacatcgtacccccgtcctccagcctgggcgaccgcgcctgcctctctctc

SEQ ID NO: 668559 - DNA, 930 bp, Homo sapiens
ccgcgcggctggtgctcaagcccccatctcccctttgtgttgcgcgaggggactacctctccgttggtcgcctgtctggagatgttctcctccccccgggtgtcgctctttttggggtaatctacggcgacttcggggaattctcccttgggcctgtcttccaaatagtttgtgctccgccagacacctgtattgcctcctcggtatgggggcccacggcccgccgctgctcgtccaacgaattgggctgtgcgacgaccccacgatggggcgcgcaaaacgctttttctcccccccccccgccgctggtgacaggggcgaccccaccttccgccacagaccaccttgttcggggtgccctcaaaaagccctccggtgccccacaaaaggggccctctctgggccctcccccgccgctgtcctaggtattaaaagggtcctcttttcccgccctctgtcaggagggcgctcgcactgtgacacccgctcgtgtcgcggtaacgctattagtgggaaaaatctggtctctgtaattgggcgccgcagttgtacttcttgttgccatgggcggttttcctcactgtgaaagggctgtgagttgctgcccgctctccgctgtgaacaagggaacaatgtttgtctctcataacactggtaagggaacacgcgtcaatcttcttttctcgggcgccgactacaagatggttcttctactcccatgtctgtgcactttccgccccatatgagtggttcccgctagatcacccagtcttgctagataacacccaaacgcgttcgccccttatctacaatagttcgtccgccaagatactaagaatatcaactcgcggatgcatagtcctcttaataatccgcagattaaggatgttacccctctgcccaaaaacgaccactgcggcccacaaaaca

SEQ ID NO: 668560 - DNA, 132 bp, Homo sapiens
acctccagggttcatgccattctctggcctcagcctcttgaattgctgacattatgggcgtgagcgcccactcccagcctttgcccattttaaaatcgtggtatttgtcttcctattgaccatgagagccct

SEQ ID NO: 668561 - DNA, 103 bp, Homo sapiens
  misc_feature (73)..(73): n is a, c, g, or t
ctgggtgcatgcattggtctccctggaggacgtcggctggctgactcgcagtggaagaacaagcacatcaggnacccatggaaacagcgaggtgggctgcgat

SEQ ID NO: 668562 - DNA, 220 bp, Homo sapiens
ggggggggttaaaacctgaaaaggggacctttttttttttaggggtaaggccccccccaaaaaaagggaaaaaaaaaggtttaggggttgggtttccaaccctgggagggggttaggtaaccttaggggccttaaatttgaaaaggttttttttaggtcctggcccccttcccggccctttttggggggggggggggaaaaaaagccttttttaaagcca

SEQ ID NO: 668563 - DNA, 243 bp, Homo sapiens
aaatcccaactattcagctctcctcatgagaaggacctgctgtttaaggactctgcccacgagttttcaaaagttccccccaggataaacgccaagacgcacctgagctatgagtataccactgccatccggaatttacgggaaggcacatgcacagaagccccaacaaataaatgaaagcatatgaagtggagtgtgttgacccaccacgagcgaccaacgagtcatggacgaagtgtcaac

SEQ ID NO: 668564 - DNA, 385 bp, Homo sapiens
gatgaagctactatacatctacaatcgggttatagttggggcttcgtactcttctctccctctaccatatactgctgggttccaggcccattcctctagcgacctgtacagccacagggcctgcactccctagccagagcgctcagtacgcatgttacttaccatcaatggaagcacctcatggtttgctggtggaacggcaggattagcttcataagctatgccaccaccagctcctagaggtggaaatttctggcctcctgaaccatagggatctcccatgttcattgctcctccggcacccattacgcatgtctctattccccgtggatccatgtatgcccattcggctgtaactttcctctctttggcgcctcattttttc

SEQ ID NO: 668565 - DNA, 793 bp, Homo sapiens
  misc_feature (75)..(75): n is a, c, g, or t
ccggtgccatcgactactgcaaatccaaagcgtcaaccttcgccttcatggagagcctgaccctggggctgctgnactgtccgggagtcagcgccaccacagtgctgcccttccacaccagcaccgagatgttccagggcatgagagtcaggtttcccaacctctttcccccactgaagccggagacggtggcccggaggacagtggaagctgtgcagctcaaccaggccctcctcctcctcccatggacaatgcatgccctcgttatcttgaaaagcatacttccacaggctgcactcgaggagatccacaaattctcaggaacctacacctgcatgaacactttcaaagggcggacatagagacaggatgaagacatgcttgaggagccacggagtttgggggccacagcacctgggcacacacccgagcacctgtccattggcatgcttctgctgggtgagcaggacagctcctgtccccagcgaagaatccggctgcccctgggccagtcccaggacctttgcacaggactgatgggtataactgacccccacagggaggcaggaaaacagccagaagccaccttgacacttttgaacatttccagttctgtagagtttattgtcaattgcttctcaagtctaaccagcctcagcagtgtgcatagaccatttccaggagggtctgtccccagatgctctgcctcccgttccaaaacccactcatcctcagcttgcacaaactggttgaacggcaggaatgaaaaatagtcgacgcggccgcgaattta

SEQ ID NO: 668566 - DNA, 150 bp, Homo sapiens
taattgtattgagagaagacatttccattatgcacagtatggatggatggacattgctattcgccatttcttgacttagcgacacctaggaaggcgtttgaacatactttttacaaacaaagaattggtatctgtgcactacaacagtgg

SEQ ID NO: 668567 - DNA, 303 bp, Homo sapiens
  misc_feature (52)..(52): n is a, c, g, or t
gcaggagcaagggggcggcccagccacgcggcatgctgactcccacgggccnttctgtttcggcttctttctcaaaaatccattccgttttctgggggcaatcttatgggcttcttggggttgcagctgggttcagccttggggttacaggttagggtcttaaaaagcaggcagaagccttgggttagaatccaaacccagcccgagtcaccaatcaggctttcataagacctttcactctgattacgggcaactgggcttcaggcagtttcccacagagcagcagactgaggaaagagacgg

SEQ ID NO: 668568 - DNA, 459 bp, Homo sapiens
gcggccgcctactactactactgctcgaattcaagcttctaacgatgtacggggacatgcttctgctgggtgagcaggacagctcctgtccccagcgaagaatccggctgcccctgggccagtcccaggacctttgcacaggactgatgggtataactgacccccacagggaggcaggaaaacagccagaagccaccttgacacttttgaacatttccagttctgtagagtttattgtcaattgcttctcaagtctaaccagcctcagcagtgtgcatagaccatttccaggagggtctgtccccagatgctctgcctcccgttccaaaacccactcatcctcagcttgcacaaactggttgaacggcaggaatgaaaaataaagagagatggcttttgtgatttcctttgttcaaatcttccgtgggcagttgggagggagccagtcccaaccataaa

SEQ ID NO: 668569 - DNA, 1247 bp, Homo sapiens
  misc_feature (881)..(881): n is a, c, g, or t
  misc_feature (890)..(890): n is a, c, g, or t
  misc_feature (896)..(896): n is a, c, g, or t
  misc_feature (928)..(928): n is a, c, g, or t
  misc_feature (931)..(931): n is a, c, g, or t
  misc_feature (937)..(937): n is a, c, g, or t
  misc_feature (941)..(941): n is a, c, g, or t
  misc_feature (1035)..(1035): n is a, c, g, or t
  misc_feature (1051)..(1051): n is a, c, g, or t
  misc_feature (1072)..(1072): n is a, c, g, or t
  misc_feature (1094)..(1094): n is a, c, g, or t
  misc_feature (1133)..(1133): n is a, c, g, or t
  misc_feature (1139)..(1139): n is a, c, g, or t
  misc_feature (1147)..(1147): n is a, c, g, or t
  misc_feature (1170)..(1170): n is a, c, g, or t
  misc_feature (1173)..(1173): n is a, c, g, or t
  misc_feature (1192)..(1192): n is a, c, g, or t
  misc_feature (1216)..(1216): n is a, c, g, or t
gcccgcgagcggacgcggcagcgcctctgtctcgctttttcttatttttcccccctttcccctttcttttttttttttccttttcttttctcccctcccccccttaacatttgccctgcgaaggggcttccccgggaaggggcaaagggggcatacccgagttgaacatctttagcaataaacgaaagtttaactaagctatactaaccccagggttggtcaatttcgtgccagccaccgcggtcacacgattaacccaagtcaatagaagccggcgtaaagagtgttttagatcaccccctccccaataaagctaaaactcacctgagttgtaaaaaactccagttgacacaaaatagactacgaaagtggctttaacatatctgaacacacaatagctaagacccaaactgggattagataccccactatgcttagccctaaacctcaacagttaaatcaacaaaactgctcgccagaacactacgagccacagcttaaaactcaaaggacctggcggtgcttcatatccctctagaggagcctgttctgtaatcgataaaccccgatcaacctcaccacctcttgctcagcctatataccgccatcttcagcaaaccctgatgaaggctacaaagtaagcgcaagtacccacgtaaagacgttaggtcaaggtgtagcccatgaggtggcaagaaatgggctacattttctaccccagaaaactacgatagcccttatgaaacttaagggtcgaaggtggatttagcagtaaactgagagtagagtgcttagttgaacagggccctgaagcgcgtacacaccgcccgtcaccctcctcaagtatacttcaaaggacatttaactaaaacccctacgcntttatatanaggagncaagtcgtaacatggtaagtgtactggaaagngcncttggncganccagagtgtagcttaacacaaagcacccaacttacacttaggagattcaacttaacttgaccgctctgagctaaacctagccccaaacccactncaccttactaccaggnaaaccttagccaaaccatttnccccaataaaagtataggcggnaggaattggaacctgggcgcaataggatatagttccgcnaggggnaaggtggnaaatttttaccccaagcctaatnttngcaaggggttaaccccctntacccttctgggataatgggtttnccttgggaattacttttcccaagggggggcc

SEQ ID NO: 668570 - DNA, 1256 bp, Homo sapiens
  misc_feature (890)..(890): n is a, c, g, or t
  misc_feature (899)..(899): n is a, c, g, or t
  misc_feature (905)..(905): n is a, c, g, or t
  misc_feature (937)..(937): n is a, c, g, or t
  misc_feature (940)..(940): n is a, c, g, or t
  misc_feature (946)..(946): n is a, c, g, or t
  misc_feature (950)..(950): n is a, c, g, or t
  misc_feature (1044)..(1044): n is a, c, g, or t
  misc_feature (1060)..(1060): n is a, c, g, or t
  misc_feature (1081)..(1081): n is a, c, g, or t
  misc_feature (1103)..(1103): n is a, c, g, or t
  misc_feature (1142)..(1142): n is a, c, g, or t
  misc_feature (1148)..(1148): n is a, c, g, or t
  misc_feature (1156)..(1156): n is a, c, g, or t
  misc_feature (1179)..(1179): n is a, c, g, or t
  misc_feature (1182)..(1182): n is a, c, g, or t
  misc_feature (1201)..(1201): n is a, c, g, or t
  misc_feature (1225)..(1225): n is a, c, g, or t
gacttcgagcctgcactttttactcgggcctatgcatttacccatgcgagcgggcaaagaccggagagatggacttgtagatgaccacgatctagaggggcacgcgtggcgcagcgcagcagtgccggtcacgacgcttaacctagccacgcctgcacggaccatagcagtgattaacctttagcaataaacgaaagtttaactaagctatactaaccccagggttggtcaatttcgtgccagccaccgcggtcacacgattaacccaagtcaatagaagccggcgtaaagagtgttttagatcaccccctccccaataaagctaaaactcacctgagttgtaaaaaactccagttgacacaaaatagactacgaaagtggctttaacatatctgaacacacaatagctaagacccaaactgggattagataccccactatgcttagccctaaacctcaacagttaaatcaacaaaactgctcgccagaacactacgagccacagcttaaaactcaaaggacctggcggtgcttcatatccctctagaggagcctgttctgtaatcgataaaccccgatcaacctcaccacctcttgctcagcctatataccgccatcttcagcaaaccctgatgaaggctacaaagtaagcgcaagtacccacgtaaagacgttaggtcaaggtgtagcccatgaggtggcaagaaatgggctacattttctaccccagaaaactacgatagcccttatgaaacttaagggtcgaaggtggatttagcagtaaactgagagtagagtgcttagttgaacagggccctgaagcgcgtacacaccgcccgtcaccctcctcaagtatacttcaaaggacatttaactaaaacccctacgcntttatatanaggagncaagtcgtaacatggtaagtgtactggaaagngcncttggncganccagagtgtagcttaacacaaagcacccaacttacacttaggagattcaacttaacttgaccgctctgagctaaacctagccccaaacccactncaccttactaccaggnaaaccttagccaaaccatttnccccaataaaagtataggcggnaggaattggaacctgggcgcaataggatatagttccgcnaggggnaaggtggnaaatttttaccccaagcctaatnttngcaaggggttaaccccctntacccttctgggataatgggtttnccttgggaattacttttcccaagggggggcc

SEQ ID NO: 668571 - DNA, 116 bp, Homo sapiens
cgaggcgtacgtaggctacctataggactcccggcaggcaggctctgctggacgagaagaactaaggatgtgctgctgcaggtggatgacgagcggaggaacgcgagcagtacaag

SEQ ID NO: 668572 - DNA, 983 bp, Homo sapiens
  misc_feature (75)..(75): n is a, c, g, or t
ccggtgccatcgactactgcaaatccaaagcgtcaaccttcgccttcatggagagcctgaccctggggctgctgnactgtccgggagtcagcgccaccacagtgctgcccttccacaccagcaccgagatgttccagggcatgagagtcaggtttcccaacctctttcccccactgaagccggagacggtggcccggaggacagtggaagctgtgcagctcaaccaggccctcctcctcctcccatggacaatgcatgccctcgttatcttgaaaagcatacttccacaggctgcactcgaggagatccacaaattctcaggaacctacacctgcatgaacactttcaaagggcggacatagagacaggatgaagacatgcttgaggagccacggagtttgggggccacagcacctgggcacacacccgagcacctgtccattggcatgcttctgctgggtgagcaggacagctcctgtccccagcgaagaatccggctgcccctgggccagtcccaggacctttgcacaggactgatgggtataactgacccccacagggaggcaggaaaacagccagaagccaccttgacacttttgaacatttccagttctgtagagtttattgtcaattgcttctcaagtctaaccagcctcagcagtgtgcatagaccatttccaggagggtctgtccccagatgctctgcctccacacccccacgggaaacagcagtgattaacctttagcaataaacgaaagtttaactaagctatactaaccccagggttggtcaatttcgtgccagccaccgcggtcacacgattaacccaagtcaatagaagccggcgtaaagagtgttttagatcaccccctccccaataaagctaaaacactctttacgccggcttctattgacttgggttaatcgtgtgaccgcggtggctgggtcgagcggccgcgaatttagtagtagtagtagtcgc

SEQ ID NO: 668573 - DNA, 892 bp, Homo sapiens
agcgggtcctgggtcgagtcaggtcgctccctgtcgctgccggagagtctctgcttcccccttcctacgcgctccggtgtggtagctcgggctctccggaggagtggggcgacggagaaaaggagaggctgacttcattaaagtttcctgaaactaatcgaactaccaccgatagaaggcccaaggtgggcgggagacctccccattttcctccgacccctctcactagagcctgaggtgaccgttgcaagagtggtagccggcagctggtgggaccccgggtttgcgggcagtgcatgacgttgccccggcgagggaagccgtccaagggtcctgcactcgcttccggtttcgcggacatccttcgggtggtggcgggacggcaagacttggctgccctgtgggcgggttccatcctgatctaacctggcacctcacgtccgcgtcgacggctcatccccggctcttagaccacggcaagacgcgcgaggggtgcggcctgttgaggacccgctcggcacagtgagatgcggtcgtacgggccccggtcggcacgtggtgatcgctgtgttgaggcatggtgggcttcgtttccggcggttctagccgacccgggcggagggacctcctatgtgggggaaaagcccgcacaagttcagggagcgcactaagtgggcccgggggttttccccgcgcagcaagttgggttcccacggtgagaatgttgcttaagctaccccagaggtgaggggcaccccagaagggggcgggcaggtcaacaaacagggccaaagggcttggtccccacaggcagggcccggccggggacataggccgtccccattttccctttcgcggaacgtcagcagaccagagcgcagtccctaaaaag

SEQ ID NO: 668574 - DNA, 997 bp, Homo sapiens
  misc_feature (631)..(631): n is a, c, g, or t
  misc_feature (640)..(640): n is a, c, g, or t
  misc_feature (646)..(646): n is a, c, g, or t
  misc_feature (678)..(678): n is a, c, g, or t
  misc_feature (681)..(681): n is a, c, g, or t
  misc_feature (687)..(687): n is a, c, g, or t
  misc_feature (691)..(691): n is a, c, g, or t
  misc_feature (785)..(785): n is a, c, g, or t
  misc_feature (801)..(801): n is a, c, g, or t
  misc_feature (822)..(822): n is a, c, g, or t
  misc_feature (844)..(844): n is a, c, g, or t
  misc_feature (883)..(883): n is a, c, g, or t
  misc_feature (889)..(889): n is a, c, g, or t
  misc_feature (897)..(897): n is a, c, g, or t
  misc_feature (920)..(920): n is a, c, g, or t
  misc_feature (923)..(923): n is a, c, g, or t
  misc_feature (942)..(942): n is a, c, g, or t
  misc_feature (966)..(966): n is a, c, g, or t
ctcgaccggatcgtcgaattagaagcgggtaagagtgtctagatcataccctccccaataaagctaaaactcacctgagttgtaaaaaactccagttgacacaaaatagactacgaaagtggctttaacatatctgaacacacaatagctaagacccaaactgggattagataccccactatgcttagccctaaacctcaacagttaaatcaacaaaactgctcgccagaacactacgagccacagcttaaaactcaaaggacctggcggtgcttcatatccctctagaggagcctgttctgtaatcgataaaccccgatcaacctcaccacctcttgctcagcctatataccgccatcttcagcaaaccctgatgaaggctacaaagtaagcgcaagtacccacgtaaagacgttaggtcaaggtgtagcccatgaggtggcaagaaatgggctacattttctaccccagaaaactacgatagcccttatgaaacttaagggtcgaaggtggatttagcagtaaactgagagtagagtgcttagttgaacagggccctgaagcgcgtacacaccgcccgtcaccctcctcaagtatacttcaaaggacatttaactaaaacccctacgcntttatatanaggagncaagtcgtaacatggtaagtgtactggaaagngcncttggncganccagagtgtagcttaacacaaagcacccaacttacacttaggagattcaacttaacttgaccgctctgagctaaacctagccccaaacccactncaccttactaccaggnaaaccttagccaaaccatttnccccaataaaagtataggcggnaggaattggaacctgggcgcaataggatatagttccgcnaggggnaaggtggnaaatttttaccccaagcctaatnttngcaaggggttaaccccctntacccttctgggataatgggtttnccttgggaattacttttcccaagggggggcc

SEQ ID NO: 668575 - DNA, 979 bp, Homo sapiens
  misc_feature (613)..(613): n is a, c, g, or t
  misc_feature (622)..(622): n is a, c, g, or t
  misc_feature (628)..(628): n is a, c, g, or t
  misc_feature (660)..(660): n is a, c, g, or t
  misc_feature (663)..(663): n is a, c, g, or t
  misc_feature (669)..(669): n is a, c, g, or t
  misc_feature (673)..(673): n is a, c, g, or t
  misc_feature (767)..(767): n is a, c, g, or t
  misc_feature (783)..(783): n is a, c, g, or t
  misc_feature (804)..(804): n is a, c, g, or t
  misc_feature (826)..(826): n is a, c, g, or t
  misc_feature (865)..(865): n is a, c, g, or t
  misc_feature (871)..(871): n is a, c, g, or t
  misc_feature (879)..(879): n is a, c, g, or t
  misc_feature (902)..(902): n is a, c, g, or t
  misc_feature (905)..(905): n is a, c, g, or t
  misc_feature (924)..(924): n is a, c, g, or t
  misc_feature (948)..(948): n is a, c, g, or t
ggtacgagagagttataaatcaccactacatctgcaattataggataatacacatctgagtagggagacactaccagttgacacaaaatagactacgaaagtggctttaacatatctgaacacacaatagctaagacccaaactgggattagataccccactatgcttagccctaaacctcaacagttaaatcaacaaaactgctcgccagaacactacgagccacagcttaaaactcaaaggacctggcggtgcttcatatccctctagaggagcctgttctgtaatcgataaaccccgatcaacctcaccacctcttgctcagcctatataccgccatcttcagcaaaccctgatgaaggctacaaagtaagcgcaagtacccacgtaaagacgttaggtcaaggtgtagcccatgaggtggcaagaaatgggctacattttctaccccagaaaactacgatagcccttatgaaacttaagggtcgaaggtggatttagcagtaaactgagagtagagtgcttagttgaacagggccctgaagcgcgtacacaccgcccgtcaccctcctcaagtatacttcaaaggacatttaactaaaacccctacgcntttatatanaggagncaagtcgtaacatggtaagtgtactggaaagngcncttggncganccagagtgtagcttaacacaaagcacccaacttacacttaggagattcaacttaacttgaccgctctgagctaaacctagccccaaacccactncaccttactaccaggnaaaccttagccaaaccatttnccccaataaaagtataggcggnaggaattggaacctgggcgcaataggatatagttccgcnaggggnaaggtggnaaatttttaccccaagcctaatnttngcaaggggttaaccccctntacccttctgggataatgggtttnccttgggaattacttttcccaagggggggcc

SEQ ID NO: 668576 - DNA, 136 bp, Homo sapiens
taggttttattaattaggtggaaaatcgtatgtatcaatctgtatgcatcttgcttaatagtattaccataaaggaggtcaggtttatagggtttggttacctattaaacatcattgactatggaaatacttacta

SEQ ID NO: 668577 - DNA, 412 bp, Homo sapiens
  misc_feature (378)..(378): n is a, c, g, or t
aaaaggttgctcccggagcgcgggaattaataaagaaattcgatgaaacgctttttaatattcgtgatatgaatgcttatcatcgtggtatggtgacgttagcgtgtattccgaccgcagtattttattttttaccgctggcaatcggtaaatttaatgagctgtatcccaatattaaagtgcggattctgggaacaaggcacgaataattgcatgggaatcggtgctgtgtaacggaatcagactttgggcataaacatggaacaacgtcacaaattcatccattggattttaccccactgggtccaacggaggccgttcgtgctgggcctgtcggaggggggggggcccggttaccccaatttcggccctatagtngaggtcgtatttacaatttcactgggccgtcgtt

SEQ ID NO: 668578 - DNA, 579 bp, Homo sapiens
  misc_feature (34)..(34): n is a, c, g, or t
  misc_feature (77)..(77): n is a, c, g, or t
  misc_feature (100)..(100): n is a, c, g, or t
  misc_feature (113)..(113): n is a, c, g, or t
  misc_feature (127)..(127): n is a, c, g, or t
  misc_feature (145)..(145): n is a, c, g, or t
  misc_feature (169)..(169): n is a, c, g, or t
  misc_feature (175)..(175): n is a, c, g, or t
  misc_feature (181)..(181): n is a, c, g, or t
  misc_feature (223)..(223): n is a, c, g, or t
  misc_feature (226)..(226): n is a, c, g, or t
  misc_feature (230)..(230): n is a, c, g, or t
  misc_feature (238)..(238): n is a, c, g, or t
  misc_feature (251)..(251): n is a, c, g, or t
  misc_feature (262)..(262): n is a, c, g, or t
  misc_feature (279)..(281): n is a, c, g, or t
  misc_feature (295)..(296): n is a, c, g, or t
atataaacctgcaaagaccctgccagaagaaaangagtaccccaagaataaagtatgtcaatagggaagccccaccnaatgtcgcgaaacctgctgatgnaagtctaggctcntctataaccacggnccttcaatttcaaaagcncaaattttaattcaaatgcgatgngccatncaggancagcctgcgcatctcagcagaagcgaaaatcaccgctggaancancaanagccctancgaaatccaaagngcatacctttncagcccgagaaagcatnnntaaactcactcatnnaataatcagccagaagccaccttgacacttttgaacatttccagttctgtagagtttattgtcaattgcttctcaagtctaaccagcctcagcagtgtgcatagaccatttccaggagggtctgtccccagatgctctgcctcccgttccaaaacccactcatcctcagcttgcacaaactggttgaacggcaggaatgaaaaataaagagagatggcttttgtgatttcctttgttcaaatcttccgtgggcagttgggagggagccagtcccaaccataaa

SEQ ID NO: 668579 - DNA, 494 bp, Homo sapiens
  misc_feature (113)..(113): n is a, c, g, or t
  misc_feature (124)..(124): n is a, c, g, or t
  misc_feature (131)..(132): n is a, c, g, or t
  misc_feature (140)..(141): n is a, c, g, or t
  misc_feature (181)..(181): n is a, c, g, or t
  misc_feature (227)..(227): n is a, c, g, or t
  misc_feature (291)..(291): n is a, c, g, or t
  misc_feature (366)..(366): n is a, c, g, or t
gaaaaatgtttagacgggctcacatcaccccaataaacaaaataaggtttggtcctagcctttctattagctcttagtaagattacacatgcaagcatccccgttccagtgantgacgttcacncctctannaatcaccnnacggaattccaaggaaacggggaccaaaggccattccaanggccaacggccaggccaattggccaggcttccaagagaacgggctnttaaggccttttaaggccccacgaaacccgcgcgaacgggggggaaaaaaccaaggccaaggtnggaattttacaacgcccttttttagggccagatttagagagcgggaaaaaaaggtctattccgttaagcttactnaacccagggttggtcatttcgtgccagccacgcggtcacacctgtaatcccagcactttgggcggcggccggcggatcacctgaggtcaggagttcgagaccagcctggccagcatggcgcccctctg

SEQ ID NO: 668580 - DNA, 192 bp, Homo sapiens
gaaaaatgtttagacgggctcacatcaccccaataaacaaaataaggtttggtcctagcctttctattagctcttagtaagattacacatgcaagcatccccgttccagtgaagatacaggacattctcatcaccacagggatccccaggatgcccacttccctccacccccacaccacagccatttaggta

SEQ ID NO: 668581 - DNA, 106 bp, Homo sapiens
  misc_feature (11)..(11): n is a, c, g, or t
  misc_feature (101)..(101): n is a, c, g, or t
tcatgattggngcagaccggtgagggactaaggggatatgagaagtgagggggtgtcaaggacaagcggtgacggagatgatgctggccactggggtggtngccca

SEQ ID NO: 668582 - DNA, 227 bp, Homo sapiens
ggcacgagcatctactctaccatctttgcaggcacactcatcacagcgctaagctcgcactgatttttttaccttagttaggccttagagattaaacattgcttagcttttattccagttctaacgctaaaaaaataaaccctccgttccacagaagcttgccattcaagtatttcctcacgcagcaaccccatccatatcctctaatagctatcgcgcttcaacaa

SEQ ID NO: 668583 - DNA, 613 bp, Homo sapiens
tttttgcttgagcccccgggcccttggccgcggggcggacggcctacttctcccccctgggacgcagggcggtgatataggagcccccgcttgatgtagagagggcgctgggggtgtatgtaccccccccgggttgatgagcgtctcccctgctctcactcccactagacccgctcaccgccgataggggccgccgccaacgatctccgccggcgcaacccgctgctgggtgtagagagggatagatagagagaagatcgctccggatgaggagacgcacaccccagagcgcctagagtctccgcccggcgaaccttcctcaccacccagccatcctcacaagaggaggccggatacgtcccgataccccgggggcccccccccatatttcccccgcgggaccaggatgttgcggccgtggagcaccgaacccccgcgggcgccccgcggcgaacaccagcttctcccccccgagcatgcaccaccccggaggcgaaaaaatttctcccggacaacacaacaaaaggggggcccccggccccctccccccctcggggggggccaccttttccctggggggggtggtttttaaaaaggaaaccaattttttgga

SEQ ID NO: 668584 - DNA, 339 bp, Homo sapiens
ccagaggacatcacccatggaaaaacgcactccagcacctgagcctgagccttgtgagggtactgagctgccagcaaagagattgaggagctcagaagagcccacagagaaggaacctccaggtcagttacaggtgaaggcccagacgcttgcccggatgacagtaccgaaacagacactgacaccatacctgctgcctgaggacctggaagcccaatttttgccacgattacagccacgggtcctgtaagatacaggaccaagtgcactcacagaatcagacgacggataccactccacaaacaaccagggagcagccaacgctgcagaaacaggagc

SEQ ID NO: 668585 - DNA, 187 bp, Homo sapiens
tgagtcggtacctaatttacaggtgtgcctgtaatcccagctacttgcgaggtgagcagaagaatcactaaaacccaggaggtagaggtttcagtgagataagatggtgtcactgcactccagcctgggcaacagagagagaccctgacctcaagtgattgttccccgctaagtgattgttcccgct

SEQ ID NO: 668586 - DNA, 204 bp, Homo sapiens
tgttacttaaccgctggtggcctcagccattcatcgtataaatagggatatagtacctgctctccacaaggtggttgtgagaatattgtgagtctacacatacaaaagtgctgaggtcatgccaggtccagtaacatatacagtgaaggtgagctgctggcgttgttcaatctaactcatacaagcagatagtcagcagcaggg

SEQ ID NO: 668587 - DNA, 207 bp, Homo sapiens
ggcaccaggcgcacttctccttacctcttacaagctgtgcacatgagcgagtcactctccctcagtttcttcacaggaaagaggctagaactaaatataccaaaatgcctggcacacagtaggagctcaataaatgttagctagtataagcagcataggtaagagtgttggcaatacctactattttaatttcattggctctattga

SEQ ID NO: 668588 - DNA, 110 bp, Homo sapiens
agcagcgagagtttgctgttgcccccgcactcgatggggtaacagcggcagcttcacgatgtggaagtcttcccctcccccccagcactgcctcgatagcgggagattcc

SEQ ID NO: 668589 - DNA, 153 bp, Homo sapiens
agagtgcaatgagtgttctgctctgttgcccatgcttggactatcagtggcacgaatcgagctcattgcagccttgaactcctgggctcaacctatccatccacctcagccttccaagtagctgggataacatggtagaagccatcacatgta

SEQ ID NO: 668590 - DNA, 115 bp, Homo sapiens
agtgctcataataacgatataatggaggtcagcacgatagctcacgtgtacgactgaacttgtacagggaggcatagcaccagaatgatacaatacacgtacgaccatggagacc

SEQ ID NO: 668591 - DNA, 178 bp, Homo sapiens
catggatttgctggtgcagtacaactaggcttaatagggacatgtggcggaggttgcagtaagccaggatcgcgccgctgcgctccaccctgggcgacagagcgagaatatgtctcaaagaaagagagaaagagagagaaggagaggagggagagaggaaagagaaagagaaagaaaa

SEQ ID NO: 668592 - DNA, 219 bp, Homo sapiens
  misc_feature (157)..(157): n is a, c, g, or t
  misc_feature (187)..(187): n is a, c, g, or t
  misc_feature (211)..(212): n is a, c, g, or t
catacgcaaattaatcaatgtcatacacgacattcacaaaagaaaagtcaaaaatcatatgatcatctcaatagatgcagaaaaagcatttgacaaagtccaacatccattcatgatcaacgaccctctgcccaaagtgggtatacgagggaacacntccttgacacatgatcactagtacacttcnaggacaaacccccacatcaaaganntaatcac

SEQ ID NO: 668593 - DNA, 941 bp, Homo sapiens
gaagtgagatacttcggcggacattgcctcccaacgtgccatcggctaaacccgagtatcctataggctatccgtggaccgtgctgctggtggcctcccggggtccgttagatgggatcccaggtgtctagcattggctgaaaacttctgtgtctgccattttatgacttactgggcgacatgctagcaagcgtgcccagtaggatgagcaattctggtctcagaacgtctacgccgagaaacaagcctgaatggcctaagctactgcgaatcgctcgcgtgcacacacttgcgctgacgtcgattcgcaatatatgccggtagttgagagcctacaggttcgagccagagtacactcttcggcgatgtacccactcctatgattgcaaaaagagtgcgttctttctttctggtagtgagcctttcccatctggacttgtagagagcagggcgagataatgctcgaatgaccctacaatggcaatgaagcaggaaagagcacatggctatgacttttcctgtagactttgaaattcacgtctagtaccctagaactacttctgactggattccgtaacggcaattcagcaggaacggcttgatttcatcccaatgtagtgtgcccgttgcactatccacggagggacgttgcaaaccgtcccaaaaagtagccccatgtaaagatgacttcacccggggaacccttgatcccgtcgatcatgatcgattagttgacaaagggctttgagtaattcctgcctgcaaagtcttaccttgcacatcatagaagcgacgccacaactcaattagaagtacctaccacggaaagaacgggggatccacttccgccatcagatgctatcccagaacccgcggattgtcagttgttctggtaagcattcctatgctaagccttttcttctcaaaaagcaacaatgtac

SEQ ID NO: 668594 - DNA, 896 bp, Homo sapiens
ccccaacattctgtcttggaggctgacagcaaagaaattatctgacctaccttgtctgattggaggtcataagacccccatttcagaaggcatcctgccctgtacttgggaggaaagaagttgcacagagaggccaagaagactctgaacagagaggccttgcgtaggtttccccactcagtctgttagcattaggtcctactttgtccaatcatatttctacccggttgtccatgcttcagtcgtgacggtccagtgaagtcctggaccgggtacagagagcttccagatagctgaacacgtggagggtcctggagggtggtgcacccagggagggtatgagagctctgcaccccttcccacatgccttgttctgtgcacctcttcatctgcattctttgtgctattctttataataaaccagtacacgtgttttcctgagttctgggcacagctttagcaaattaatcaaacctaagaagggggtcatgggaacactgacttgaagctggttggccagaagttctggatgaggcctggccttacaactagtgtctgaagtgggggcagaccttgtgagactgagccctctctcagcctgtgggatctaatgctatctccaggtagatagcatgagaattgaattggattagcaagggtgctcagctggtggtatcttctgcagaactgattgcttcttgataggtggaggagaaagtccccacacaattaggtacacaagaaagtctactggtgttgactgatggtgagagtacgaagcatggtgaacaacgccaattggaatgaatactacacccaagggtgaacgagcaatgtacatggcatcacactaaatgacttaacctttcactaggaagggtatcaactgctcaaga

SEQ ID NO: 668595 - DNA, 414 bp, Homo sapiens
gcagatgctgtgggcaggaactaggcatgctttctggcaaggcactcagcagacaagaatcccttgatgtaaatcgcatgttaatttattgagtttcggtcagaagggcagcatttgcgtgacagaatgtatgtagagagttggggtgtgtggtaggcagaacgcaaggcagttgggatagttggattaagaggctagacgaggcatagaatagtatgggtatgtgtgcaatggcgggagtattaaatgatgtttcgaagtccagtgtggcagtcccgcattcagatttcatttgctgttgcgttatacgttgcgtacccaaggacattgcctcagggttgcaaactctttaaagggagatttatccatatatccgtgtattatatagaagaatgaagattgagtgtacttcga

SEQ ID NO: 668596 - DNA, 112 bp, Homo sapiens
tagaattgagctcggtacctatactattgcccctcccggcatttcatgccgggcgctactgcgctaagctcggaaaatgacctgtttaccgccccggcgctcaaaactgccg

SEQ ID NO: 668597 - DNA, 116 bp, Homo sapiens
gtcgcagctcggtagtggcaggagcgacagccatcagcagagtgagtcatccttcccaggttctcccctgggagactccctttgcaccaaggccccaccagggcctctgaccaccg

SEQ ID NO: 668598 - DNA, 295 bp, Homo sapiens
gacagacaaggtctcactatgttgcccaggctggtcttaaactcctgtactcaagcaatcctcccgcttcagcctcccaaagtgctgagattacaggtgtgagccactgtacctggcccactggatctttatttcttcatggaatcaaacgtaggttgaaaatcatctttcctaatacttgtcagtgcctcaagattgttaggataaatataaaacttccaaccaaaggatactggttgacatccagaattttaagaaaagttgtgaaataaaatatccagcttctgggtcgacg

SEQ ID NO: 668599 - DNA, 119 bp, Homo sapiens
tacttttccacaggatacagacagcaatagaattctctgtctcctacaggacaatcttcagcgagattaatagaacaacagtaacgtgccacgtctggagggatagacttaggacacat

SEQ ID NO: 668600 - DNA, 296 bp, Homo sapiens
cccgactagcccgacagggccgggtgacttgggcacctcaagattcaccactatgtcgtccacattggccaaccggtgaaacgtttatggcttcagttatatcccttcggaggacacatgacttggatggtctggaccttttcttcttatatccgggactaagaggcagccccatgcatgaccgggggacttttctcttcttaatggaagagctccggttcgccttccggaaggaggcacggctcaccatgcgcccgaggctgctgctgtcgggctagtcgggggggtaccgagct

SEQ ID NO: 668601 - DNA, 138 bp, Homo sapiens
tctgtaaagagtttagggtttgattttataaaatcccaaatgagccttttattgaatccagttttttatgtcaccagttctccagttttcatcctatgcctcaaccttgacatccttgccgggttttcctcttaaaaa

SEQ ID NO: 668602 - DNA, 130 bp, Homo sapiens
ggacttccgacgagttgtccgagttacctggtcactgttttactggtcctacattaaaatgtagatgcgtttgtctaattccactttaagatgctttaatggagcttctataactatcaactataaaatt

SEQ ID NO: 668603 - DNA, 954 bp, Homo sapiens
  misc_feature (558)..(558): n is a, c, g, or t
caccgggttctcgtgttttccccaaggttcctaaagcctgctttaacgccacgtgggtctatacccggcccggtccgtccctgtgcgccgtgcgccgcgattgcgacaaaggccctttcccagctcaaagccccttctcccacatattctaaggctccagttagatgtatgtcagtgagcggccccgataattttctctggtgaggggccttcttatatttggtgaatcttatggcgcgcccacaaggaggtgccctcggtccccccccgcccctcgggggtatgcttgtccccccacactgtggtgggaactttttcttcccactgcggatcgaaacccatcctgggtcctgtgactcccccctttaccccctttagtgggcgcccccattgggccccaaatgccccccggccgtccacgaatgtacccccaccttttttttgtcccgaagattaatataaaggcaccaatttcctcgtctccacgacgagttagtaactttaattgtctctcgcccatgaggtggaggggacacacaacaaatcggcgtgggtccnaaatggctgtattaaaccacgcgccacgtctccgcaacagctattgctcgtgacaacaaattatctccgcccgatatagtagaaacatgtcaccccccctgtattatatcatccaacagggtcccgtctctttattcgaccaccgtaaaatatctgtgtaaccattgtttcccccaaggttcagctttcagtgacccacccccgggtttttaacaagtgtattctagttttccacccacaaaatttttaaaccacattccgtgttattcctcttctcccacatcattatgtcaatggtaacatgcaaacccagatcagccccccccttttttcaaaatgggagaaaaaaaaaataattttttttaaaccacataacaaaaaaaacgaacaaaaaaa

SEQ ID NO: 668604 - DNA, 438 bp, Homo sapiens
  misc_feature (57)..(57): n is a, c, g, or t
gttttttcctaatcccccccaaagacattttaaacccccaaaaaaattgtttatggnctatatgtatatacataaccaaaacataagcaaaacatttgggggattaaaattaaaaaaaatccaattatgtttcccccaaaaaaacctgtttttgctttttgggagcaaaattgcccctgtgagactgcatgctataaggtaaggttgggcttgttaaaaacccaaaacatgattgggttccccagtttccaaaggaagagggggggctagtctgtttttattattattttaaaattgaaaaattggggtcttttttaaagttcaaaaaagggaaagcttacttttttttaattgtttatttagttgtaaacttggggattgttttttgatccccattgggggggtttttcaaaaaaatttttcatttttgcaatttta

SEQ ID NO: 668605 - DNA, 703 bp, Homo sapiens
  misc_feature (369)..(369): n is a, c, g, or t
  misc_feature (398)..(398): n is a, c, g, or t
  misc_feature (703)..(703): n is a, c, g, or t
ctcgactgtctcctgtgcctgcgttcatagagctgaggcggatgctgtgcccttctgtgtcagcacgagtgtctatgcttcagtggtctatagtatttactcctaattatgggaaaggtcctttttaatccattatttttaactctttcctaaattaatcccgacctaaagaatcttttgaagagcctgtaatggcactagaaaaaagcttactggagtcatggatgaccgtgactgcaagcaggccagctggtgtgcccgcgaccctccgtgtgactatgagagaaacactgagtcatatgaagcaccggtgggcactcggaagaccgggttccccttgtgtttcacttgcaccactcagaagagttntctcgaaaactgaccaaatcattcagganaagatgccgcctcagacttttagactagacactgataccctcatatgggtgaatgtggcgaggtaactaagaatagcttggaccaagcaaggcatgtttctgctgcgattgtggcaatgaccacaactactgggatagggccgcgcaggttcgcacaatatatcgtgcagctgtgggctctgggggaagcacactatcgctggcgggttaattatgcgttttatttttacatttgctcaggacatatggaaccttgaaagtggggtcggcctaaatatgtgacctattagcagtgcttctctgcn

SEQ ID NO: 668606 - DNA, 91 bp, Homo sapiens
  misc_feature (27)..(27): n is a, c, g, or t
  misc_feature (38)..(38): n is a, c, g, or t
  misc_feature (58)..(58): n is a, c, g, or t
ggatttgctggtgcagtacaactaggncttaatagggnacatgccacctacactcagncctgggcaacagagtgtgaccctgtctcaaaga

SEQ ID NO: 668607 - DNA, 890 bp, Homo sapiens
  misc_feature (458)..(458): n is a, c, g, or t
  misc_feature (513)..(513): n is a, c, g, or t
ttttcttggggtccccttttagtttttttggtaacaaaacaaccgtggttccccttttataaggttttaaaacgtggaccctctcatctttctcctattctccgagtgtgaacacaaacaagaaacaattaagacaaataacacgaggaacacaaaattcacaatagaagaaagtggtcaatctaccaaatagagaactccctacgaggtctctcgtggcgtgaatttctctccccgatatgtggagtgtggccgacgggccctctcaagagtctctatctctattatgaggagagaagaaacatatatatttttatacacagagtgtgtgtcatctcttatagacagcgtggcagaggagagtgtctctgtgtgcgtcaacatatatctccaacaattatacaacactgatgtgcgcccaaagagagtagacaacgcccgaagtgtgtgtgtcgtcnaaaaagagtgccgcccacttatacaacgcggcaccccagagagcgctttctctcnacaacgcccaaccctgtgtggtgtgtgaacgcttttctatatatacaaccccccaaatattttctctataacgtgttgtcattattctctctgtaatatatattataaaaccaagagagagacaaagatgtgtacgcccagcgacgaatcatcccatgtgctgtgggggccaacacatggggggcataacagccgggggctcccacattatatctccacacatatgagaagagagaacccacacggagcggtggagtaacacctccctctgagtaggagcgccccccaataatatttcaccgacgaaacaccaacggggcgaggcggaacaacaacaacgcggcattaagaaaatttttgcttaatgtggccccgat

SEQ ID NO: 668608 - DNA, 166 bp, Homo sapiens
ggcttccggtgtccgtcaccgtgctggcctggctttgcagttagctggcttccacaatgactctaaagggcaactacatgtcttactcaaatatttcttctttcctctggcaattattaattacaatgagtatttttcggggccagcagagtgtactggcgttgag

SEQ ID NO: 668609 - DNA, 993 bp, Homo sapiens
  misc_feature (166)..(166): n is a, c, g, or t
tctagtatatatactatgatgcaaaaaccaaagattccaatatagcacagagaccagtatataacaaggtcatgagacaatggtgtgggacatgcaggaggtgatgtacaaactggtgggtcagatcgtctcctctaacatgacgctacactgtcgctgaggaacncatttaataagcacttcagaactgaactgaaacgtgagaagacatgacaacttccaggcatgccttcaagcatctccctcaggagggattcgcaacacccctagactacagtgtggggaggcttacaattcttggaagcaataacaaagttacacactattgaaatcttcacagaagaatttaaaggccaaaacatagtgggttcatattctcttcacttccagggacaatctgatgctttcctcaaaccacattaagactagccagtacaaatcccaagccaaacagtgacactcctgcacgaagtccagcccaacgaagaaaagctcgataaagtccaataggactaccggtcgaagggcctgagataacccagtccaccacaggcaggcatatcaactaagcagagagagaagttacaaccaaccagggagtactaagcagaacagcaaacaagggagacgataccacacaggcgcccaagacaagggtgaaagggcagagcgaaccaacatcagttcaccgatccggcaaaacagaaagcgtcacactctcacgagggaccaagggcacacccataaatcagggaagagcctaagcaagacggacgacaaggatagacaaaacgaccctcacacacatacggccaacgggacgcggcacggacataaaaccaaacacacaacacaaggagaagacaggagccaccaaggggaacaacaaacacacaaacaacggacacacgagacgaagagaaagaaaacgagcacgcacgaaaacaagagacacgagcaagagacaacgaacacaaaacacaaacagcacaa

SEQ ID NO: 668610 - DNA, 711 bp, Homo sapiens
  misc_feature (6)..(6): n is a, c, g, or t
  misc_feature (70)..(70): n is a, c, g, or t
  misc_feature (76)..(76): n is a, c, g, or t
  misc_feature (80)..(80): n is a, c, g, or t
  misc_feature (82)..(82): n is a, c, g, or t
  misc_feature (89)..(89): n is a, c, g, or t
  misc_feature (92)..(92): n is a, c, g, or t
  misc_feature (102)..(102): n is a, c, g, or t
  misc_feature (120)..(120): n is a, c, g, or t
  misc_feature (147)..(147): n is a, c, g, or t
  misc_feature (161)..(161): n is a, c, g, or t
  misc_feature (165)..(165): n is a, c, g, or t
  misc_feature (180)..(180): n is a, c, g, or t
  misc_feature (185)..(185): n is a, c, g, or t
  misc_feature (217)..(217): n is a, c, g, or t
  misc_feature (221)..(221): n is a, c, g, or t
  misc_feature (241)..(242): n is a, c, g, or t
  misc_feature (244)..(244): n is a, c, g, or t
  misc_feature (284)..(284): n is a, c, g, or t
  misc_feature (309)..(310): n is a, c, g, or t
  misc_feature (312)..(312): n is a, c, g, or t
  misc_feature (337)..(337): n is a, c, g, or t
  misc_feature (398)..(398): n is a, c, g, or t
  misc_feature (401)..(403): n is a, c, g, or t
  misc_feature (412)..(412): n is a, c, g, or t
  misc_feature (423)..(423): n is a, c, g, or t
  misc_feature (447)..(447): n is a, c, g, or t
  misc_feature (465)..(465): n is a, c, g, or t
  misc_feature (495)..(495): n is a, c, g, or t
  misc_feature (510)..(510): n is a, c, g, or t
  misc_feature (529)..(529): n is a, c, g, or t
  misc_feature (559)..(559): n is a, c, g, or t
  misc_feature (635)..(635): n is a, c, g, or t
  misc_feature (695)..(695): n is a, c, g, or t
tggcantggctctggctctgtttttggtactggtactggcaccagtgctggctctgccgctctcttgggntttggntttngnttctgcnggngcctgggtcngggctttggcccagggtncgatatcagcttctgtgcccggtttgnggtggcccggcagngttntccgggccgggcccnttgcncattcgtgctctattctcggccctggccttgncttntgcgtgctgcctcagctgcnncnttgctaagatgccgtcgttccaatcgcgctctcgcgtatntgaggctgtcccaattccttgtggnntnctttctctttgatacctctgcaggncaaacttgaaggtacttttcatcttggctggctctcatagataagagcgcaggcccccagnagnnnctcatattnaggggggattnctattgggggactctggcatagtncaggtacttctgcttcanaaactcatcagtgatgagcttcttcacgtncccaaagagtgaatnatgtatcccagggcgcacncaaactttgcgcacaccctccccagatganagcctcactgggaccgatttccattcatgaagatgatgctaagaagcaccatgagcagacccagcttgggtgagtncttagtcgttccccagtatgcctgcatcagtgggctctaaggtgctgagaagaatgtacnagtggtcattcttatc

SEQ ID NO: 668611 - DNA, 428 bp, Homo sapiens
ttacagaggaatttcgtagattttacgcaataatgatttcttcatttgttgcctgccgtttcgacaattttcaggtaaattaaatggttgttatttttacaattatcatgagttaggattttttttttcttggaatgggtacactgagctcctcacactgcctttctggaagtggaactctgtcagaggttccttaaaaaagtgactcaatggcttctgccagtatctctctggccagctttatgacagatggccactcctgtctgcaaagaaggcttggatatgagcagtttaattagacacataagcaccccaagtagggatagtggaaaatggagtttaactagcatattgcccacagaaagactgagtgcttagcggtttttaaaaagcatgtgcatccattagtttgataaaagttaattgta

SEQ ID NO: 668612 - DNA, 175 bp, Homo sapiens
  misc_feature (104)..(104): n is a, c, g, or t
ctgatatggtactgatcgtgacttcagacagcataaatatgtgtgcatctcatgtgcatccttatagacccagcttggttcttctccaatgtctccttttgagntgtacctgattttatttccagttttcatccgaatccactggggaatgggacgatttggcttttgtttcttg

SEQ ID NO: 668613 - DNA, 132 bp, Homo sapiens
cactgcatactcatgattgacgtcgagggatagcagaacgactctctggtgggggactatgtactgctgtgtgcctatatgagctccctgtgacttgggcttgtaccgggacccaaagaaaccacaagcagt

SEQ ID NO: 668614 - DNA, 1197 bp, Homo sapiens
ccctctgtgaatgtccctgtacccattgctaagacattcagacactggacctgtaggcaggaaggcgcggacagagcgcacgcgagtcctggtcgcgcgaggagttggcaggcggacagaaacgaagcgaggaatggagcacgtcgggtgcgagtgctgtagcgagagtctccccgtgctcctaggagagacgcggtccaggtaggagctccaggtgacgcttgcgacaatggactgacggagatagccatgctgaaaggtacaaaggaagtgcccatgcttgggcctgctgtgtgcctgtttcctgcatgacctccaactgtcccacaactgtctgttgagttgactgtgcctagactcctgtgatgttgcatgctcgtgcccctggtgccccctttgtgatgcttggaccttgatctggtgctgaccatggacgatgctttcaatgacatgcacgtctgttcttgttagcatttgaaccgtgaagtgagttagttgcgatcgttacactgtgactcacaaacacactcatctgttatcccctgtgtgtctaacccctagacaaaatcgataaggttgtccctgggccactcgaaatagtaccaatcccaaagacacttacaggttaccacggtgacacaagtgcagttccaaatgaactttgaatcgacagcacctagaacctaccaattgtgattacgctgcaaagccttaaattgttgtgcccccactgtggagccccagtacgctgcacgataaccagaacatttcccatttgatcacgcccgcggattggtgcacgtggtaggtgcaacccccaatatagggtgagttacttgaccatgagaccccctgcgagttcccacgcctaaccatgcatacttccaaatgttcccccggcttttcaatcaatgtaaccgtaacctgaaacatactactggaatcccaggtaacctcaaaccacgatttgttcccccttcgcgtcggaagactatggaaaactttccttcccatccccgaccttccagatccgaatacatctgaacctttgcgttcgaaactctgcgatccttcgagacggactccctaaatacgcccaatagaaacgaggcatgaatgtgactatctagaggccacatcgaaatcattgggacctgatgaaactagtggaacccaaacacggtcgaccatagagcc

SEQ ID NO: 668615 - DNA, 671 bp, Homo sapiens
cctgcagccgcgtgctctgatcaacatgattcacaagattcggagtggcatctagaatggtgaatcctctccggaagatttgcaatagacttggtccagatctatcagaggaatcactatctagtggtagctatagcctgacaaaagtgtgttacttaaaaagtaagacttgaaagtagcaatgactccttgatccctgggctgtgcaatagatggtgtgtttagcaggcctgaaaacaacataaatcttgtacatcttgtacatctccatcttaggtgaccaggtgtattgtccatgagcaataatattttgaaaggaatattttgctctgagcagtaggtcaaaacaatgggcttaaaatatccagtaaattatgctgcaaacagacgtgctgtcacccagactttgttatttcatttctagagcacaggcagagtagatttagcataattcttaagggccctagaattttcagaatggtaaatggccattggttcaccttaaagttaccagctgcattagcccctaacaagagcattagcctgtcctttgaagtgttgaagccagacattgacttctgtctagctgtgaaagtcctagatggcatcttcttccaatgtaaggctgtttatctacattaaacgctgtgtgtatgtagcaccttatcatg

SEQ ID NO: 668616 - DNA, 83 bp, Homo sapiens
ccacgcgtccgtctagaatcgcggagcgcctctcctgcccctcgccggtacctcagcaaggtgccactagaagcgccaggctg

SEQ ID NO: 668617 - DNA, 131 bp, Homo sapiens
agagagtcctcctctttgatcctactgagcgttttcttcctgaagaagagaaacttactgaacaagagagatcaaaaagatttgaaaaggttatactcataaccgctattactcagtccaagctaaccagc

SEQ ID NO: 668618 - DNA, 949 bp, Homo sapiens
  misc_feature (268)..(268): n is a, c, g, or t
agatcgaatgacctcttcctagagtctaccgagatcctactgatgtgaaagccctaaaggtagagcatttatccatgggcaataggaagaatcgctggtccagaggatgttagagaaacctatatagttcaccatttacgaccggaagtgtgactacgggaccaaaggcatagattcttgggccatgaatgttgtaacacgttgcctctattgcattggtttctcttcgcgaaaagatatcattagtaggtggggaaaggcatagctngccatatgggtcgaaaccctcaagtcttcgggaaatatgcgtctcttgtccaatcggttttagacttgcgcgaaattagtttcggaaggctgtggtgattagacgggagtcaatgcaaggatcggatatcgtagaatttctacagtctagtaggaatgttgtctcatccatggactcgtaggggcatgtcgtggggtggacaaataatactttctatcagatgggtcgtgtcacgaagggaaaccgatgctgggatacgacattattccatgtccatgtctggaaggccgtccggtacctttctgtccccattcgtcagttcgagtagagcaataatccagagagaagtacctgtatttagagaggcattcatgcctcagcaggtgtgtgggatactttagaatgatggaaaaatgtgatgggtcatacttgggagattgaaggtagtaaatttaggtccattgtatcttgataatcatcactgtagcatgaattgcggtagtctggtaaatacttctcagtagaggaaactttccctggtgtgaacatcagttcaatatggaattataacttgcactttttttcacctttattaacgtcggtaaagagttgtggtaaaccttgttttttttagaatggtattgtagtcgggatttctggaaaaaactcttgaaaaatggg

SEQ ID NO: 668619 - DNA, 266 bp, Homo sapiens
gcttaagcccaaagtgctgggattacaggcgttagcaccggctggcagcatttcatttttcctttgggaaaggcgtttctgtagtatgtaccagtttcctctgaaataccaaatccatccacaacataccggcacagtacttgtcacttttttcagtgtaggtagcacaggtaagtttattgaattattctgaagccagaatttatttctacagtaatttctgggcaggttctaaaaaagtcatctgtgactttaggactgaagtg

SEQ ID NO: 668620 - DNA, 323 bp, Homo sapiens
ggtagtgttctggaaaacaagatcagccacatagacagcagtatgtaaagggcagcaccttgtcaacacccatctcttaatctactttatgtgtcagtgatcacggaaggcccacggtaacacatacagtatacttcacgcaaccatcatccactcaacacaagtgtctggcaaaaagtacaggcagcgagaatggaaccattcgcaaatgtgaaaaccacatatatcagcgacacatatgcagttctcaatgcagttacctaggaaatgagttttgaaatgatctgattctcatattatctctggtgtattattccagttgt

SEQ ID NO: 668621 - DNA, 1092 bp, Homo sapiens
  misc_feature (26)..(26): n is a, c, g, or t
  misc_feature (41)..(41): n is a, c, g, or t
  misc_feature (69)..(69): n is a, c, g, or t
  misc_feature (73)..(73): n is a, c, g, or t
  misc_feature (86)..(86): n is a, c, g, or t
  misc_feature (92)..(92): n is a, c, g, or t
  misc_feature (97)..(97): n is a, c, g, or t
  misc_feature (110)..(110): n is a, c, g, or t
  misc_feature (130)..(130): n is a, c, g, or t
  misc_feature (175)..(175): n is a, c, g, or t
  misc_feature (181)..(181): n is a, c, g, or t
  misc_feature (191)..(191): n is a, c, g, or t
  misc_feature (261)..(261): n is a, c, g, or t
gccagattttcagtgcccctccccanacagggatttttttntcatagagtaattatatgaacagttttnatgncctccttttggtntgaaanacttntgaacagaatttnttttttttaaaaaaaaacanagatggggtcttactatgttgcccaggctggtgtcgaactcctgngctcangcgatccttntgccttggcctcccgaagtgctgggattgcaggcataagctaccatgctgggcctgaacataatttcaanaggaggatttataaaaccattttctgtaatcaaatgattggggtcattttcccatttgccaatgtagtctcacttaaaaaaaaaaaaagaaaaagacaagtgataagtttcatctacgtggcctttactgtggggttaagtggtgattcttaaacaccttcatcagtggaactctcagagtggggtccgtttcgggtttcctgggtgggcggggtttggaaagcataagggaaagcacatttggagcatgtctggggtaccatgggtgcggatgctggggaaccagaacggtttcagaggaattctaaagctcgtgatttagatttccagagacacagctgggtgctaaaaccatgcgaagacatgacttctaggactcaagcagcaagccaggattctaggtaggctgcagggtcaccttggaagtcaagaccaaagctgggctcgaccttcacagggtcctcggaaggacaaatacttcacgaatccgggcaacccactgtgacaatactaacctacgtccgcacacaccaacacctagaaccttcgagccgaacaatcgggactatcgcgccgaaacccgacacgccgggaaaccatctggatcccccatttcactctgcaagttctgggacacaataccagcaaatcatcaattctgggaaccagaattatgggaccccacattaagaacctcgggggcggaaccagagcatcttggaaaaactaaagccagagggggacaacccggcggaaaaaacaccacaacaacaacaaacacgcggagccgccaaaaaaaaacccccaaagggcccacacacacgccgaccc

SEQ ID NO: 668622 - DNA, 186 bp, Homo sapiens
catttccacccatgtgtcggcacctccctggatgtccagccttaccaagccttcagaggacttcagccacaaatcttatcttattacatccttgtgagaccctcataaagatccaattagctgagcccaatcaacctatggaactgatagaaataaattgatgtgatgtattgtgccgctgaggga

SEQ ID NO: 668623 - DNA, 576 bp, Homo sapiens
tgttattctgaatccacacacactacacacacttgcacacagacaaaggaacacatgcacatgtatgcactcacacactcgtgtgcacagacacgtcctgcctgtgtatgccatagaggagatagcgcaaagatgcacctgccagtgatcacagagctctatctcaggggtgatgtcagctcatgaataggtcccagttcactctaattgattcatcgatgggcgtaaactctgagggtgatgggggcatcaggttacagagatgaagtcagtttagtgccatttcctatccatgggctccccagaagtaagagagaaaggaaggaaggccttttaaaagtccacattggagccagtgacttgtggctttcccttgcagaaaagaaactttggcaacagctagtagtcatcttctcctgagcccgccaatctcacagccccctccacacacacacacacacacacacacacacacacacacagagctgcagctgcagctgtgtctagctggcccccaaacagtgtagcgctgaacagaccagagatggagacactatgtgtgatcatcataaccag

SEQ ID NO: 668624 - DNA, 318 bp, Homo sapiens
  misc_feature (200)..(200): n is a, c, g, or t
gatccgtggtgcaatgtgggctttgtgtactacacgagaggaaggacctcattggagatcagggtacatgttcgcgtggcacaccatccggtgtcgctagcctgcatgcccgtgatgtgtctgccatggctcccgatgatgaatgatcatctgatgccctaggctctcatgaagctactcggtcatcggtgagctccgantagagacctgcgctttgacctacggctatctaagtattcacgcagataaatatctcacaagggggcgaccaccttgaacattcctggaggttgatgtggcatgggtgtattcaaggag

SEQ ID NO: 668625 - DNA, 1559 bp, Homo sapiens
caggagtggggcagagctggcaaggagaactccccactgaatgtttcataaaggaagcactgttggacgctactgcaaatgctactattgcacctgtgcaccgcagaacttttacagcacggatagaactacactggaaacgcaaactgagctattgtcggcagcatgacacgaccctggcagttcaaaaagactcttgcatatgacctgcttattaccacttagcacttctggctttctgacactcagccacttagctcactttgaaactgtaacgcaactggctactacaacccacattccaagctctttaacttctcttaaccaccactggccacccttttgcacactaacactgcctcttagcacttactactacttccgacacctcccaggcagctaacccaggctcgctcccaacgccaacacaaccaacactgggcaacaactgctctctaacaacacactcctggcgtggcacctctcttgcacacaagccattctttcctaacaaacacaacacacagaccctccgacaaacaagcgagacacacatggcaacccgcgctgcgccccacagagaccggcccagtggcccacacaacaccagtacattccaccgcgcctaccacagtgacaacccccctcgcgaacacaccccgcggcagccccaccacacacaccacacctgccgccacgtcgacccacatacagccaccaatcccacgcaaacatcaaaccgccggcagcaactcaccccacgagcgtcgccccacacacaacatcaaccacacacacccaccacaccgccccaaacacacacaccgccgcgaaactcctcccaacaaccacccacaccgacagccgcgcgcagctcccacaccacactctctgcgaaccaccggccgcgccacccatgaggaacgactcccacacggaaccaccccggcggagtgagataccaccaccaccaactcgttatggcaaccatgcccccaaaacgaggcggcccacatcacacaatcgatagccgccgcggacgaaagaacaccacacacacactgcgtgccctccacagcccgacgacacaacgcccctccctagcgccgcggccagccacaccaacaaccccccagtccgccacgacaccccacacgcgccgacgaccacacaaacgagcggcacgaccaaccacaacgggcagaccccacccaacaacacccagcgccgaacacacacaccagcaaggcaccaacaacatgaatcactcagacaacgagaacacatccatgggccccacaacacacacgagcgcagagacccccagtataatcgaatgaccaaccgccaccgaaccccctccacaccgcgcgccaaacccccacgcgacccacaacccacaacacctacagccacacgccgaacaccactcagcgccccgtcctgaagacccgcaccgaaacacaaccagcgcacacagcccgcagcgacagacttccaaccaagccaccaccaccagcatgagtaccaagcaccactaacgtacaccacacacaagc

SEQ ID NO: 668626 - DNA, 100 bp, Homo sapiens
ctgcgtgtgtctattagaacaccacctctcacaatttcaggcagaagctgatatcccagaaagactatatattagtttatttcaattattttttatttat

SEQ ID NO: 668627 - DNA, 188 bp, Homo sapiens
ccagcctgggcaaaaaaaaaaaattttgttttgttttttaaaaaaaaaaaaggccaaacccggtggtgggcacctgtagtcccaacaacttgggaggtttaaatgggaggattgctttagcccaggagtttaaaactgcagtgagcccctgcacttcagggtggacaacagagggagtccctgtgtca

SEQ ID NO: 668628 - DNA, 377 bp, Homo sapiens
tttgacggacggtcacggacgacacggactgtgtacggacgtgtactgatgggcccaacttcagaagcagaggttggaagagggagtgattctggccgttgggaccgagtgtgtgttgttcgatggggctctcctggtccccccaaaacacgtacccactccagcccatatgtctggaggtcagcacccaatgcaatgctggacctccgcctcgccccggagccggtgctcaatgccaacacagtgtgcctaacattgacatgtgcctgagcctgtcggcagattgaggtgtgtgtgcgttcacccttgaatgtggttggctcagccatacagtgcatccagatcgccatccacgacaatggcaatgaccaattcag

SEQ ID NO: 668629 - DNA, 174 bp, Homo sapiens
ctaccatcttctccttacaccgtaggcatgtgtttcctctatcgttaggggccatcaagtttcatcacaacaattatcaatataacaagcccccgtgtccataacccaaatgggtgatcctcctaagagtcgagcctgtcaggcactgcagagcttgcggcactgcgccagtcg

SEQ ID NO: 668630 - DNA, 382 bp, Homo sapiens
cccgtctcagctccccatgtactgggattattgacaattagccactgttctggctattataatggtcttaaaaataggaagtctctattccttttttcttttttcccattttttggaaacgggcccagcgttttccgccaaggtgagtgcagtggtgtagatctcggccctttgtaccctctgcatagtgtgtacaagagattctccctcctcagcatatttattattttctgttctctggaaaactttaataagctgtggtgtggttccccccgtaattgaaagaatacactagtgaaaccgtctttacttgagattttcttaagggaaagatttttaataatacatcccatttctttattggcttggggagctgaggagg

SEQ ID NO: 668631 - DNA, 206 bp, Homo sapiens
gggggaaaaccccccccgggggggtttttcccaaaaaaaattttttttggtttaaggggttttcccccaaagggggttaaggggttttcccccccgggggggtttttttttttgggggggggggctttcccaaaaaaaaaaaagggttttccccccctttgggggttttcccctttttttttttttttttataaatttttgcccca

SEQ ID NO: 668632 - DNA, 342 bp, Homo sapiens
acaaagagatttattttcactcacagtttcttcaggctgtacaagaagcatagggccgggcatctgatttgggtgaggcctcaggaagcttccaatcatggtagaaggagaagggagagcaggtgtatcacatggcaagagagggatcaagagagttgccaagctcttttctttttttgagatggaggtcttgctctgtcacccaggctggagtgcagtggtatgatctctgctcacttcaacctccacttcctgggctcaagtgatcctcctgcctcagcctcccgagtagctgggactataggtgcatgccatcatgcctggctaatttttggtcgacgc

SEQ ID NO: 668633 - DNA, 241 bp, Homo sapiens
  misc_feature (93)..(93): n is a, c, g, or t
  misc_feature (105)..(105): n is a, c, g, or t
  misc_feature (216)..(216): n is a, c, g, or t
aaaaaatgtaattagccaggcattggtggtgcatgcctgtaatcccagctactcgggaggctgatgcaggagaatctcttgacctggtgaggnggaggttgcagngagctgagatcatgccattgttttctagcctaggcaacaggagcaaaactccatctcaaaaaataaataattaaataaagtatggccaggcgtggcggctcctgcctgtantccctgcactttgggaggccaaagc

SEQ ID NO: 668634 - DNA, 179 bp, Homo sapiens
  misc_feature (21)..(21): n is a, c, g, or t
  misc_feature (152)..(152): n is a, c, g, or t
  misc_feature (160)..(160): n is a, c, g, or t
cgggatcctggacggctgcancaacggccgctgcgtgcgcgtccccgaagcttcacctgccgttgcttcgacggctaccgctggacatgacccgcatggcctgcgttgacatcaacgagtgtgatgaggccgaggctgcctccccgctgtgntgcaacgngcgttgcctcaacacggat

SEQ ID NO: 668635 - DNA, 930 bp, Homo sapiens
tgctcggtggagtgaagtgcctcgttgcagagacggtctcattcggtgtttttgggaagagagtcgtgtgtggcccagtgtatcgtagcggcgacacgcgagagacgggcggtgtgacagccttaccactacctgcacgagtgtattggtactgtactgctatcagctatgccgctgacccgtatgcgctgcagacccgcttggccaagagaggcatcctcaaacactcttggacgcctgaaccagacggacacgacgactcatttgccgaggaactactgaccgactgactcctggtggacctaccgacggccaccaggattggacgggcctaaccaccaagctggtacaacggtgttcgaccccatatcctgcggggcatccccatatacctactggacatgcagacacagaccctagatatcctggctctcccccacattgaacccaagctccgcagggttacccaacatcggccaagaacgctcaggaagcagtaatgcacagatgctgacagagaacgttcggaccggaggccatgacaagtcgggcacaggggccctgacaagtcggcaccgcagcccatgagcaacctcagaccagagggccacgacccaggtcccgacccgggggccacgcacaagttctgaccaggggatcgacgaccggtggcataatacacaagtcagccaccgcgagcagaggaaaacaggaacggccacccggaccacggactcacacagactaaaccaggaacacgtgaaaacgcaccgggacacacataaccagagacggcacatggcccccatttccctatacgaccacgcgccatacgcagcgatgattcaagatagaccaattaaccaaaaataatatccaagccccacaggaagtattattaaacgtctccactatctattttaccaaaga

SEQ ID NO: 668636 - DNA, 910 bp, Homo sapiens
ccggggtacaagggagagatggctttcctggacgggcgggtcgccccgggatgaacggattgaagggagagaaaggggagccgggagatgccagccttgtgatttggcatgagggcgaatgcccggtcccccaggatctccagggcccccaggccctccagggtactcctgtgtacgacagtcgagtgtgtcttgctggggtccagccggcccgggcctccaggagttgccagggaatcagggccctccaggacccaagggcgcctgaaggagaagtgggcccccgccggagcgaacagggacagtctctcgcgtatagagcttacctcgcagattcggagggctcgcagatgaacgggaggagaaggggagacccgaggctgattgcaggacgagacacaggcgagaagtgggggggagcccctgcggtgtgctggacgggtgctctttcgcgcttcgcatgccctgtcccgagtcccacccgaggtgcccctcggaggaccccgagtgggctcgcacgcgtgggactccccgaggttgacaaccgcaaggcatagagcgtaccagagggtaggggcgccgtgggccacgcacatggagacctcggccaagggagagcccaaccgcgagcaccctgggcaacacaaaagcacggcgaaacaaggaagacccccaagaataccacggagctaacacccttaccaaaacccaaacaggcgaaaccccaaccccaaagacccaaggggaaatcaccaacgggggcaaacgaatcatagctacgggactcaaccatgaagccaacacgtgaccttggaaacacaacacggcaacatgcgaggcaagaagcaaggcaccgcccggaacgcaaggaaggccaccaccgaggcacaaagccaacggggggaggacc

SEQ ID NO: 668637 - DNA, 1202 bp, Homo sapiens
agcggagtgtgccggaggaactgtgctctttgagcgccgacgctagcgggcccggaaggggaaactgcgaggccgaaggtgaccgcgggaccgacgcatttcagactctgctcggctagacctggctgcaccaccacccatgttggctgcaaggctggtgtgtctccggacactacccttctagggctccccacccagctttcacccaaggcctccccctgttgttgacagaatcccatcaccgaaaggacatccacatgggcccgtccaaaccacccccaagccaggggccaatcatgccccccgcacaccccagacactcggcgaccccggcgctggcccagcaactgcccacgaaactccaacagaccgccagccctgccaacccatcgcatgcgccaacccactatcctacccactttgccctcaggcatcggccaagcatgggtcccgctcagcgtgcgcggcgcgctcgccttgcttgggcctctgcgcaccaattgctgcctcacctcattggcccctgggcacctcgtttcaactggacgactctggacgcccttattcgcaccacaggcctgctccatttcgggccctccagcaatttgtcccacagcgaattaccacattttcatctccaaacagctcactcattgtcaactttccaaccagcgcgcagctctatcacggtttgtaaaccgacgcccttgcagccgttgcccatccacccacactcccagcccagacacccggccattggtccctcccatcgaaccctctcccattgcactccatccagcggctccctttgcgccgtgaaacacacattgggccgtcgcacccttcgccacgcccactggccccggccagcccggcaattgccatcggcaaccagatccaacatacccactatcgcacccaggacaccccaaggccccaacaccccatcctggcctgaggcagcccaacaattcctgcggctgcgcaacgggcgcaggacggaagagcactactctgacaacgcaacctacgcggcgccaacttcccaacactcgagggacacggacgaggaacaaacgccgtggaacttgcacggagaggcccacctaacacgacgagccacgagtacccgaccgcaaacacactccctgcccacacggcagaagcccacgacgagacaccacacaagaccacctgaccct

SEQ ID NO: 668638 - DNA, 1168 bp, Homo sapiens
ctcctgatcattgcctcactataacctatgtacctcctgtgctcacccggatccttcgccagcatgtggtctccgtgatgttaccatgggcgtaactacaagtgacacatgccgtaactgacaccgcaacattatatttatctgttagttcgctacgaagtcccgaggttctctacctaatgcttagtcccgaaacttgtgatcttcgaagactcattgggacctgcaatgccaagttcctcgcatgtcctcagtacttcctcaaaggctgaccagggcatttaaccacgagtagtcgtaagcgcacacaacattcccaatgttccaaataatacgatgaattctatctcctagattcacaattacgtatatccttccttatcacttatcatataaacgttgtgcatacttggctcgttatcgcgagaagatgtttcactcgcttatttcatctttagtcttacccccagtttacctttgtacgcgacgactgtgttatcttctcataatttacttttagattcgtgggttgcgagtgtcgattatggttttacgtcattaccatggtaggataatttagattgtctaccattattctctttgcactatgtagttcaaagtcccatgttagggattccacccaatcaaagacgttatctttcttgatactcctttaaaacaccattgctttttcttcctgtttaattgtgccactgggtgctggtaatggactctcatttatttctgtgagcaaaccagttttctgtatccaatgggtgacaaatttcggttcttccccacgtcacgcattagaaacctccgggacagaggacttgtctgaaatttctcactctcttaaaagtgcggcagaaaattcacctgacttattagccacaaggctttggcacgttcccttctgtgattgtaagcgcgaaagcggattggtttccccttaggcggctacacattaaggttggccccctgtggcctttttttaaggggcgtccttttccttcctaagtgcggcacaaggaattattggcgcaaaacaggaacaatttaccaaaagaattctattagttcattatcgggtttattcccaccacgcatttaagtaaacctccctattttccttcatagttttacacaccccgtggagccaacatag

SEQ ID NO: 668639 - DNA, 986 bp, Homo sapiens
  misc_feature (399)..(399): n is a, c, g, or t
agcggagtgaggggagcggtgctaagagcaggacgatgccgccggcgtcgaccaccaccgacagagatacacctctcgatcctacagggccgacggccgtgggcacttggctgcgcaggcaaggctatcggaccccgtcaggctctggacgttggctgactggtctccaggtttcttctaacctccgaggaagaagaagaataattggtcccgcttgaattctgggaagttcactctgacatgatgtctagaaatttagtggaccttatttacaatatattggacatggtctgagtctgatggcgcaatcaatgaaccgaacggagaccaaaagtacgggtacaactaatacattatgaccacgatatcaaaacctacgctatctgtctggtgcacgangtccgacttgttggactataatcatatgcataagtgcttctggtttagtgaacatggacagatttctaagttgaagtttcaacgagacgtaaccaattaggcgtgctggcatttgtctaacgcacaaactgtaattgtcgtgtgattcgacacgtcacaagtaacagtttctgacagttatggggataccatgctgcgttcaacgaacagattaccataagccatatcaacccaaaatggatacttatctacgcagggaagcgggctatagcaagatcgactatgatcgttcattatgaatatccacaacactgagggaagttccctttttggcaaaggagcttgacaagaattgcggtttaaataagaaagctatccacgcagtgcccagcgagaggtgcgctgataccacttagtaatattgaagctgttgatccgggggaaaaacctaaggggcggcatccatcaggccatacatttactaacgcaccccagttaggaattctccccagggcacagccctagaatccctgattgtcaggcaattgaccaaattcaggtcttatttatttcccatggggcggaac

SEQ ID NO: 668640 - DNA, 112 bp, Homo sapiens
atagccaacaaagaaacaaattcagaattagtctgccaagtaccctggtataagcttggaagtggattcttcccagattcttccaataagagccctgtgggtccttatcgag

SEQ ID NO: 668641 - DNA, 197 bp, Homo sapiens
tgggctcacaacctttcctccacctctgctgctgtctctcccgcccactcatgttgttcgcctctacatcccccacaacccacttgtgggtgtcgaaaccgcccgccctgatacaggcccttttgctaaaaatggtttgagctaatttctcggatgtgtcccactcctttttatgagggtcactcaatcatatacaa

SEQ ID NO: 668642 - DNA, 373 bp, Homo sapiens
agcgacgagatgtaaggcagtgttgatatatttgcagcaaacctgcatcagcatttcatgcatggcatggatttaggatataagagaaagacagaaccccgaaaaaacttcagagcctctggtctgagcacattagaagaatggacgtacttttcaccaaaattaagagcagtagattttagccggacagtccaagcaatttttcatttgatcacattttagtttgcaatatcaactagaccagcctaatagaggcatatcacatctagggctctcaagaagtaaacatggcaatcgttgctacagagatggcatttactctaaagagactggattggactgataacattgtgtgtgaaatgggaaggtggga

SEQ ID NO: 668643 - DNA, 239 bp, Homo sapiens
gatccccttatagggttgtggcaggctggtctggaactgctgaactcaggtgatcctcctgcttcagcctcccagagtgctgggattgcaggcataaccactacgctaggccaggaatttttgttattgttgtttttgtttttgtttttgagacacagtcttgctctgtgcccagaccggagtgcagtggagcaatctcggctcactgcaacctccgcctcttggattcaagtgattca

SEQ ID NO: 668644 - DNA, 153 bp, Homo sapiens
tcttggcgtgtacggaggctgtaggacggcgtgtacggaccgtgtaatacgtgttaggaggcgctcgttacggagacgcctccataacgacgcctccgtaacacgcctccgtaacgagcgcctccgtaacagccctatactccctctacatat

SEQ ID NO: 668645 - DNA, 462 bp, Homo sapiens
tacttctcgcagttataataaacagtaagggtaatttcatgatgctcaaagatgtgcctacttgcagacggaatgaagagctatgacactattgttgttttacccatttattatacctacttatgaattccagaagtgtagctctataagcttaccaatagaaaggtatttcataaataaatgaacatggaacatgaacctacatagaaaaataaaataaaatgggaaatggctaatatttgatgtcctgtattttgttctattctctcttatgaactcccaaaaccagaagcaaataagtttattaagatgccttgaaggaaacatttaggatttggaaggttaaaagaaatggcatttcaagtcaggttttggtagttccttctttagagccctttcagacaatgtttctgtattctccatgataaggagagagaaagtaagaaatcaggtagctgcttc

SEQ ID NO: 668646 - DNA, 298 bp, Homo sapiens
tacatgcctcgacctctcacaaccccgatgatcactattcatacgatggcgtcctcttccaggcccaccagcctaccccccagcatgctggtatatgcagcttgtttcccttgcaccaagctaatatgaagccaggcatccgtcctcccaaacaagcagaagctcagtaggtctcaccaggggccctagaatctttccaggaggcaaacgaggtcaacatttatagcagactccaagatatggccgtatcagcattccctcgtgccccacgtctggctactctgcgcacacacgcaga

SEQ ID NO: 668647 - DNA, 188 bp, Homo sapiens
agccgaacagtgtttattaaaaagagttaccaagtgacacaaggtgacatctgagatttgaacatgtaaatttataacagcacctatttgtggttctgttgatttttttttccaatagctcttagctgccttggtacagcaagacattcagctagtgtggggatgggctggatgagtacaaagaaaag

SEQ ID NO: 668648 - DNA, 159 bp, Homo sapiens
ttccagcccagcctgcaaggagaacagtctctagtggtcttgatggaataggggctgagggaacaatggtgaccctgaaaggggtccaggttctgtgagaagcagcattggctgtctgagggtgggtagctgagagacacacatagacgtgggtgatgg

SEQ ID NO: 668649 - DNA, 351 bp, Homo sapiens
ggtcgactactaaaaatacaaaaattagctgggcatggtggcgtgcgcctgtggtaccagctactcaggaggctgagacaggagaatcgttcaggtggtggatgttgcagtgaggcaagattgcaccactgtactccagcctgggtgacagagttagactccgtctcaaaatcctactttttcatgctcacaaaaagtgataaacaatctgttatacatctccttgtgcacatgtgggtgtctttgggatatatcccaatcaggaaacttctagaatatggtatgtgtgtgtctcgacatctctaacactgtcacattactctctggggtggttttaccagtcacctctca

SEQ ID NO: 668650 - DNA, 376 bp, Homo sapiens
ttctgattggttacctagggcaatttcaagcattatagtctaaaacttcttttactggggtcaaacctttttcccctgtgcccaaaattacgtgggtgagtcctcccaaaccccttatttcccaattttacccctcatcagggggctatggaggaattttaatttgtcccctaatcaactcccaaccaattgagcaaatagttaaggtggtcctgaaactactctccagtcccgggggcatttggaatgcatttttactttttttttgaaacccatagacctcatccttcccaagcaaacaaaatgggtccatgggccccaacctttgttttcattcagtaaaaagcacaataaaagtcccttttttgccctttta

SEQ ID NO: 668651 - DNA, 1212 bp, Homo sapiens
tctcattctggaccaagccatttaaatttggtaacttaaatggtggcaatatgaagtcagataatccttgaaaattctcaccgtggctctggttacagagtgtgaggctgagttctacacctttcagtcttcatcatcaggagggataccataattctctcatcgtgtccacgtgggaaggatcaggatacggaaaggtgacccagcaccctcttcgtgagctcagtgccaaaagcgccagaaaaactccaaaaccacagtgagctccgcgtgaaaaaacctcgcctcgggaaacaccgtgggactcgggctcagcggggggaacgggtctataccggggcccaagtggtgcacaccaccacgcggcattgagcggactccaccattctccagcagttccggtgcgcagccgcttcgtgaaaaagggggcctcacaagcgcaagcgaaagaacgccagccgagttcagaaggggacatactcgcactcccgtccgccccgggggtgggcccgggcgtggtgaaaccagggcggaaatgtggcgggcgaaggcatatataattccacaccggaatccgactgggggggtcgggggagcaagggattggtgtgtttgcaaccgggtgtggcggcaagggaggggcccggccacccaggtgtgggccagcgggatgccttggaggccggttgggttttggctgaccacttcttcccattcctcaggggaacactggggccctccgggacatccgagtcttgtcccgaaggttaacctgcgacgcggcaagggcaaggcttgtaggtccacaggggggagccccatgtgggaaccttgcacattgtcggtctgcggaattattccctcttgcatggcgaaaaactcagagggaaaaacggcaatcacaatctacggccggaaacgggtccgaggtatacaggcgccaggagagataaacgcataatcagacggcccattttaccccagtgcgcagagaacccgaacccgcacaaatcttatggagcagtgagtcacaaacgagaaaatcccacagacgggagacaacatagtggaggcactcgtgacgacagattatggctcgcgaaaacccgcaacaaagagggattcctaccgctctcttctcgcgtccctcctccgctcgcgcggccctcttcctacacaaccacagagagagagaacagcacaaaagaaaga

SEQ ID NO: 668652 - DNA, 365 bp, Homo sapiens
cgcttggggctttcgaggtgccatgggaaccagaactgcatttgaaggccaaagcaggtgtggcctctgattttgggaaagaaactgcattctttgaggctcgtggccttaccaaaataactttctcccctctccctcatgccttccgttgccttcaggcctttctactacagacaggagacggaaagcaccaagacctcaagtacatctcaccagagacgatggcggccctattgacgggcaagttcagcaacatcgaggataagattgtgattgtagactgccgatacccctatgaatatgaaggcgggcacatcaagactgcggcgaacttgcccctggaacgcaactcgaaagcccaagcg

SEQ ID NO: 668653 - DNA, 228 bp, Homo sapiens
agctctctcggttgggggacgctctccggtaccgctctctcggtggggacctctctctgtgggggaccgctctctcgggtgaccgctctctcgtgtgggggacctctctcgtgtgggggaccgctctctcgggttgaccgctctctcgtgtgggggacctctctcgtgtgggggacctgacggtgcctggaccttcagacggcgaccaggacgggtacgtgacggttt

SEQ ID NO: 668654 - DNA, 696 bp, Homo sapiens
ctctatcatagaagagcttatcaccttttatgatcacgccctctataatcattttccattatctgcattcgctatgtcctgtatgcccttttcctaacactcacaacaaaactaacataatactaacatctcagacgctcaggaaatagaaagcgtctgaactatcctgccgcgtcatcatcctagtccgtcgatctgccctctcacatcgcctacgctatcctttacataatcgaggactgaggtcaagctgatctccatcccattaccaatctaaatctagattggcatccaatggtactgaacctatcgtagatacaccagatcgtacgtgcaggactcaatctatcaactctcatacatgacttccccacattattcctagaaaccaggcgatctgcgtactcctgcatagtagtacaatcgagtagtactcccgattgaagcccccattcgtataataattacatcacaagacgtcttgcactcatgagctgtccccacattaggcttaaataacagatgcaattcccggacgtctaaaccaaatcactttcagccgctacactgaccgggggtatactacggtcaatgctctgaaatctgtggagcaaaccacagtttcatgcccatcgtcctagaattaattcccctaaaaatcttcgacatagggcccgtatttaccctatagcaccc

SEQ ID NO: 668655 - DNA, 226 bp, Homo sapiens
tcactctagactgcgtgacagagcgagactccatctctaaaccacaaaacgagagagacaacaaacaaaaaacacatggccgtctactgctgctagactcagaatgctccccaccacggtcagcagaggaggaagaggcagacatctgccagcccatccatcgccaagcccatttcaggttgagacctcctctgagttcaggggctaagaatcccgctccatggcg

SEQ ID NO: 668656 - DNA, 208 bp, Homo sapiens
aggtagcccagggtgctccacccactcccaggtagaccacaagccttcatacatctcaagtcgggggacaagaaagggcggagggggggggcacgaaggctcatcattcaaagataaaacaacataaaaaagtattaaggcgacgattaaaaaaaattttgcattacataatttacacgaaagcaatgctcatcacctccccggtgtg

SEQ ID NO: 668657 - DNA, 955 bp, Homo sapiens
gggagtaattctcttatctttgttttacccagaggactagcttctaatttgtccaaaagccacacagagttgtgtaaaaactgatcctgggagggaacctgaaaaagtccatgatgcgcagggccaatgttgcctctaaaagttctccagcaagcccaggatgcgctattgagcacgattctcccggaactccgggctccggccgtaccccgatgtatctctgagatactccttgatagataatgcctgacaattttgataggagcttccttcgcattgtttaggaatctggtagaaccctctgtggcgaactctgggggacacttggcatttgcagattcttcggccagtgatgtaccaaattgtgctggacgaacaaagagccccgtattccaggcgccggaggtagaacctcctcctcgggtgatcatgtgtcagagtagatctctcctcgcccggaccattgtcggtgataaccccgtttcaatcttctgtggccgccaccgtgaattgtgcacccagatttttaaaattgcaacttccattagatcgtgtacaaccttctacacgtgtcattatacaggtgaaactatattcagaaatgccggggatccgatgtgatagcccctcaacagagttcacgcagatagtggacagcccaggactcgaaccagaacagtgctcgtcaagtgtccctatcctacaggggtgtccccaatgttgcatgtaaaacttcccgtggggaagaacttcccaataacaaggagcgggcaaacaggcagggggcagcgacaagcccaacagaaaagtgctcccagcacacacataaaagggccaaagtgcactggggcccaaacgggggcccaaccacgcatggccagtggcgccgcacaaccacttcacggggccaccggcccccgagggagaacatgccaacccccgcgagaccccacgc

SEQ ID NO: 668658 - DNA, 909 bp, Homo sapiens
  misc_feature (8)..(8): n is a, c, g, or t
  misc_feature (129)..(129): n is a, c, g, or t
  misc_feature (137)..(137): n is a, c, g, or t
  misc_feature (198)..(199): n is a, c, g, or t
  misc_feature (228)..(228): n is a, c, g, or t
  misc_feature (232)..(233): n is a, c, g, or t
  misc_feature (244)..(245): n is a, c, g, or t
  misc_feature (263)..(263): n is a, c, g, or t
  misc_feature (267)..(268): n is a, c, g, or t
  misc_feature (277)..(277): n is a, c, g, or t
  misc_feature (286)..(286): n is a, c, g, or t
  misc_feature (292)..(292): n is a, c, g, or t
  misc_feature (303)..(303): n is a, c, g, or t
  misc_feature (308)..(308): n is a, c, g, or t
  misc_feature (338)..(338): n is a, c, g, or t
  misc_feature (361)..(361): n is a, c, g, or t
  misc_feature (374)..(374): n is a, c, g, or t
  misc_feature (378)..(379): n is a, c, g, or t
  misc_feature (383)..(383): n is a, c, g, or t
  misc_feature (402)..(402): n is a, c, g, or t
  misc_feature (419)..(419): n is a, c, g, or t
  misc_feature (436)..(436): n is a, c, g, or t
  misc_feature (467)..(467): n is a, c, g, or t
  misc_feature (496)..(496): n is a, c, g, or t
  misc_feature (503)..(503): n is a, c, g, or t
  misc_feature (557)..(557): n is a, c, g, or t
  misc_feature (566)..(566): n is a, c, g, or t
  misc_feature (587)..(587): n is a, c, g, or t
  misc_feature (595)..(595): n is a, c, g, or t
cttctctnttatgaaggggcatggcagaaaatgaaggctattgtgactaaaaggaagctctgcgagattaacaacatataactataaccttgtctccaagggagatctaagagtgcccccacaagaatntgagagantgtaataggatatgaagagaacagctgaggaccctcatttttatttatttatttatatttnnttttttttgagatatcagtgttaattggnaagnntctcatttttnntttttaacgagttattangttnntttttactnttgtttttnaatttntacaccaaganaactntgtattttgagtatatgagttaagtatggnaaaaagtaaagtaccttaaaaanttttattttagtncttnntggnccatgctaaaacttatatntagaaatacggcaaaanaaaatgaaacagatctntccttgtacataaaatagctaaaaatttggnctctttattgatcttatgttatgtatttnggttganaaaaaaacaacaacaaaacaaacagttacaagggttaaacaaactaaatttttnttctaaatntctaaatgctcatagatagcnaacttgcnggggatacacagtgccttgagagtcggtcccacagaaaatacttatgtaaatgaaacaagaaggatgctatttgtttttcattacataaacattacctgaacttaactaatcaatccacttatttgataaaaatcatctaggaccaaaagcactatcaagtttgctggctgccattttcactctaatcatacccaaaaggcttagaaataattcaaaactagaaagaggcccaagtagtaaggctacctatggctcttgctacaaaacagttgccagtctgatgtgtgtgtgtctagaaagaatgatagaaaat

SEQ ID NO: 668659 - DNA, 304 bp, Homo sapiens
cgatgagagctatgaatggagagtccctggatgggcgccaaatccgagttgatcatgcaggaaagtctgccaggggatccagagggggtgcctttggtgggcgtggtcgcagttactctagaggtggtggagaccagggatatggaagtggaagatatgacagtcgtcctggaggatatggatatgggtatgggcggtctagagactacagtggcagaagccagggtggctatgaccgctactcaggaggaaattacagagacaattatgacaacttgagattggggcatgcacacaaaatata

SEQ ID NO: 668660 - DNA, 490 bp, Homo sapiens
tgcatgatgtactgcggtgacagaacctaaatcgtatctagagtctgagttgcaagaaagtttggaaatgtcatttttagctttccagcctctgcagtagaggaacgcacacttaatggaggttgtagagtagattggctcacttatctgatgcacataatctttgctaacacaaagcttaaaattggattgtgaagccaagagtaacatgtgaaatagcaaataagagtttagcccatgaatctgaaaggagcctgtatcagtgagttgttcaaagatagattggactgccggagatcaagttatttcccatcactgaaggtattgaagtgtggaaggtggttacctggtcaggaggctctagcaaggacttctgtcccaaatatgtggtctgtcttttaagttttcttctattatgagtgtctgggtcagatactcataacaattttgtcagatttatttattaggtttttatttttccatttcaaga

SEQ ID NO: 668661 - DNA, 446 bp, Homo sapiens
  misc_feature (13)..(13): n is a, c, g, or t
  misc_feature (54)..(54): n is a, c, g, or t
  misc_feature (113)..(113): n is a, c, g, or t
  misc_feature (244)..(244): n is a, c, g, or t
  misc_feature (349)..(349): n is a, c, g, or t
  misc_feature (367)..(367): n is a, c, g, or t
  misc_feature (415)..(415): n is a, c, g, or t
tagttaatgagcnacaagagtcaaatagtcctgtgaatggagcccccatcacanaacagtgcccaggaggatggctcctcaagctaaccatgcccagcgccataaagcagcancagatgttttggaattggggtgaaacacccacagggcagcctgctagcagcagtgaatttgacttctggtcttaaagagtccctcacttcagccccaggagatattggtgggtttaagcagttttgtcttnaccgtttttagttctccttgattatttgtttttttttttttcccaataaggtttggtatgtgttgtttaaaacccatggttcctcaagtttcctttttaaacatntgcatttgctggacaaangcaattttttttaaaaaattcccctacccatgtttaaagctgaaaaanacatttggttcatgtgcaatgtttacaagag

SEQ ID NO: 668662 - DNA, 296 bp, Homo sapiens
gtagccggtctagaggatccctgcagcccatgttcagcaagcacagcattctcttgtttagatacagattctcactctgtcacacaagactagggtgcgagtgatcatccatcttggctcactacaacctccttctactaatgttaaaaccattctcctgccgttggccttccaagtagctgggactacatgtgcatgccaccacacatggataatttttatatttttcagtacaagatgaggtttcaccagtgtttggcctaggctgtatctcaagacatcctggtccgtcaagc

SEQ ID NO: 668663 - DNA, 306 bp, Homo sapiens
gacacgctggctcgtctgccggtgcgttgacttggacaaccctgtggggcccatcttccctctccccaccctttagactagcccaacatggtacagaacacaatgaaagtcttaagggccatagaggggacaagaaacaaaacaagagaaccagcacataacaaagcgaccatcccccaaatccatacctaggaacgggccctcagggacggagggtgcatcgagaggaggacgcggaatgggatgtaagaaccaggtatttacaagaacagctcgagagcgcaacaggaacgcgggcaagaccaa

SEQ ID NO: 668664 - DNA, 1632 bp, Homo sapiens
  misc_feature (562)..(562): n is a, c, g, or t
  misc_feature (987)..(987): n is a, c, g, or t
  misc_feature (1530)..(1530): n is a, c, g, or t
gattagttggggtggatgtctcactggaacagttgctccgatcgcagacatggctccctcggcttcctgccttcggaaggcgcaggaccgaacggcatagagccgcaaggtgaagcacgcgttccctacagggagtgaccgcgtgcgaagcgcgggtgccagctcacgagaccttgcctggggatagcagagggctggcgatgcagcgtccaatgatcagtgccgggcagacgctcagactgagtgcgggcatccacaggtgtacacaacggagggcagtctggtgagaccgctgtgcaccactatgtcagagacatcctatccacaatgcgtggaggatgtgaggttcactaggtgaggtcctacgcatggaaaaaccccatcgaagggacccatccgcgagaaccgtatcgtgcaacatgctacgtttatggcatggacgccgagcaaatgcaggatggagtgaaacctgtcagaagcacgtgccagtgggtcagtcacttaaaagaacactctggtggcattcgacagtaccataacttctagagggaagagcgccccntttttataaacccaacagtttcatcgttgggggccacattgaaaaactgagggcaatgggtacatgcaagggggcacttcgggtcgcgaaagtagcaaggccgaaagcctttgtggaagacaaaaggggaacacgtctttcgagcagccacgtttccactgggcagaagagaataggctccatcctagttggcaaaatgtttacatcggccgaagggttccgagttttgggcccccgaggagacagcgaagtttaatgagcgggacacggttgcctattgccgcggtcgtgttgggtcgccaagttagaccgtaggagtgccccgcaacctcttctcaatgtgagcaacgtcacttccaccaagggtgcttgcaccagcgggggaacaggggcagaatcgttgcctagagggcgccaggagaggncacacagagccgatagcggcaatcttcgatgtgtacgcaccgggccgcaaagacgagggtcctcctggcagggcccaagctaccaagagggtgaatcgctttgccttagacaacgcacaatatgcgtagattggacgtggcgaccacggtcaacttcggagggcaattcagacgtccacggagaccgttccaactaccgggcagaggatagaaccccaagagggggggcgaaagaaaggagctttacacaaaaagggggggatcaaacccacggtccggttatggaggagacaggcccagaaagaaaatagccattgacacccaagaagaaatgaaaccccccaaacccggaatgggccacttgcgagccacaagggtcttggcccttgtagcattacggcgagcagttgtgcacttccttggactgcggtaggtagagccctgtacatacttgagtggagaactggcgcattgggacagcaaaaggagtaaacacaatcaacaccgcaagttcgagcgaattccacaccagagaaagcgatntacattaagcgaattttggcgccaaagggggttaacccgctaatacacagtgacagagtggacaggcttggagtcacagacaaccacatgagcccatcacag

SEQ ID NO: 668665 - DNA, 165 bp, Homo sapiens
tggcttgtcgctcagcctcccaaagtactgaaattacaggcgtgaggccaccacatccagccttggttgattggtggtcctaatggttaattggttgggtagttttataagtcgctcatgacatgtttcctgctcgtgtatggatgctcgtgctgggtaccgagc

SEQ ID NO: 668666 - DNA, 405 bp, Homo sapiens
agacgcttgggggtcaggggttgaggtcttggagattgttttacgggggttaccaatggaggtaggattgttcctgtgggtaaaaaagtttaatggggtggtggttgtggtaaactttattagggtaggaagctgattatttattgaaggaaaggggtcagggttgattcggaaggatcctattgttgcggggcctttgattaattatgggcgttgattattagtagttactggttgaccattgttggtgggggtatatattgtatttagaattgttcgggggaataggttatgtgattaggattagggttaggatgattggaaaaaaaaaagaaaggaattaaagtttaattatccctttttgggttgaggtaataatggaggtgagaatttggcgctggaact

SEQ ID NO: 668667 - DNA, 261 bp, Homo sapiens
atgtccccctaaaatacactgtagttcatgtataaggtaacttgaggctttcaaaatggaagatgtatttttcacctgaggacattcttggctataagtggttattagggaaaatgatttcagacttcagataatgccagcaagctaaatcctcctgctctactcggatggcctgtggtattctgtctaatggtggaatacaaagatggccaaaccaatgttctgatgactgttttgattcaggcattggaagaagttatg

SEQ ID NO: 668668 - DNA, 319 bp, Homo sapiens
gttaaatatgttagatgtaataataaattgcaaagaaatgcacatactgacttttgactacaagcgtgcagactaagtacgatgactttagaaggctacagtatgtacaaatccatgagtgcaataagctttcaaatacattaggtatatatccgtttaaataaatagtagaatacttgatttgacatatgtgatagtcatactgattacaccaaaaatgttttacaaaatatagccaaaaatggaacgttatacattttgatatacaactctttaaatactttatatattcattacttacttcaaattatagtgtaca

SEQ ID NO: 668669 - DNA, 748 bp, Homo sapiens
  misc_feature (6)..(6): n is a, c, g, or t
  misc_feature (20)..(20): n is a, c, g, or t
  misc_feature (204)..(204): n is a, c, g, or t
  misc_feature (312)..(312): n is a, c, g, or t
  misc_feature (473)..(473): n is a, c, g, or t
  misc_feature (527)..(527): n is a, c, g, or t
  misc_feature (553)..(553): n is a, c, g, or t
  misc_feature (578)..(578): n is a, c, g, or t
  misc_feature (603)..(603): n is a, c, g, or t
  misc_feature (609)..(609): n is a, c, g, or t
  misc_feature (613)..(613): n is a, c, g, or t
  misc_feature (616)..(617): n is a, c, g, or t
  misc_feature (620)..(620): n is a, c, g, or t
  misc_feature (629)..(629): n is a, c, g, or t
  misc_feature (635)..(635): n is a, c, g, or t
  misc_feature (637)..(638): n is a, c, g, or t
  misc_feature (646)..(646): n is a, c, g, or t
  misc_feature (660)..(660): n is a, c, g, or t
  misc_feature (680)..(680): n is a, c, g, or t
  misc_feature (688)..(688): n is a, c, g, or t
  misc_feature (729)..(729): n is a, c, g, or t
attttnatgaactaactcanggctacatcagtacaaaatagtttaaattagtaaaataaagtagtttcaaagggaaatcattgacgacttcaggataagtgccaccaccatttgggaacagaggatagaaggtagccatgtggttattccatgatgcaggaatcaggtcggcaggtggactgtcattgctgtcttgcggcagcnggcctctgccttcagggtaccaccgtctccaggacacaaatgggcagcagaaaaatgtcaccttgttgatactcagcagctcatctattgggacaaaacttccatctnggccaagggaaatactctgttgagtgaccagcggggcccagcccccagccctatttatctcatcaatatggttcagggaagataaaaaagagtgttctatgggatagaaaggtgggaataagaaaaaactaagtggctgggcatggtgagtcacgcctgtnatcccaacactttgggaggccaaggtgggcggatcacgaggtcgagattgagancatcctggccaacacagggaaacccncgtctctacgaaaaatacaaaaatnagccgggcgtggtggtgcacacctntagtancagntanncangaggctganacaggngnntcgcttgnatacgggaggcggnggctgcagtgagccgagacngtgctgcngtgagccgagatggcaccactgcactccagcctggcgacanagggagactctgcctccag

SEQ ID NO: 668670 - DNA, 146 bp, Homo sapiens
tctcatttaacttttttaatgggttaaaattctgtgacaaaatttttggtcaagtgtttccattaaaaagtactgatttaaaactaataaccttaaactgcacaccgcaaaagaaaccaagtgtcacaaacagcgcgcgaatcgaa

SEQ ID NO: 668671 - DNA, 934 bp, Homo sapiens
ggcagttacgagaggatcccgctgggtctgctctctctgcttcaagcagtgtaagagacggaacagatccggggaaatctcatatccaggctctcgacctgacctccgatttcctctccgactatgaaaccctccggggaccaatctgcatcggccatcatccatgacttactgagggacctgccaagagagccgataacgggtgggtatcagcatccttcttgcccaaaccaaacacagtgaggctcccaaggaatgcggctcgagacaatgtgattcacaaccgacacagtgggcacaggccagcccacgtcaaaatcagccctggggtccaacattgtggtaaccctggcagggaccctccctaagcacctaaacctacttctcttgggagctttccttattttcggacccagacgactagcattgttgggccttcaatgcgtaaagtgcctggttgcagccccactttcatatcccggcgaaacttcgggcccggaagagaaatcaaagtcgcgtcaaggagcaaacgcacaacggtcatcccgtggacgcggcaatgacaaacacaccccaagacagaggggcagggcgacccgggacgcccacaccacgctctcaccaggggcaccaatatcaaaacgaaacaacgcccaaggcctggcacgcgcaagcgcaggatgagagagaaaaaccaacgcccgccgacggaacgggccccaacggaacaacagacgaggggcacaaagtgggcacccattgtgcagcaacacataaggcgtggaactacccagggcacccttttaggggcacttcttatcaattgccccctgtgtgaatctatgcaccagacagaatggacgcccccacaatcaatcaggatgcacataccctgggacaaaacataattttccttagcattgcaggcacgtcg

SEQ ID NO: 668672 - DNA, 381 bp, Homo sapiens
catgctaatgttaacacacaaccacacagtcatgttaacacacaaccacagtcatgttaacacacaaccacacagtcatgttaacacacacacacagtcatgttaacacacaaccacacagtcatgttaacacacaaacacagtcagactggtactgtatatttgtcactgctcaactaaatcaatctcagtcgaccaacaactgtgtgtgtagtggggtcagccctacaacacacagtcatattaacacacatccagacacacagtcatgttaacacacatccagacacacagtcaaggtatggagaaatgtgtctgtaccttttctgctgtcaggaagtactctttaacgagatcctccaccctcagaccctcagttga

SEQ ID NO: 668673 - DNA, 99 bp, Homo sapiens
tccactagtgtaggtatgtgtgtagtgcgtggtgtgtagtatgtgtggtgtgtagagtgtagtgtggcgtgcatttaatgactcgtacacactgtgatg

SEQ ID NO: 668674 - DNA, 117 bp, Homo sapiens
ggacgaacaacagaggtatttctcctatctaattgtaactttgtaccattgactaacctctcatattcccttccctccttctctctctcatctttgtaattgctgttcgttccattt

SEQ ID NO: 668675 - DNA, 1003 bp, Homo sapiens
cggccggatggctcgagctcgggcggtggctggcggtggccggaggcggcggtgccatcctcctctctcgccccggcgccggcgtgtgatccgagcgagctggccggagccctccgatgagactgctgtgcgggctggctgtgtcctgagcctggctgtccgtgtggctggcgcggaggatgtggacgctgcggagcccgctcacccgttccctgtacgtgaacatgattagtcggcccggggtgtggctcggctggggctcgagaggcggtgcagggaaggagaagcaccaggtggtagtgtgtgcgaaactagagcagaaattatgcagaatcactccaggtctgtctttggttcagagttaccttgatcaaggaaccagagatcttcttaaaccaacgagcattgagaaatcgggctgggtatttatccaattatatcattctttgtgtcagtcgtgttttagcctgttaatgtctagaagatctatcaatgggttgtaggaagaggtcaatgtttgtgttttcaccagatcaggtttcagagaggtgcttaggaattatgtccagagctgaaaaagccaaaagagttcttgatttaggtgctggagatggagaagtcaaaaaatcatgagccctcattttgaagagatctatgcagtgagctttctgaaacctatgatatgggaggttcgaacaatgaaatagagagtcgtgggtataagatgaatggggaactacggggttccaggtatgaatgtcatcagctgctgaattgctggaccgtgtgaatagcccctgactttgttaacggatattcgaagtgtcttggagccacatagaggcggggcatctcgccttttctccccttatccattgggacgttggggaggtgggaaaccctcaatttggatcaggcggccgggggaacacggaattgccaggtcagagcggtgtttagctccgaacacccggttggggggtaaaaccgggcggtgtcacca

SEQ ID NO: 668676 - DNA, 138 bp, Homo sapiens
  misc_feature (18)..(18): n is a, c, g, or t
  misc_feature (34)..(34): n is a, c, g, or t
  misc_feature (37)..(37): n is a, c, g, or t
  misc_feature (99)..(99): n is a, c, g, or t
gacgagaaagcgactaanagcagagggacaccanagnagtttttcttcaactctgcacactattgactctattattttctgaagcaaaaagctgtttgntagaatggaaacagaaaaacattaaaaagttcattcctt

SEQ ID NO: 668677 - DNA, 110 bp, Homo sapiens
atgggagtgcgcctagtctcgaggcgggagagccagccgccctgcagccggccgtcggccccgcagccacagaagccgagcaccgctgcggagctcccggcggcccagcc

SEQ ID NO: 668678 - DNA, 1101 bp, Homo sapiens
gctgacacggggtgcccgaggtgtctgtacactctccccagtctgcgtgcgcctcaaactcagtagcaaccagatcacggagctgtccctgtgcatagaccagtgggtgctcgtggaaactctgaacctgtcccgaaatcagctcacctcgacatgccctcagccattttgcacagctgagcaagactgaagaagctgtaccatgacttccaacgaagctggacttgtagaccgggcgtgccctctaggcattaggacaagcatcaaccgaaccttggaatgagattcatgggcgtgccaacaaagcgaaccttggagtctggatcccgtgaatcagtcctcttgctagtgtgccacaatgagctgacggaaactttgtccgtgatactacaggaacaacacctggtgacccatcgcacagatatgctcgatccaatttacgcttgtaccgggagaatcggaggttcctgagcatgatgcagggaagtacacctccaatatgcatggttcaatcgtcgcgtcccaaaagaccccagacaccgaagcgcagtgtcgcgagtgaagatgtgatacagacgattctgaaccttcgtcgacttgtcaggaaaacatgcatgtcgggcctagacggggatgcctcttccgtgctaactgtggcttagcatgtctgcagctgggatggtgggcccatagggaccctagtggcatcgcacagatgcagacgtgcgtgacgagcgcaaatggatttcacgcgccagggatgacccatggtcaaggcatggtgctgcacgggcatagtcaggatagtttgcccgaggagaacgaaccaccaaaagcaggcacgacgagcgcagattgcccgggcccacagcgggaaagggtgcggcgtagggaccaagggcctggagaaagccccgcttgactactcccgagttcttcacgggaggacgttgggccaagtgcccggactgaccatcttgggcagcattgagaacttcgtgccttttataggtggaaggaaagccttccacggaaagttctaccaaggctgactggtaccttggtgccaaaacttcctgggatacacgggggtccctcaag

SEQ ID NO: 668679 - DNA, 738 bp, Homo sapiens
cgagaacgtatctcgcggccgtggatatccactttgaaaaacaggagactattaactccatctaaaaataccgaatcaggaactggggggacccataggaaaatcctccacctctaacagagcgaagtatactggctttcggctgtgccccaagaatcccaaggcttgatgttgggaaggaattcatctgtcctctcacccttacttccccagtatcacttccaagcacataagtttcacacactatctggaagaaatgggttctgcccttgctgaacagcgtagaatgggacagctcaagtgcagtgggcagaacacaggcagccatcaactcttagaacaaaaacatgcactcaaggcaccacgctgccgttgccacgttgtgggcgccattcccacgtgcatggttgggactctgtggtctgctcagtggatgctagccaagaaccgcattaacaacgactgcggctgcccatagcgaagcccacccagccagcctgttgctaccacgcttcatgctttctgtagtcctaattatacacatcatcagccaaagcccttggtcagaaacagccctaagaggcctccttatcaagcccccatgacgagagaaaggcaacactcaatagatactcgccatctatccacactctgaaatgtaagcctctgacacgtgtgatcatcatgggaaagaatgtaagccacaattggggccttgtcatcataccattgcgtccc

SEQ ID NO: 668680 - DNA, 312 bp, Homo sapiens
caggatccagaatccccggggtttggagcataaggtttatttcaagtttcaattgaactgcctcctcttgtcaggcagggacaactgggaggatgagccccaaaagcctcaagaacccaacaaggtgcccctaaaagacccaaagacaaatgaactttgggcatccttggaggcagctgccaagcggaagctttcgggtttggagcagccccaaggagctttccaaacgagacggaaaaaaaaaaagcggcctgggtcccccagcccctgacgcccctgggccccctttgtaaataaactgttgaaccccca

SEQ ID NO: 668681 - DNA, 206 bp, Homo sapiens
gatcgagctcggtacctgttatcgatgcacgatgaacgtctttgacagacacattcttgacattgaagcccacattgtccccaggaagagcttcactcaaagcttcatggtgtatatcgatgccacttcctgatagcccctatcatcatggaagtggtagatatcagttaatcctgagttctggaaaaatacaacaaaaagggacc

SEQ ID NO: 668682 - DNA, 100 bp, Homo sapiens
atttaatggtattgtaaacagaattgtttttttaatttaatttttggtttgttaattgatagtttttagaaataaacatgatttttgcatattaattttg

SEQ ID NO: 668683 - DNA, 236 bp, Homo sapiens
  misc_feature (32)..(32): n is a, c, g, or t
tttttcccccctttttggcaaaatgggggttnacggttcattcctttatcaaagaaaaggatttacttcctttttagaataaggggaatgggtttcccccttggccctttacttgaacgggggttttgattttttttttgcctcatcagagaaggaatttggattccccatcccccccccgggataaaagtcctgccctttgtttttttgggggaataaaaggtggtttatcctta

SEQ ID NO: 668684 - DNA, 447 bp, Homo sapiens
  misc_feature (90)..(90): n is a, c, g, or t
  misc_feature (124)..(124): n is a, c, g, or t
  misc_feature (145)..(145): n is a, c, g, or t
  misc_feature (239)..(239): n is a, c, g, or t
  misc_feature (290)..(290): n is a, c, g, or t
  misc_feature (359)..(359): n is a, c, g, or t
ggatgaactttatttttatattgttgtataatttattggtaaacttaaaaaaatataaatatatgatttgattgttgttctagaaaaganttttgttacattgttagctgtttcctttagtgtntcttgctcttgttagtaattntgtatgtaactgtaataatttgtgtgacttgagaaaggtgtgttaagggtgtctttacagtgagaagggattaggtagatatttgggggccttnggcttcttcttgcttccctttctaggggatgtgatgacaggaccctgaagntgtggctctgacaggtgggatctttaaaggggacagtcccatgaaagacacacggggacaccagctcantgggagcttttgctttcccaaacaagatgtgggcagcatgactccagcctctggaacccaacaatgtatcttccacaaacttttgata

SEQ ID NO: 668685 - DNA, 343 bp, Homo sapiens
cacgtttataactcagtagtgacactctcttaccagcaggctcctgggtaatacagattcaagccttgtgattctgatgattatctttgggtcattgatggttggtgaattctccatagactgtggtcttgcagttacaaccttctgaatgagaatgcagcccattaattggaaaagaaccagaagtcattggctgatgtgtatcactcttttgatacatatgggcttgaggttgattgatgaaaaagcgaaggcttactgtattgagaaggcttagggtcactctgaaactcttctgtgtcccctgcatcttccattccatttatcaatctgtccagattct

SEQ ID NO: 668686 - DNA, 906 bp, Homo sapiens
taaggatattcaaataggaagagatgaagtcaaatgtcttgttgtagatgacatgatcctatatctagagaaccccatcgtctaggcccaaacgctgcttgagctgataagcaacttcaatagtgtctctggatataaaataaatgtacaaaaatcaccagcattcctatacaccaacgacagggaagcagagagccaagtcatgaattaactcccactcataattgctacaaggggaataaaatgcctaggaatatggctaacaagggacatgaaggacctcttcaaggagaacttacaaaccactgctcaaggaaatgagagaggacacaaacaaatggagaaacattccatgctcatggataggaagagtcaatatcttgaaaatggccttgtgccccaaggtaatttatagagtcaatgctattctcgttaaactgcactgacattcttaaacagaatggggaaaaaaattttaaaaaattccatgtggaagcaaaaaaaaaaaaaaaaaaaaaaaacaaaattgggaaagataattcctaaacatatttgaacccaccgtgtgggcggctaagggtaaccccgaatttcaacgcgtgctaccaagggtggggggttaaccaaaacacgcttggttgtgctcccagagcccgcacctttgctcatgggcacgacttgggattcgcactatattgtgcccttaacctttggtttttgcaacttggcaaacctcgctggaaatactcccattaggaaaaggggcggcggtattaaccaattggaattgaaatggcccttgttcaccataaaatatgcagatagagtaagggcggggtaaccccacaaagtggtcgtgggggtctgtcaccacccacacatgttgtttctgccaagacagagctt

SEQ ID NO: 668687 - DNA, 1175 bp, Homo sapiens
  misc_feature (344)..(344): n is a, c, g, or t
tccacggcgtaaaatattctcaagtttcccaaacagtgcaaggtgaggcagtcatcttcaaaagttcagcttctccagaagccgtggaggcaaacaaggcctcacatgtggattaggctccccgaggtctcacagtttagaggcagaagtgggtgcgtgagggggttgtgctcccgtgcagaagaaccgagaggtgacaagaggctccttctctttcacatctgctttgtagaagcctctctcacaaaaagctctctcatcacttgtgatgcgcatataacgcaattctcaagttctcacacacaacttccatcatcagataaattcgccaaatataggagacncacactatataaagagaagaacactacacgccatatcaaccaggggaatgtgtctataaccaatatctccacgagcgcctttgtgtgcactacatatctattatgtgtgaggacaaaaatctctatgtgacacaaccaccgagagaagtgagagcgcccaatctactcggagagcagacgagtggtcctcccgactgtgtgatatcaacaatatcttctttttacaaaagagcaggcgtacaaagaagatcattactccaacgacaactgtgttttctaatcataataaaagaccaaagagcaaccccccaagcgacttctattcatgtgtagtgacggtctagtcgtcttaaaactgatctatataaaacagagaaaggagaaagagacggtctcctattaaaatgatgctgtagagaagaaatatcgatgtagcgcacaggaggaaacatatttgggcgtataacatgggcgccggcacacaaagagaaaaattaaaacacagataggtgaagaaagaaacattcatggcgatagggtcaaaaatacagcagggaagaatatctacacggcgagagaacaaacagaagcagcaacatataataaacacaacaaacacacagcagtattcaacgaaacgaactcagtgggcggacagtgaggctacacgaccagcaagcggtgggactaacaaaaaaaggaatggagcaataacggacacagaaaacatctcatcacaaagactagaacgagaggccataccaccaacgcacaactaccgagcagcccccaaaagacgaatcaccattatccgaagatgcaacccacagt

SEQ ID NO: 668688 - DNA, 860 bp, Homo sapiens
ggtggactaggatctctacattcagatctgaagcttgtactgtgccataagccaaagattagtctaaatgaaattgtgcacctaccctgtcgtgatgctccatatatatttcttgtgtttctttttatatgtccccaacactttcgcgtcgccccgtgtcctatagtgttttcggtctgtaattcggcatgggtgtcgtgcggatggaaagttgatttctgtgcaatgcttgtgagcaggtctgttccctgccgtgctcttgtttgtcgcttcgatatgatgtatctggatcgagcccttgtcggtgctcattgtttttggtggaagtactacttccgttgtcttttgcttatttgttggtgccttgtgtgttctccgacttttccgaatcccactatttgactatggtgcactatagtacgttctgggcgtttccccgggattccttaagtacttgtttagtttggagttggcaatgttgtgtacattctgttacgattgtatgtccttacatcgatctagtggatctgttgttgaagtgttcttggtcgctattgctttggtttgagtgacgatgttgcatcattatatgtagcgtgctttttgcggaaagctcttggttaacgctttgctcaggcctcacgcctctctgttggtgcgggagtactgtcatcgggtgacgtgaggggacttattattcatatgtccgggcgcgaatggtccgttgtgcacccacagtttgcgcccggtgatgctgtgccgtctcgtttcccccctttggggcccctcgctctgtgccttttttacaggggtttgtacccccttttcggggtgtggggttgcccgccggggggggtttc

SEQ ID NO: 668689 - DNA, 846 bp, Homo sapiens
ctaggccaccgctggtttggcccccaaccctgtccccggcagggtgtccccccccccccccgttcttcctcccgccggggttttggtcttccactttctccgcaacgcccttttggttgcctgtctcctttacacaggggggctatgtaaaattactgggcattgttgggaaaagtgcttgtgtttcagttaagttcgccgctggggaccacctagtgcaagtgctccctgcttggacaaagtggcatacttcatggccagagcatttcctgcggggtggttaaccccggcgcgtggctttaccattcccataggagcaatacgttctcgacagtgcctccttcataaattgaaccaccgccacggtcctttggtttagggacattaaggttggcccactgatgccataaaacatgtgccagttgcaagcttcgaccacaaaagaggcgcccctttatgtattgtgaaaggttatgatacataaccacaggcgtgcgcgtgacaaagactctgcagtgaatcaatggcgattggcaaggttgactttgtctcaccttggatccccctcgaaacactggtctacttgattaacaagccctaaactaaacaaagctggccacaactgttgtaacaacaagaccccctcgtccgcctcccaaacaacaaaaatttttcacccatccccccccaacaagaggaaaggaacataaatattgtctccaccctacctgcttttagacaaccaccaccgcacccactttcattttataccttcttccatgggttcatcattacaactgcggggggcaccaaaaacaacaaaaaaaatggcgccaacataacacg

SEQ ID NO: 668690 - DNA, 208 bp, Homo sapiens
tgttggtgcatgtttggtcttctcaacataaaaaaagtcctaagagacagcaacattaaagaaaaaatgaaacaaaaccaacaaagggtataaatcatgagaaaaataatttatggttttgagtatgacttacagacaagaattagaggaagggtggtagttcctgtggtggctcagcagcaacaaacctgactagtatccagcggta

SEQ ID NO: 668691 - DNA, 1192 bp, Homo sapiens
  misc_feature (287)..(287): n is a, c, g, or t
  misc_feature (877)..(877): n is a, c, g, or t
gccttccggggcctctgaacgtgctatgtcgccgtcctatgattcactgtgccctgtcaaaaaccatgagaaaagtccagtaacgtataaaaacatctcaagagtagatgagaaaggtcagagtctccaccgagagatgtatgataatgttcgtcctcgactccacagaagtagcagtagcgatttttagcattgcagtccgcgacaagtctacgtctcatgtcatatcgaagattatggttaacactaggcacgacactcttgctacaaccttgctactgcccttntaatacaaactgcgcgaattcacggcattgatgtatatgcatcatgtatgatatcactatggagcatcgccatgccaggacttcgtatagaagtgaatgtggtcgtagcgtacgtgctgttggccatgtcgggacatcttggcacaagtgatgtggcgcatagcagcggttatgaaagctgatatgtgacatagtcgagaatggtgagacatggatgtcaggcttattgggacattcatgtgtcaatgtctggaagatgcatggaaacgtgatgttaagtaactctgacattcacatatgatatgtcacaaatgcgcttttctattgtctatcattgattgcggcatgtcctattatccttcatggaaacacactgttcccccacgtgtcggaggtgctgcatgcaaagctaagacttgatcgaacactcacgctcccgctttctaaggtgtagctgccccaaactttcatcacccatgggaactgggaatcaatgcgacttttgccattatccccgaaccgtgccatgggggcatatatgtgcgcaaaacgataataaaagcaacggttagtaattgctccgttgctancaggaatccgggcgatgttcatgaggaggaactcctcggttcgctggtccaagaattaatagttttgccgcggacatttgtgttataagagcttcggatagcataacgtatggacttaattaaaggggagggatgacgtgctctccatttcctctgacctcttcttgggcgaaagaccccttctttaataaaaacgttttcccccaattaacctagggtatcagagtcccaacgtttagggatcgcgcttcgacgacaagtataggcgcccgccataggtgttgactgcgctttggcgcccatttctattataaa

SEQ ID NO: 668692 - DNA, 402 bp, Homo sapiens
cgacgaagtatcaaacaaggagtgtgcagtgtgtgtaggaataaacacccagtcgcttgtgacatttgccccataatctacaatggatattaaaaccaacaaaagccgcacacgctggcccagaggtcgctcctttgttatcccatgctattctaattccagtcgcactgactagctatggtcacacttttttagtcaacagtaaaaaatcactggcgcccactggacatgcatgatatgcgattatcagaaaaggtaccactcccgtgtatctcagtctctgaatatagtctgttcacagacccacaagggcatgggtacaccaatacacgaagtggctgggactaaaccattgcgccttagaggctctcaataacaactacgaacccttaaaatcagcaa

SEQ ID NO: 668693 - DNA, 310 bp, Homo sapiens
  misc_feature (204)..(204): n is a, c, g, or t
  misc_feature (221)..(221): n is a, c, g, or t
  misc_feature (245)..(245): n is a, c, g, or t
  misc_feature (253)..(253): n is a, c, g, or t
  misc_feature (281)..(281): n is a, c, g, or t
  misc_feature (286)..(286): n is a, c, g, or t
taaaaatataaaatagtaggggcgaatgtgcttttagagattccaatcaaattttaggccaggagcggtggctcacacctgtgatcctaatcccagcactttgggaggccaaggtgggcggatcacttgaggtcaggagatcaacaccagccctgcggcccaacatgggtaaaaccttcaccttaaactaaaattttaaaattnggctgggcttggtggcncatgccccttaggttcccggttancccgatangggtttagggcacaggggtttgcttttnaaccnggggggagtttggggagtttttca

SEQ ID NO: 668694 - DNA, 577 bp, Homo sapiens
aatagaggatagagtggtgtcactaaatatcccacagtgacactggacagctcccatgtgacagtgttatccaacagagaagtgtcagtagtgtgcttaagtgaggaaatcctgattttatcctctgcagttttccagattattttctcatccatctcaacatcacaggggtctattgaactgaggggacaaaactgatatctaggagcaaagtgaatattctgtgcaggtgctactggccgtcattataaaaagttacggggttggaggggtggacaggtggttgaggaagaaacagtagctatatgacttctgtggcaggcagtggtgcatggttgttccgaacaagactttgggccgggcgcggtggctcacgcctccaatcccagcaccttgggaggccgaggcaggcggttcacgaggtcaagagttcgagaccagcctggccaacacggtggaaccctgcctctactaagaatacaaaaattagctgggtgtggtggtgcgtgcctgtagaatcgctcgaacccaggaggcagaagtttgcagtgagccaagatcgccccactgaactcct

SEQ ID NO: 668695 - DNA, 314 bp, Homo sapiens
  misc_feature (13)..(13): n is a, c, g, or t
  misc_feature (156)..(157): n is a, c, g, or t
cggcctgactganggttctcttacatttggattttttcatgacacccatgactatgctttggagagagtggctgcccccacgaccctggctgggaccaagaccatcagcacttctccatcaccatggctgagcccaggatgagcgtgggctggtcnngcagtaggtgaaaagggggccaaatgatactcagaatgaaagccacacgaagccacacccagtgaggctgctgcctgggccagaaggcccatgaatacctctcctaaaatggaaaaaaacgcaaacgcacacaggcggatcaatggtccaggggcag

SEQ ID NO: 668696 - DNA, 474 bp, Homo sapiens
ctccagagccatccaactaaggcaaggcatgtgacaaaggagtccagggaagatccagggctttgacctgtcacaacctcctcaccatttctttccccagtttggatgagcagccactggaagattttgctcaccacctcaactcaacaataaccccactgacccatttcataacttgtataaaaagagtaaaaagtaactctttttaagaagtcagaatataatcatttcacggtcactatcacatgattctttaaatgtttagttttttaaactatttcactttgttttgctaacaattttgcagattacatgtttgatgttgttctacatttgcaaatttaatgactggtaacatgtttatacattgtgtatttaaaatgtatcaagtatttgattttactgttttccatttttactgaatgaatgtggaatacttttaaataaaacaacgcggttaggtcagtattactc

SEQ ID NO: 668697 - DNA, 601 bp, Homo sapiens
gagtcggacagaggccgatccggaactggttgaaccatatctgatcgtctgccacgggcttcagcatcgcctcgaccatgcttcggccggccttgccgcgctgtggctgatcgatcaggtaggtagcgaaacgacgacgcaggaacaggttctggaagccctcacgcccatcggcctgtcgtctcccagctcttcgaggactggcccgcaccgtgcaacatcacgatgggcaacgtgcgcgcgttcaccggcttctggtagaaggcatagacgtgatcgccgtgatagctctggccatccggattggagggattcaacggatcgaacgtgccagactccttcttggtcgtgcccccagcgaggaagctgccttgcgaatcgatctgcagtggctcgttggccatggcggttgtggcgcagagggaaaccgctatccagagcagtgtggaggggaagctgggcacaagagtgcgaaggcgcgtacgagtctgcatgggtcactccgtgactgattgtcaggaaaatctaccctccgggccatcctggaagaggcgcgggggtgcatatgaccaatgcatggaggatatatatatgcatgtct

SEQ ID NO: 668698 - DNA, 167 bp, Homo sapiens
gaaggaagggttgggggaagggcaaactttatgggaccttggtcctggccctggcctttcactccaattttgggtgaggcaggaactgggaggggtggggagggggagggggaaagtgtctgcctttatgtccttttttttgaaataaaagtaaaagcatttttgga

SEQ ID NO: 668699 - DNA, 121 bp, Homo sapiens
ctctagacgatctttcgctgtggaggagctgagcgagtcagagttaaggctcattggtggtgctgcccttggcgctgggcagctgcacagctggggaaggagtcagcctcggggtaggtga

SEQ ID NO: 668700 - DNA, 386 bp, Homo sapiens
cccacgcccacgatcacaaccgtaacaggccactgcctactaattgccaatatttgcccctcccctttaatacaacgttttaagaagtcacattattgtgaaacttaacttcaacatatgtcctactctagctcttctgatagttctcctgagatgactgaatattaaccaaagctgcactgtgctgtacttttcagcttcaactgggaatactcttccaaggatgaaagcagctccagtccctgatggtgttcgtgccaacagcacagcggtacactccttctctaacccagtttgtcaatagtactatcgcatctgtggaaaatcttagaaaaaaacattttctcccccaccctctctcttccctgttaagaccatcccaaaat

SEQ ID NO: 668701 - DNA, 289 bp, Homo sapiens
cgagttgagttttgacgcggttacgcccccgcgagtgtctatcgttgttgcagcgctgcgagacggtgcgccggcggctgccggcggtcgagcatccgctgatcaacgcgctggcccgcgacgccagcccggcggagttgggtggccggctttcgcatgcgatcgccgaggccaccctgatcagccgcgccgaggccgcccggcgggtccacaccgccgccgacctgggcccccgcgtcgggctgaccggcgagccgatcgccccggcactggcggccaccgcggccgc

SEQ ID NO: 668702 - DNA, 220 bp, Homo sapiens
gtgatgctgaggtcgatctagagtgatcccattcagacaggtcccgcgaggtgtagaaattgcatcccaatctgtaggctgagtgaccggaaggttggacggactgccgaagtccagaaagcttcagcagtttccttagtgtcaggatctacttcaataatctcctgatccagggctgagacctcaggaacataattgtctctcctttcgctcgcctctt

SEQ ID NO: 668703 - DNA, 535 bp, Homo sapiens
gctacccaggctggagtgcattggcacaatctcagctcaccgggcctgcggctcccaggttcaagagattctcctgcctcagcctcccaagtagctgggattacaggtgccttccatcacacccggctaacttttttatttttactacagacaaggtttcaccatgttgatcaggctggtctcatctcctgacctcaggcgatccacacccccttggcctcccaaagtgctgggattatgggcgtgagctgccacgcccagcctctgtcctgcttttaagcaaacagagagaaagcagagaactcttctgcatcttaattgactttagctcaaccatcttttatattttggagaggtatatcctggtctctcacaccataaacaaccctaatgtccatcagtaaatggaacaacaaactgtggtacatccatacaatggaatactgctatgcagtgaagaggaatgaattcctgatacccacaacagcatggatgaaactcaaaataattattgccaggaaaaataatctatacc

SEQ ID NO: 668704 - DNA, 213 bp, Homo sapiens
  misc_feature (85)..(85): n is a, c, g, or t
tgcaaagctctacatgatgtgacaggttagtaaaacacacactttggtgcatatagatctattactgcttagtcagaggagatgntttcacttgtgactcctcccagtgaatgagttatacatttaacaaactaacacagtttcagtttattaagttacaatctgtaaccaccctaatgtagctcaagtgtatgggtggatactcagatataa

SEQ ID NO: 668705 - DNA, 309 bp, Homo sapiens
aaataaaaatttttaaatagaaaatgctttttctttgtaaggtaaaagaggatccatatgcttaaatgtgctcgtttttaaaattttaaagggtgatataatcagctcatgaatgcccagctatgccttttgtgatagattggacataacctcagccgttgaaaggtaaaaccattgcttttttttttttttgcctttgttaagtgactatgggactttgtgattccttaatctataaatgagtcagctccccccctgagtctctttttaaagggaaatcagtaataaagctgttaaataaggaaggga

SEQ ID NO: 668706 - DNA, 411 bp, Homo sapiens
  misc_feature (116)..(116): n is a, c, g, or t
  misc_feature (162)..(162): n is a, c, g, or t
  misc_feature (164)..(164): n is a, c, g, or t
ccgcaggaccctttggtttccgtctagtgcagcgtttaccggcctgatttcaaacgaacctattcttcaatgttcgaccacgatactgtgacagaacccatctaccactgtaatgncgcagactccaagtggtgaccacagctttcaagaatatgactaatncnttatggatgggcaaaaaggccaatgctccagcgaattggtaaaatgcaccctggacattccagtttcagtgatctttggcgcccgatcctgcatagatggcaattctggcaccagcatccagtccttacgaccacattcatatgtgaagacaattagctattcttggggcaggacattatgtatatgcagatcaaccagaagaatttcaaccagaaagtaaaggagatttggcggacactgtgggac

SEQ ID NO: 668707 - DNA, 163 bp, Homo sapiens
gaggtagtagctggtggggtctgtgaggctctgatgccgggtgatgggaggaaacgctcgagaggcgagcggtggtggtggctggctgcgccaggctgcgagagcgacaggtggaactgagtgagtatgtttgggcacccccaggccatggggctccgccacc

SEQ ID NO: 668708 - DNA, 347 bp, Homo sapiens
tctcagagaggatattcagggatgcacgattgacactgagcgaggctttactatgtctcgactgtgcaagcggtctatagatgagccagctgccaagcatgtggcgaatcagaacagattccgggaatagacatacagctgaatagtaagtatcacaccacacgtaagctttctactaccaaagattcctcacagcctgttgaggagaaggttggagctttcacagagataatagaagccatggcattcacgggacctttgaaatacagtaaatggtagattaagattgcggccctgcgcatgtatactagctgagtggagagaactgacttcgaggaattctttct

SEQ ID NO: 668709 - DNA, 809 bp, Homo sapiens
cgcttccatccacctaccacacccacattcctgacccctcccgccgatctgttgctgtggaacaggactcacagagccgcacccacttcccaagacccagccccatccctccctctctactgcctgatccccgcctggccaatctcaagtcccgccgcagttactagactctagtgccacgtaccggcagacatttggtctgagttccctacaccatatccctatacaataacgtgtgtgttgataagggcagttccagtgagctgcgaggctacatatcgctctgtctcgaccccatcaccatgcctcaactacttatacagcgtttttgcagattcgcacgcagcatttccctccccttactcttcccacggcctggcgctttaccccgcgcatgagcgtctggtcttgcgggatggtgaaagacggttgtccctgtgtggtaattgaaggagtgagtttcggggctgctgggggtacggtagctgccaggatcgatgtgctgtgtcctgtctagcatgcaggtaggatgggtgcaacgtctcagccattcgcttgcctgaaagcaccagagcccttgggcccggcggaccagatccgagctgggtccatcagcagccggagcccgactgttggagagagctcggacgaggagccggtggagtccagggcccagcggctgcggcgcaccggattgcagaaggtacagagcctccgaagggccctttcgggccggaaaggccctgcaagagccaccgtccacccggtcaaagccgctcgccttggggctggccggagcgcagaagcca

SEQ ID NO: 668710 - DNA, 350 bp, Homo sapiens
cacgagcctgcggccgcgcttttacaccaccgtgatctcgtgaaggggccccccgactggcccccgccctgaacatgcagtcgcacactgccgaggagggggatctgcgcgtgttggactacgaggaggcagcggcggcggcagaagccctggtgacctccagccccaggcccccgggccagcgctgggtttggatgaacttcgagtcgccctcgcactccccggggctgcgaagcctggcaagtaacctcttcaactggacgctctcctaccgggcggactcggacgtctttgtgccttatggctacctctaccccagaagccaccccggcgacccgccctcaggcctg

SEQ ID NO: 668711 - DNA, 126 bp, Homo sapiens
gactagaggttccagaataatagtgtacagattttaaaaaatcaatcacagcaagtgacttggttctctttgagctcctggatcacgtatgtcttgtcactctggcagtctgcgtcttcacaaaca

SEQ ID NO: 668712 - DNA, 339 bp, Homo sapiens
tgagcatgtgatctcaactctggggcaggccatggacaggtggatcatgagacaggaggttggagaccagcctgaccaacatgtgtgaacccctgtctaagcaaaaatacaaaaattagccaggcgtggtggcacacgcctataatcccagctacttgggaggctgaggcaggagaatcgcttgaacccaggaggcagagtgttgcagtgagttgagatagcactactgcactccagcctgggctgacagagtgagactctgtctcaaaaaaaacaaaagagagagggtaaccacttcttcccctaagtggcctcaggtgatctgagaaaatggtttgc

SEQ ID NO: 668713 - DNA, 200 bp, Homo sapiens
gagcggagctgctccccccggccgggcgccgcgcgccgtgctccgcgctcgtgccctcggctgctgctccgccggcgctgcctccctcgccccgtgtgtcccccttgcaacttggcgggcctcctcccttttgtccggcccggcccggccgcgccacctccgcgcccggagccgagctcccgggtctccgggccggtggc

SEQ ID NO: 668714 - DNA, 118 bp, Homo sapiens
ccacatggcacacgtggtgtctccagagctggtgacgatctgattgtatccaggaatcggcagcaggacaggtaacctgtgtgtctgccagctcacgactcacgcgcacgttcccctc

SEQ ID NO: 668715 - DNA, 476 bp, Homo sapiens
tcctgcaaagtcgatctctagaggatacccctgtgacacaggatctgatggttttatcaggagtttccgcttttgcatcttcctcattttctcttgccaccaccatgtaagaagtgacttttgactcctgccatgattctgaggcctcccaagccatgtggaactgtaagttcaattaaacttctttttcttcccagtctcgggtatgtctgtatcagcagcatgaaaacggactaataacagtaaattggtaccaggagtgagatgttgctgaaatgagacccaaaaatgtggaagcaactttggaactgggtatcaggcagaggctggaagagtttggagggctcagaagaagacaggaaaatgtaggacagtttggaaccacctagagacttgttgaatggctttggcaaaaaagctgatagtgatatgaacaataaggttcagactgaggtggtctcagatggacatgagga

SEQ ID NO: 668716 - DNA, 223 bp, Homo sapiens
ccgcaggtcaccgtctctacacagaaattttacaaatcgggcggacgtgatggcgggcgcctgtgtgtccagctgccggggaggctgaggtgggaggatcgcttgatagcccgggaagttgacggtgcagagatccctccactgaactccaggccgggtgacagcagggcgagatcctgtctcaaaaaaaaacataaccgacatccagaagtgcgcctgggta

SEQ ID NO: 668717 - DNA, 159 bp, Homo sapiens
gataaagctgtgaggcaggatagtctgagtctgcctctaaaggagtagccaagactcctgggtctctgcatttttctttttcttgagacagggtctcgctctctcacccaggttggagtgcagtggcacgatcctagctcactgcagcttcaagcctcc

SEQ ID NO: 668718 - DNA, 138 bp, Homo sapiens
aatggctggcccgcctagcatataggacattggaaacagtataattgacaaagaaaaatgatacttctcttttttgctgttccaccaaatacaattcgatgcttttgttttatttttttaccaattccaatttcaaaa

SEQ ID NO: 668719 - DNA, 326 bp, Homo sapiens
tgtatcatcaataaggaagggtccccagcgttggggacgagccccaagttgaaaatagtaagtgaacaattgttgtactgaaccacttagttacatactgctagatcataaacaacctgtgtgtaatatgtattcccctacaaacgtagcacccttcagcaggaccctataaaactttcctccagcccttgcctctttgcaggtagccccttctccgctgagctgcccactgcaacatattttcacattttctctaataaatctgcccttctttacctacaactatcttggtaaatggctttaccacctgcaaaactgaccctagg

SEQ ID NO: 668720 - DNA, 612 bp, Homo sapiens
  misc_feature (89)..(90): n is a, c, g, or t
  misc_feature (93)..(94): n is a, c, g, or t
ctctctggtcggtttgttgtgtcctcgttctcttcgacgggttggctgccgctctctctgagggggtggcgtgctgctctctccgaggnntgnnatgcgcgtctctgaggggtgggggtgccgctctaaattggctccatatcatttgagtttagggttctggtgtttggtttcttcattctttactgcactcagatttaagccttacaaagggaaagcctctggccgtcacacgtaggacgcatgaaggtcactcgtggtgaggctgacatgctcacacattacaacagtagagagggaaaatcctaagacagaggaactccagagatgagtgtctggagccgcttcagcttctagcatgttaaacggccaaggacgggccacacgtggctgcggcctcgttccatggcggcacgtccttgggcgtctctaatgttgcagctaagggctggcacttttttaaatataataaatgggtgttatttttatttttttattgtgaaagaagctttggtcttcatgtggacacatgccaagtgatcatcgtgatgcgctgtctcgatcaatagatcaggcctctacaagcaggcacgactatcctcactagacggg

SEQ ID NO: 668721 - DNA, 237 bp, Homo sapiens
ctctggtattttagtagagacggggttctccagtgtgggtcagcgtcttgactcctgacctcaggtgatccacccgcctcagtctcccaaagtgctgggattacagggtgtgagccagcacaccctgctggaaagcattctttttggctgtatctgttgtttttaaactagttttgaacattataaaagttacacatatacattataaaaatatcttcaagaggcacagattgcagt

SEQ ID NO: 668722 - DNA, 648 bp, Homo sapiens
taaaagacggttaaaaaggtttttaaaaaggggggagggggttttagggcccctttttacaaaaaaacctccacaattttttaaaccaaattaaacccctagttaacccaaaaaaaaaaaaaaaaaaaaaaaaagggggggcgcgccgccacaaatacccccctggggcgcgccgaagttatgtactgctcacccagctttgtttggcacaaaagggggcgcccctaaaggggacgtctaatctaatatacagcacaaggagagcggcggggcgcggcaattaacaacaaggcgtcggcgagcgtggagaacaaacgtcatacgctgggagacctcggcgagagaaaagagacaacccctactctcgcgggggggggagcaccatagtgtgccaacaacaccacccaccaggagagaattaaaaacccaacaccgggaggaaaaaattaacaaccttgtcaacaggcggcaaatagggggggtaacccaaacacggcgtaaacaaagactcgggaggagcaacaaaaaattgtggacaacaaggagagataacattatagacgaaaaactattcatcaacccacggagcatcttagtagtaacaaactagacgagaacacaacacaataaccacaagaaacaaaacag

SEQ ID NO: 668723 - DNA, 146 bp, Homo sapiens
agaatcttgcatgtcacctaaatcgaaagccaatcctgagatcatagaagcatagactggctgccagaacttcaaagaaagaaagaacactgattaccttaaatatataattgtatacagtatgtagcacaccttttggctaggtg

SEQ ID NO: 668724 - DNA, 130 bp, Homo sapiens
atctagaggaccccagcgctcgcagtagtacaggtctgtgccagtgccctcccaggatgaccccttgcatcctctcaataagcttcagtgaggcagtggaggagtattcactacccacctgagactgcaa

SEQ ID NO: 668725 - DNA, 1035 bp, Homo sapiens
cactatcccacatcaattggcttacccgttgctgtcataccatctattgctctgacacagttctccaaatgatccgtcagggaaatgatcgatgaagaggagttgctgctctggggggaatcctgaccagcctggtgaggccctgttgcaggaagtgtatatgctcccaacatatcagttataccttgatgtctcttgcttcacccagtgagtgcttggctcgctctgtgaactgataatgaaaaggctgaagtctagctatggtgtctagtatatggctatggcaaggggctagaatgaatagactagatccacatcgaatgcacctgggggagtgctcgatgttcgcgttctataggagacgattgacgtgtcacgatttcagcttctccagttgtgcgcatctcgccgtctaagctagttggagcttacaatctggtaccctgcttgcctgtacttagcatggcaagtgtctattgcgcacctctgtgtattcaatgctgggtgtcactcgtgtaggtgtccacaataggtgtgtggtgacgtccggagcaccacgtcatatcctcacgcgctgcatcaaccgcgtccttgagcattcatctcctctgtggcaacttcttgaaaaggtctcccatttccctgctgccctctgtacgcacccatgttgtccctccctcaggggattggggtattgatgccgatatggctccaagtggccacggacgctgcagaacttgcctgctctcccaagacgcccgggagtggagtcgtcatgttgtctcgtgccgtactgaatagggtggcccaatccgatgctctcctatccctggcacagttactggctgccttgccgcgacgagtttgatggccggcgcacgggcgttcctggcgatggccccgtttctccttttcctctccgtccttgcgggtcccgcaaaccctgccgctgtttccttagcggccggcctccggttttccttttccgcgtgggggcacgcggaccctccgtgggggagctgctccaaggcgccg

SEQ ID NO: 668726 - DNA, 346 bp, Homo sapiens
ttcattagcaaatggcagtggaaaaggagagaccacctagtggaggggtgaggagagggcagtggaaaaggagagaccacctagtggaggggtgaggagagggcagtggaaaaggagagaccacctagtggaggggagggcggtggaaaaggagagaccacctagtgggggggtgaggagagggcagtggaaaaggagagaccacctagtggaggggtgaggagagggcggtggaaaaggagagaccatctagtggaggggtgaggagagggcggtggaaaaggagagaccacctagtggaggggtgaggagagggcggtggaaaaggagagaccacctagtggag

SEQ ID NO: 668727 - DNA, 162 bp, Homo sapiens
ggtaccggattgggattaggtaggtatgactaagagagaggaggaagtgcacattactcagttgtgaagtacaatttatagatgttaaatagaaaagaagggttttgtttagatgaagggaagatattgagtaatcgggatgaactacctatttcacactcg

SEQ ID NO: 668728 - DNA, 465 bp, Homo sapiens
gtaggggcgcggcatgtcaagtgtgtggacagaagatccgtgaggacagcgttaggacgagagcctgtattaggcgagaactagcttgagatctcccagagtgccagggataagcagatggaggtgtgagtgggaggtgcatagaccgaggagaagaggtagtagagtcaggctggagataggagccaagtcccttgagcctcatgtactaaatcaggggtctgagtactgtactaaatggggagaacctttaaggagatataacaaagaagtttccatgattgctgttgtaaagaagaatcctttggctgtagtgtggatcactgtctttagcaaggaaggaagcagagctcacactggaaggctgctgacatgtccatgggatactcagccatgggcatgagactggagagccatggtcaggttggaatctgccttgctgataggtgtagggggggtccgagc

SEQ ID NO: 668729 - DNA, 121 bp, Homo sapiens
tcatattccttcatttagtatttattgaatgtctactatgtgcaaggcactcacccatgggcctggacagaccacatggcaaggtacacaagcaatccatttagagccccattccgaatat

SEQ ID NO: 668730 - DNA, 930 bp, Homo sapiens
caagctttgatatgctttgcgctgccgtgcagcaaccgacgagcgcagcgtctagagagtcgagtaagcggtttcgcataatttcgatatagcactagcatatacgacggttctcaagtcgacggtactggcacatttcctctccagatcggccattagagaacgggcgtatggagtgatatgacatgtctatataattctctaaatgccgactttaattaccgagcagctgagctccctgctgttgctgagttctccaccagcgagatcatgggtcagttctgcagatcgactggccgtcgttatacatggtctcgggtggatcaggatgtactatgcactgcgctctcacagctctagccgagaatgtgacaggatgaggcgactcctttctgatgtggtacccttcaaagtaccaggaaaagatacagttaccaaagataatggcatccgtccttcctcactggagcagatggccaaactaaaacctgcattcatcaagccctacggcacagtgacagctgcaaattcttctttcttgactgatggtgcatctgcaatgttaatcatggcggaggaaaaggctctggccatgggttataagccgaaggcatatttgagggatttatgtatgtgtctcaggatccaaaagatcaactattacttggaccaacatatgctactccaaaaagttctagaaaggcaggattgaccattgaatgatatgtgatgcttttgaattttcatgaagcttctctcgggtcagactttggcaattttaaagccatggattctgattggtttgcagaaaaactacatggggtagaaacaaccacaggttggattgcccccttggagaagtttaatacactggggtggatctctgtcctggaacacctttggagcctggctgggtggtctggtgcgcca

SEQ ID NO: 668731 - DNA, 1530 bp, Homo sapiens
ggggacaacaatacggggaatgtggggccgcctaatatggagcctaagtagttaccacaacacaggcgcggcttccttctcacacacaggttgagtagtagttaagaccccccatgggccgggtctctataaagaggaaattcatgggagaccagtgattaaagcgccgtcgttgccacaagagggaccgacttggcttaacacacagggggttccatattggcccgcgcaaaatgctccgcctccggtatagatatatacttgtggagggggactttttttttacgaccacaacagctagttgaccccacacgggtgttcttgggaggggcccctcggtgaatatttgttgaggcattataactgaatagggcgcgagtctttcctccccggcgaaagatttataatgtggaggagagaccaccacacttgttatacatagccccttttggtgggggaaaatttatctttggggcaaacagaacctgtgtccgacgattggtccgcccaacgacgggggcgttgtccgcgggattttttgtgccgacgaaggggattgtgaactctcgagggactaattggttgtgttagaagaaaaaagcggtcttctcgttcgggggcgaacctgcgtgagtttgatttcgcgagacgtctcccagtgttgaatcccgcgcgcttgatatgaggccggtttggtgtttccccgccgcgcagaaccaacgagtatggtggggacacgactcgccgggttttgaaagtaccaacacgcatttcacataaggcgtctgcacgtgctagagtattgtgtgaggggcagaacgataaggggaaacctcggggacacaagggtgggcctgcgcaagaagaagatgtttgttgtcgcccaaacacacaagcatgggccgcgcgattgagcgaacagagcaacagagggggagtcttccacacccctggcgacgggccccggggcccacttctctgtgcgagaatgggggcaccacataaacacatcccggcgggagaacagttactccccggacaccgtgggtaaagaattgctgccaaaaaagttgcggtccacaagccgtccgtctagacccagagggtcctaaataacttgcccgggaacacactgggggggatacagaggatagcgcacctataccacacgcggggggcccaaaggatgaatgtccccaggtctggaatagcgtgtaacctgcggctgcgcccccacatgcaacgagctaatctgggccccacgagaatctcccaaagtttttgaccctgtagaagagagaagggaatttggggtttcttgaaatctgggaccaaaaagtccctgcggttcaggcagcaattagcccatctgtgccctgctgaggggctggcgtgccttgagatggccgtgatgttccacaaccctttttggaaaaaaaggtctttttgtttcagggtccacccgagtcaccttttttgttttaaagttcaccgtccacagctttgggaaaaaccatcctggggaattta

SEQ ID NO: 668732 - DNA, 293 bp, Homo sapiens
ctgaataatctgacgggtcgcctcatgctggctgtgagaagagcagtgctagcgctcccatgaagataaggctacaacactggagtcatcaatgccccccagaaggtgagtactgtgccctcgttggcttatgaacaccagcctgctctgttgcacctcacacatgcccacagtctcacgccaccacctgaacttacgagtcctttatatgaccgcactgtactgtctgcctctccagccagtgttctggccctgttcatgtcagagcctcttctcttgctttggaatcaggg

SEQ ID NO: 668733 - DNA, 1334 bp, Homo sapiens
gagagccgaggtctgggctgcagtaggtcccggcaaccgcaggctcgcggcgggcgctgggcgcgggatccgactctagtcgtaatggaggcgggcggctttctggactcgctcatttacggagcatgcgtggtcttcacccttggcatgttctccgccggcctctcggacctcaggcacatgcgaatgacccggagtgtggacaacgtccagttcctgccctttctcaccacggaagtcaacaacctgggctggctgagttatggggctttgaagggagacgggatcctcatcgtcgtcaacacagtgggtgctgcgcttcagaccctgtatatcttggcatatctgcattactgccctcggaagcgtgttgtgctcctacagactgcaaccctgctaggggtccttctcctgggttatggctacttttggctcctggtacccaaccctgaggcccggcttcagcagttgggcctcttctgcagtgtcttcaccatcagcatgtacctctcaccactggctgacttggctaaggtgattcaaactaaatcaacccaatgtctctcctacccactcaccattgctacccttctcacctctgcctcctggtgcctctatgggtttcgactcagagatccctatatcatggtgtccaactttccaggaatcgtcaccagctttatccgcttctggcttttctggaagtacccccaggagcaagacaggaactactggctcctgcaaacctgaggctgctcatctgaccactgggcaccttagtgccaacctgaaccaaagagacctccttgtttcagctgggcctgctgtccagcttcccaggtgcagtgggttgtgggaacaagagatgactttgaggataaaaggaccaaagaaaaagctttacttagatgattgattggggcctaggagatgaaatcactttttattttttagagatttttttttttaattttggaggttggggtgcaatctttagaatatgccttaaaaggccgggcgcggtggctcacgcctgtaatcccagcactttgggaggccaaggtgggcggatcgcctgaggtcaggagttcaagaccaacctgactaacatggtgaaaccccatctctactaaaaatacaaaattagccaggcatgatggcacatgcctgtaatcccagatacttgggaggctgaggcaggagaattgcttgaacccaggaggtggaggttgcagtgagctgagatcgtgccattgtgatatgaatatgccttatatgctgatatgaatatgccttaaaataaagtgttccccacccctgccaaaaaaaaaaaa

SEQ ID NO: 668734 - DNA, 1210 bp, Homo sapiens
gagagccgaggtctgggctgcagtaggtcccggcaaccgcaggctcgcggcgggcgctgggcgcgggatccgactctagtcgtaatggaggcgggcggctttctggactcgctcatttacggagcatgcgtggtcttcacccttggcatgttctccgccggcctctcggacctcaggcacatgcgaatgacccggagtgtggacaacgtccagttcctgccctttctcaccacggaagtcaacgtgttgtgctcctacagactgcaaccctgctaggggtccttctcctgggttatggctacttttggctcctggtacccaaccctgaggcccggcttcagcagttgggcctcttctgcagtgtcttcaccatcagcatgtacctctcaccactggctgacttggctaaggtgattcaaactaaatcaacccaatgtctctcctacccactcaccattgctacccttctcacctctgcctcctggtgcctctatgggtttcgactcagagatccctatatcatggtgtccaactttccaggaatcgtcaccagctttatccgcttctggcttttctggaagtacccccaggagcaagacaggaactactggctcctgcaaacctgaggctgctcatctgaccactgggcaccttagtgccaacctgaaccaaagagacctccttgtttcagctgggcctgctgtccagcttcccaggtgcagtgggttgtgggaacaagagatgactttgaggataaaaggaccaaagaaaaagctttacttagatgattgattggggcctaggagatgaaatcactttttattttttagagatttttttttttaattttggaggttggggtgcaatctttagaatatgccttaaaaggccgggcgcggtggctcacgcctgtaatcccagcactttgggaggccaaggtgggcggatcgcctgaggtcaggagttcaagaccaacctgactaacatggtgaaaccccatctctactaaaaatacaaaattagccaggcatgatggcacatgcctgtaatcccagatacttgggaggctgaggcaggagaattgcttgaacccaggaggtggaggttgcagtgagctgagatcgtgccattgtgatatgaatatgccttatatgctgatatgaatatgccttaaaataaagtgttccccacccctgccaaaaaaaaaaaa

SEQ ID NO: 668735 - DNA, 1048 bp, Homo sapiens
gagagccgaggtctgggctgcagtaggtcccggcaaccgcaggctcgcggcgggcgctgggcgcgggatccgactctagtcgtaatggaggcgggcggctttctggactcgctcatttacggagcatgcgtggtcttcacccttggcatgttctccgccggcctctcggacctcaggcacatgcgaatgacccggagtgtggacaacgtccagttcctgccctttctcaccacggaagtcaagctaaggtgattcaaactaaatcaacccaatgtctctcctacccactcaccattgctacccttctcacctctgcctcctggtgcctctatgggtttcgactcagagatccctatatcatggtgtccaactttccaggaatcgtcaccagctttatccgcttctggcttttctggaagtacccccaggagcaagacaggaactactggctcctgcaaacctgaggctgctcatctgaccactgggcaccttagtgccaacctgaaccaaagagacctccttgtttcagctgggcctgctgtccagcttcccaggtgcagtgggttgtgggaacaagagatgactttgaggataaaaggaccaaagaaaaagctttacttagatgattgattggggcctaggagatgaaatcactttttattttttagagatttttttttttaattttggaggttggggtgcaatctttagaatatgccttaaaaggccgggcgcggtggctcacgcctgtaatcccagcactttgggaggccaaggtgggcggatcgcctgaggtcaggagttcaagaccaacctgactaacatggtgaaaccccatctctactaaaaatacaaaattagccaggcatgatggcacatgcctgtaatcccagatacttgggaggctgaggcaggagaattgcttgaacccaggaggtggaggttgcagtgagctgagatcgtgccattgtgatatgaatatgccttatatgctgatatgaatatgccttaaaataaagtgttccccacccctgccaaaaaaaaaaaa

SEQ ID NO: 668736 - DNA, 142 bp, Homo sapiens
tggccacccccggccagtccactaggcgtcctcccgactcctctcccgggagcctcctcagctactccatccttgcaccctgggggcccaagcccacccggcatgcacaggagcacggggcataggtgtctcctggggaggc

SEQ ID NO: 668737 - DNA, 173 bp, Homo sapiens
agcacccatcagcgggtccacatcggtgcctatcctggctaagggcaatcatacactaatcacctcccgaagtggaccaccatagaaacgcgaaacatccgggaggcaattgagcattttggaatcaagatctatcaattcccagactgtgactctgatgggacgaagatgcg

SEQ ID NO: 668738 - DNA, 886 bp, Homo sapiens
  misc_feature (688)..(688): n is a, c, g, or t
  misc_feature (693)..(693): n is a, c, g, or t
  misc_feature (700)..(700): n is a, c, g, or t
  misc_feature (707)..(707): n is a, c, g, or t
  misc_feature (713)..(713): n is a, c, g, or t
  misc_feature (715)..(715): n is a, c, g, or t
  misc_feature (727)..(729): n is a, c, g, or t
  misc_feature (733)..(733): n is a, c, g, or t
  misc_feature (739)..(739): n is a, c, g, or t
  misc_feature (741)..(741): n is a, c, g, or t
  misc_feature (743)..(743): n is a, c, g, or t
  misc_feature (752)..(752): n is a, c, g, or t
  misc_feature (758)..(758): n is a, c, g, or t
  misc_feature (773)..(773): n is a, c, g, or t
  misc_feature (787)..(787): n is a, c, g, or t
gagagccgaggtctgggctgcagtaggtcccggcaaccgcaggctcgcggcgggcgctgggcgcgggatccgactctagtcgtaatggaggcgggcggctttctggactcgctcatttacggagcatgcgtggtcttcaccaacctgggctggctgagttatggggctttgaagggagacgggatcctcatcgtcgtcaacacagtgggtgctgcgcttcagaccctgtatatcttggcatatctgcattactgccctcggaagcgtgttgtgctcctacagactgcaaccctgctaggggtccttctcctgggttatggctacttttggctcctggtacccaaccctgaggcccggcttcagcagttgggcctcttctgcagtgtcttcaccatcagcatgtacctctcaccactggctgacttggctaaggtgattcaaactaaatcaacccaatgtctctcctacccactcaccattgctacccttctcacctctgcctcctggtgcctctatgggtttcgactcagagatccctatatcatggtgtccaactttccaggaatcgtcaccagctttatccgcttctggcttttctggaagtacccccaggagcaagacaggaactactggctcctgcaaacctgaggctgctcatctgaccactgggcaccttagtgcaactgancaagngactctngttaagnggctgngncagtccaggtgnnnggtngggacncngnggctggggnaaggcnagacagttcttatgntggggcaggagacnttataaagttaaaactggggggggacaaaagcaagagggggccactcaccagagagggctggagacacagagcccaaaacggggcacagcagacagata

SEQ ID NO: 668739 - DNA, 1030 bp, Homo sapiens
gatagggactgccttcatacattcctactccaatctactttggagcagtcattgacaccacctgcatgctctggcaacaggaatgtggtgtgcagggttcttgctgggagtacaacgtgacgtcgtttcgttttgtgtattttggtttggctgccggcctcaaattcgttgggtttatttttatttttctggcctggtactccataaaatacaaggaggatggactgcagaggcggaggcagagagaatttcccctgagcaccgtgagtgagagagtgggacaccccgacaatgcccggactagatcttgcccagctttcagcacccagggagaattccacgaagagactggcctgcaaaaagggatccagtgcgcagcacagacctacccggggcccttcccagaagcaataagttcctctgcggacccggggctggaagagagccccgctgccttggagccgccctcctgaagcttgaaaatggaagaatttagttttgttggttgaattgaaaatggcgacttgagaaacaactgtgccttcttttctttctttcttttttttaacctctacagacacaatcctcaaaccaacaaaactcagtatacacagccgctattcattgagggctggatacctcaacaagactgagagcctttccccgcttctctccaagaaggagacgttcagctagatttgttcccatttccgttgtgttaattcaaagctcatgctcccctacggtacaggctgaggtacacggttcgcaaaaccatgggaaggggaatggcggtgcatatcattaactaacactccaaacaaaggtgagcttgcccaggacttggcatttccaaatcaaagtttttagatatgaacacctactgtgagttctgctacaaagcacaaatgaatttgtctcaactatgcaatttgattggaaaaatgtatgtgcagcatgttacatttactttcacggaataaagcagatatgtttctgaaaaacccaaccccatacataaaaacaaggg

SEQ ID NO: 668740 - DNA, 283 bp, Homo sapiens
tttttagtagagatgggtttcaccatgttagtcaggttggtcttgaactcctgacctcagcgatgccgcccatctctactaaaaatacaaaattagccaggcatgatggcacatgcctgtaatcccagatacttgggaggctgaggcaggagaattgcttgaacccaggaggtggaggttgcagtgagctgagatcgtgccattgtgatatgaatatgccttatatgctgatatgaatatgccttaaaataaagtgttccccacccctgccaaaaaaaaaaaa

SEQ ID NO: 668741 - DNA, 1070 bp, Homo sapiens
gctctttctctcctccctctgccttcccaggtgcataaaggtctctgtcgttacccggaagttgttggccatgcctattgatgtaggctttcccccgggttctctaaactaagctatttaaaggtctgtggtcgcaaatggtatcgactaagccgtaggatgggacttaatgtagaagggcatatagtattacactgatcctcagcggatgctaaatagacgtagtctaggtgcaaggcgcgtgatgcagcagcgggcaaatgtgcgatgcggtcttcaagggcttttcggactgtttgctcaagctgggcgatccagcatgggcaactacccgcatgggcctggacgacaagactgaacatcaagaccgtgtgcacatactgggaggatttccacagctgcacggtcacagcccttacggattggccatggaatggggcgaaagatatgtgggataaactggagaaaagaatccaagaaacctcaacatccaaggcagcttattcgaactctgcggcagcggcaacggggcggcggggtccctgctcccggcgttcccggtgctcctggtgtctctctcggcaagactatagcgacctggatttccttctgagcgtggggccagctccccccgagcgccaaccaaactcactccatgctccggaaatcgagaggaagatccataagttctatggggacgttgtgattctctgtgatgctgaaaacactcatatagggaatagtgggaaatccatgatacatactagaacagtaccgacggaaactcggagtaaaataggccaaatgttacaaacagggaggcaagcaagcacaggcaaaaatcgggaccacccagaatataagtcgcggacgtatcacaacaccaaattcagaaaaaggggaaaaacgagcaccatcgttaaacatatacatcattaatcacgtataaaagaagggaaaaaaaacacctcaggaaagggccctgggcacacacaagaataataacaatgcaaggaaacatgacaaaagaagaggcacctacccaaatagaaaggcaaggaagaaacagg

SEQ ID NO: 668742 - DNA, 1871 bp, Homo sapiens
  misc_feature (1338)..(1339): n is a, c, g, or t
  misc_feature (1342)..(1342): n is a, c, g, or t
  misc_feature (1347)..(1347): n is a, c, g, or t
  misc_feature (1357)..(1357): n is a, c, g, or t
gagagccgaggtctgggctgcagtaggtcccggcaaccgcaggctcgcggcgggcgctgggcgcgggatccgactctagtcgtaatggaggcgggcggctttctggactcgctcatttacggagcatgcgtggtcttcacccttggcatgttctccgccggcctctcggacctcaggcacatgcgaatgacccggagtgtggacaacgtccagttcctgccctttctcaccacggaagtcaacaacctgggctggctgagttatggggctttgaagggagacgggatcctcatcgtcgtcaacacagtgggtgctgcgcttcagaccctgtatatcttggcatatctgcattactgccctcggaagcgtgttgtgctcctacagactgcaaccctgctaggggtccttctcctgggttatggctacttttggctcctggtacccaaccctgaggcccggcttcagcagttgggcctcttctgcagtgtcttcaccatcagcatgtacctctcaccactggctgacttggctaaggtgattcaaactaaatcaacccaatgtctctcctacccactcaccattgctacccttctcacctctgcctcctggtgcctctatgggtttcgactcagagatccctatatcatggtgtccaactttccaggaatcgtcaccagctttatccgcttctggcttttctggaagtacccccaggagcaagacaggaactactggctcctgcaaacctgaggctgctcatctgaccactgggcaccttagtgccaacctgaaccaaagagacctccttgtttcagctgggcctgctgtccagcttcccaggtgcagtgggttgtgggaacaagagatgactttgaggataaaaggaccaaagaaaaagctttacttagatgattgattggggcctaggagatgaaatcactttttattttttagagatttttttttttaattttggaggttggggtgcaatctttagaatatgccttaaaaggccgggcgcggtggctcacgcctgtaatcccagcactttgggaggccaaggtgggcggatcgcctgaggtcaggagttcaagaccaacctgactaacatggtgaaaccccatctctactaaaaatacaaaattagccaggcatgatggcacatgcctgtaatcccagatacttgggaggctgaggcaggagaattgcttgaacccaggaggtggaggttgcagtgagctgagatcgtgccattgtgatatgaatatgccttatatgctgatatgaatatgccttaaaataaagtgttccccacccctgccaaaaaaaaaaaacaannaanaacancaaaaaaaanaacaaaaaaaacacaacaaaacaaacaaagaaaacaaagacaaagaaaaaaacaaaacagaaaacggaaacaacaaaaaacaagcacaaggggggggggcggcaaaaaacaacacgggggggcgagaaaatagcacactttgtaaaaagcgcccacaaggaggagtcaaaaaagacgagccgccgcgcggccaaacaaacagcgcggcgacgaacacaacgcatgccagcagcagcttcggagagcacacacccacccgtggggggggggaaccaacgaggacaccaacacatgataatgagacccggcaaacacaacgacagggtgtgggggaccacaccctacactggcgtgagacaccgccctgctctctataaaattacggacgcactaaaaaaaggacagcaagtagcatcccagcaggacgcgagacaggcccacaacgtcgcagagcaacacacgacgaccgcagcacgaggccgcagacacacacaagacacgcaacgcgcagcgg

SEQ ID NO: 668743 - DNA, 121 bp, Homo sapiens
gtcatagctgttagtgtcaaacgactgcagtgcatgtcattgctgttagtgtaacacgacggccagcgcatggtcatgctattcgtgtcacacgacggccagtgcctggcttagcttttcg

SEQ ID NO: 668744 - DNA, 1310 bp, Homo sapiens
gagagccgaggtctgggctgcagtaggtcccggcaaccgcaggctcgcggcgggcgctgggcgcgggatccgactctagtcgtaatggaggcgggcggctttctggactcgctcatttacggagcatgcgtggtcttcacctcggacctcaggcacatgcgaatgacccggagtgtggacaacgtccagttcctgccctttctcaccacggaagtcaacaacctgggctggctgagttatggggctttgaagggagacgggatcctcatcgtcgtcaacacagtgggtgctgcgcttcagaccctgtatatcttggcatatctgcattactgccctcggaagcgtgttgtgctcctacagactgcaaccctgctaggggtccttctcctgggttatggctacttttggctcctggtacccaaccctgaggcccggcttcagcagttgggcctcttctgcagtgtcttcaccatcagcatgtacctctcaccactggctgacttggctaaggtgattcaaactaaatcaacccaatgtctctcctacccactcaccattgctacccttctcacctctgcctcctggtgcctctatgggtttcgactcagagatccctatatcatggtgtccaactttccaggaatcgtcaccagctttatccgcttctggcttttctggaagtacccccaggagcaagacaggaactactggctcctgcaaacctgaggctgctcatctgaccactgggcaccttagtgccaacctgaaccaaagagacctccttgtttcagctgggcctgctgtccagcttcccaggtgcagtgggttgtgggaacaagagatgactttgaggataaaaggaccaaagaaaaagctttacttagatgattgattggggcctaggagatgaaatcactttttattttttagagatttttttttttaattttggaggttggggtgcaatctttagaatatgccttaaaaggccgggcgcggtggctcacgcctgtaatcccagcactttgggaggccaaggtgggcggatcgcctgaggtcaggagttcaagaccaacctgactaacatggtgaaaccccatctctactaaaaatacaaaattagccaggcatgatggcacatgcctgtaatcccagatacttgggaggctgaggcaggagaattgcttgaacccaggaggtggaggttgcagtgagctgagatcgtgccattgtgatatgaatatgccttatatgctgatatgaatatgccttaaaataaagtgttccccacccctgccaaaaaaaaaaaa

SEQ ID NO: 668745 - DNA, 1789 bp, Homo sapiens
  misc_feature (571)..(571): n is a, c, g, or t
  misc_feature (582)..(582): n is a, c, g, or t
  misc_feature (617)..(617): n is a, c, g, or t
  misc_feature (622)..(622): n is a, c, g, or t
gagagccgaggtctgggctgcagtaggtcccggcaaccgcaggctcgcggcgggcgctgggcgcgggatccgactctagtcgtaatggaggcgggcggctttctggactcgctcatttacggagcatgcgtggtcttcacccttggcatgttctccgccggcctctcggacctcaggcacatgcgaatgacccggagtgtggacaacgtccagttcctgccctttctcaccacggaagtcaagtgaggggccgacggctgcggtagtgggaaaggctaccagagggaggtgggggcggggcaggaggagcaagagtgaaagaggtttggccgggacgcggtggctcacgcctgtaatccctgcactttgggaggccgagacgggcggatcacgaggtcaggagatccagaccatcctggctaacacggtgaaaccccgtctctactaaaaatacaaaaaattagccgggcgtggtgccgggcgcctgtagtcccagctactcgggaggctgaggcaggagaatggcgtgaacccaggaggcggagcttgcagtgagccgagatcgtgccancgtactccagnctgggcgaatgagcgagactacgtctcacataaanataangtgtgcaaagacccttggggtcctcctctcacattgaacccttttgagccatgtccatccccttccaccctgcagcaacctgggctggctgagttatggggctttgaagggagacgggatcctcatcgtcgtcaacacagtgggtgctgcgcttcagaccctgtatatcttggcatatctgcattactgccctcggaagcgtgttgtgctcctacagactgcaaccctgctaggggtccttctcctgggttatggctacttttggctcctggtacccaaccctgaggcccggcttcagcagttgggcctcttctgcagtgtcttcaccatcagcatgtacctctcaccactggctgacttggctaaggtgattcaaactaaatcaacccaatgtctctcctacccactcaccattgctacccttctcacctctgcctcctggtgcctctatgggtttcgactcagagatccctatatcatggtgtccaactttccaggaatcgtcaccagctttatccgcttctggcttttctggaagtacccccaggagcaagacaggaactactggctcctgcaaacctgaggctgctcatctgaccactgggcaccttagtgccaacctgaaccaaagagacctccttgtttcagctgggcctgctgtccagcttcccaggtgcagtgggttgtgggaacaagagatgactttgaggataaaaggaccaaagaaaaagctttacttagatgattgattggggcctaggagatgaaatcactttttattttttagagatttttttttttaattttggaggttggggtgcaatctttagaatatgccttaaaaggccgggcgcggtggctcacgcctgtaatcccagcactttgggaggccaaggtgggcggatcgcctgaggtcaggagttcaagaccaacctgactaacatggtgaaaccccatctctactaaaaatacaaaattagccaggcatgatggcacatgcctgtaatcccagatacttgggaggctgaggcaggagaattgcttgaacccaggaggtggaggttgcagtgagctgagatcgtgccattgtgatatgaatatgccttatatgctgatatgaatatgccttaaaataaagtgttccccacccctgccaaaaaaaaaaaa

SEQ ID NO: 668746 - DNA, 1384 bp, Homo sapiens
gcgagagggagggcaaaagaggaaggctgggtgattcctggtaatgtgttattttgagaaaaagcttcggcagcacactccagaaaaaaacttcccaaaccctgggcaactgaggttctgatgtggagctctggatggaaagcgtgctgaagtcttgttaaactagcaagcttttgtttggaggtccaccgccgaaggcgcacaggcctgtgggaacacgagcgttgagactgggggcgtctagatgatccaaggggtaggcagagtgtgagcagcggcaggtatcggggacacacccgcggagccctaggaaggggactgaccgggacatggaagagctcggacctcaggcacatgcgaatgacccggagtgtggacaacgtccagttcctgccctttctcaccacggaagtcaacgtgttgtgctcctacagactgcaaccctgctaggggtccttctcctgggttatggctacttttggctcctggtacccaaccctgaggcccggcttcagcagttgggcctcttctgcagtgtcttcaccatcagcatgtacctctcaccactggctgacttggctaaggtgattcaaactaaatcaacccaatgtctctcctacccactcaccattgctacccttctcacctctgcctcctggtgcctctatgggtttcgactcagagatccctatatcatggtgtccaactttccaggaatcgtcaccagctttatccgcttctggcttttctggaagtacccccaggagcaagacaggaactactggctcctgcaaacctgaggctgctcatctgaccactgggcaccttagtgccaacctgaaccaaagagacctccttgtttcagctgggcctgctgtccagcttcccaggtgcagtgggttgtgggaacaagagatgactttgaggataaaaggaccaaagaaaaagctttacttagatgattgattggggcctaggagatgaaatcactttttattttttagagatttttttttttaattttggaggttggggtgcaatctttagaatatgccttaaaaggccgggcgcggtggctcacgcctgtaatcccagcactttgggaggccaaggtgggcggatcgcctgaggtcaggagttcaagaccaacctgactaacatggtgaaaccccatctctactaaaaatacaaaattagccaggcatgatggcacatgcctgtaatcccagatacttgggaggctgaggcaggagaattgcttgaacccaggaggtggaggttgcagtgagctgagatcgtgccattgtgatatgaatatgccttatatgctgatatgaatatgccttaaaataaagtgttccccacccctgccaaaaaaaaaaaa

SEQ ID NO: 668747 - DNA, 196 bp, Homo sapiens
ctttttttttaaaaaaaaaaattttttttgaaagggtttgaggcccaaagggggccaaaaaaaatttttttctttgggctaatctaaaaagggtttttaaagggtgccctaccaacctggtgaaatcaagaaattttgcccatgggcccaaatggtaacccttggtttttttaaaaaaaggaatttgaaaccccga

SEQ ID NO: 668748 - DNA, 257 bp, Homo sapiens
cccggttccttcggagctcgtcgtctctgccgtcctctgacttttaatttccaggacttgccttctgccatgtcgtctgaagaagggaaactcttcgtaggagggctcaacttcaacaccgatgaacaggcacttgaagaccacttcagcagctttgggcctatctctgaggtggttgttgtaaggaccgggagactaaagatcctggggttttggcttataccttacaaccaagagcatgcctagatgcgatgaga

SEQ ID NO: 668749 - DNA, 1311 bp, Homo sapiens
  misc_feature (965)..(965): n is a, c, g, or t
  misc_feature (969)..(969): n is a, c, g, or t
  misc_feature (971)..(971): n is a, c, g, or t
  misc_feature (974)..(974): n is a, c, g, or t
  misc_feature (977)..(977): n is a, c, g, or t
  misc_feature (979)..(979): n is a, c, g, or t
  misc_feature (986)..(986): n is a, c, g, or t
  misc_feature (999)..(999): n is a, c, g, or t
  misc_feature (1010)..(1011): n is a, c, g, or t
  misc_feature (1016)..(1016): n is a, c, g, or t
  misc_feature (1032)..(1032): n is a, c, g, or t
  misc_feature (1035)..(1035): n is a, c, g, or t
  misc_feature (1048)..(1048): n is a, c, g, or t
  misc_feature (1068)..(1068): n is a, c, g, or t
  misc_feature (1078)..(1078): n is a, c, g, or t
  misc_feature (1080)..(1080): n is a, c, g, or t
  misc_feature (1093)..(1093): n is a, c, g, or t
  misc_feature (1098)..(1098): n is a, c, g, or t
  misc_feature (1104)..(1104): n is a, c, g, or t
gagagccgaggtctgggctgcagtaggtcccggcaaccgcaggctcgcggcgggcgctgggcgcgggatccgactctagtcgtaatggaggcgggcggctttctggactcgctcatttacggagcatgcgtggtcttcacccttggcatgttctccgccggcctctcggacctcaggcacatgcgaatgacccggagtgtggacaacgtccagttcctgccctttctcaccacggaagtcaacaacctgggctggctgagttatggggctttgaagggagacgggatcctcatcgtcgtcaacacagtgggtgctgcgcttcagaccctgtatatcttggcatatctgcattactgccctcggaagcgtgttgtgctcctacagactgcaaccctgctaggggtccttctcctgggttatggctacttttggctcctggtacccaaccctgaggcccggcttcagcagttgggcctcttctgcagtgtcttcaccatcagcatgtacctctcaccactggctgacttggctaaggtgattcaaactaaatcaacccaatgtctctcctacccactcaccattgctacccttctcacctctgcctcctggtgcctctatgggtttcgactcagagatccctatatcatggtgtccaactttccaggaatcgtcaccagctttatccgcttctggcttttctggaagtacccccaggagcaagacaggaactactggctcctgcaaacctgaggctgctcatctgaccactgggcaccttagtgccaacctgaaccaaagagacctccttgtttcagctgggcctgctgtccagcttcccaggtgcagtgggttgtgggaacaagagatgactttgaggataaaaggaccaaagaaaaagctttacttagatgattgattggggcctaggagatgaaatcactttttattttttagagattttttantttngnagntgngngtgcacnctttagaaatatncttaaaaggcnngcgcngtggtcacgcctggtnatncccagcactttgngagggccagtgtggcggatngctgaagtcngnagtcaagaacaantgatnacatgntgaacccattttttctataaatccaaatttccagatgatagccatgccgttatcccataattgggagcggcggcaggaatgcgtgtacccagacgtgagctatctcaggctcagagcccaggatataatagaccatcaagataatatacaaaaaaggtgcccctgtagaaaaacacacacacaaggggcacatctagtgccaaatcg

SEQ ID NO: 668750 - DNA, 480 bp, Homo sapiens
tcggtagcagtgggtgcctgtagagcgatgcgtgtgaactaatctagtggttgaagaggcaggacggcttgcagctgcctgggtcccactacaggatgccagcaggcgtcactttcctctcgctgggccacagagatatattatatataatgacttgaaactggctgtgtctcggtgtggcgaggatggcccatgggtgctgctggtacgcgccagggctatccaccttcagcatctccatgtagaagatgacgcgctggtggttctgctgcagggcgtccagctcagcatggcccacggagctgtgttcacgcatctgtgcaacaccgcatcagtgccgatggccctacagggggtccttgcccaccgtgatgttgcagagactcttggccaccagcgggtacaggaccacatgcttgatgtcacagaggaactgggcaatctacccttctagcatggtgcacacgatggtctaccaca

SEQ ID NO: 668751 - DNA, 640 bp, Homo sapiens
  misc_feature (2)..(2): n is a, c, g, or t
  misc_feature (30)..(30): n is a, c, g, or t
tntgccgaggggagggatatatttaatatnttgactttgtcagagatataattggtgtatgcatatttgcagaattatgaaatggggtatgttaaacactttgtatgacagatgcattcgacagcattaacttaagcataccctgagaatgactggatggtctaagaagaatatgtgttcagagtctaagctaaggaatccgggaatggccaacccagagagattcacttcttatctgtgaaggacacttgaactccctgcctgtccgttggaactcaggatgtgcaaggaaccaaggccttttattttgggttaaatggaggttgctaagtggagagtgctaagtagaaatggtatataaactacatactttttacaaataggaggggtcctgtccagcccactgacactggaccacatttgtatttaagtcctaaaaaaacccctagtcccatttactggctctgggtctttttttggaaaggggccatcccttgtggaaataaaatgggtccagcatgacacatgtggaggaatttttaaattatataaatttttctcaattaagggtggggaaatttttaaagggcctgacctgtcccgggatggggaaaaatttaaaggggcaaaaatagtaggt

SEQ ID NO: 668752 - DNA, 438 bp, Homo sapiens
  misc_feature (7)..(7): n is a, c, g, or t
  misc_feature (13)..(13): n is a, c, g, or t
  misc_feature (31)..(32): n is a, c, g, or t
  misc_feature (53)..(53): n is a, c, g, or t
  misc_feature (73)..(73): n is a, c, g, or t
  misc_feature (183)..(183): n is a, c, g, or t
  misc_feature (372)..(372): n is a, c, g, or t
  misc_feature (401)..(401): n is a, c, g, or t
  misc_feature (425)..(425): n is a, c, g, or t
aattcgngcacgnggagaaggggccacactnncccttttaacaggagccacanaggtgctaacagcgaggacnctttggtgaggacggagccctcacgacctcagcagtgttgcgttggggatcaggtttccgatggtgaacttggggacacgtccacaccacagcacgtgcctattgtgttnctcggtggctggtgtgtttgaggatggcgcgtgcatgcgttttccagctttctttgtggaggaagttacctgtgggtattaacctgtccccagccatcctctcactgagcttgggttgcctgggcctgggtttcctgttgttgctggaacgaatgaccacaagacagtggcattagacagcgcaggcanacatgacctccttgggcttctgcgggtgncaacactgccgctccttcttgganggctcagggaagg

SEQ ID NO: 668753 - DNA, 138 bp, Homo sapiens
gctctcttacggcagcttttgagcccttcactgggttacacctcagatgcgtgtgtgtccctgatacatgaaggcctccagaagtgtctgatacggtgttgaaggcgatcacagggattgtgctgcattctgacttag

SEQ ID NO: 668754 - DNA, 1008 bp, Homo sapiens
  misc_feature (15)..(15): n is a, c, g, or t
  misc_feature (40)..(40): n is a, c, g, or t
  misc_feature (68)..(68): n is a, c, g, or t
  misc_feature (76)..(76): n is a, c, g, or t
  misc_feature (79)..(79): n is a, c, g, or t
  misc_feature (90)..(90): n is a, c, g, or t
  misc_feature (109)..(109): n is a, c, g, or t
  misc_feature (125)..(125): n is a, c, g, or t
  misc_feature (127)..(127): n is a, c, g, or t
  misc_feature (134)..(134): n is a, c, g, or t
  misc_feature (153)..(153): n is a, c, g, or t
  misc_feature (187)..(187): n is a, c, g, or t
  misc_feature (211)..(211): n is a, c, g, or t
  misc_feature (216)..(216): n is a, c, g, or t
  misc_feature (221)..(221): n is a, c, g, or t
  misc_feature (225)..(225): n is a, c, g, or t
  misc_feature (232)..(232): n is a, c, g, or t
  misc_feature (234)..(234): n is a, c, g, or t
  misc_feature (237)..(237): n is a, c, g, or t
  misc_feature (239)..(240): n is a, c, g, or t
  misc_feature (242)..(242): n is a, c, g, or t
  misc_feature (244)..(245): n is a, c, g, or t
  misc_feature (248)..(248): n is a, c, g, or t
  misc_feature (250)..(250): n is a, c, g, or t
  misc_feature (254)..(254): n is a, c, g, or t
  misc_feature (313)..(313): n is a, c, g, or t
  misc_feature (315)..(315): n is a, c, g, or t
  misc_feature (317)..(317): n is a, c, g, or t
  misc_feature (348)..(348): n is a, c, g, or t
  misc_feature (351)..(351): n is a, c, g, or t
  misc_feature (361)..(362): n is a, c, g, or t
  misc_feature (369)..(369): n is a, c, g, or t
  misc_feature (380)..(380): n is a, c, g, or t
  misc_feature (387)..(387): n is a, c, g, or t
  misc_feature (428)..(428): n is a, c, g, or t
  misc_feature (432)..(432): n is a, c, g, or t
  misc_feature (440)..(440): n is a, c, g, or t
  misc_feature (443)..(443): n is a, c, g, or t
  misc_feature (448)..(448): n is a, c, g, or t
  misc_feature (488)..(488): n is a, c, g, or t
  misc_feature (548)..(548): n is a, c, g, or t
  misc_feature (554)..(554): n is a, c, g, or t
  misc_feature (937)..(937): n is a, c, g, or t
  misc_feature (989)..(989): n is a, c, g, or t
taacatttctacgcntgctttccgaggctgcatgaaaaanttgaagaaaaccagtggtgtcgttagantgaatganaangaaggagtaanaaaaaagtgctcggaagantggaagcttgtgcgancngcctcantctccagaggaggacaatngagtttcactgatttgggcttaccacctactgancacctccaggcctcatttggattncaganctttnaacncagtggnanatnannanannatnanaaanggacaaggaacctgcaggtcactctggaagatggttacattgaattgagcaccagcganangncggcccaatttttaaatctccacagacgtanatngatggtttanngcattangtatctgtaanaagcganaactctggactacggcttctcatcgatgaccagcttctganaaanagcaaaangcnaaaanacatttcaagttcccggcagtctctgcgtctgggcggganaattttgagggttgtattagcaatgtttttgtccagaggttatcactgagtcctgaagtnctaganttgaccagtaactctctcaagagagatgtgtccctgggaggctgcagtttaaacaaacacaccttttctaatgttgcttaaaggttctaccaggtttaacaagaccaagacttttcgtatcaaccagctgttgcaggacacaccagtggcctccccaaggagcgtgaaggtgtggcaagatgcttgctcaccacttcccaagacccaggccaatcatggagccctccagtttggggacattcccaccagccacttgctattcaagcttcctcaggagctgctgaaacccaggtcacagtttgctgtggacatgcagacaacatcctccagaggactggtggttcacacgggcactaaagaactcctttatggctctttatctntcaaaaggacgtctggtcttgcactggggacagatgggaaaaattgaggatnaaagcaagagaaatgcact

SEQ ID NO: 668755 - DNA, 443 bp, Homo sapiens
agatcacccggaagaagcagaagaagatcagacgggttcagcactggtgtaactgtaagttatatgtcaagtatgcttggtatgagttccgggcaatggtgaaaggataaggtgaatgattatggaaaataagattttggaattattggaacagaaaggcagcgtatcaatgaatgatgatattttcccgttggtggaaaaagaatttgaaggtcaggtgattggtgcagaactttatgaacttgcacaccaatacatatcacagttgttgtatggggtacatactgccggggttgccgtgattgctgttcctaagtttgcagcgggtcagcagttcggtcagatggttgttgctgatgtgatttatacaaaggtgaatgatacaccgtatgattttatgcagtagttacgcaatagttacggtcgacgcggccgcgaattta

SEQ ID NO: 668756 - DNA, 166 bp, Homo sapiens
ccaacatgtagacagtaaaaaaatacatgcaccacatacttttactgaaaacacttaacttggaacgaaagcaccgaaactacacaaatgcagaatgaagacagcatttcacctccacccaaaagtagtcatcgtacaaggtgtcacagtccaccgtaacttcact

SEQ ID NO: 668757 - DNA, 180 bp, Homo sapiens
gtgttctttgtcttcctgcgattgggattccgtgtacactccatatacctctaacctccgcactttcccactcatctctggcatactgactgtcgccttctctctcgttctccctcgttgacaacctctgcgccgatgagagccaaacttcatgcctgcaatctatctgcgcttggccgc

SEQ ID NO: 668758 - DNA, 393 bp, Homo sapiens
tatgcggtcccttcgacggtgtctgtttgaagtaattattgggggagttcctgtcatggctcagaggttactgaatctgcctaggagcacatgaggttgcaggtttgatccctgaccttgctcagtgggttgaggatctggcattccatgagctgtggtgtagtttgcagacacagctcgtatcccacgttgctgtggctgtggcataggctggcagctgcagctcccattagactagacctctagcctgggaacctccatgtgccacaagtgtggccctagaaaagaccccccctcaaaaaaaggtaattattggtactatagttgctttttccccccttcttttgtggttctcttgttcctttcttcctctcttgcagaacaccgtcgaag

SEQ ID NO: 668759 - DNA, 155 bp, Homo sapiens
gagtgaattgagcattgtattactggctctcattttctgtcttaagttgtcgaccgctaacagtggtaggcttgatatacttctgtccactgtggagcgtggtggttcccattgaagggtttgtgttgtgcctggctggatttgagattccgtct

SEQ ID NO: 668760 - DNA, 251 bp, Homo sapiens
tcgaccttcaggctgattgaggcgaatcatttgaacccaggaggcggaggctgcagtgagccgagatcacaccactgctctccagcctgggcaacatgaaggagattctttctcaaaaaaaaaaaagaaaaaaagaaaaaagaaaaaaaaagaaagtagggatgtcatcactgatccttctgacatgacagacattaaaaagctaataagtggctgggtacagtggctcacgcttgcaatcaagcctggaa

SEQ ID NO: 668761 - DNA, 599 bp, Homo sapiens
tggaaaaagtcatggaggccagggggtgggcttgaaaccagcttgggggggtctcgatcccttcctttttggtctaaattaatgtatacgggttcttcgaatgtgtggtaggggggggggcatccatatagtcactccaggtttatggagggttcttctactataaggacttttcgcttcgaagcgaaggcttctcaaatcatgaaaattattaatatacggctgtagagaaatgaatgagcctacagatgataggatgtccaggtggtgtatgcatcggggtagtccgagtaacgtcggggcatcccggataggccgagaaagtgtggggggacgaaagttagattaacgccgatgaatattcgatagtggaaagggattctgggcgtaggtaatcgggccaagggtgtacgcctgagactcgcgggaacatcacggtgaatgaagcctcctatgagggcaaataccagccctatggatagggaccatacggggaatgtgagctacaacgtagacacgtgtacgtgtagcaccgagtcaagtgatggagtctgcaaacacaacgccagtcaggcacctaggcgacaagaaagaggatc

SEQ ID NO: 668762 - DNA, 1114 bp, Homo sapiens
gtgtgcagacccgcgtgtggtcgcaggcaaggaccctcaaaataaacagcctctacacttgctgagcctgtcgttccgccaggcctgcgtccggagtcatcctggctgctgctgggccctgatcctgatggctggaagatctgacttgcgagccatgagcaggaaatgagtagcttcaatgtgtaggacagatctgggccacttggagcccggggcaatgtcctacttggttgcgaggcctgtgggtctgtggatatgcagcaagcctgtgggcaagaggtgcgttttacctcggggataagaggttaccaagattgtgtatcactcgatactcttccagtacatataggtatatcgctgtggtagagtctgggtcatctttgccaaggatatgtgatcttcaaggagagatgccgtgcctataactgcggtcacaggtggccacattgccaagtgactgcaaggatgcccaatgagagagcgagagccattggctgcatacacactgtggcaaaatcaaggccatctggctcgtgactgcgaccatgcaggatgcgcacgaactggctaatacttggtgccagcaatccgggacacattcacacacaggacgggcaccaaaagttgacagtggcactacggatgctgggggaacatgggccattgttagcccattcaacatggcaggctaggaccacgttgaagtcaacctggtaaccggctgctgggccgaagtacagcaggcccctgtgcaccggggacatgcacaaattgcagggctaacagccctaaataactaatcccatgggcggcccactcctaatacgggacgcggcgctggaaaatgtacccctgaaaccccaccaccgcgggccccaatgccttgcacgctacaagtgacaaccccaggccacagcagcgtaccacggaccgggcaaacagccggcacaaccggcggggcgaaacacaccggaattcctcgcgtcaccaccacgaaaggtgactgaccacacggggcactgcgcagaaacacgggaaaaacaccccgcaggccacagaacaacactaacagcgacaggtcaaagaccaccgagatgaaaagaccacaaaagaa

SEQ ID NO: 668763 - DNA, 459 bp, Homo sapiens
  misc_feature (8)..(8): n is a, c, g, or t
  misc_feature (30)..(30): n is a, c, g, or t
  misc_feature (44)..(44): n is a, c, g, or t
  misc_feature (70)..(70): n is a, c, g, or t
  misc_feature (456)..(456): n is a, c, g, or t
  misc_feature (459)..(459): n is a, c, g, or t
aatttccnccaagaggtttcaagcccctanactctgacaacctncccaaacattgcctatgaagagcctnaaaattggaggaaatatgtccacactccgtaaaatggaaaattccaacattgttaaagatggtaatcctccttcaaattaaccctacagattctcccacaactcccattaaaatccctagcaggttttcctaacaccgcatgttctcactcataagtgggagttgaacaatgagaacacatggacacagggagggcaacatcacacactggggcctgtcagggggtgcggggcaaggggagggagagcattggacaaatacctaatgcatgtggggcttaaaacctagatgatgggttgatgggtgcaacaaaccaccatggcacatgtatacctatgtaacaaacctgcactttctgcacatgtatcccaaaacttaaagtgaanagn

SEQ ID NO: 668764 - DNA, 950 bp, Homo sapiens
ggagagagaactagtctcgagtttgtgggttctattttctcggtggacaggaagtagaattaatgggggagtattaaaaggggggcagcacatgtggaagccctcatgagtgcagggcccgccattgtgtccaaagggccacgcacgggggatgtacttgaccccaaagccatctgggatgaacccgcttttcagccaccagtgtcttcaaattcatcagctttgaactgggtgaagccccacttcttgcgagcagtgtggatcttctgggcggccaggaaacttgaactgggcccgtgggcagggccctcaatcacatgtgcctcctgtgtctgcagcttaggtgcggatggacatgaataactgtggccaagtggtgacacccgtggccacagatgcccgtgggagctttccaaaggcacactcgcagtgcctgattgggagcctgatcagccccagacacaggacaacatctgtggtgatgcggatgacgtggaaggggctggagccgaaccccggaatatggaagccatctgtgggccacaatcgtttttaacgccagtgtaccgatatgggcaccaaaattcgggacgagacctccagggcctatccaacgaggacagcgtgctaaaaattcatctgacaccatggtggcccaaaaagcggaaaatgatcaccagtttgagactttttcgcggcaccgagggtccaaaatgtgcgaaatctgggcactccgggacacctcggcaaaaaccacaaacattgtggaaatacgggatggtacttaccgaatcaccggtgaaacaacggagacggggcggtcgggccccgggggcaaagccagccacagagagtgagatgacggcgcccgcgggggcagtagcccgggagtggccaagcgcccatcggacacccaaggccgcaaaacgagccggaaagaggagacgcca

SEQ ID NO: 668765 - DNA, 276 bp, Homo sapiens
  misc_feature (166)..(167): n is a, c, g, or t
  misc_feature (204)..(204): n is a, c, g, or t
gacgctctctctgtggggaggggaccagcttccctcgtgattcccgtcctttcaagttcattatggcagctctgtcaatgagcaccccaggtggtgtggcctgcagcaccagtgaccctgtgctgaatggcccagatgacctgtgcagtgccggtgagaaattccnntttcctttgggaatgaaccaccaactgctcagtccanagctcacacgggttatctatgtcggcaatgccttccctgccctgcagccaataccccccacagagagagcgt

SEQ ID NO: 668766 - DNA, 139 bp, Homo sapiens
cagttgactgttttcacacccagctaaggttgcgttcgcgggcttgaactcatgctgcgggctgtgcttgaagtcatagtcaggctgaaggatcaggagcggtcgcctgagtcctgtaagtaggagagtgatatttgat

SEQ ID NO: 668767 - DNA, 220 bp, Homo sapiens
acttcttccctagggctggatcactgtggcacgtgtgtgtcatcctccaccgggcacacggcgccactcacacgtcttgctggcaccgttgaacgctacgcacctgactgttgagactcctacaagcacaatggtggcagcggggtcccatgtccacaggggtctcctattttctacctttatggagtagggagtgagagccccatacagacttttaggc

SEQ ID NO: 668768 - DNA, 130 bp, Homo sapiens
tatcatcatacagactaaatgatactgagtatgcaatgtagtgtagacagacttccatctataatggataatacaggatcactactgtggcagtatgggaagtcttatatattgctgtgggactggattc

SEQ ID NO: 668769 - DNA, 735 bp, Homo sapiens
agcggggtcggggagtgtccctgtgctgaaagaatgaggagatcctgggggccttacctactagctggaatcgactgaagagactgcctgccagtgcgggagtgtaggaagctcgatccccaaatgaaaatgagctgagtgggcagtgcagcttgctgagacagaacctggagtgttgcatgggtcgctagaggcctggttcctggtctgtgcttgctctcctgtgaagccatggtacaggcagaactcagtggctgatccccaggtgagggcatgcggctctgcctgggattccaccgagagtacaaggcgggtagattgcgtgggtggaggaaagaaacggatgtagcctgcaacttgatcggaccaatagcaaccgctgagatgggcttacaatttgcaaagaatgcaggcaagaaagctagaagacacatgcggccggtccatgtgaggcgggtacgaaggctggtccgtaagagtcagcacctgaacagcctttatgtcttccgatagtatttgcggagttgacaaaaacagcgcaggaggaaacagtggctcgcacccatttaaccgaatcgttatacggacgagtctatatacgcgtttgctaagccgggaatcttgatatggtgccggaagaaacgcattgcccttggacaccattgtaccctgggatggaaactggaacgacaggtgagattcagaagcgtttagtaagcagggtacaagtacctg

SEQ ID NO: 668770 - DNA, 1202 bp, Homo sapiens
ccacgcgttccgggcaaaaccccgactctgcatcaactgagggcaaagtcagccactcttaattacgctaagcccttactagaccgagatgggacttgaaatccacacaaacacttagattaagcagcttaagcagccgctaagtcaacgtggcatatccaatcgtacttcatcccgccagcccgtggcaaaaaagagcggggagacagccccgagcgatgggttgtagacagcatgcgtgtgcttgcgaattgtgccaattacaatgatgagataatcgacctcgtgagcttggtaaacaatgaggccgtaaccccatgatctatgagaatttaccagtccaatgccttcacgtcagcactagtttataccctacacccacgcatctgcatgttcggccgacccgtgagactcattcgtcgtaaccaaagcggcagagagaagagcagttggtgaaccacgtagtaccgtactgagttgcggtgcagtgacgctgggagtcgctagtgcacagctactaagacataccttatccggaagaccagaaggctgtgggccaagagacggcaggaaaagcgtactcaggtaagacgaccaagcgatcgtaacaagagtaaatacagtagaagcaagtcgccaatggcaatatctagtcaagtgaatcctttacgtgacgatcacgatacatacgcccatcgatcaaagtgcggaggcctttaggggccctgacatgtagcatagatatgcccccataaagtatagtgcggaatgacgcgcccagtaataatgcgacgttgtccccccagtgaattccaaaacgaaaccagtaaggaatgtcctggaagtacagtgtacacatcccgtgcgtcatccgtaacctccctggaattcgcattctgtcatattcaatgcgaaagaggcccgggcaagaccacgagcaacagcaaggggactggaacaacacaggtagcataaccaccaaccgacacttaacgaccaggggcaaccataaactacagcagaccaccactgggacagacacgaccgggagtaaagaaccgctgaaaaccaggaccaacactcagcatctagccaagccgctaagcaaggagagctcactagccacgactaatacgcaaaggaggggacgaaaccgaaggagcagtaccacgacagaaacacagtccacagcaatcacaaac

SEQ ID NO: 668771 - DNA, 140 bp, Homo sapiens
tcattatgtcctttgaatgaagtcctgtcttagtggctgcattaccaatggcctatcttgctgcctaaagagcgcctcatggtactgaggtcacagaattccccccaacccagcatgggactcatggaaaattgaatgat

SEQ ID NO: 668772 - DNA, 931 bp, Homo sapiens
  misc_feature (1)..(1): n is a, c, g, or t
ntgcgtgcagcgctggcgcagcgcggagggcgcgggttgccctttatatgtgcgccatggctgtcctggcgtgtcgccgtttttactgtgcagcagccggtttccccgccggggttcgcgcatacggggcattgcctttcggtgggccccgcccttgggcgcccttgccagccccccggctccatgtgccagatttccccggcggggccccgtccccctgtgcaattgtttctcgggcccctcaaaccaacctctttctggcttcattttcccccccacaatttgctgtgggaagcggtaacacttttttcccggaccatggtctgcggtacatggcctgtgggtttcttcctcctcctcgtatctccctacccctctggctgggtcccgccccttttttctcggcgcctccaaccccgctcattcagtggcggtcacccccccgcgccatttatccgccccgtgtccctggggaggaatggctcaccccgcgcccgtgtgcgagtgatcattcgcgctcgggttttgtcccccgagcacgccccctatttgtagggagtcccggcaagctccccctttgtatcaaggcgggatgatcactgccctccaaacacacaggtggggagccacctccggacgaatcctccccacgccgtgcagtgggttggcccggcaagagaggtctggggggagccaccatctttcctggtagacagggcacgctctccccgaaccgccaggtatgatggcgcctctgtctgatccgctccccggatgttttgacaaggccgcccccctggcacatccgttaagggcggcttctggaggtctaggctcctacgcgtccccccgcactcctgggccgttccttacactgttgcacgccagcccttggccccaagggaaaaaaacttttttcgtcccacatagc

SEQ ID NO: 668773 - DNA, 702 bp, Homo sapiens
gcggcagcagcatgctggggtgctgcgtggcgtgtcggggctccggtgccggggctggcggcgccatcttgtgccctggtggcctggtgcgggagtgcctggtggattgtggtgccccgtgggggcgcaggggactacgggaacggcctggagtctgaggagctggagcctgaggagctgctgctggagcccgagccggagcccgagcccgaaggaggagcctgcccggcccctggcccccccgggagctccgggccctgggcctggttcgggagcccccggcagccaagaggaggaggagcgagccgggactaggtcgagggtgacccgggggacggcgccacaagacggacccggagctcggaagctatcaacacgctcgagtcacgcacactgcacggaacgaaccctgaccacagctcaccagcgagcccacccaacccacgctaccacacaccagactggactactgacctccaccctcccaggcagatgctggccccggtgatcatgtccattgcggcacgaacactgccacggctcgatacgccccgtaaccagtcgtattgttcggccgactgctgggagctatggggtgcaacatgcaggaaggagcttggacgcgtcactattcagtggctcgtggttcagttcgaatcggtggtaccatacttgtgttgagcagtatttacgtggccatcg

SEQ ID NO: 668774 - DNA, 496 bp, Homo sapiens
ccgatgccacacgtaggctctagtagtataacgtaccttggatacttacggaatggactaagtatagctcctgggctacaaacctgtactgcatgtaatctatactgaatcctgtgggcagatgtacaataacagtgagttttagtgtatactaaacatagaacgcggaacagcaaaaatatggtattataatcttaccggaccagcagtcagactcggtgatctgacattgactgaaatgtcgttatgcaggccatgacgtgtattacctctctgacgttccccaggagagctggttccagaaggttcggatgagtcctgaatgtttatgtatggcattttcctttagcaaaagaaagccaaagaacatcaaaagctttcgggggttctagtagccattgaagtactcctaagtgtggtcatcagaacataagccattctttaaccgcttgacttctaacggtagaggtccattcggcgggtcttctagaatccg

SEQ ID NO: 668775 - DNA, 1346 bp, Homo sapiens
acctgagatctatcatgtgatccgtgagactggataatgtcctgaatggcctgcagtacttgcacccgtgtatttttgggatgtcgaaccggacgaactggaatatctgacacagcgtgtgcaaactcacggacacaagcgtaactcggaacgacacgacaacgccacctcgaagacacgacaaccacacgaacgctcgacaaacaaaggacacacggctcacagatgcttaccaacagcgatgcattgcccagcagtactggcctacacgcacagctgggaacctctcgtgggatagtggcgggcactgccaagcacttccttttcaacgacacgcgcctacgcactctctcgtcttcggaggaacagcgatgcaagtagggaacataaacaattccttacggaagaaattggggacttagttgtctcatgcacatacataaatccgacccttaacgcgtgtgggttgcatcgttttagtataagatcaaaggaccagtggagaacacaagacaagtatggaccgattaccgtggaaaattgagggtgaaaagaggagtttttacaattttaagtgtgcaccgaggtgcattgagcagaatgttgttgggatggtaaaacaggagtttatcgagtcgtagacgtttgagattatgtggatagaggaaatagggacgatgagtggggagagtttattgtcggcggaagaactggtgtgtctatagcaccaaagtggaactgatgatttccctgtgtggaatgggtgtaacaaacaatgcaatacaaagccccgacatccttgggtcgacggcgagccgtcactcacaagtggcaaccgccacacaagatggtggatcaccttggcaacggtgggaacttgtcactcaacgcgtcggccaaccgcacagggggtggtataacagttggctatgggcagcgacacgggattataaagcacagttattccgtcacccacagaagacaaacagcaacatggggctgatttaaacagcactccagtagcccagaaggcgcccgctgggtgcgaacattatgggacacacacagggcaaaggaccttgacgattactctggcggtgaggcaacacaaacgcttgggtacgcgggtgcgactcacaacacatggggctgtcgggcacaacgacacgtcatacttcatacacgggcttcaagtataagccccgccaacacaacatttgctcacccttatcaaaggtgactttcacattaatacacactggttcgtggcacagcggaaactatccctcgaaacaagcaaacgtgagcggtcacagacacatacacagggacgcgcgcctcaccag

SEQ ID NO: 668776 - DNA, 135 bp, Homo sapiens
gccttgagacccagaagggagcgaaggtttttcctgccccaacgcagtgaccgaaaggctttccgccttaacggccggccgttatcctcgcctgcaagatgggcccccactctctgggcttctgcgctatataca

SEQ ID NO: 668777 - DNA, 829 bp, Homo sapiens
agcggaggcgactctcccgtggcgccatggcggaatgcagaggacggcaggaaactgggtcccttgaagaatctacaggatgagtctgaggaagaagagagcgaagaggaacccaagactagaatgtatgaagaggcttatccaagtggggtaactgaatatacttcaaaaggatgcaggtagctgtcatgacagatccatgacaagttttgtggcatttgggcacacatgatggcagaggtttattgtacttgatgtccaggggaacatcactcgagaagttgcgatgtaagtcgctgtgaagataaatcagattagctttggatgaaagtggagagcacatgggtgtgtgttcagaggatggcgaaggtgcgaggtatttaggactggtattctggagaagaattgtcagccgagactgttgagactgtcccattaacaattattagctgtgcgacccacattgtcgtcgagatccagtggcaagcagttgtgtgagcggagggaacaagctggctactgtttgaacggtcttggatgagcagatggaagtctggcgtgttctggatgacaggggaacgggatcgctaaaggagtgtgaaggtggagaggcatctgattgcgttgggccgaataatatgggtgtgaaggatgatgacatgcatctcatagagcaaagacatcaccaggtgtgccccggcgagtgactataagtcttcaggccaggacattgtatactctggaagcctctgctggaaagggcccaaggtgcacacgtgattatctgcgtgggggggaaatctgtcaaagggtgtggtcagtgaaggac

SEQ ID NO: 668778 - DNA, 323 bp, Homo sapiens
  misc_feature (277)..(277): n is a, c, g, or t
atctagaggatctatcctggtatcccacccatgaaaaaaaagatatcatcgctggtcattggagaactgcaaatcaaaaccacaatgagataccatctcatgccagttagaatggcaatcatgaagagtcaggaaacaacagatgctggagatgtgaagaaatagaaatgcttttacactggttggtgggagtgtagattggttcaaccatttgtggaaaacagctgtggagattcctcaaggaatcgtagaactagcaaacacgcattcgacccangcaatcccacttactgggctatatacccaagaggattatgagctcg

SEQ ID NO: 668779 - DNA, 960 bp, Homo sapiens
aaaaaaaaaggaaaagagaaacagagaagaacacgagacgacagacagtgacagagacagaactcggcgaagctggtcgggcggacacagtgtgatcgttccctgtcaacccgccgcgagagtatgcccccgcaagtggcaggttcccgtcgcacaagcgaccatgtgtcgctccaaggccgccaaccaggtgcggggactggccgccgacacccccgtgtggtgtgggggccgccagctgcctcttggaggtgcgacagaccgctggggaccagtccttttgggaggaaactaaacgaacacgcggtgtgggccaaggaacacacaggggccgtggttgtcagaaaaagcaccgcgcgcttcgggagataacgagaatctataggcgtgccggtcggacatgggaaactgtttcccccgcgtccctctgataatgctggaatgttcttgcaaccacacgaggtacttccccgcgacacgcccaagtttttccccgttgagtgcggcccgccggtacattttaagcgggtgtctttaggtatcaacactaggtattacccgcaagcagggaaacaacaccggcgcggggagtagacccccacactggtagatcttcttacagggaggtgaaccacctctgtcctaaattgctcctccaaagtggactagtcccgcttgttgcacttgttataacccgcttgggactccaataagtcgttatgcagccgcttcatgaatcacaggatacccgcacaacaccggagaaccttgtgagacacagaaatccgcacgctgaaataattggtctttagatcgagactcctcgagctaaatacacgccgtataatcttggcggaccactcatcactgcatggcaccaccaccttaaagacaaacccgaggcccgtttgtatccgggaaaaacaaatggggagatcacccccaacaacaaaagacagc

SEQ ID NO: 668780 - DNA, 334 bp, Homo sapiens
taaatccctcaatctggagtgcagtggctcatgcctgtattctaacactttgggagggcaaggtaggaggatcccttgaggcaaggaatttgagaacagcctgggcaacacaacaagaccctctctctattaaaaataaatacattaaaataaattttggctgggcacggtggctcacgactgtcatcccggcactttgggagcctgaggcgggcagatcgcgaggtcaggagttcgagaccagcctgacctacatggtgaaaccccgtctctactataaatacagaatttagcttgcgtggtggctcgtgcctgttatcccagctactcagga

SEQ ID NO: 668781 - DNA, 444 bp, Homo sapiens
acacatgacccttacaatatggtaccatatgatggtagaagaagcgaatggagagcgacgaaaggatgggctgatcaggaggatcatacttacttctgtagaaataacaagaaaccagtgacccagctatagtcatttgctggcacgcaatgctgaattcaatagtccagatgaggccaattaaatggtacgaccacatgtaccgactgcccgaacggggctatataatccacttggacgacttccataacctgggcagctcctgcagttcccaggctcagcagacacagccacccagaggcacccagaagaaaatgcggatggcaaatgtccacagtggctggaacagcaggaagggagcactgctgatggctttatttgtgatctggcaaagactcaactgtcagattttctcctctttctgagaccaacaaatcaagacga

SEQ ID NO: 668782 - DNA, 496 bp, Homo sapiens
cacgtagcccggccgtacgcgtaaccgcataagattactgcaggccaactactcatgcagcataattggaagctccaacacgagcaatatcaaccattaaccttacctctacacttatcatcctcacaattctaattctactgactatccttgaaatggtcgccaatccgcggattggcgaccattccaaatagacaagtcgtcatcagaggttgataagttagtgctaaacagggaatcaaaacaacaccgtgctaacacaaaacacacataagtacacagcacacaggttctataaagcaactatgcaatcaagtctacataacaaccatcacaaaatcaaaatctcacatgtcaatatcaaccctgaatgtaaatgggccacattcccccacttaaaagatacagagttgcacgctggataaaagagaagattcaaccatctattgtcttcaagagatccatctcacatgtaacagcacacccaggctcaaac

SEQ ID NO: 668783 - DNA, 263 bp, Homo sapiens
accaccgcgtggttctcaccagttggaagtcgcaggccttaggttatcgaggtgaatggtttcgccggccttggtactgatcgggatctcctcggctttgcagcgcaatacgtcagtgcctacctgatcggaccgcgccattttcggggtaggctggctgatcggtccccgatcgcttaacgtgctgaagtccagggtcagacggttaccctggaagccaccgaatacccccagatccttccaggcctcgtcccaaatctcga

SEQ ID NO: 668784 - DNA, 839 bp, Homo sapiens
cccgcggtcttctctgcaaatgggctccgtggcctagcgcccccgtccccgccacccgtgatcgtgcgccgaggccgcgaggggtcgccgccagatcccaccagccagcaagctaaagcatggcggcatcccctccagcggctcgctcgtggccacccacgactactaccggcgccgcctgggttccacttccagcagcatgaccgcctgtggcctggctcgggacgccccgaggaagcagcccggcggtcagtccagcacagccagcgctgggcccccgtcctgacctgagcggttaccaccagccccaggcctgcggaggcgctagtccaccagagccctccgcgcccgatgtccccatcggatcctcgccctccaactcccaaccccccaccgctgtaaacttagggcgggctgcagtgcaagcagaccttcgcatcaacacagcagacaccaaaaacccagtgagagccccgcttctcttatcgggccgcgggccccagcacttcggcatggcttttccttgaccacctggaacttgtgccccttgggccacccaaggccgggaatacacttaaaactttccaaatggcacggccagcgtacacagcacgctacatgaaatcgcaaaacacagccgccagccgcgattcatatatgtccgagggcggtccgcagcacaaaaccgcgctcactgagcacagtgggcacgttggccacatagcggtgttcatggaaccccgagttttgtagtgcaccacccgggggaagacatctacgccgggccccccatagttgggggagccgcgattcattttcgatagccccgggtaccctgt

SEQ ID NO: 668785 - DNA, 1696 bp, Homo sapiens
tgtttgggggtttttcactcatctcctcacactcctcgggagtactacggggggtttctggaaaacgcgagggcaagggcagccgagccggttgtcttttctcctttcttttaagggcgtgtttcttcttcgcgggtttcctccgaggctttcctagttaattcttcagcgagcgcggttctcctcgggccgtggaaccgagttggcttctccttgtcagtgagcatctccgagagattctctattgctgcggggggatactctctctctcgcgagtgcttctctatatagaaggaaggacacgagagtgcggctctcttatcagagctgtggggtttcctgcgaagagagccttctctcccgcgagaaatataccagcgctgcgggggggggccacactctacgagagagaaagagctgcaaatctcgagaataatcgtgggtgagagggggcggaaaatacgtgtggaggattgtgggtgtgtgtgcgcagaggggagtatatggcgagagagagaatgtgcgggggcgctatgtgtgtgtctcttgtgtggggaaaagaggtgtagcgtctcgggcgccaaatgtgagagggggtgggggagtgtgtgaaaaaagatgtgtgacgtctcccatatatatgtgtgtggggcgggtgtgtgtatcacccaccctgtgtgggtcctatcaacgaggggggggcctctctgtgtggagacaaaactggtgtggcgctgtcccccctattttgtggtgtgtgtggggccccgcggtgggggaaaaatcttcaaactcttcgagagcacacaccgcgagagagagcgtgtgggccaaaatcacacgccccgccccaaatatagggccgagagagagggcccgtgtgataaataggggagctcacagggggagaagatcccgcgtgtggatcacaagggcccaaggagtggggaagcaccccgccggggacgcacggacgcagtccccgccgggccgcggtgggcatcattagggagaggcctatatatacggagaaacctcgctggcggcggcatcaaaatttcacaacgacgggggggctattttcttcttattcgtcggcccccgatgaagggggggggccgcacaccaacctttctttttttccaccacaagggtgtgtgggggaggagataatacaccggcacggcagaaagaggagaggggggcgccgcgggttggccaaccacaggcaaaagggggggcgccttctagaaacacacggggtggggggattgtgggagtggaggttcacaccgcagaggggaaacaacaacgaaagacaactcaattgcttggtgtgggggtcaacccgttcgggggctggctgtggggcgcggacaacaaagaaaaaaagtgttcccagccgttgaggggcacaccaaaaacatcgttggccgccagcgtggagttgtgcggacacaagcaggaacacccacggtggtggtgcgcgggggaacaacagacaatcactcgtcgggcgcctctgcgggggtgattacgccaccaccacagcggttcttgggacggagatggagcacccctatggagggagagggagaccatcacacggcgcccaggaatagacaacagggggatagacaagcacactcacaaacagcgagtgccccccagggcggggggagagcagtggtcccac

SEQ ID NO: 668786 - DNA, 169 bp, Homo sapiens
  misc_feature (20)..(20): n is a, c, g, or t
  misc_feature (138)..(138): n is a, c, g, or t
acccccctggcttgaaaaantcccctaagaagcctaatttccagaagccccggaaaaaaaaaaataattccaataagttggcgccaagaactggggttagctttccaaaacaagcttccacaggtttaaaaggaaaanctgttgcctgaaaatggggtttgggtggggc

SEQ ID NO: 668787 - DNA, 365 bp, Homo sapiens
acggtctcaagggctatagaggagatgagggtcacaggatgtcgtatgtctaccgggtgcgtagtacggctagagtgggagatcagctctttattaaagtgaatctgcttttcaatacagaaaactaagttagatgacagattcccgaatggtactgctgtggcaggcctctgggagagtgttcccagggggctatttgggtaagttggttatttttcagtgccttaccagcaatcagtgtcagggtgttgcatttgaataacagtctgaggtaagagtcaagtggggctctgctcagtaactgacaggctggatccggggaagcaaccgctgctgcctagatagggaacccttctacaggggca

SEQ ID NO: 668788 - DNA, 782 bp, Homo sapiens
ggagagagagaactagtctcggtctagggggggtgtttttccagagtcggatctgattaattggttacccaaaaaatcttatttcggacgggatccagacttaaaagtaaaagctcgcaaagaggaaagtcgggtctcttcgcaattggtccctgggcgcttctccttagcctccttcattctctgggccaaaatgtttagcatattctggcagcctcttcttaattttcctgggtacgctgcttcttcagagcaatacgccgccgttggtggctgcaggacccgtggagtacacaagaccgctgaatctggggtgcgcttgggccctaggtttcttcaccttctttaattacaaggggctttcttacaacatcactggggggactatcatcttctttcaaagagtattgaaaatgtttggcggatacctggctaagctcctttggggggcccaggcggcgaggccctggtagttatcagtcatgtcccaggaatatccttctctccctttttttacaatacccaatgttgaaaacgctccagattggcttccacaatgcaaccagggaacggatttcctcttatctttctccagttctcctgggtctgtaccaggaatgccccttactcagtagcagggggacacggccagggcgtcaagaaaccctgcttcagggcggaaaccttgtttggtcgtcccaccattgattcggaccaattaacccttccattcttcacccagagcgtcagcagcaatttctggggccatacgttctcataga

SEQ ID NO: 668789 - DNA, 310 bp, Homo sapiens
gtgagggtaatgtgggagctgaggtataaatgggcctgtgtatccccttctcccggcccagctgctccctcctgcctgctgcccacaggtctcctctgtccctgtcctctggtggttggggatggagcggcagaaaggggttgtaatgggggctgggctctgtcttctacaggccaccccgaggtcctcagtggtttgctggggagccggacggggccctaaaggggtacaggttgggtgggcccttccctaagagctctaggggctcagcgctttggccttctggttgccttctacagttcaacccaag

SEQ ID NO: 668790 - DNA, 547 bp, Homo sapiens
gagggcgatggtggtacacgcctatagtcctagctactagaaaggctgagtgggagaatcgctgagcctgggaggttgaggctgcagtgagctgtaatcacaccaccaactcagcctgggtaactgagtgagactgcctcaaaacaaaataaaaataataaataaaaatggaaacagtctataaacctttttagttgttgatttataaaaaatcaaaacatacagattattactaaagggtttagctttggaattgagtagttgaacaaccacttaaatatcctttctttgtctaagaattttacagatataaactgttttgaatatttggacttggtgttattaccaagaaaaataataactgtaagctcacaacctcttcttatgaaacagtatagagaagtcacactgtaagtcttgcttgccctgctatgctactaggcagtatgcacaggcttttgtatgctatgatatgcatattccattccaagtcgtgacaaccagatgcaaagaatgtgcagcactcatcacttgttgtctggaatcc

SEQ ID NO: 668791 - DNA, 172 bp, Homo sapiens
aacccgggtacgagcttcatctctaacgcttcatgggtgcatttcgacagagttttacttccgtttgtaacgttgacttggagcaaagtgtgaccactcagtactcgggtttgaataacaccagtctccaatcgtgcccatctacgtgaacctatgtaccacattgaccact

SEQ ID NO: 668792 - DNA, 431 bp, Homo sapiens
tccccacgatcaccatatttggcatgctggtctcgaactccttaccttgtgatctgccttctctatggacctccctacagcgctgggattacaggtgtgagctaccgtgactcagacttatgacccactttttaatgggattatttattttatatacttcttgaattaatttcctgtatagattctggatattagacctttgttggatgcattagtttgtgaatattttgtcccgtactgtaggttgtctttattctatacattgtttcttttgctgttttgagtatctttacattatggtattcagtatttgtgttgtacttttgttttagtactttatcctaattattttccgaaggtaaatttccataatggtgttacctgggttttcttctaggaatctaataagtaagaggcattctgtgtaaatc

SEQ ID NO: 668793 - DNA, 748 bp, Homo sapiens
atacgcactgtcttactctaagcgccacggggattaacgtatcaaggaggacgtgtgctgatggtctaatctactacgagtaacttttgtacttctcctggtcatgtgagtagtttggacgccgtaagtgatttgcatttgtttacatgtccgacattattcacataaataatgtcgtgtaacaagaaaagaacgataaatgaagccaacatgattgttctcatttcgggaggaactctgttgcttcgcctggacaagtcaggcaaaatgctgatttcctccttgggtagaaagagggagtcgagggcaaatggggtagtagagagaaaacaggcgagatcaagcactctaattccagtgggctttaagagataagacagaatatcagctttacaacaatccctagaggctcgaccacagaataatgccagtcaccaccctgaacgcacaatctccagtgcaggatctaatgactgtactatattgatcgttagtattattattgttattattgttgttctgtaaacatcgcttgcacaagcttagcctttttgcgttctgttgtgcgtgcctgtaaaaccccatgctttgtgaaatgagaatcttgacatttttcttgtgaaatctggaaaatgtgagtcaattgccatcaagctgtgtttagtgttctctatgtcaaagtttagttttatattgagaatgttaacttattgtttactccgcggggggcagaaatatatccgttgtg

SEQ ID NO: 668794 - DNA, 842 bp, Homo sapiens
  misc_feature (283)..(283): n is a, c, g, or t
agcgggggaccgggaacggggagcgcggctgccagcacccctgagccgcctgccggaccctccgtcgccccgtgggctggcactccagggacctgagggtcccctggatgtgctcccgactatcgagcgcacgttccagaatgtgctcatcgatgagctaggcgagtacgtgtgacgagggggggccacagaggatgggggccgtcgagggcgcccctgtgcgtgcgccctggtgtccccgtcccggcggcgatgcgctccttgggcgtaggatcccccccgntcaaggggggggttgggaggccgtggtgttcccattggcggcgggaggtcccccaagcactgggcctcgggaatgcctggcggtgtggacccgcggcgcgctgtggggtgtggggcagcgagtgtcgcgccggctcttggccttcctgggcgccacgcgcttttgggcgatctagtggcccgtagggggcgcgggaccaaggagagcccttgctgtgtgcccccgggggggaactgtctgcactccccgcgggggggcccccacggacatcatggggccgggggcacccccaggggaagcttgtacgacccacgccacaatccaaggtgggaaatgggggcggcgtgcccaggtacatgccattgaagacattggattctccaaaataaaccgctagggacagttcgggtggcggatttgtacccccgtgtgagctctcatgtgcaatagtgtgttgtcccccaaaaagagagcgggttgtcccaaaatagtttagccaaatggacccgtaaatggtccccggtaacttgtgtcgtgcacacagaaccgatttttcccc

SEQ ID NO: 668795 - DNA, 1035 bp, Homo sapiens
ctgtttgtgttgtcggccttattgtcgctggtttgtactcgtgttgttcttgttttttctctccctcctcgcgttcgtgtttcttgtgtctgcctcggcctttgttgcgtctcccccgtgcgtggtatcggcgttggctcttgccctggccctcccgtgtgctgtttctcagttggcgcgtgtactcatccgtgtgcggtcgggttccgctattttccccgggcttgttggtctttgccattttgtgtacccttggggccttttgttgttctcttctctcgtctctgctgctcggccggattcctgtgactttgttctgattctaaatgtcccccgaggatttacctagccaatttgtccaaaaggtgagatcctgagatgatttggtcaaattgggataaggccccgccatcggcattgtaacaagcaccccagtcactaggatccagatggacccccacctttgagaaacccccccccgtttcgaactttttgcacccttaattttctctgttcctgagcccccccacttctctaggagaaacttagaggaaaagggcaccagaccactacatatctaaagctttggaccagtccttgacctctataaacttcagagtcctccattataaaatgggaagactgagctggagttcccgccagtgatgcttttagttttaaaagtctatgatctggacttcctataatcaccaaataccaccaatcctcccaagaatttgacttggaaaaaaatgtccaaaggaaaaccaggttatctgccccatgtgcatatggcaccaaccttgactaccctggcctggcccgtggtgcgccagtcccgggctatctgtactgtttcaaagaattactttgtagttgacaaccaccaaacaccaacaccaaaaaaggcataaaatgccagccggtttatagaaaaaacagcctggtattctcccagttaggtatgcccagagtcccattctttttaacagctgtgagaatttgctgcttcattcccaaccaaaattttattta

SEQ ID NO: 668796 - DNA, 142 bp, Homo sapiens
  misc_feature (90)..(90): n is a, c, g, or t
tcgagacccccatcacagcagtcgcggcaggcttggcatatacggaggatataaactctataaatatttatccagaaacaatatcgccgnaagatatatatgggtaaactcactctacttagactctacttatatggcttta

SEQ ID NO: 668797 - DNA, 231 bp, Homo sapiens
cggcacgagggaatgcggcctttgagtcatgaagactccatctccatgtgaccgaacactgcagctgtctgaccttccaaagagtaagactctcggcaggttctctttgagtcaatagcgtgttttcgtccatctgttgacaaatgacagatctttttttttttccccctatcagttgagtttttttattgacagataacttctttaggggaagtaaaacagtcatctcga

SEQ ID NO: 668798 - DNA, 337 bp, Homo sapiens
atcgagctcgctacctgttagtagcaacaacctagggtcagttttgcatgtggtaaagccatttaccaagatagttgtaggtaaagaagggcagatttattagagaaattgtgaaaatatgttgcagtgggcagctcagcagagaaggggctacctgcaaagaggcaagggctggaggaaagttttatagggtcctgctgaagggtgctacgtgtggaatgaggtcattgtgcccgcaggttgtttgtgattagctgtctctaacaattgttcatacaataattgttcattattgttctcaacttggggctctccccaacctggggacccttcctta

SEQ ID NO: 668799 - DNA, 211 bp, Homo sapiens
  misc_feature (37)..(38): n is a, c, g, or t
cacggcaaaaggaatagtcagcagagttaacagacannacacagagtgggaaaaagtcttcacaatctatacatctgacagagggctaacatccagaatctacaacgaactcaaacaaatcagcaagaaaaaaaaattccatcaaaaaatgggctaaggacatgaataaacaattctcaaaagaagatatacaaatgaccaacaaacatat

SEQ ID NO: 668800 - DNA, 162 bp, Homo sapiens
gtctgtagcactgatgttcagctcgtcgttgtttcagttaagctcaatggcgaacatgggaaccgagctttcgccttcccgtgggggagaaaccctctggctgatggctttgccccggaattatcaaacagccaccgggtgactttctggcttccacatcca

SEQ ID NO: 668801 - DNA, 363 bp, Homo sapiens
aagcagtaatacagactcagtggttgtctacccttgatatggttcagctccgtatcccacccaaatcccatgtcaaattgcaattcccagtgttgagggagggacctggtaggaggtgattggctcatggcggctgacgtcccccttgctgttctcatgatagtgagtgagcgctcatgggatctggttgtttagaagcatgcaccacctcccgcttcactctctctgtctctcctgctccaccatggccagaaacgtgcctgcttccccttcgccttctggcgtgattgtcagtttcctgaggcctccccagccatggttcctgtacagcctggaggactgtgagtctgtattaactgcttg

SEQ ID NO: 668802 - DNA, 287 bp, Homo sapiens
gctattattttcttctgcataaatgtacactcatttcattatgtgccttgctccctgattgtgcaaagctatatatatacacacaaatatatatatatatatgagagagagatatattcattcagtactactgatgtttttttttgttctactgctggattaagttattgtctgagttacacttgccacttgtcataaactattgtaatggcttaggacagtggtcatatagccagagtaaatttgtttttccagtttcattattttgtcatctatcccaattctta

SEQ ID NO: 668803 - DNA, 177 bp, Homo sapiens
gtcgacgctgagaaacagattaggccattaacgaaaaaagttgtggccacgtgtgtgctcacgcctatagtcccagcactttgggaggccgaggcagggggatcacgaggtcaggagatcgagaccatcctggctaatatggcgaaaccccgtctctactaaatatacaaaaaaagt

SEQ ID NO: 668804 - DNA, 339 bp, Homo sapiens
cagggcattggcatcggttggctattgttaagactacggaccttgttagactatggaccttatgcagctttcagtgtctgtatgcgctgtgtgtgcattctacgcaaggtgatctcatgtgtagtatcttgtaaccatctccacccctgccattgccatagaactgtctcgtcaccgagtggaactcacctcccttgtgattctccttttgagcctcatccccacacattgcccgtgtgtccttggcagccacaaatcccttctctgttctccatctctagttttgtcatatggaggatgttatgtacatggaagcgtgtagtgtgtaaccttctgtaa

SEQ ID NO: 668805 - DNA, 199 bp, Homo sapiens
acagtccacgcataatatgtcagtgtatgacaaactgccaaactgtatccagagatggcgtactatattatattcccaccagcaataagtgacctagtttttctaaatcctcaccagcatgtggtattgtcaaagtgatcttttcatctaaatgcatatatatacatatatatgtgtgtgtgtgtgtgtgtgtgtgtgt

SEQ ID NO: 668806 - DNA, 181 bp, Homo sapiens
  misc_feature (45)..(45): n is a, c, g, or t
  misc_feature (95)..(95): n is a, c, g, or t
  misc_feature (100)..(100): n is a, c, g, or t
ccaaaaaatttttttcttccggtagcctctcgggcccccccccanaatcccccagcctcatgtcctgccccatccctatcctgcctgatccctgnatctncctcagatcccctcttctcagacagcgccaggccggggtggggccggggttggggccagaaccccacagtcgccccctccc

SEQ ID NO: 668807 - DNA, 407 bp, Homo sapiens
cccaaaaaagtttatggttatttgtgtgggggggtgttgttatatattattgtctttaagggaaaagaagctataagattccctgcccccccaagtatcctttagaaaagtgaagccccaagatttaggttgatgaaaaatccatgagtttgccttttgacctgttcagtgtctgtcttccagcccggtgggtacccttcttcaaaattgtaccccgtttgctaattaaaaatatcttggaaagcctcatggtccctaattttccactagcccccggtattttgaaaacgtgtgtctggatattacctcttgtttaaactgaatgtatgatattttgttagaatggaaaagtactatcttgttaatttaagtattttaaaaatagttgtatatttttcttcctctta

SEQ ID NO: 668808 - DNA, 181 bp, Homo sapiens
  misc_feature (95)..(95): n is a, c, g, or t
  misc_feature (100)..(100): n is a, c, g, or t
gcggccgcctactactactactactgctcgaattcaagcttctaacgatgtacggggacatgtcctgccccatccctatcctgcctgatccctgnatctncctcagatcccctcttctcagacagcgccaggccggggtggggccggggttggggccagaaccccacagtcgccccctccc

SEQ ID NO: 668809 - DNA, 630 bp, Homo sapiens
actctcctctctatgggctctgtgatccactctgggcacagggagggagacccgagagccccaccccagacatcggggcctgtggcaaaaccatctatttgtggggggatttgcattggtatctgaatgcccaagtgagatgttaggctgtctgtggtttctgtcttctcattcttatttggtgttaggtaactcagaaccgactgcagtttcgccatcatttaaatctttatatagacttttccccctgctttttatttgagccatttattactttccttgaaagggaattaattgatagtataatttgaagatttttttttcaggattgggaatgggatttctaaaggctgcaaaatgtcatcactagaattttcaccgtagatctgagaagacacttagtctgcagtgtggctgttgaaaacgttggtaaaacacaaattaacgtatttttactttggttagtgatagcctttcaaatggttattcttacaaatcttttattgtgaaaaattcaaaatacacaaaaatggaacgaatagcatgatgcacccccgtgtaccatcactcagctcagtagtgatcttttatataatctactaccaccagtcattgattcccatcccctct

SEQ ID NO: 668810 - DNA, 336 bp, Homo sapiens
gagagaggatttcgccattatggcaggctggtcttgaactctatgttctcaagtgatccaccctcctaccgtctccccacagtgctgggattacaggcacgagccaccatgcctggcccacagaagatcttttaaataaatattgtatggcctacatctacgcatccctcatcccactccgataaaaaaatggctatatataagtcattacatcatctacggtcttgatgctggtttgcttaattcgtgaatctcttatgacttttacaatatcatcttatgtcacatagggattgtctagggaggagcagcaaaaagtcaccaacagtgcagaga

SEQ ID NO: 668811 - DNA, 142 bp, Homo sapiens
cttatgtgtgccactaagccaaccactttattgactctagccgcagacctcctcatactaacctgaagtcggagtgacaaccaggtaagctaccctttaagcatcattggacaagtagcactccggatctatacttgcatca

SEQ ID NO: 668812 - DNA, 1502 bp, Homo sapiens
taagaggaaaacccggtaagtgagtgttcggggtttgagggatataggaggaaaatgtgggggaatagggtttttgaacattgaggggtgtttttctcggtgttgaatgagggttattagtgtttgtaaagtgtgggtgggtgagttgagccccatgtggtgttgggtggctcaacattatgttcagaaggggagatatgcagggcgtggtgacacctacctcagtggtggaagctcccgtgtgataagatcaggacagacaggtgcactaatctggcactcgaggggagaaacagtggtggctctccttaccccacaagacagagagtctttccttcccgaaatgagggttctaacatcaggtggcgggggtataagcggcgcacaggtttctagcccgcgcgctctgtggctataacacagtttcatcttcacacacagcagccataatctacgtgcgtgtgcactcttagcaagtctttcgcggaagaggtcttctctttttatacacataccgtgccactaacactcgataatcgccgccacatccagatccaacacttcacccgtattctctcgccatcaacccctttctgaacatactaatgctgactcctacacgtatgactcactaatacaacttcactctccaatctctgcacagcccacatcgactctcacacactcccccccatctatgcgaatcaacaatcaatctctttcacacaatcttgccatttgatcttccctctctcgtataccagctcttcactcaactcgactcaccacaccagcacattctcaacacaattgcactcctgtctcaccacacccctccaagctgtcccaccagcctcgcgccactcccaatttgaccaaaaaaaactactttttcaaacatcacatcacccgtccctactctcaaccccttccttcttctctcggactgccctaccggccacgaaactcgccccacgtcgtgtcgctcactctcgcgctcacccctgcccccccatctcttgcgtcacgtagcactccaagcagctgaacagcggtccatacagggccactgtgcgagttgctcggctccactcgcccctcatccaaccacaatacctcgtcattccacaccgcgcgctgccactacgctagcccttctgaacgcctcgtgtccttctcatgtgtggcaggcggactgttgtcgggggtgtctagattgatcatatgtgacacacctcgtcccccttcttttcgcatccatctcctgacccttgagacatttcgtcgacactcatctcatcaatctgtcagatcatccactcttcgacacccctactttcccccccccactctcccccctcacccactcctcactcctcaccacccctcccgacacatacatccgcgtctgacctctctccatctgctcctatctccccgaacaccactacacaatatcaaccgtaccaaacacacgacacatccacaatctcttcacctcc

SEQ ID NO: 668813 - DNA, 141 bp, Homo sapiens
aaaaaaaaaatttttttttatgaatgttggttttcctacccaaaaagatggaggggttaaaatttgggtatgatttttatgtttttttaataaaaaacccttttcaaggttattttcctaaataaacctcataattgtgga

SEQ ID NO: 668814 - DNA, 932 bp, Homo sapiens
  misc_feature (863)..(863): n is a, c, g, or t
  misc_feature (887)..(887): n is a, c, g, or t
  misc_feature (926)..(926): n is a, c, g, or t
ccctctccgcgccgccgccggcggcctccgcgcgggcctcccagcccttattccactcactttgttctccgcctttgtcctaatccacaccagcaggtggagccgcagttaaagtttccgagtccattccgggagcgggagcccatcttgctggctgccgaggccctcgctggaggaggagggtcagaactcgggtgcagccaatcgagggcaacgctgctacttatcagagcagaatgggctgtagtttagtgaaataggaaagctgcaaaacactgtggagtgctcccgtgtaaataaaaagaggaaaaaagtttctcaagtcgccgctgcacgacgtctggccggcgctggagcgggggtctgcgctctcccgagcggccgcgcgctggactttattgtgccgcaaccagccccagttcccattgtttgtgtttttttcaaaatatggcaaaggttcaggtgaacaatgtagtggtgctggataacccttctcctttctacaacccgttccagttcgagatcaccttcgagtgcatcgaggacctgtctgaagacttggaatggaaaattatctatgtgggctctgcagaaagtgaagaatacgatcaagttttagactctgttttagtgggtcccgttcctgcaggaaggcatatgtttgtgtttcaggctgatgcaccgaatgcaggactcatcccagatgcagatgcagtgggggtaacagttgttctgattacttgcacctaccgaggtcaagaatttattagagttggctactatgtaaataatgaatacactgaaacagaattaagggaaaacccaccagtaaaaccagacttttctaagcttcaaaggaatantttgggcatctaatcccagagtcncaagattccaccattaactggggaagataatacagaaanactgga

SEQ ID NO: 668815 - DNA, 124 bp, Homo sapiens
  misc_feature (1)..(1): n is a, c, g, or t
nttgctctggtggtatcctccttgttccaatgttctaatgcctcagttaactccacctccatagcctgcacagtttcctccactagctccagggttatgtggcttcactgtctgggtacagtga

SEQ ID NO: 668816 - DNA, 1034 bp, Homo sapiens
  misc_feature (312)..(312): n is a, c, g, or t
agcggcggggtctgggtttcgtacgtagcagaacaagctcctctcgggcctctttcattattattattatgatgattattattatcatttgtggagatggcgtctcgctctgacgctccaggctggagtgcaggtggtgcaatcttcgggctaacatgctgaccgtccggcatccctgggtttgtagattacaacttgctcctgctcgtcatgtcttcagcggatgtagctgcgaggacatacgaggccggctcgccgaggcactacctgagggtacattgatcgatactctggtacctggtatgatgtggnctttgcaggtaataagttggctacaaggcgtggggcatcacatacatgcctgtgacgcttgggaggtcgctcgcaactcgagtgcatcacgtcacgtcgccagaaagtgacaagaatactagcagagcggctatgagggcgcgtctcgctaccgatgggtcgtcgagagggattgagtgaagcctgggccatcttggaattggggtaccaagtaaaggtatgcaaagtaggtcagggttggacagcgagtagatggatcgtggctcattcgcggtataaacaactagttccactggtagccagcgtttgtcgaactgactgttgagtcgaagctggggccatttccccgatcgtaagacactttcttgcattgcgctggaaggcgaaggtggaaacctgattctgtaaatgggggcagaaaagtggtttgaagcacaacgcgggaagtacgttgcaactggtaccatttatgggatcctcagatgtatgcgggttgggttgtggaaggttaactagaaagtagttggatgcatgttggcgaagagtagggacagttgtatgattgggaaggtggtaatttagtcacaggaagtgacagtgaggggttggtagcactgaagaggtatgggtgaggacaatgaacatgttacagcgatgatgagggaatagattagggttcaaggaaccaagtgggggaagaatttgaattggaaagggataca

SEQ ID NO: 668817 - DNA, 398 bp, Homo sapiens
gtgccttcctcagcagacctgtgactccggccctgtaagccgattctgagatgatggtgaaaggctctggcttccaggctgttgagctgctcacgactgcacctgctggggagctgcctgagccaagtgcacagaatgccatgtggaggagaaccgtgctcacctgtcaacatgtcccgatcaccagacacggaccccgcatagcatgcaccgcgagcaactagcgtgtatctataagacaggtagctgactgacctctacactgatatctagagtggcggttatacggcaggaggcattattcggaattctgccggtaagctccatgtccgatatgcgtacacaattggcgatatccaagcagggcaattggctcttcaatgttccctcctcctgcg

SEQ ID NO: 668818 - DNA, 690 bp, Homo sapiens
agggggtgccggtagttatctttctcttcctaacagtatgtggatgtggcacgctctctgtgtgccccagctcactggtggctctgtctacaaatatgcttcctttcaggtggagaacgaccaggagcggttcctgagtgacctgcattaatgaatcggcaagtgaagaaaataagagaaactacggcagcagaccgaggggaccattaagaagctacgacgtgacgaccggaaaaggcagagatgagagaagacagcacatgccaggacgaagaacaaggcggcgcgacacacacccaccaaacgacacagccggacacacaacagaaaccgcccaggccgacacagacccaacaacgcaacacacgcaacacaaacaaccacccgcgccacgaaagccagccaaaaacgggaaacagacgaccaacgacaagagaacagagggagtgaagcagaagagaagagggaggaacgagaggtggaagaaaaaggaggagcgaggagagtaaggagggacctaggcgacccggaaagccagaaaagcaggcgaggagaggaagagaagcgcacggagtaaaaaagaggtggacaagcacgcagccggaaacagagaaagaaacacatgagcgaaaacaagaagccgtcaacacacacacacaagagcagagcaaccacgcaagaaagagaaca

SEQ ID NO: 668819 - DNA, 1202 bp, Homo sapiens
  misc_feature (461)..(461): n is a, c, g, or t
  misc_feature (517)..(517): n is a, c, g, or t
  misc_feature (526)..(526): n is a, c, g, or t
  misc_feature (531)..(531): n is a, c, g, or t
  misc_feature (537)..(537): n is a, c, g, or t
  misc_feature (1154)..(1154): n is a, c, g, or t
ggtcgtactatgccctgcggcgcgagcgcggggcggttcctatcgcgcgctccgagcatgagccccacagtcgaatgggcagcgcaggagctccagaggcatcgcccgtggggcgactgtgaccggccggaggtagggccatgcgaggagcattccctccgccgaagggctgatcggcctatcgcagtaatggcgcgacgctgcaaagagcaactgggagcactttatcgccgccacggtggtgacaggggagtcgtccctcacgtgtgtgaaccggaacaggcatgaagcaaggcggtggccatctgtgagactgtccaatctgacgccagtctgacgccacttagcctagggctgctgacggccgaaggagggtagggtcacccactcctgagggaagcaccacccctatacgtaacgaacgaaggatgactgtcctctgtttcaccgggaaggcactncttcacacagtttgaacgtgcggtgcactgcgtagcgtttcacacgcagtgaaaantcgcgcaanggganagcggntgggagggaattgaaagtaactgtaatcctgcacgcatctcattgagtctcggacgagaacgcgtatacagaagcaacgcgcagggcacgcgagtgggtaagcgaatgcgggccggatctgaggggcgcggatggcattggtcgccccttcgtatccggccggtacatggggacagcggggcccgacatgggccactctcgctcgaatgagagacctcgtggagaacgaaccggggggggtcaaacgcgcgaggcgacccgggatggccctccaagtcggtacgggacgtggacgataacgaacacggcaatccgccacgcggacggcccaattcgcttgccaggtactgcgatccctaggtctcgcgtccggggggaaccctgtgaagcccgggtagcgttacccctttccaattggaagagggacttcccctgccattcgatgacagccagaacgtggcatgatcacgggcttttccgtacccggcgcgacaggggtcccgggatccggagcgaaacatattcgcgttggccggcagaaccaattcggagggcgaaggaaaacggtcttggttgcactgtagcgcggttcctgtggcgcccctggtgaaactctntttcgggagaggccacacggtggaagggacatgtggcgcccaaacccg

SEQ ID NO: 668820 - DNA, 704 bp, Homo sapiens
cctgtcagttatcgggtgtgaccgccgcggccagagtatgtctctgtgggaagattctgtcctccgtccatatgcgaccatgactcgcaggatatctctacgttcaggcagctctgggttgactactggcaaaattgctggagctcggcctgtttgtttgtgggtggaggtattggtggcactatcctatagtgccaaactgggattcccattctccgggaaagtgtatgcagaaaaccataggcttatcttcatgacaaaactctctcgaggatggttcttggtgcctgcagcttatatactgttccatatgccaccagcaccactccgattgcagtgcgggtccactaaaacatctctagtgtatcagaagtaatgaacagaatctacagaggctgcctcacaactccaagatagcaatgagggagatactccagcttcagcgaacagcaggtgataccctgtcggtcccaggccctgcggttcaggcctgaggacctcgtttccagaaaccggatcaccctgaacttggtgacggaaaacccaaagctgcgcttgtcgagaagaagcgtcctcatctactataagggagcgagcactgaagaagtggagtcgcgttgccacaggacatccagacagctaaattgggttctagccagagctaaaaagccggggaaatgaggtgtaccgcagtatgcaccaag

SEQ ID NO: 668821 - DNA, 242 bp, Homo sapiens
tgttttgggccaggagactacgttctgggacaggatctgtgctggagatgtcaccgtgaggcattagctggatgcagagaggccagtgtgaggcaagacctggggctgtctaaagctgctgggagacacgcaaggaatctggacagggaagagttgccactgaagacgaaaagtttgggcctgtgaaaggcccttggtgaagcatgtagcttgtggcttaaaagagtgcgcacatggtgttg

SEQ ID NO: 668822 - DNA, 159 bp, Homo sapiens
catgatccagcagcagtcccatatgtcatgaaccgacgggcagtaccctctctatggtacatatcggatcattgtcgtcctcgcagtgtgccggagggtacgtctctcccacggtacaatcgccgactgatccagctttcgaagtgctgattatcggcg

SEQ ID NO: 668823 - DNA, 422 bp, Homo sapiens
agcttctgggccccagggggatgggatgcacttcagttctgcattcccggcaaggctgggaagggtcccagaaggcttggaagctattgcccacccttcagagttgacagatgaggaaactgaggcccgggtggtgctatgacttatgaagaatagaaggcagcttgctgcagagtgaggcctggcgtctatgtcttttggctctgatcttccttgccattacgttaaaacagagatcccctagctcagctgaaatgcacctgtctctagaaggccccaactcatgcagtgcttttctacctgtcatcttggttcatcttgccgccttcacgttgtccaggtgaaataggaagatcgtctctatgtgaccagtgcagacatggagcagcatggctgggctgatgtgggtcctgcactcaggc

SEQ ID NO: 668824 - DNA, 860 bp, Homo sapiens
atgaaccataaccaatactaccaatcaatactcatcattaataatcataatggctatagcaataaaactaggaatagccccctttcacttctgagtcccagaggttacccaaggcacccctctgacatccggcctgcttcttctcacatgacaaaaattagcccccatctcaatcatataccaaatctctccctcacgtaaacgtaagccttctcctcactctctcaatcttatccatcatagcaggcagttgaggtggattaaagcaaacccagctacgcaaaatcttagcatactccgtcaattacccgacataggatgaataagtagcagttctaccgtacaagcctaacagaacattcttaatttaactatttatattatcctaactactaccggattcctactactcagttaaactccagcaccagagacccgtactactatctcgcagctgaaacaagctagatgactaaacacccttaattccatccacctccgtctccctaggaggtcgtgcgcccgtaactggtttttggcccaaaatgggcattatcgaagaatgcacaaagaaacaataggctcgtatgcccacatatagcacatcacctcttaactctagttctactagctagtctatccagctcaataaatatcccatatctaacaagtagaataaagccgttggacattaaaaacccacccattctgccaaatcatgcttaacagtatctactattccttattatactaagaaagaaaaaaaaaatggggggcgccgaaaattaacatgggcgggcgaagaagaacgcgaacgcgcaggctccaaaggggggggaacggggtggaggaccaacgcg

SEQ ID NO: 668825 - DNA, 1001 bp, Homo sapiens
aagacgtgattcactacgtgtgatcgtacgatggatcctagagtttgacctacgacgagagtgtgttaagtcgagtgctgctggttaacgggcgcatctgtcaatatgatcgaggccctggatgttgtaggggcaggcgtgtagggtggcatggcgcgctgtacaataacagtgtgaagactttgatcggagcgtacggagtggaagtacggtggtcctcgttgttctagcgtctggagtatcacatatattagtgtggcacccacacgtatgagtcatacagcgttcgaggaacctctgtgaagagggactctccggaacgctgtgctgagaggatgcatgacatgtccgtgttggcgcaccatcgtacaaggtaacgacactatgtgtcttgtgaactagaaaaactgtccgaaagtgaagggaagctagaaccacccatgaaaacataccccttgcgtagactttggatccatcggttgacgcaagtacccgcatgttggagaagccgcgtttaaacccgtgccggttcggtgagagaacccagggtcccggggggtatgatccttaaccttgtgtggcctcatttgatggaatacaattcggtagaagggatgcatgtcttggaccggtccacgaatgtcacttgatttccttgatattaggcttagataagccagtgcgcctttgttggggattgaaggtggtcgtagcttaaaaatttatcaggggcactaaccaagttaccttttatgaattctatccctggggcagagaaaagaaggtgtcgcgatttcccattgctttgtacgggttcaattggaccacttactaaaaaaacactctcggtgggaatgacacccggatagacgtactggaggtcattgcggggtcacaattgaacagcgctgtggtcaggggagatcaagatgactaactgttcagccggtagatggtagggtttacccgcgggtagtttgattaaactttgggcaggacca

SEQ ID NO: 668826 - DNA, 205 bp, Homo sapiens
cacacctttgtacagaggtgtacaaatgcctctatgaggatttttcctccagattctgagagtcaaagcagacccaatgtttcaggatacactccagagggtacaagctgggggtggtgaagtgagctggttgccattctgaagcagggaatagaggcattcccatttcccttctttctttcagtgaaactcagggttacagaga

SEQ ID NO: 668827 - DNA, 375 bp, Homo sapiens
ggagtctacccatatagtcgactgcaggcggcgcacattcactagctattatacccgggtcctgggtacgggcaattctcctgtctcagcctacccaagtagctaggattgcaggtagccactaccacacccagctaattataatcgtataatatggtagagacgggtttcaccgtgtatgggcaggctggtttcaaactcctagaactacgagtgatctgaccgcctacggctcccaaagtgctgtgattaccggcataagccactatgcctagcccaaattttcttttatgatcgaccaactcttcacattcatcactcactgttataagagaatcggtctctaagccattacatactcttccaatctatttg

SEQ ID NO: 668828 - DNA, 112 bp, Homo sapiens
gtctgctctacgaggatccccggcacgaggctgcggacggtcagtatttcctttatttatttatttattttgagatggagtctccctctagtcgcccaggctggagtgcaat

SEQ ID NO: 668829 - DNA, 1254 bp, Homo sapiens
  misc_feature (140)..(140): n is a, c, g, or t
  misc_feature (285)..(285): n is a, c, g, or t
gaaacaggtctgccatgacatccatgaatgcaagcgatggcaacaatggtggctgtgaaccaaacgtccatctgcaccaacactgtgggctactttacaagtgtgtgtccactgaccagtcctggtgttttccttggagncaaccagataccagggctgcctcccaggcctcggatcctgccatcatggcactcaagagccaacagtccccatgaccgacatcgcattgcatcacttgtcttctttagaactgcaagtgagtgcagatgatcctgaccagatgtnaacgttggctggcttgcggcgccgtgcggacaatcgggacatctgttgattgcttggcggaacattgtactagcgaagtaactaatcagtactgtgcataacctcatggagccaattgcatcgtgaccccatgacagtgagtatctacagcaaagcaaaatcgacctcggcgaacatctacgagagcaaacgttgccacttttagcacaccgcaaacttctgtgcgcaggcgaaacggactcgccttgattagactccgaattgtgtgatacgcggtgggaccattgtacgtttagcttgagttgattaagctttgactaaggtgagaaattccgtgagtcgaacagaaacattgttccgactgagaccaaaacattgacccatgagcgttggttttcaccccccaaacaaatctatataacccaagctattataagcctccaagtaacttaccgtagggaaatatccaagtagtattggtaggtcgaatggccctttggttgaaccaccattttgtggttccctcccagaatgagtacacctaatacaagcagtttgaaaccccaaagacagagggcgctacctagggaaattgcggctaaaagtttggagcgcacacagtggatcgcattcgcgcgtttgtgttggtataccataactcgggcaaccaggcattggagacacatagcgcggcggcagtttgggtccacttcgtccacaatatattgggccactatgaccatgatagcccacacatattgcccccccttatagaagaggcttccccccaaagaaatcgccgacgatatccatggcaactgaacggcaccacggcgtgtacattgaatgcggaccccgaggcgggacatggatgtgacatggaactatgcgccatttgtgctgacacgcagggcattaggcctcctgtgggaacaacatgtgcataccatcaagtaccgcttaaccgcc

SEQ ID NO: 668830 - DNA, 81 bp, Homo sapiens
  misc_feature (70)..(70): n is a, c, g, or t
cgctgatgcggctcagcggggtgcaacgggtggagtctgtgttctttggtggggggacccccagcttagncagtccccaca

SEQ ID NO: 668831 - DNA, 233 bp, Homo sapiens
atgtcactaggaggagggaggatttaggatggtaagtaggtacagagactctgttcaggccctgaagctgtcccttgcccttcttccccttccctgactgcaggagttatgtggaagtgtgtgtggcagcaggcagcggggaggggaggaacaggaaagcggaaactgggaggtctctgtacctaactttaccatcctaaatccttccctccttctcttctctcccctcccag

SEQ ID NO: 668832 - DNA, 1093 bp, Homo sapiens
acctgtgttgtgtccccttggtaccttgcaaagtgttccgggggcacaagctggtccgggacaccctttcttgttcccggttttagccgggcgtggtgaaagcattgtttcgcggagccctctttcggaccccttttcgaagtttttttgccctcctctgtgcggatttggggtccgctgttcccccctctaagggcaggtttttctacaccccctatttaggggagagtccgggtataaagggtaacataacccgggtgcatcaatcgccgtgtgaccacgttggtgctcgccttctggaatgaagtgtttctcccgtggggtgtctgctgcccgataatatttttcgagagaagttttttcacaccccgggggaccccaattcgggaagtttctcaacaacccctgggaggttttgtggggcccctgtgttaaggggaatgttgtttcccccgggtgcggaaccttgttgggaccaaaatgtcacgtgcttttttcggggagctcacccggcgccccctcttttgttgcgctcccccgcggctttttacccagggggatctcttggggaaccggcgctggagtgatccccgaagcactgatcccgagttaaaggtttatatgggcccaccatcgggtttttttgcgcttcccctttgaagctatttgcaccacccccctgtgaaaattgggtgagaaggttcacaaggaaccccacaggtgctttttctctgattccatacaaggttttctgggggccccattttccggccctttggggaggcccggagagctgttctcgccccaggacatcccgcaagttctcctttctggtggctggaggccgcgccatgagcccccccctttctcccccgccggccacccttccccccccagtgccctcccggctttttttggggagagaaacccctctttttgagggagatgagtgtttgcctcccgcccctgcccactatctggggacccaccggtcacccccttaccccccccaggtcactcccccaccccccaatcccgggtgggaaaccaaaccggggttgtggtggtgatatatacgacctttatcttttta

SEQ ID NO: 668833 - DNA, 244 bp, Homo sapiens
gtcgtagcttaaccaggctgatgctcatgtactgttggtcaggtagatgccctgggagagctggcacagcggcgtgtctgagtgtgtctcgcagggagtgcagcactgaagtggcaaggtgcacagcaggcagagtgtctggccacctgccagggttggtcatgtagatacagggtctccgtccacgtgctgcatgcggcagacagaacacccaagagcgccaggctgattgagcagcatgtgc

SEQ ID NO: 668834 - DNA, 1179 bp, Homo sapiens
  misc_feature (331)..(331): n is a, c, g, or t
  misc_feature (373)..(373): n is a, c, g, or t
  misc_feature (463)..(463): n is a, c, g, or t
  misc_feature (487)..(487): n is a, c, g, or t
  misc_feature (519)..(519): n is a, c, g, or t
  misc_feature (872)..(873): n is a, c, g, or t
  misc_feature (875)..(875): n is a, c, g, or t
  misc_feature (886)..(887): n is a, c, g, or t
  misc_feature (907)..(907): n is a, c, g, or t
  misc_feature (912)..(912): n is a, c, g, or t
  misc_feature (915)..(915): n is a, c, g, or t
  misc_feature (917)..(917): n is a, c, g, or t
  misc_feature (933)..(933): n is a, c, g, or t
  misc_feature (955)..(955): n is a, c, g, or t
  misc_feature (971)..(971): n is a, c, g, or t
  misc_feature (973)..(973): n is a, c, g, or t
  misc_feature (983)..(983): n is a, c, g, or t
  misc_feature (1001)..(1001): n is a, c, g, or t
  misc_feature (1006)..(1006): n is a, c, g, or t
  misc_feature (1013)..(1013): n is a, c, g, or t
  misc_feature (1028)..(1028): n is a, c, g, or t
  misc_feature (1041)..(1041): n is a, c, g, or t
  misc_feature (1043)..(1043): n is a, c, g, or t
  misc_feature (1047)..(1047): n is a, c, g, or t
  misc_feature (1053)..(1053): n is a, c, g, or t
  misc_feature (1065)..(1065): n is a, c, g, or t
  misc_feature (1100)..(1100): n is a, c, g, or t
  misc_feature (1115)..(1115): n is a, c, g, or t
  misc_feature (1164)..(1164): n is a, c, g, or t
gatccaaattcaagtattgtctaatggaggtccgtgctccagaagcagtaactgataaaattttgccaagagtcgagcaagacaattgataggaatatgcagttgcccgtgaccctgaaagtagaccttggtgttctgggaaagcagcagtgagagttggaaaataagttgcaaacccttcaacaggggaaaatgtggatgcggtagaagcttatgctacaatgctgagaagcatctctgatttcagcgcactgaaagaactactttctgggccaaaccgactgaagatccgtattgatgctatgcatggagtcgtgggaccgtcatgtanagaagatcctctgtgaagaactcggtgcccctgcgaactcgncagttaactgcgtcctctggaggacttggaggccaccaccctgaccccaactcacctatgcagctgacctggtggagaccatgaagtcangagagcatgatttggggctgcctngatggagatggggatcgaaacatgattctggncaagcatgggttctttgtgaacccttcagactctgtggctgtcattgctgccaacatcttcagcattcccgtatttccagcagactggggtccgccggctttgcacggagcatgcccacgagtggtgctctggaccgggtggctagtgctacaaagattgctttgtatgagaccccaactggctggaagttttttgggaatttgatggacgcgagcaaactgtccctttgtggggaggagagcttcgggaccggttctgaccacatccgtgagaaagatggactgtgggctgtccttgcctggctctccatcctagccacccgcaagcagagtgtggaggacattctcaaagnncntgggcaaaatnngggccgggatttcttccacnagtcntgntnacgaggagtgggaagnggagggcgcaaacaaatgatgnaaggattggtaggccngntgtttgatcngtcctttgtggggaagcnttatncagcaangaacaaatttcacangtgggagaaggcngntaanttgtantacagcgacccntgggatgggaatcatttcaacaaatcaggggttcngcttcattttcacanatggttctcgaatcgtcttccgactgagcggcatgggagtgcgggggcnacattcggctgtaca

SEQ ID NO: 668835 - DNA, 112 bp, Homo sapiens
gtagacctatggaaggcaggaggaatgagtcccagacacattcttcgtccgtcagttgtgcccaggaccatgacattacctattacttactgtcatctatatgcccatcatc

SEQ ID NO: 668836 - DNA, 152 bp, Homo sapiens
cctatgcttgtgtccaggaggtgctgccagtctcttcattacagtcaggctctgaggttggggaagtggaagtttccagctatttcatccctcatccctgagggcctagaatcagttcagcaactatactaaatgagatgatgtggcttgta

SEQ ID NO: 668837 - DNA, 221 bp, Homo sapiens
cgtgagccatcatggctgagcgcttttagagacgcgcataacgaggcttcggtgacaccaagttctctagctgtgcatgatggagccccgcagaatgagcctgcctgggatggcctgagttcccaggagctgtctggtggccctggtgatgcgccctgaggctggagcccccaatggccagaccagcctggttctgtcctctgtcctgactgtgtcccaat

SEQ ID NO: 668838 - DNA, 931 bp, Homo sapiens
  misc_feature (416)..(416): n is a, c, g, or t
atcccgccactgcactccagccagggcgacagagcgagactctgtctcaaaaaaaaaaaaaaagtttttggtcccccttttggtttggcaggaaaagaggctttggacccaactctccttttattaatattaatactttggaatattttttggtgggagaccggggtctggctggtgttggccagagctagtcttgaactccggggctcaggtgatcttcctggtctcggcctcccagaatgctggggattacaagtgtgagccatcatgctgggacctccaactctcttttactttaaaaaaaaaaaaaattcggggttaaaaaggtggtccttttttggttttcccggtttaacaacgcgggctcctggccgggtgctgtggtcccagcgttgggctcctggaaactccgcggngtttccccaaggggggcgggcctttcacgggctctctgcgccccaccaccccccagccaaaggtttcctcctggagggagacaccaggctccggaaattatttcctggaccttttaactaccggccgagatttccttaaaataaagttcttctctcattataagaaggttgtcccttgaccattttgtgctgcccatttccccggcgtggcttttttcccgttggaaacccttcaacattgtggtccgtaacgggaatctgggtcaacactccttgtggtggccgggcgcgggttcgacccttaatccaagcctgtgggagcccgggcggtggtcaccctgggaccggggaccggctgggcaaagagaacccggtttttaattacaaatttcgcggtggcctgtgttggcccgtaccagtgtgtgccgggtcaggcgggggccccactcgttgttgagctcccaggctgtggcctactagcgacaactcgttggtgcaccccgtaactcacttgc

SEQ ID NO: 668839 - DNA, 501 bp, Homo sapiens
tgcttctgaattgtcgatgtctggggcagtgctttccttacccaccagctgtttagttgcaaaaaccgctaggtgtacggatagtgtaatcattttgaatcgatgcagtagtatatcaatgagtgggatatcttcgatgaatgctctctgtctgtgtttagtgagtctctgccactcttgctgtgaagttgaggtgcgtgtagaagaaaccttttactatgtgaaactttacaacacttgtgagggcaactcaatttggtttatgcgcagtgtagtatttctccaggtatcatccaaaatgcgccacagacaaggctttggtcctcattaggggttgcctcagcgtaaccctctagggctgttctatgaaattggtgccagagttttacatcgaggtacctccgctttgtagaacgtattgtttactaatgttattgaaaccaatttctagttcatactgatgttgttggaaacagcaattaaagtttttgttccatgaaa

SEQ ID NO: 668840 - DNA, 1393 bp, Homo sapiens
  misc_feature (493)..(493): n is a, c, g, or t
agcggacttgtgcaggaggataagccggagctagtcagccccaaggtcagatcccagacttgggatcaccaaagcgagcattctgtccaatcaagtgatccgaatctgcctcgacctggctgggcctggcgccgcttgtcgggaccgggagaagcgtgatgcaagccgtaggaggccttggtatcagctgggctttaccactcctgtgtgagatcttggctgccctctgatagctcaagggcagctatccagcctatctatcgcttgtacgcttcaagcatgagccgggtgtaggaaaaaacgtagacagtctgccttcctctctggaaacctggcgggcgtggtgcacagcacctgcgacatgcacgcttcccgaaagccatcctctaagccatgtgaatcacagcatgtggacagtggtgcctcatcacctgtcatgctgcctttccaggcagctgcgcgcaatgagggaccacctgaccccatggtgggnccctactgccaaattgtgcgacccaattgctatggcacactactgacttccagggaccagtgctgaatggcgccttctgactccagaactgcgtgaacctcgctgtaagagggctgttacgccgtgcatgtgcatcggaggacgcttccgctgggatagactcgtgtaggatcactcgttacatcacacctacctcaactcgtgcacgtaccccagtgacgcaacctgggataatgtgtcctgcttcgcacgtaaggtctagcgagtggtcgagcgagcttcgagttgtgcccgggatgacgaagggaataggacgctatgagcgatttcccctttgggcaaggcaaagaaatatcgcctcaccatttggtacttgcaattgctcaaagcggatgaaaggcttaccttggaaccccaagagggtagttcccccgtgaaaaagaagcggttcgaggcgaagaaatccgcctccggggggatggtcccaacccccgggtgcgttttccattgcaagtgggcccccagttgttgggggaattgaaggaaactagtgcgtaacctcattctgtggtcgcaacctgcccgagggttggcttaatagggcgatggcattccgcgctaccctgcctttgggtggtgtgttcttttcccggcaacactggtacgcgctgacgggtacgcccctgactatcctggtacatgcgcgttgagtgcaaccggattatactttcccgtttcgcggttcccttggtgaaccttgggtcggtgcccccgcacgtggctagtgccttggagttgggttgccccctggcatgtgatccattggggcgcccgcttctcccaggtggtgaaacgggatggaggggggggacctcaccgatccgggggggcgtcctcccg

SEQ ID NO: 668841 - DNA, 430 bp, Homo sapiens
  misc_feature (44)..(44): n is a, c, g, or t
  misc_feature (61)..(61): n is a, c, g, or t
ggctgctctagagtaccccgatgacgtaatcttggccactggcnatgtggctcgtgctatnttgcaaataaagttttactgggacaaagccaagcctatcatttgcaaattgtctataaatattttcatgttacagcaatcacaccagtttcaacatgagacccatcttgtctcacgaagctgcaaaatatctcactatcttggccccttgcaagcacagtttgcccaaacctatagttttaatatacatcacacagcatcagctatctccatagcacacctatctcaccacaacaccattgtggggaccagggaccttcttttttttttggagcacggggtcttgcccctgttgcaccagcgctggacttgtagctggcatgatcagtgggctcacgtgcagccctcagccacagattatactcatcgg

SEQ ID NO: 668842 - DNA, 472 bp, Homo sapiens
atgagagagaacgtgtgcgacaaccttggggaccacctcgatgtcgcactgtctatctcagttcctggagggaggaggatggagagcgggtcgtgactgaaatcaccctgcggtggttcaacgggcaggctgtgcacgggaatgtacccgaggtggcttctgcaacttcatgcatctgcggcccatttcccagaacctccagaggcagctctatgggcggggacccaggcgcaggtcacccccgaggttccatactggccaccatccccgagagaggaaccatcggtgttcccctgatcactggcatggccgcttctgaggccctggcccccttacccttcacccccaacagggacagatgttcctggcaggacctctcctcaaagcccccttcactctcctgccccatccttcccaggctcccgggctccataatgtaatctgttcagcatggagaccttctctctccact

SEQ ID NO: 668843 - DNA, 532 bp, Homo sapiens
agagcagaaattcacattcaagcagtctggtttcagaatctgtgcttgttacaaaagaaaattttgattagtactaggtaagaaagaaatgaacagtgctgtgacagagagtactggaattttctgtgttgagggatactactttaaaggcaacatctgagcagagcactgagggatgcaaagaagccagttaggtgaagaactggatgagaggattggtgttctgggtagaaaatattgcaagcaggccgggtgcggtggctcatgcctgtaatcccagcactttgggaaggccgaggcaggtggatcacctgaggtcaggagttcaagaccagcctggccaacatggcgaaaccccgtctctaataagaatacaaaaattagccgggcacggtggcgcatgcctgtagtcccagctactcaggaggctgaggcaggagaatcacttgaacccgggtggcggaggttgcagtgggctgaaatcgtgccactgtactccaggctgggtgacagagcgagactccatctcaaa

SEQ ID NO: 668844 - DNA, 240 bp, Homo sapiens
  misc_feature (26)..(26): n is a, c, g, or t
  misc_feature (62)..(62): n is a, c, g, or t
  misc_feature (94)..(94): n is a, c, g, or t
  misc_feature (99)..(99): n is a, c, g, or t
  misc_feature (134)..(134): n is a, c, g, or t
  misc_feature (153)..(153): n is a, c, g, or t
tccctatcaatcaccgaactactttnctttttaaagtacttggttaagtaatacttttctgnggattggttagatattgtcaaatatttttgcnggtcncctaaaatgcagccagatgtttcattgttaaaaanctatataaaagtgcaagcnccttttttaaattacataaatcccatgaatacatggccaaaatagttattttttaaagactttaaaataaatgatttaatcgatgct

SEQ ID NO: 668845 - DNA, 635 bp, Homo sapiens
cttgtgtttttccttatgagcaagagcaattggttgagaccaagcgaaccataaacttgctatagtttgggagtcccctctgaaaaaaacatggtctggttttataactatcggtatgtaataaacccagaccttgttatttattgtggggactcacatactatcccatgttaaaggttcgcttggacactcaaaaatgcaattgcacataaaaaaatacactagttttccctggggaaaaaaaattaattccatagcagtccagttaaggcacgtgttttataacatcgcgactggaaaacaccctgggtttgatacaaaatgagttcaatgatacaggtgctactgtccacttaagcaaaaaaaaaatttttttttttccttcagcgtgtttaataaaatttggtcctgtttaccaaaattttttcatttttaaaatccgtctttttataaaattggtctgggctaagtaaattgtaaatccgcaccctgcaggtggggggaggttttttttaaatatcccacatgtcacggtttggtatacaatttggattggtttttggtatcctatttgggaggtggggctttcccctctggcttataggggttttctttcactcttcacctctatactg

SEQ ID NO: 668846 - DNA, 102 bp, Homo sapiens
actacaggatctcaagtatccagcagagaaggaagtttaatcataagcgcgcgaataaggagacaggggaaacctcaaatctgcctgtctgagccgtttagg

SEQ ID NO: 668847 - DNA, 620 bp, Homo sapiens
cacctgctgcagtggctgctgctgctgctgcccacgctctgtggcccaggcactgctagcctggaccacctcatccttgagcctgtagcccagtggccctagagtatctaggtagccaagagcctagggagcaaggccgtttgcagatggccaagcaggcccatagagggcaatatggccaatacaagagcacagctctgggaggaaccattggttggggcagccatgagtagacccataattgcgcaacatgaagagtggctggcacggggaccaaagttcgtgatacacaacacaagttcaccgattgtacaaccaaaaagcacattggtgccacaaaccgcggcaaagggcccacacatatataaagcgaccaaggtggaaaccaagcaagacaaatggcaccagagcgacaacgaacattgataccccaattgacgaacacggcccacaagagtacacggaattggcgaaaaaaaaccagggattccacacaagttacacgacccccacaatatggacaaaacaagcccaattgtagacaataaccaaaagtatgggcgaccaaccgcaacaaggaaaatcgaggcaaaaaaacaccaaagaaaaaagaaatgggg

SEQ ID NO: 668848 - DNA, 471 bp, Homo sapiens
gagtacagtggcgcagtgtcagcttgctgcactccccctccggggttcaagccattcttgtgcctcagcctcctgagtagccaccacgcctggctaatctttgtattttttggtagagacggggattcaccatgttggccaggctggtctcaaactcctggcttcaagtaatccccccatctcagcctcccaaagtgctgaaatgacaggtgtgagctgccgtacctggctgaataacaatttaattgtacatttaaaaataactaaaagaatataattgtattgtttgtaatacaaagaataaatgcttgaggtgatagatacctcgtttaccacgtgattttttttttttccggaggcagggtctggctgtgttgcccagtctggagtgcaggggtgggatcatggcttatggcaaactccgcttcccagtcttaagcaacccttccacctcagccggggcgaaagaaa

SEQ ID NO: 668849 - DNA, 230 bp, Homo sapiens
tttagatgcactaggtcccttgaggccaggagctgaagaccagcccgggcaacacaatgagaccccatctctacaaaacactttaaaaacaaaaatctagccaagtatagttgtgcatttctgtagtcctagctactcaggaggctgaagcaggagcccatgagttcaaggttacagtgagctatgatcgtgccactacacttcagcttgggcaacagagataccttgtc

SEQ ID NO: 668850 - DNA, 1236 bp, Homo sapiens
agcggggtgtggggcaccgggcggggccgcgggaaccggcgccccgacagtgagctgctgctgtcagatcaatgcccggggcccccgatcatcactgcgccgcgctttctggcgcctgagaacttagcgttcccggttattgccatgatgacttggcctcggcgcttgaggctggggtccgggccctccactccgcgtcccgtcctgcgcgcgaactcgcggtcgcgagccactgggaggcaggaggcatctgtccgccgtgcggctgggctgcaggccgagagcgcgcacgcgtggcagaacgctgaacccgtgggcgagtcaccagcggcatccgtatgatagtcttgccccaggggtgtgagcttgaggtgaccagtcagtatggaaggagcctcctgcatgagagcgtcatattgactggctgcctgggaacaacagacgaaatagacgtgtgcgtgaatgcgctgaacgaatgtcgaacgaacgtgttagcctgattgaccaatgggcttcctaccatgagatcgcgagtggtagaacgcatcggactgacgcacgatccacttccacgtggggaatgcatggctaattttatacaagaccaattcttcgaagatgctggaacgtgcacctcatcgaggccaaatgttctatacccactggatagttgcgaactctccgttagggtgtcgaccccaacgtcctggggcatggaccccttggggacgggactgatggagcaccgattgacatgccccaggtggactgcatttcaagcccgaggaagtaatgcgccttcaccagttatggaaccgttcgtgcggccagctggttgggctgatttccgcaagacttgggagtgtccactggccacaatgagcgaagttgcgcgcaaaaagattaaggcgcgtatggttcattaaccaaagagagcctgggcgggaaaaaaccgcacgttcactttacgtcccttcggcagatgcaccaccttgggaggcacgtctggggatatcgcctggggaaggcaggacagcgctgtggtatacgtgggggcaatttattgtctctcagcgtgcaccaacccgttttgactggggcccttagttttaccccgggccgtgtgctccaggtgtgaactcccacacacctggtggtggcctttgtggcccccaagtgtgcggagtcttggtcctgtgtgcgccgggggcgtattgcgcgcatttagtgcccccc

SEQ ID NO: 668851 - DNA, 920 bp, Homo sapiens
  misc_feature (577)..(577): n is a, c, g, or t
tcagcttcttggcatgtacatattcatttgtgagtgttaatgtgctgctgttttttgttttttggtggttttgtttttgttttttttgttttgagatggagtcttactctgtcgcccaggctggagtgcagtggtacgatcttggctcactgcaacctccgcctcctgggttcaagtaattctcctgcctcagctttccaagtagctgggattacaggcacccatcaccacacccagctaattttcgtctttttaatagagagggggtttttccatgttggccaggctggtcttgaactcctgacctcaggtgatccgcctgcctcagcttcccaaagtgctgagattacaggcatgagctaccacgcctggcccgtgttgctgttttaaaggtgctgccatgttcccccatcttttttttttttgagatggagtctcgctctgtcgcccaggctggagtgcagtggtggcgatcttggctcactgcaagctccgcctcccaggttcacaccattctcctgcctcagcctcccaagtagctgggactacaggcgcccaccaccagcctggctaattngtattttagtagagatggggtttcaccgtgttagccaggctggtctcgatctgaactcatgatccaccgctcggctcccaaagtgctgggattacaggcggtggaaccaatggccggcttcccctctcattatgatgccctctgggcaggcgaacggctctgggggtctttcccactggtctaccaaggccccgtgaatggccggcgaaaggaggaataagatggttgggaacggaagcggtgggcaccggttggaggatttctattcttgtccacagcggaaggtatagcgtgtcaagacttttttgtaaacgcggaaatggaccgccaaaaaggtggctta

SEQ ID NO: 668852 - DNA, 419 bp, Homo sapiens
  misc_feature (39)..(39): n is a, c, g, or t
  misc_feature (275)..(275): n is a, c, g, or t
  misc_feature (283)..(283): n is a, c, g, or t
  misc_feature (346)..(346): n is a, c, g, or t
acactggacacgtgctgcttctccttgccttccaccatngatatagcttcttgaggcctccccagcaatgtggaactgtgagtcaattaaacctcttttctttataaattactctgtctcaggtatttcttcatagcagtgtgagaacggactagcagaaccaccatttcccttggggagctagtgaaaacatatggcaactttaagaagggaaaaggaagaaaaataaaacataccctctaaatccgggggaggggcaagaacactgagaaggncatactgncaaacccaggggcacagtaactgcttaagactaaggcttaatcaggacatacccataacttgnctctcaccaccagactacaaagcatagagcaacaagtaattgcactatactaccgggagagggaccagggagt

SEQ ID NO: 668853 - DNA, 1517 bp, Homo sapiens
  misc_feature (819)..(819): n is a, c, g, or t
atgggtagaaataggcgacggatccagctaggacgctggtctagtgtcatggcgctcacgaaaagacatggaatacaaggcatctcactacgcagcactgatgacaaatcgtggcttctgccccacgctctcaggactatgacctacgacacgtcacgagactacgtgctaccagattcaggactgacacaggagcctgggtgtcccacggataaccgctcccgcgagcaccgatgtcatacaacgagacacatcacagtgcgaggacccataccgagcccgagcacacccgcaggaccgcatacagaacacatcctgctacgcactactcactgataccagtacccaggcacttagcccacgactcctgcgcacagaatgagagacaaacaagcaaaagtacagatgagcgaagctagcagctaagacacgaggaacaccacgaaaagagcgacagacgaacaggacaaaacagaccaacaacaacaaagcaacacacgaagcaacgaaggatcagacgcccacacaagacgacgcgaagacccacgcaaagcgacccgcgcaaaacacacagacaccctccccatacacaagagaacaacacacaaacgaacccacgaacaaccaaacccaatcagaaacacaacccacagccccaagccactcgcacaccagcacgcagacagaccaacccaccagcgccgccccaccagcaccatacccgcagcaaaataagcaaacagaacgcgacatcgacagaccacacaacaacgaaccacgcggacacacacaagcaagcaacaacacccgccaaacganaagaacacaaaccaaagaactagaccagacccaacccacaaactccaacacagacacccaaacaccagaccaccaaccccgcacatacccacgatgctaacaagaacgaaaaaaggaaaccataacaaacaagacatcgcgatggaagcacacaacacaccgccacaatccaagacgcacaagaacaaacgaacaagcagaccaaatgtagagctcacaagacaaaacctacgaaagacatagccacacaatcacacaagagaccacaaacacacgagactcgcactcacacactacatcatcaatgtcaccaagcacgccacaccacaccactcatcccaccacagcagtacatcaaaacaccaccaccagccgcaaacaaaaaaaaccacgaatccccacaaacaactacagatcacacaacgcaaccacaaaacccaacacacacaccatgcaactcccaacaggcaaagacaaacaacacacaaaaaaccgacagatagagcaacacacaccacagagacagacacaaccatcgacaaccacaaacgtcacaagcgacaaaacacacagaccagaccagcaacacagccagctatgcgatcaatcatacaccgaccagaaccacacaccacgaccgacagcaagacaacacacaaacacaccatgacatgacgacagaacaccaaaaaaaccga

SEQ ID NO: 668854 - DNA, 143 bp, Homo sapiens
gttcaaataatgatcgtgaacgtcggagagcctgtgtggctacaaaaatgttgagtcgtaataccgtcggaaatggggaaagcctagtcgaagtactctgaggcttgtaggagggtaaaatagagacccagtaaaattgtaat

SEQ ID NO: 668855 - DNA, 394 bp, Homo sapiens
  misc_feature (9)..(9): n is a, c, g, or t
  misc_feature (25)..(25): n is a, c, g, or t
  misc_feature (56)..(56): n is a, c, g, or t
ggaagaaanattccccacaacaaanttaaatatgaaataggcaagggaagttcatngggaacccacccttagcgtttgcccaacccattgttggtatcaaaagtactgtcccaattatgtcgtggtgattaaacctatgtgatatggttttcccataaggaataacagttggctgggcatgatggctcatgtctgtaatcccagcactttgggcgactaaggcaggcagatcccttgagctcaagagttcaagaccagcctaggaaacatggtgaaaccccaactctacaaaaaattagccaggattgcctgagcccaggaggtcgagactgcagtgagccatgatcttgccactgcatgccagcccaggtgacagagtgaaaccctgtctcaa

SEQ ID NO: 668856 - DNA, 147 bp, Homo sapiens
ttatctggtactgtgtgcagacattcttctgcgagctttacacctattccttcctttaaactctcattacccctataaggtaaatacgtttgagccttgaacaatgccgaagttatgggtgtccatcctcacacaggcctttaggta

SEQ ID NO: 668857 - DNA, 353 bp, Homo sapiens
gaaaaccgtggcgtaataaaatacaaaaatagccaggagttgtgtgcgtcatcccagctacctgggaggctgaggtaggagaatatgcttgaacctgggagctggaggttccagtgagccgagatcgcaccactgcactccagcctaggcaacagagtgagaccccatctcaaaaaaaaaaaaaaatggattctatcccaaaagaaaacaggtgaacaagccctcctacctcgggaccatgcacaagacaagaaatactagccatttataccccttccagggtgcaagtgaggccataagccaccacggtatccggcctccaaatgtttccacactttggccctggctcatct

SEQ ID NO: 668858 - DNA, 147 bp, Homo sapiens
tgaccctagaggatcccaagctccaacagagaggggactattcagtctggccactccgcaaaacagaaaagaagtggcgggtgccggccactcagtaggctctgctccgattgcttgctgaagactttaacaagtttgggaggtcaa

SEQ ID NO: 668859 - DNA, 332 bp, Homo sapiens
tattccgatacttagtccagcgctggttggagttgagcgagtgaatgggcagagtacattagcccactgagtcgctccacctcctctttctctactagtaagcagtgcacgggctctgcatgaacagggagtgaaaaccacaggaagtaggcaaccctcaggcctttgctggctgtaaggcagtgatgctactggaggggaagtgggaggcctgtgaaacgccctgctccgctcagtcaaatctacccacgcccccaggcaggagcctgtgaccggctcctgggtcacctgctaacaccctgaatctgaccaggctgttcctgctgaaattc

SEQ ID NO: 668860 - DNA, 212 bp, Homo sapiens
tccacacatgcttccggaaccaaggaaaaaagaacaaatattgtaaccaaagctcatgcttatagctatagtcactgaggaaatcacaagggtgatgggaataatgagccaaagcatggaggaggaaccccaatgcataaatatcatcatcacacagggactaagcagatgatgaggtgcagatgcatccccaggatgggctctaatccaac

SEQ ID NO: 668861 - DNA, 507 bp, Homo sapiens
  misc_feature (9)..(9): n is a, c, g, or t
  misc_feature (159)..(159): n is a, c, g, or t
  misc_feature (207)..(207): n is a, c, g, or t
  misc_feature (226)..(226): n is a, c, g, or t
  misc_feature (251)..(251): n is a, c, g, or t
  misc_feature (263)..(263): n is a, c, g, or t
  misc_feature (269)..(269): n is a, c, g, or t
  misc_feature (279)..(279): n is a, c, g, or t
  misc_feature (307)..(307): n is a, c, g, or t
  misc_feature (318)..(319): n is a, c, g, or t
  misc_feature (341)..(341): n is a, c, g, or t
  misc_feature (345)..(345): n is a, c, g, or t
  misc_feature (350)..(350): n is a, c, g, or t
  misc_feature (356)..(356): n is a, c, g, or t
  misc_feature (363)..(363): n is a, c, g, or t
  misc_feature (387)..(387): n is a, c, g, or t
  misc_feature (396)..(396): n is a, c, g, or t
  misc_feature (403)..(403): n is a, c, g, or t
  misc_feature (441)..(441): n is a, c, g, or t
  misc_feature (456)..(456): n is a, c, g, or t
tccataaantttttacagtttacagcagagaacaaggtttgtttctgcgcatgagtgtaaaagccaaaccaaactttattattgcaatcacacaaatactgcaattaaaaaaaatcaaagagcagttaccccaatgcaaaaaaacagggactgccagantcaatcttagaatggaaacacaaacacactagccccaaaccctaaaanagagattcacaaggaactnagctgacgaacagacgcagcagggnggacaccatggncttggnaccttagggngctcacttagaaacctgacttacgaaanatcagccatcnnagtttacaacttttggttatanatgntaccntgatgngccagtngttagggtgcgttatccatttgtnagctttganccctggntctttctaatgttcacccatgaagggcccttgttttgnctctaaatggtggtnatctgggggagctgtcttcagggatacctaagggatcttcagagctaaaag

SEQ ID NO: 668862 - DNA, 812 bp, Homo sapiens
tggtgtcctgtgggtggacgtggttggtgattgggaggatcctggtatacggtaacagggccaaatggcagatcttcgtgaaaacccttaccggagacatcaccttgagtgtgtgagcccagtgacaccatcggaaaatgtgaagtggcacgatccacggataaggaaggcattccccccgaccagcagaggctcatctttgtcaggcgaagcagctggagagatgggcgacgtctcttctgagctacaacatccagaaggagtcgagcctgtcacctggtcctgcgtctcgagaggtgggatgtagatcttcgtgaagagcctgagctggggagagcatacaccctgtgaatgtggagcccagtgacagcatcgaaaatgtgaatggccaagataccaggataaagaaggaatcgtctcccgagcagcaaggacatctttgcaggcagcagctggaagatggacgcactctttctgactacaacataccagaaggagtcgacctgcacctggtcctgcgtctgagaggtggatgtagatcttcgtgaatagcctgacggcgagacagcaggctggacgttgagcccagtgacatcattcgacaatgtgcatggccaggatccatgataggtaaggtgattcgcccggacagcaaaggtccacaatgtagggagcaggggaaagtgcgacactctggtacaacattcggagaggacctgtcagtttgcgtggggtgttacaccagtttcggggcaagtggtcttgagcttccatagtaatctcgagatacgcgtaggtgtgaaactgcttgg

SEQ ID NO: 668863 - DNA, 437 bp, Homo sapiens
gtctgtgagggtgttgccaaaggagataaatattggagtcagtggactggagagggcagacccaccctcagtgtgggtgggcaccctcgaatcaaccgccagtgcggctaggttaaagccgacttgccgagtcttccgatcatcatctttctcttgtgctggatgcttcctgaccctgaatatggaactccaagttcttcagcttctggacccttggacatacaccagtgatttgccgggggctctcaggccttcaaccacagactgaaggctgcgctgtcagcttccttccctacttttgaggttttgggactcgagctggctttcttgcttcacaacttgcagacagctcattgtgggacttcactttgtgatcatgtgaataatactccttaataagtcgacgcggcccgaatttagtagtagtaggcggccgc

SEQ ID NO: 668864 - DNA, 1299 bp, Homo sapiens
  misc_feature (1299)..(1299): n is a, c, g, or t
ttcttgattcctggctccttctcactgtctcccccatcagaccacgccggcctgcagtctgctcctgctgttaccaacacactggctttcggctgaagcatttctgtatacttgtattactagctatctgacactttactatgagcttttcacgtccagcgccaacgctgcttactactgctgctgctgcgctggctggcactaggccttgcggccttagcgctctctctacacagctgacaaccttgctgggcgcagctcaacaactctacccctcactagctcccctggaagctcagctacggacctctggcgaacctcgtgcactcactcacaccactcccaagaacttaacccctgctctcctctctctctccctttgccactctctactctctactctctaccctctacatctatagcacccggaaggctccttcggcgtacgtgcgtacagccccccagggcgcttggcacgccttgcgcacacgtggcccgcccgcacctccatgtgcgccctttcaggcgtgcccacaggcgcatcccaaccccgtcccccaagggcttctcccactggaccgcgcgttcttacctctgctggcgccctttccacgtcgcgccttcctgtgcgacgcctacgccctggcgggaatccttaccgcggcccggccccaaccccacacccatcgccccgtggcgcgccttacactcttgtctcgctcgtactactctagtgatttactatattagcggggcgtattatttctacaagccagccgcctaacgacgacgcaatcgtgcggccggcatctctaccacccgcagagtggtcgatataaggccccccgacgtgccaatgctggcgccctcctcctcaggacatactcttatccgctgtggtaaacccctctgcggggtgaacacctctaccaccactcctcgtggcgcccccttccggccggcccctccttcccgccccaagaagcacgtgcgtgactgcgtaggagccacggatatttcacaaccagcaggcggtcgtcttgttttgaaatggtcccacacaccagacgggccgcaccccacgaaggcccccccttcttaccgcacccttcgagaaagattcctttcaaccaacgatccccgccggaggggcgatcctttcatcccccacattcctatatataacattgctcgggcgcagaggagggccaccccaatataatggcggccctaccaacgcgatcatacagtttgtagcaaacagcacgttttactacacaaactgcctgactgaccatn

SEQ ID NO: 668865 - DNA, 116 bp, Homo sapiens
actgtcacaagatgtagtccaaatgtacttataaatcttcaaacactggcattcacatacggtagaagatgaaaaatccagtgaaacagattccaaaaattcaggtattgggatgt

SEQ ID NO: 668866 - DNA, 654 bp, Homo sapiens
  misc_feature (126)..(126): n is a, c, g, or t
agtggtggcgggtgcctgtagtcccagctactcgggaggctgagacaggagaatggtgtgaacccggaaggtgtagcttgcagtgagccgagactcgcgccactgcactccagcctgggtgacaangagtgagactctgtctcaaaaaaaaaaaaaaaaaaagaatacacatttcccaggcagcattgggtccattcctattttccctcaaggtttccaaaaaacaccacttcttatgtttgggggccaccattggtttcttcttccgaaaaaacctacagcaggctgtggacgcagtggggttcacaccgtgtgtaattcccagacacttttagggaggggcaggggcattgaggactcacttttgagcccattgagtttcgaaaccagcctgtgggcaacaaagttaagactccattctgttccaaaacaaacaaaaaattacgcgtggggtggtcggcagggcgagcggggaagaatcacgcgccttggtaaattcccagcgcactttgggagagggccaacgggtggggcgagggaccattagatgtctccgggaagattgggagagaccattcggcgggttaacacgggttgaaaccccggtctcctattaaaattacaccaaatattagccagaaggcgggcgagatc

SEQ ID NO: 668867 - DNA, 419 bp, Homo sapiens
tggaattgtctcctcctcattctaactcatgagaaaagaaaaagacacaagagaggcaaggtctcagctgccacggatttggaaataactgttaaataagggatgcacccccctcacagacattgtccattctctccccacacgatgcttgttacaccttatatatattttaacactggtatacataattaatgtaataactttacctccagaacaaaaatttctggaggccatgaccacgtcttatatatctctgaatcccacgtaacacagcacagacaagaaaaacaaggttgagatggtcccatcctattttatctatcattttatcaaatccctatttctatctggcactcatcaacagcagacacccaggctccaaacacacagatggcctatacctgactgcttcctccttt

SEQ ID NO: 668868 - DNA, 159 bp, Homo sapiens
cgccgttggagaatgtgcgttcctgcctgctaccaccactcggagcagaagccggctgacacccctcggctggacacccctcgaagagagggcgcttccttgagtaggtagggctccccttgccgcttccctccctatcactccatactgcgggtgggc

SEQ ID NO: 668869 - DNA, 1681 bp, Homo sapiens
ggcaagaacgatgcgccttacgaaaggcggcaaaaagggagccaagaagcaacagtggttgatccattgtgcttaagcacaagattggtcatgacatgtgagacagctcctgcgtatggtccacatgataagtaaactattggtaaagacgctcggtcaccaggcaccgcacggcaaccacccatcggcatctgaaatggtcctctacagggtcggtgctgatatgtggaacggtggaggtcttctgcatgcagtatgtgccaggacactgcactgagagctgagcagctatcagaacacacagttcctacagcgtgcaatatcacctgaacagcatgattccagcggactcacaagacacctaggcgcgtgaaactacaacgttgtctctagtggctcaatgcgatactccttgcacccgccgttggccaccatcctaaatggctggtctcacaatagggatgcgtggactaacacatggggctgacgcacccacaattggcaagtttagaacagaccttcatacggatttcggccatcgcttcccacaccgaacacttacctccggaacttgggttactaaccaactgggcatcttcgggttcatccggtttgccttggttcgtgtgacagagggcacacataacgtccaccacaagagacacccctgcaaaaccacgaacaatatcaaatcgcaattcacctgtggaccaagtgacaccacctatccatatagagtaggacttaccaaacgatccacctgccaaaaccgcaccggggttgccacgggcgccaaacagacatcgcgcggcgacagcgacaccagcacctcgacctcggagaatacacctccactctcgaacccgccccgcgaccggaccgaggtaggacacccgaaccaccagaacgttggaagacgtcgtagaaacccagaacacggatcgggctacacaacatccaaacagcgttcgaggatagtccccacgacaccccagcccacctctggcggaacacaaccggcacccatttacggaacacacacagcggcacctcgtggcccccaaaaccactgaacttcaggagctcacgcggcgcgtcccccagatgccacctgacacctccacccgcactacagagagcacacagttccagaacaacatcgccctagaacaggcaacacgcccccgcacagccgtcacggcacacctccgcggcgcacaacagcccatccactgggccagcgctgatccacctcgacgccgacaccccgcgcaacgccacgcgttcccatgcggagaacagatgccccaccctggggcgcacacgcaccacccacggcgtggcacctacaacgactagccaacgacagcccggcatgcggcccccactgccaccgccacgcgacagatatcgacagaaagaagatcacgggtcacaacgcaatcacgagacctatcaccacaccacggggtcgagaccaatcagaacgagggcgcacatcaaggcagacacggggcatgtggcgaatcacgacgcccgccgaacgcacgccaacaaccaaactgacgctgcactcccagtaaccacggcgacgcgccacagaggacaccacccagcactgacggacaccacgacgaacgaatcgacgcagacggcggctcccatcacacgaggcgacgac

SEQ ID NO: 668870 - DNA, 140 bp, Homo sapiens
  misc_feature (21)..(21): n is a, c, g, or t
  misc_feature (39)..(39): n is a, c, g, or t
  misc_feature (52)..(53): n is a, c, g, or t
  misc_feature (56)..(56): n is a, c, g, or t
tagaatcgagctggtcccganggggtggggcaggtgganataactgaatcanngangcgtttcccccatgctgttctcatggtagtgaataagtctcatgaggtctgatggttttataaatggatgttcccctgcacatg

SEQ ID NO: 668871 - DNA, 652 bp, Homo sapiens
  misc_feature (32)..(32): n is a, c, g, or t
  misc_feature (79)..(79): n is a, c, g, or t
  misc_feature (93)..(93): n is a, c, g, or t
  misc_feature (106)..(106): n is a, c, g, or t
  misc_feature (150)..(150): n is a, c, g, or t
  misc_feature (152)..(153): n is a, c, g, or t
  misc_feature (158)..(158): n is a, c, g, or t
  misc_feature (160)..(160): n is a, c, g, or t
  misc_feature (189)..(189): n is a, c, g, or t
  misc_feature (191)..(191): n is a, c, g, or t
  misc_feature (196)..(196): n is a, c, g, or t
  misc_feature (206)..(206): n is a, c, g, or t
  misc_feature (226)..(226): n is a, c, g, or t
  misc_feature (459)..(459): n is a, c, g, or t
  misc_feature (464)..(464): n is a, c, g, or t
  misc_feature (640)..(640): n is a, c, g, or t
cccaaaaaattcgcaaaaaggaaaaaaataanaaatccagaatttgcaggggaagtgaaaatgtaataatgtgatgaantaaaaggaatcctnatctctggaagcngggaggaataaaaagtcggtgtaaaaagcagcggcagggacaananntgacnanaaggctgggtcccagaaaaaattaaaganangcagnagctgaggcnccttctctgaaaactatttnaattgcacagtggccatagaaggctccatttgcatggtaatatctctgcagacaatttgtccacaatgaaaataatagcaccggcatcattgctttgggctgcagggaggacaatgacccaccatgaaaagagttaaaaagattctggggaaggggaaaggcaggcccacacggtggcaattcaagatcttttggatgccgtgagcgtgttctttaattaagcccctcttctncagcncatcctgcagaaacgcacctgcttcccatctgccatccaaaacggcaagcacaagaatgacttcacactgtcactttcagagttccgctgtggcccacagtgatttttcaagaaaggcagccacagactcgctcgcgctttctctttctcctttcctctgaaagactctataaaanccacattaaaaa

SEQ ID NO: 668872 - DNA, 132 bp, Homo sapiens
  misc_feature (105)..(105): n is a, c, g, or t
cttatgaggcagagggacagcgggcgcagaggtatagcttgaagtggcagaaggtcattcggggcgggagacctgagcctgctgagaaatccttttagcgccagnaagccccacccaggccctgtcctgtgt

SEQ ID NO: 668873 - DNA, 1103 bp, Homo sapiens
  misc_feature (352)..(352): n is a, c, g, or t
  misc_feature (413)..(413): n is a, c, g, or t
  misc_feature (457)..(457): n is a, c, g, or t
  misc_feature (503)..(503): n is a, c, g, or t
  misc_feature (520)..(520): n is a, c, g, or t
agcggctaatctagtgtacctaggcccgcggccgtacgggtagtagagctagcgccgcaccgctactagagggtaacgtggcccaccgctacctatacgcggtaccctgccgccaccgtaccacgctacagcgtagttagagaagataaagagggtacggaacagctgccaacgccggtcaatattatagctgagccctgttacattgggtggtaacttggctatacatctgtcgagctccgcaattagtactaaagtagaggcgccaactagcatgagtctttctatcatgttcgaaatcaacgaacttaaacggatccattttgatatcatcaaaatgagttcgcaatgntaaccaaatctcaggatagatatctaataaggctttatctataaatatcggactcggaaanataatgctattgatattatgattgaggagactatctacattttnagagacaaattaggcttgtaacattttatctgggctaacaagaagncaagatatcaattgganaagatcgttccactttctatttgacagggattgtctaattcattcaaacctctataccgatcagcgcgattagagctcgggagattcaacgtatctgaaatcacccggacagaatttcggacaacaatgaaacatatgcggcatggaacatagtgggtatgcacaaactcaatgttaaacgaataccaattgggactgcccatggtaatgcacacatttaggtcatttaatgtgatcaaggggtcagggatttggaaactttacttttttaacttttaaggaatgttctcaaatgtttcactaaaccgaaaggggcaatcttgaaaacttgataacggaatatttttcattctggaaaattgtgggttaaacggatcgggtgattcgcttaattgcgggatttgggaccgactttttctcttcggattcccatggacgggcccccactctcctcttgggggggggaggccctattcttcttgggcaatttactgccgtcatcgttcctacttttaacgcgctcccttggtcccccttgccttctgccgcccggtcaaaccggcgactcgcaccgaactcgcct

SEQ ID NO: 668874 - DNA, 238 bp, Homo sapiens
tatctgggactacaggcatacacacacacctggctaatttttttcttctttggtagtgatgaagtttcgccatgttgccccgactggtctcagactcctggactcaagtgatccacctccctcagcctccccaagtgctgggattacacacataagccaccgtgcctggccaaggatcttaattttcgaagtttattttccttgcaggttattgaggacatacccgtgccagccatag

SEQ ID NO: 668875 - DNA, 672 bp, Homo sapiens
  misc_feature (385)..(385): n is a, c, g, or t
  misc_feature (670)..(671): n is a, c, g, or t
ccctgatggggagagagggacagggcacacccccacaccacacaacccaccccccccccgccggcctgtgcccttttcaatacactgcacccgcaccaccccttttcccccaattgaacgcgcggggcgtcgcacccaaccacaatttattgtggtttcccccactcattcagccacccccattttttacattttattcctcccgccctattatgttgtggtgaatttgggcgccgataaacaattccacacagggaaacgcttatgacttgattacgatatttaatccgcctcactatgagggaatctcgccctcgagcccaagaatccgccacgaggacgacctacccacaggagaacatccctctcgcaaaggtctccttcntccccctccagagggggagaggagaacaccaaaaaaaaccccctgtgtccacaccccaattccttccttcttggttgtaaaccccccgggtttttataaaacccccccgttttttacccaaacaaaaacgttatttttgtgtgttggctcccccactcccctctcccaccctacgggaggaaaagcagggcttacagaaggtttttccttcaggaggaagcaccacaaaaacccctctgagtcaaggtgggggggaaaccctctcaataaacactttttggtttnna

SEQ ID NO: 668876 - DNA, 950 bp, Homo sapiens
ggtcttcaggagacctcagtggtggctgtgagagctacctagtcaacctgtctctcaatgatcaacgatggctccagtggggcttcagaccaggataccctggctcctctgcctggggccacgccccgtggcccctgctgcccagcgtttctcctaccagtaccctgccccactacccctacatgccctgcagcctccaccctaccatgagctttcatcttacacctagtggtgggggcagtgccagcagccagcatagtgagggcagccggagcagtgggtcgacaacggagtgatgagaggggcagggcgcacggggacgcgccgcgaggagcgggcccccgagtccaagtccaggacatgtggcagatgagtctgagtccctccagctcgagggggcagacttcggcggggtgggggaagcaagtgggactagcgatagggtggccctcctccatccagaggctcagaactaggagagtgtgcccctaatctccgagaccaggccaggtctccatccctatggaccgcgcatcatggaatggcacttacgccatgcaaagtccaggattggtggtcactgattgccaccaacatccaagcatccaagtccctccagcatgctgcacataacagggagaattgtgagcacttgtgagctctcgaccaggagaggcctggttcctcccccttccctcaggggtagaccaacgggacctttcgactgattcgtcaaggcttagtattcctcataacgccttatacgaggggttaagaacaagaagtcaccttaacatttgtgaaggggaactgtatgcaagtagaggcttagccctctatataatctgaaggaattcccatcgcatggggccccgtttgaagccccggaatgatgactctcctccagtagcgcaaaccgcctttgcaaggtggggatgagccagggaacg

SEQ ID NO: 668877 - DNA, 104 bp, Homo sapiens
gtacgtgtgtagagtaggagtagctctgatgctctgaagtcacccccagcacaaccccaatggcaaaaattcctttactccttcatagatattgctcgtacaca

SEQ ID NO: 668878 - DNA, 899 bp, Homo sapiens
  misc_feature (373)..(373): n is a, c, g, or t
gatgagctctttcagaggaattaaccccctaaatgaatgacttgagcagctgattatatgcgactcttgcctactgccgagtacagacctaattcttcgcccgacgattgggatcgtaacaagcgtctacagtggcaattcgatcttacccgtgtagtatccgcctaggcacttgaactgcgcattcgcacacagtacaagccaccacgcggaacgtatttgccatcagtgcgacttactgctgagcatgccaacctactgagctgtccgtctaaacccaggctcgttatatgcaatctaattcagcacacaactagtcgacatcaggaagaagcgatgatagtgaagttgggtcatcgaacctctaatcccngaatgcgcgtaatacgacaggctcggaatggagacagtccatcgcatgattgcgtatgtattcatagctcttctgtcacattgctacaaatccgagggtcagtgagtgcgcgaaagcactctacaggggaaatccaagtgtctcatcaatcactttccaaggcaaaaacgcgtgatacacatgagtgcggggaattatcatttgcatccctaggcatctcgacagaatgctaattaaggcgaacaactaggactcggaaatacgagccaaggggcacataatggctccccctccggaacaaaattaggaaaggggaccaaaccactaaatccgattgccccctttgaggtgatggggcggccgattcgaaagggcaccacctatatacaccattatgaccatttttagaagattcaatccaaccgcgttgtactttctggttaggcttaattggagtttattgggtcgcatcaaaagattaccttaaaaagtttaacaacgaatccagacacttcgtttgaaattg

SEQ ID NO: 668879 - DNA, 372 bp, Homo sapiens
aaaaacccccccccccaaaattaaaggggggttttttggcccccccccccccccaccgggggagccttttaggggtataaaaatggccccccccccccccagatttttccccgggggaggggggggatttttcccctttaaaaggcccccccccccccggccctttggccaaaagggtggggggcccctcaaaaaaaagggaaaaggcaagggaaaccctgtgcccctttttcattgcccaggggggggggcccccggggaggggtttccagttcccccggggcccgcccctgccagttttttggcaaggggggatttttctgggggggtttccgttgggggtttggggggggggtttttttttttttttta

SEQ ID NO: 668880 - DNA, 202 bp, Homo sapiens
  misc_feature (72)..(72): n is a, c, g, or t
ctgagggataacagagtagtagatacagacggtacagaaaccattcctgtactcaatgagtgctctcccagnattcccattatctatcattatgtaacaaattatactaatacgtagtggcttgaaacatccatattattcttccaccatattatgcggaacagcagtttggaaagggcatggtggagtcaggtgatatctg

SEQ ID NO: 668881 - DNA, 790 bp, Homo sapiens
ggtcaacggattgggtcgtatgggcgcctgggtcaccaggctgcttttaatctctggtaaagatggatatagtggccatcaatgaccccttcatagacctcaattacatggtttacatgttccagtatgattccacgcatggaaaattccatggaaccgtctaggctgagttaacgggaagcttgtcatcagtggaaatcccattcatcatcttccaggagcgagatccctccaaaatcaagtggggcgatgctgggcgctgtaggtacgtcgtggaggtccactggacgtcttcagcagcatggagaagggtggggctcattcgcagggggggagccatgaagggtctctcatctctgccccctctgtgtgatgcccccatgttcgtcgatggggtgtgaaccatgagaagtatgactaatagactcaagatcagtcaggaatgcctcctgtaggccatcaacatgtcgttagcgaacccctgagcaatggtcagtccatgacaactttggtatcgtggaaggactcatgagcacagttcatggcatcagtgacatccagaagactgtggatggcccatccgggaaactgtggcgtgatggcgcggggctctccagaacatcatccctgtcctctactggtgctgcaaggtctgtgggcaaggtcatccctgagctgacgggaaggtgactgtcatggtcttccgtgttcccactgcaaccgtgtagtggtggacctgaactgcagttagaaaactgcaaattgatgactcaaaaggggggaagaggcg

SEQ ID NO: 668882 - DNA, 154 bp, Homo sapiens
tgactctaccggatcttaatatctgcacccacagcgacatgtttttttcttactgactattgtccagaaacagttgcttcgttgatatttttttattttctggtaacctcatatacagaagcgatgttttgaagtccagattaaggttccggga

SEQ ID NO: 668883 - DNA, 373 bp, Homo sapiens
tcctgtgcttgtcaggtctggatcaggtgtctctctgaagttagggacactcttggcccaggtgaggatcacggtggtctccccgggtcaggtacctcttggcgcaggtgaggatcatgtggtctccctgagattgagaccctcttggaccaggtgaggatcacgtggtgtcccttagcttgggaccttcttggctcaggtgtggatcaagtggtctccctgaacgtcaggctcctcttggccaagtgaggatcacgtggtctccctgaaattgggaccctcttcgcccacgtgaagatcacgtggactccctgagattgggaccctcttgagccacgtgaggatcatgtggtctgcctgagattgagaccct

SEQ ID NO: 668884 - DNA, 207 bp, Homo sapiens
ctgactacggcggaagcaccatggttggactgactgcaggcggagggagaaaccgagccaagagtctttatgaggcttctgcaggaaggaacaggcatagcagggtaagcaggtttaggatcagctagtttgagtcattatagcaggctctgtggcccaggtctgagactagatgctaggagcctggtcccacaatgatgagggcat

SEQ ID NO: 668885 - DNA, 411 bp, Homo sapiens
aaaaatttttaataagacaatttcaataaaaacacatcatattatttaatatttttcaacactaacataaatcaaattttttaaaaacattccattgtgaaacataagttataaaccggttgaagtcacaatctgctaaaaatctaatcaacacataatctccaacagaagttgcaccagtgtatacacgatacgcattgcgatcacccacacctaaagtacttgaaacagtgatttaatatggaaagggtaagcgtacaacttagtgaattcaacacatacacgccgtatccatcacacatactctacccctatcaaaggcacacaacataaacaaggtcctcaacataactaccgcgcataacacaaacaaggtacacaacacaactaccacacacaacacaatcatgg

SEQ ID NO: 668886 - DNA, 651 bp, Homo sapiens
tactgaaaacacaccaggctgtctctggatgctttactggtggccttgaagttcatgcaggtgataggacgtggatcattgacgaagttcagtgtattctggctaagcttgatatacatgggacacggtcaaaggctacatatcgcatcagcatcagaagctggatggtgttcagcaagcagaacccatttcctcccctgctgccacggctgtgttgaacagtacacggtagtccccgatggacggtactcgcgctgtgattctggaagatctttgttgagcacttcttcgaaggaggctttgcgttgaggggctgcatcggttcacatttggcctaaggtgatggtcacctgaaaggctgtctttgttaacctttatggtgatgttctttgtgtaaaaagctgtaattctggaattatacacatggcatgttcttcagttatatctttccaggatatcatctattgttgatatattaatattgagaatgtgttatcaaaatgctgtggttaacttaagggcgagccttgttaaagagcagaatttaatttgatttaaattattgccagattttatagcttgccgtgtatggatgctcctcaatttatgatggggttacatcaccaataaacttatatcagttttggcttt

SEQ ID NO: 668887 - DNA, 145 bp, Homo sapiens
  misc_feature (44)..(44): n is a, c, g, or t
tacatcagagctaacaacccggggacggctttttaaatttcccngggaaggagaccgtcaggccgcatgtagaccatgctgctaagaaacagaacaaaatgcccaccccttctaatagtattatactaatttattaaaaaaaaaa

SEQ ID NO: 668888 - DNA, 571 bp, Homo sapiens
aagctaagtcaggatagctaagatctgattcacatctgctggagtgaaaaagtgatgatcagtcgtttcaggaaggttattatatgggggataattggtcgcttaagataccccaaaatcacatatgtacgcatacatcatatacacacacattgcatacacatttccccttgactgattcgcatctttgtagataaacactaaatttcgataaagattatttacacttatttaggctattactccaatttaaaaatcagtgaaagttttcaatgtttagtctcctaatatataatgcttaaatttgcaacaggaacaatacattatcaaaagcattaacctgtatttagctttcaaatatacctgtctatattaggcagtgatatcttaagaaatcattttctcccttatattttctaaagtgctttaaaaactcatttaatctacacatttttcagaggtaggtcggaattatcctcttgttgccaatgaggaaacaggcacagtgagcattggtgacttgtttcaggttacaccaaaaaaatccatgagtgctaagctcagagcccgg

SEQ ID NO: 668889 - DNA, 130 bp, Homo sapiens
caggagcaggactgtccggtagcctggagccattgccattaggtgagctgtccacaggacctgagtggtacggggagttgggccttgggatcctagagccggtctcttgagctgcatctagaggtgggga

SEQ ID NO: 668890 - DNA, 156 bp, Homo sapiens
ggctgacacacccagccctggatacggggtcccagacgcagacgtcgggaatttcttgacaatgctcagcagggtaggaccagaggcccatgttgaccagcctaaggtcctgggtttacgggaacaaactctttactttttaaaaaaattacttgg

SEQ ID NO: 668891 - DNA, 227 bp, Homo sapiens
  misc_feature (64)..(64): n is a, c, g, or t
  misc_feature (88)..(88): n is a, c, g, or t
  misc_feature (122)..(122): n is a, c, g, or t
  misc_feature (125)..(125): n is a, c, g, or t
  misc_feature (165)..(165): n is a, c, g, or t
  misc_feature (196)..(196): n is a, c, g, or t
catggggacccgggtttattttattaggaaggaaacaaccaagcaccccatgttcctgcccggnactcccggggggaacatgccaaanagccggggatcgaacccagcccacctgtcgtggnggncccttccttctcaggccacagaaataaacccgtgtacttnttattgttagcacaacattaccagaaaacgntaacggcagccaagcaggacagacagttaag

SEQ ID NO: 668892 - DNA, 326 bp, Homo sapiens
ggtgattagaggatccttgctcccattggttgccaggatcggctatgatccagctggcaaagagggagattcgttaaaaaaaaaaaaaaaaacaaaaatttacagtggagttaggacttgagtcatgccctataggttggtacaatgtgggtcaggaggtgaagggcattctgtgcctgaggaagctgcatagcccaggatgtcaggtgttggatggtgtcaggtggcagcagcgttaatgaaaaatgaggtgggatgtctaggatgcaatgaaaatatggaggctcttcaagggtgggttgaggattggagatacagttaactaa

SEQ ID NO: 668893 - DNA, 87 bp, Homo sapiens
  misc_feature (20)..(20): n is a, c, g, or t
tcatgtgagttagaggtagncttctgagtagcctcagtgtaaccttacgtgggcggtttacagtacccctaggggccacataggatc

SEQ ID NO: 668894 - DNA, 223 bp, Homo sapiens
  misc_feature (31)..(31): n is a, c, g, or t
  misc_feature (49)..(49): n is a, c, g, or t
  misc_feature (63)..(63): n is a, c, g, or t
cgaagtatatgctgagttatgtacttgcatnaggtcagcaattccagtnccaacaaataaggnatctattactgagcatcaactatggtgaaactgtgcttggtggaagttcaagaatgaatatatcaaaagtcacgtcctgcaggaagtcacaaccaacaacggagataaactgttaaactgaaaatgatccttgtatgaatcaaagatgctggtacacttg

SEQ ID NO: 668895 - DNA, 361 bp, Homo sapiens
agggcgtttttggaagacactgagataaccatgacccaatgtggatgggcactgatatggtttggctgtgtccccacccagatctcatcttgaattgtagttcctgtaatacctacatgtcgtgggagggacccaatgggaggtgactgaatcatggtggtggttactgccatgatgttctcatgacagtgagtgagttttcatgatttgatggttttataaggggcttttcccctttggctcagcacttcttgttgctgccatgtgaagagggatagctttgcttccccttctgccatgattgtgaggcccctgcagccatttggaactgtcagcccattaaacccctttgttctttata

SEQ ID NO: 668896 - DNA, 408 bp, Homo sapiens
tgtcgggacacatttgtcctatccgatcacaccatcccggatgtcacgctgatttagtgcggccggcggtgcggctctttagctgtgcatttattgcgtgactgcagcacgggtgcagtttgcgcgtagtcgatagcgttaaggaagtgaggtgcataacgactgcacaatgatacgggtagcgtgctttgccgaaaaggttgtccctgcgggtgaggcttttgcctgtagcataccgacgtgggcgataaatatcgtaattgtgtgcaccattgccgtcagtggattggccaccctaatgttaagggataacacgtggtttacgagtgacttagactatacgcgtggccgcgaggccgtgcgcctgactgagtctgtggacttgccacttttgtgtcgcttactacg

SEQ ID NO: 668897 - DNA, 279 bp, Homo sapiens
gcgggattgatctatatatatacacacagatatatacatacacgtatgcatatatatatgtgtgtgtgtatatatatatatatacacatagactgaaaatgggaaatctcaaggccactcagcgcttccagagggctcacagctgaacttggaatatcctaaaccgtgtattcaggtttatgaagtcccctgaacttggctcccatgcccgactttgtaccccacaagcacatcgctgcacagccgcagaggggctactgctctccaagggtaccgagc

SEQ ID NO: 668898 - DNA, 270 bp, Homo sapiens
gcatggcacaattctacggatgctggcagacaatagtgttggtagtccaccacctcaagacgaagcttatatctgaggctaagctctttaaaggccacgctaatctcatctctcatctatttgtcctccttagcacaatgtccaaacgcatagtaatctcagaacaggaaggcggcctggcttgctgaggagcccatccaggcacactggagcacatagagattcacccaatgtatgtagaacttcgcgtcatcctcatgcttgacttta

SEQ ID NO: 668899 - DNA, 398 bp, Homo sapiens
tccaaacggctttttcccaagaaaaaaatatagccagttgttttttcctgaagaaaaaaaaaacaccagcccaaaaaaagttccgaaccggcacccctgaaaatcccaacggtttacggcccccttgatttgggcacccaaaactcctttttaacctagcccggggaggtgccggtcccagattttaaagtaaaaaaaaaaaggcaacccgggtccaaaatgcggtttagtttcccccagccaaccccaaaccggggtttttttttaaaggaagggtaaccaaccggtccatccaacccctttttaaatttacttctcccaaaacccctttggccggggcccggcggcgggaggaaaaccacacccccttttttttttaacctttcccaaattttggg

SEQ ID NO: 668900 - DNA, 1052 bp, Homo sapiens
  misc_feature (441)..(441): n is a, c, g, or t
gacagtccctggcctaccataggcacttagaaagtatttgttaaaaattgattttttttttttaaagaaacaacccagagtttttttattctgccccaacccctggcattaaaataaatcttcctcaactgccatcactaatcgccaggattccctcctagccaattatgcttggactcaacctctacctcccactccacattccaaagtttctatttctttccattccagaagggcaactccacaacaggagtgagggagaggacctgactcctcctcagagtccaataacactcctaacctgctcccccacctgtggactttttaaatccatgaaaatagaacctgtcaagctaccacaaaatacatcagaagcagatcatctttcatagcatacaatctctgtaaatactgaaaaaagattatgaaaagcctgctaangtttgtctccagtgaaatagatgcaggcaagtattttgattgttctgaacacattagagatgagtgctacacagaactaaggtaaactttgtaaattcgtatgtcataacactttgttccacaaaaaactatcttattttttatactccatactgatacagccaagtaatgtggctcttattttctaaagatgccagcaatatgtttaaacatgtcttcattgtagtaaaagtatcatatttataaaaaatacatatgcatttaatgtgatattccttatagtcaaaatcttgatatcatcctgttaatctggctaaaaatgtatctgtaaaatgacagagaggaatattttgcattccctaaaacaacagttgttgaagctttggtaatgctggttatgggaatttaccaataacagggaatgaatttggatttcttttgtggaatcaaatggcacatgtcttattagttaaatatgtgaggtaatgaagttgagtttaggcacatccttatggcatataacgggacttaaagtcatttggacataggtggttttcttggcaagaagaatatagtcggtacctaagacaggtctatcagggagtagattc

SEQ ID NO: 668901 - DNA, 401 bp, Homo sapiens
  misc_feature (327)..(327): n is a, c, g, or t
cttttgaaatcacgtctaaaaaatatgactcagcctcttgagtagctgggattacaggcatgcgccaccatgcccagctaattttgtatttttagtagagacggagttgcaccatgttggccaggctggtcttgaattcctgacctcaggtgatccacctgcttcggcctcccaaagtgctaggattacaggtgtgagccaccacgcctggctaattttgtatttttagtagagatggggtttctccaaaggctggtcttgaactcccgacctcaggtgatccgcccaccttggcctcccgaagtgctgggattacaggcgtgacanccgttgcccggcctgatgtttttgaatgattatgaaaatgggtattacagcattaaaaccttagactgattttt

SEQ ID NO: 668902 - DNA, 110 bp, Homo sapiens
aaccactccaccttactaccagacaccttagctaacatttaccaaataaggttaggcgttagaattggaacctggcgcatagttatagtaccgcaggagaagatgaaaat

SEQ ID NO: 668903 - DNA, 578 bp, Homo sapiens
  misc_feature (251)..(251): n is a, c, g, or t
  misc_feature (565)..(566): n is a, c, g, or t
agtgaagtgaagacatcttctgtacctcattattctgtcatgacctggagcatcaggtggttgctgatgcagcagctcctatcctgaagaacattcttgtcatagactgaatgtttatgtccttgctaaattcagtttagaactttatcccagtgtgatactatttggaaatgtggtatttgggaagtgattaggctcgaccctcacttatgggattagtgcctctgtaaaataggccccagagaggtccntttccccttccatactctgtgaggacaaagtgaaaagtcagccatctatgaaccaggaagtgggtcctcatcagacaccaaacctgttggcaccttgatctttgacttctcggtctccagaattgtgagaaataagtttctgttgtataagtcactgtctatggtattttgttatagcagcctgcataaagacactactgtatgttccaaacactcatattcattatctataaaccttatataaacacatgagtgtatattatcatccctagtatagataaaataatggaaacagaaaataataaataactatnnaagttaatacaa

SEQ ID NO: 668904 - DNA, 144 bp, Homo sapiens
aagggaggccggaaggatattagtttgggggcggccaagctttcccaacaaaccaagggttttgggccccgggccgaaattcatcacaagtgccgtgtgcccggggagggtaacaaaggaaatacggtgccctgggggttgaca

SEQ ID NO: 668905 - DNA, 120 bp, Homo sapiens
tgcgaatcgagctcggtaccgttacaggctgtgccctattcgtctgggtacagaagaacacagctttctttagcaaaaacatttactttaaaaccaagcacctgtattgatattttagtg

SEQ ID NO: 668906 - DNA, 562 bp, Homo sapiens
tgtgatagacatatgacgtcttaaacataacacgtgctgcaaagaacactgatatccaaatgatctgccacatggaacaaatagggaaccatttttctagcctgtactgtctagggtttacaacgcacatgacctgcctttctgggaaggtgcttctgggtcataggccattcaaagcaaactttgatgacaaaaattattgcttcagctaatcttttatacatatttgattcatcattcatggtcaagctctcacctcaatattcaagtcagaaatagcttcttggcctgtacttcatctgcattttcaaataacacttcacattgtgaaagcctgctgaaagtacctaattaagcagcatggactctgcagcaattcattaatggcacagtgggcaggcacatcagcagcaaacgtaagagagggcaattccttcatttataatgttgtatgagaaccaggtctccagatacatttccagtgaaatgaaaacaaattttatggagtttaaacattttttccagtatccagataatttcagtgaggccacgagatctgctt

SEQ ID NO: 668907 - DNA, 678 bp, Homo sapiens
agcgggctgcatctggtctcgtcgagtcccctccgtccgccgctgtcgtcctgactctctctccctcctttcctcagaggatgtccggtcttccagatcaactcaacccgctcaaggagccactcggtttcatcaaggtcctcgagtggatagcttctatctttgctttcgccacctgtggacggttttaagggccaaacagacaattcaacgtgaatagtcctcctgcagttactgagaataaaactgttacagctactttggttatccattcaggttgaatgaggcatcatttcagccactccaggtgtaacacatatgtgatgtaaatggggaacgattacgtcctcataggcgattactcttcttcgtgcacaattctatgttacctatgcagctcttcgtgtacctgtactgatttgtgccttcttgctttatgttggctacacgagtctgtatctggactcgtcgtacacttcctatgatcagaccttgttgtcacacttgtagcacttttagtggttggtgaacacttcacctggtgctaagctctgcagattcacatagctatgggcaaaaatatgagaattcggcggacagaacaggctggtcatggctggcaccgggaacaagtctcgcatggcccaatactcggaaatgcttaaaccaacatattca

SEQ ID NO: 668908 - DNA, 293 bp, Homo sapiens
acccgctttgccccttgggcctttttgggggccccttttgaaccggtttggcccaaaaagccggggggggccgggccgggattcccgggggttcgtttcccctaaaattttttttggggggtgttcccctttttttttttggttttggaattgcccccctttttccccccccctgggcccccccacccacttacccgccccttatgggtttttcccccctcttttttttcctcccccccgcccttggtttgggctttggggggctcccaaaagggtttggtgggcccggatta

SEQ ID NO: 668909 - DNA, 203 bp, Homo sapiens
cagtgggaccacagacacccgcgaccacgccggcaattctatctgcataataaatagtagagacaaggatttcaccgatgatcagccaagatggtctcaacatcttatcttctctggaccttagcctggcctggaataacaccagcagctccccaggttctcgggccttatggactcaagattgaattacatcattctagagt

SEQ ID NO: 668910 - DNA, 253 bp, Homo sapiens
aaatacaaatccttttaagacagtaataccacatatagactctagatagtgtacgagatatcatattcaaattaatataaaagccaactactgtcattaagaaataatttaagattagtgctctagacagaaaataactctgtaaccatcaatcttattgccgacattccataacagtggtaggaaagatattctcatttattaattgaaccagacatttttataaaatactgattgactttgtacattatgg

SEQ ID NO: 668911 - DNA, 379 bp, Homo sapiens
aacttgtaatcaccagcacctgtacacattcacagctgacagtgttcagagaacgaaggacctttatcttggagcctttcagcccgccagatggtccttgtcattcaggccccaaacaaacaccttggttcttatcgtagctgctgattccagcccagcagccttctttctaatgaggcttccgctgttcgctttctcatcctcctcctcttcattatccgaagctaagatttttaatgcagccaaatcttcctcttctgcacggatccgtcccagcaggatgagaccatggattttacaatcgattcctgagctcctgcactgctttatagcaatttcaatatacctgtgatactctgtgcagtcattcagaaggggc

SEQ ID NO: 668912 - DNA, 756 bp, Homo sapiens
gggaacccgctcggtgtccttccatgctgtggaggctctgattgtttcgctctttctactgcttactcttcgggtccacactgcttttatgagcctgtaacactcaccctgaaggttggcaactgtgactcctgaagccagaagaccagagccccaggaggaacgaacaaattccagaggcgctgcttaagagctgtaacatttcaccgagaaggtctgcaggcttcactcctgagccagcgaggcagaaacccaccagaaggaagaaagtcttgaacacatccgaacatcagaagggaacaaactccaagactgtgccaccttaaagagctggtaacacctcacgtgcgaggttccgcgcgattacattttgaaggtcagtgagaccaaagaaccaagcaattcgggacacaaataccaatcttttcatgccagggagaagcctccttaaaaagacattgcgcgtgactaaagcaggcatgccaccagtggggtcagacaattcttcccttgaaaaggtttgatccatggggagccttgtacgaacgaaattcccttcctttttatcgcagatgagacttctttatgcttataggcaggggttccccgggcccagcacgtgcacaccagagtggagcacccggaaacattcacaggcaacgtagattcctttttcaaccttaagcacaagggttggtactcccaccacttttgttgtggatacagcagggcctcagagggtgagaagtggtctgc

SEQ ID NO: 668913 - DNA, 213 bp, Homo sapiens
cagattagcagaaggggcaagaggacagacactattctacatatcacataaggggagcgaggaactaccacactgtccatcaccttactggactcacgaaccctccagacgcctctttgtcccgtgaatgtcggaagttgatcagacgttgccttattccatgcccccttactacgtctctaggctcattcaacttgcctttccctcgggcct

SEQ ID NO: 668914 - DNA, 676 bp, Homo sapiens
ggggataaaaatgcaaccaaaggcggtgcggcactgacgaaaagcgtaaacacattaagagtctcattgagaaaatccctacagccaaacctgagctcttcgtttatcccctggattgggctattgtggattctatactggtggaccgtcgaattagaccatggattaataagaaaaccataggtgtataggcgaagaagaagctacattagttgattttgtctgttctaaggttatggctcatagttcaccccagagctttttagatgatgttgccatgaaacttgatgaataagcaaaagtttttatagtcaaaatgtgaagattattgatatatgaaacagaagccaagaaaatcggtcttgtgaagttaaactttttatatttagagttccattccagatttattctttgccacccttttaaggactatgaatccttctttgtctttgaacacattgtgagatctcgaatttttttttttttgaaaaaatgggaattttttgagcctctaattcgctgttgccctgggactcccttggtggaaagacatctgaatccttggtctcttagtctaccaagggcaaatgcgtgggtggttttttagccggaggtactggaccagcccatctgaataaaacaggtctgggaggtgggcctgaaaaataaaacactc

SEQ ID NO: 668915 - DNA, 185 bp, Homo sapiens
ctacccttgactcttgattaacggagaaaaatcttatggtaaaactagcctttcacataggtttgggtgtatttgttaaataactaacatgcgctctattttctgggtgtagaaagtattgggctctaggaaacatttacttgtgtgtgaaaagaataccccaaggtaataggccgcatccaaag

SEQ ID NO: 668916 - DNA, 714 bp, Homo sapiens
cgggcgccgtggctcatgcctgtaatcccagctgcttggcaggctgaggcgtttgagttccttgaacccgagagtcagagcttgcagtgagctgtgcaacacagcaagactccatctcaaaacactaaacaaacaatttaactgcctagaaggtagaaatcgagtgcattccttaggcctttgaataatagcccaacgataactcattcatattaaattatgacaacacactgcctcctgctaaactttcaaagcattatttccaactaaatcaggaagaacttcccacttttacatatgcacgacattgatgaccagccttactcagccgcgcctcgcctacccacccaaccctacctcttccataccacctcacaactacttgcaccctctaccggccctttacacccacatccgcctacccccgccttcgcctcacccctcatttcacaccactctctacccccacatcaccccatcactatacctcctcctccccccctccactccccccctcctcccctcctcccttcccctctcctccctccccccccctcctctccacctcccctcgaccccaccctccgcctctcccccccccccctctctccccctcccttccaccaccccctcttcccctaccacctcaccctcctcttccacccacctcgctctctctccctctctcaccctctcccctctccgccctctgcg

SEQ ID NO: 668917 - DNA, 213 bp, Homo sapiens
agattggaaacacaccagaaaaggggcgtttctttgccagcattggtgtattagaggtgtcatctctcctgtcctcttcggagtaaataaaggtgtgacacaagaagcagtgcgtggagggaggcacatatccctccctaaaaccacagaagataacctgatactcttttgacccactgcatcacactaaacagctgcagaccccctgaattt

SEQ ID NO: 668918 - DNA, 424 bp, Homo sapiens
cttttcggtggtgacgacctatgcagacgagatgatgcctctggtaaaggatttttttcatgcctctccaaatgaggagagaaggatgcacacgaagaaacacctggtgcagagccctaattcctagtttatggatgataactgccaatgatgctataaaatcaccacggcgtttagccaggcacaaacggcagttttaagtgttggctgttcaactgtgatgtgccagctttcagaaggaaaaggatggcttacagaaggaagcctctttaggaggaaccggactaaaagcactctaagtcaagatgattgggaaaccgaatcagttatcgacactttgggaaaaataaatttcatcgataaaaagaaaagatttcgcccgccaatcactttggctctggacttgggtttttggtgcgtccgg

SEQ ID NO: 668919 - DNA, 166 bp, Homo sapiens
gtgcgatcacatcgcggaggtggacagcgaggcaggatggagccgccgatccacacggagtacttgcgctcaggaggagcaggatctggatcttcatgtgctggggccaggcaggatctccttctgcatcctgtcggcaatgccaggtacatggtggtgccgccag

SEQ ID NO: 668920 - DNA, 732 bp, Homo sapiens
gctggtggcgaaaagggggcgccgtggccgctctagccgccctggtccagcgcctccctctctcagcatggactgaggagagcctggagtctggccttgcagacctacctgtgcgcagcatgcagcaggtggagctgtgccttgtggcgcctggcctggattctgtctgatgcatggctgaccaggcgccagctgcagggtggacctgaagggatgctcatctgagctcacctgaggccatgccatggtgtcatgtacaggaaggatgcacggttgtctggcctgcgcctggaccgaaggagacgcccgaggcctgccatggacacgatgctgacgtaccgaggcgtttccggggacggccatacactgcacggcgcgctgagaggcaccatgccagcgagcccgtggagtccgcgatcagagaccgtgcctaaagcgagaggcggaggacagacatctgcggcaggtgggcaggaggaggaagagggagaggacgaggcacgagctgagtggcaacaaaggtgagccgcgccctaactacagcacctgagccaacctggcgcatcacaacgccaatgcacgaagcgacacggcacgcaggccggagggactgacatcggcaggggggacacgaagcgaccatacacgtggtacccccaggaccccaggtcctcatgaacccagatgcccgagacaccatgaagagcacacgacgacggacaaagagacaag

SEQ ID NO: 668921 - DNA, 750 bp, Homo sapiens
  misc_feature (1)..(1): n is a, c, g, or t
  misc_feature (259)..(259): n is a, c, g, or t
  misc_feature (283)..(283): n is a, c, g, or t
  misc_feature (351)..(351): n is a, c, g, or t
  misc_feature (353)..(353): n is a, c, g, or t
  misc_feature (357)..(357): n is a, c, g, or t
  misc_feature (411)..(411): n is a, c, g, or t
  misc_feature (431)..(431): n is a, c, g, or t
  misc_feature (433)..(433): n is a, c, g, or t
  misc_feature (435)..(435): n is a, c, g, or t
  misc_feature (437)..(437): n is a, c, g, or t
  misc_feature (444)..(444): n is a, c, g, or t
  misc_feature (454)..(455): n is a, c, g, or t
  misc_feature (467)..(467): n is a, c, g, or t
  misc_feature (484)..(484): n is a, c, g, or t
  misc_feature (486)..(486): n is a, c, g, or t
  misc_feature (490)..(491): n is a, c, g, or t
  misc_feature (520)..(520): n is a, c, g, or t
  misc_feature (522)..(523): n is a, c, g, or t
  misc_feature (527)..(527): n is a, c, g, or t
  misc_feature (532)..(533): n is a, c, g, or t
  misc_feature (536)..(536): n is a, c, g, or t
  misc_feature (545)..(545): n is a, c, g, or t
  misc_feature (555)..(556): n is a, c, g, or t
  misc_feature (582)..(582): n is a, c, g, or t
  misc_feature (598)..(598): n is a, c, g, or t
  misc_feature (600)..(600): n is a, c, g, or t
  misc_feature (603)..(603): n is a, c, g, or t
  misc_feature (605)..(605): n is a, c, g, or t
  misc_feature (621)..(621): n is a, c, g, or t
  misc_feature (674)..(674): n is a, c, g, or t
  misc_feature (748)..(748): n is a, c, g, or t
nggtggctcacagcaaacaagtagctgtaaggcaggaagttacacaagcatttgcaaagatatttaattagaaaaaagtgttttaaggaacatttaatagaattatactttgtaggccacacaggttattggttcagattaatttaatcaggacttataaggtttgttttctgtgttccattctaaagagcataaatattaaatgcttataaaatacacttcattcaaaatgctttaaatacaaaacacaagttgggcncaaaacaatgcatcatggtctcgnggatacatttacaaaacactgtaatgaaaaattaacagcctcaagtaagtagataatactatacaacncntgcnccccaaatgccattttaaacaaagggggaaaaagcccccgcaatgtcaattagngttgttcttttaaccatatngnangnggttaanggggggattnncgaatttttagnggcggggttaaaattangngacnntcgaaacggggttaaaaacggcactgggncnncganggacnnacntgagggggnggggaaattnnggctttccggttggcaatagggccanaatacatgggggggcngntcncngggggcggcggggggngggccctaaacatttcacatttcgtacagatcgaggacggtgttcactagtanatacgtgtcataaactggactttcttggctcaatgacaggtgtagaaaatcgtgattcttataagactatctcnta

SEQ ID NO: 668922 - DNA, 158 bp, Homo sapiens
tctagagcgatcccctaatgctccctcttcacctgaacttacctcataagaaaacaaatcccagatgctgacaagcagatgacaaaaaagttgaccagcctccagaagctaaaaagccaaaataaaggtggtgtatagtagagctgcctattgaagcc

SEQ ID NO: 668923 - DNA, 125 bp, Homo sapiens
tcgtccgtcgtgagctgtactaggaactttcctaagaaaccgctgactacaggacaaaacacaaccaagggtacacgcaggcatcacgggtttcctgcccagcgacggcttagtccagctcccga

SEQ ID NO: 668924 - DNA, 482 bp, Homo sapiens
  misc_feature (10)..(10): n is a, c, g, or t
  misc_feature (100)..(100): n is a, c, g, or t
  misc_feature (121)..(121): n is a, c, g, or t
  misc_feature (181)..(181): n is a, c, g, or t
  misc_feature (189)..(189): n is a, c, g, or t
  misc_feature (236)..(237): n is a, c, g, or t
  misc_feature (258)..(258): n is a, c, g, or t
  misc_feature (264)..(264): n is a, c, g, or t
  misc_feature (287)..(287): n is a, c, g, or t
  misc_feature (298)..(298): n is a, c, g, or t
  misc_feature (392)..(392): n is a, c, g, or t
  misc_feature (401)..(401): n is a, c, g, or t
  misc_feature (412)..(412): n is a, c, g, or t
  misc_feature (451)..(451): n is a, c, g, or t
tgtttcctgntctctgtgttcttatgagttgattgttttttgtttttttctctctattttctctttatgtttctattggctaaggggtgttggttggttntggggggtttgaccgggtggnggcaggggcggagctcattcttaaagaaaaacctcaaagttcaacttcaaacagctgaantttgtttntttgctgtgggtcaccctgttcttgccacccaggaataaattataannttgccacctccgccgagggcnaaaggngctttcccgaactttggcctggnctgccccgggngccgccctcccggctgcttttttcaccaggggggtttttgggcccgctgttcttgtgttctttctttcgttgggttgtccgggcttctcccccngggggcttnttttttgcttnttctcctgttttctggtgaacccagggttttggggcttnttgctgtggttcacctgcccggcttgccctt

SEQ ID NO: 668925 - DNA, 346 bp, Homo sapiens
cgtgagaattctcttgtatacctggtgaggcagagggttgcatgtgagctgagattgggcctactgcactgcatcctgggggacggtgagactccatctcaataaggatagaatagaataactcttgtttaggtgttacagaatccagggcataaaagtctacagtttaatctcatacccagttcctagatgagtcccgttctccatgtcaggctcgtgacctaaacctcagggttgccttacttcggtagggcaccatctgctcccttccccgcctttgttcctctttgtgctctgctggctcctccggggttgggtgtgttcagaggcagaaataggctcaagg

SEQ ID NO: 668926 - DNA, 705 bp, Homo sapiens
atcagaggtgccttcttacatcagcgatttatgcactccaaggccgcagtgtggctgtgcaaaaacaaataatcttaaaaagcgtgtttcacagcaacctgtaccctgtcttggtcctgtgtctcgagtgtgaagatgtcaagaatgcaagggagtgtgtacagaatgggtcatatctgatcaatctggaagaaggctactgtacactgcggtaatcattggtatggaagcagttcacaaaatgaaaaaatactgactaagaccatcaaagcagtctccttctccagtgacctctatctgggctggctaatggcagctgtcacgctgatgataactgccttagtgaacaaactcaccaagagtatagattatacttggactgttatctgctgtttctgcttcaattaaagacgaaaaatctttgaaaatacaaccagtcccttgaaaagtggtctctctcacaagctgtcactggtctaatagacacaggaagaatatctgaagctgaaactctctgcacaaagaatttaaaaagtaccctgatcagccagccgttatcttacttgtgagaccaagttcagtgtaaaccctcctggagtcacaaaagcactcccagatgctgtacttgaagaacttacaaaacagtcatgtcgaatcaacctctgtccagcttggcgtgatggacatgtgttcaatccacgaatg

SEQ ID NO: 668927 - DNA, 1247 bp, Homo sapiens
gcagcgctgtccaccacctgacgtactgccccgtgtggccctatcatgccggacgaggacttcttcagcctcattcagagggtgcaggctaagcgcatggacgagcagcgggtggacctcgcctgggggcccggagccagggtggcaggcggaccgcccgagaccccagacagcagtgccagcctggatgcagagcataaggccctgtgcccaccgccaggcccaacctgacccaacatcctggacgaccggtctcacagttcacagaacaacgtccatcccgagagccaattgccgaggacaggacactggtgcatgcagccccacggacctcacccgaacccagggcgaccaggctcaaggccaaagcttagcccagtagagtgaagaagaggccgtgcttccaattccacaggcacattgagaccccatagacccttcacgattaccatacccttacatgcccactgacaagaaggactgaacggagacctagacgggcaatgtcagggcaccaggaaacttgttagcttggtcatgaattcacgcgcaatccattcatcgaccacaaagcaccatacacacagagagaggaccgtaggaccttgaacaaacatagtagaaaacaacatgcatagaagtcaaacagaagaacataacacaaaaagggagcgaacaatgacacacaagactgaagagaaaaacaacaaaggcagcacatgggagccagagaaacatgaccacgccgccgaagcacgggatccatagaaacacggaccacgcgacagacaagacaatggcaaacaagcaagtgccaagaaagggacaacagagaaagaaggaaaaaagagaggaaaaccgcgagagctgggaggcggccgcaggaaggctagaaagagacgcacgggaagaaggacggcagcagcgaacgcacagacgacaaaacaagcacggcagcacgcgcgtcacaagaacaacacacagggacaacacgaggagagagggaggagagggagcgagggacgagaggaaggccgcggaccggaggggagaggatggcgaaggaaaagaaggacggcaggagggagggaatggagagggacggaggagaagggcaggcggggaggagggagagcgagggagcgggggggaggagagaagagggtgggaggagggaggggagagagcggaaaatggagcagagggggaaagggaggagaggaggagggcggggaggagaacagggg

SEQ ID NO: 668928 - DNA, 180 bp, Homo sapiens
ggttttcccaggggggaaaaaagatgttttttccaaccaggccgatgggggggtaatggtgaaaattcctaaacaaggcaggggggggcttttttctttaataaaattggaaggtttttaaatttttttggaagtttggggggtttttccaaaaaagaattttaggattgttttccttta

SEQ ID NO: 668929 - DNA, 357 bp, Homo sapiens
aaattagccgggtgtggtggtgggcgcctgtaatcccagctactcaggaggctgaagcaggagaattgcttgaacgcgggaggcggaggttgcagtgaaccaagatcgcgccactgcactccagcctgggcgacagagcgagactccgtctcaaaaaaaaaaaaagtctcaagtagatagtgtctccagggtcctggcagaagcaaattgtaatcctttcttgaggatggtttttttttggtgggtttttggttttggaggatggagtctcaactctgtcgtccagaactgggcaaaatttacaaatgtgagaagttataaattaaaaattacaaattgtcaaaaaaacaaaaaaag

SEQ ID NO: 668930 - DNA, 516 bp, Homo sapiens
  misc_feature (426)..(426): n is a, c, g, or t
  misc_feature (470)..(470): n is a, c, g, or t
tcagttctacgagtgaaaaatggcttagaactacccacacacataaacacacacaaacaagggcatgtaaaacgggtgaaatctgaaaagctctgtaaactatatcaaagtcaatttccggtactatagtattaggtgggtgcaaaagttatggcagttggccggttttggtggtggtggtggtggtggtggtaggagatggagtctcatggggtggcccagacgggagtataagggcgtgatctcggctcacggcaacctccgcctcccaggttcaagcgattctacggcctcagcctcctgagtagctgggactacaggaacgtgccaccatgcccggctaattttttggtatctcaagtagagatagggttacgtaatgtgggccaggcgggtctggaacccctgacctcgtgatccacccgnctcggcctccccaagggctggggattacgggcgtgagccaccgnacccggccaaaatttttaatatttatgtatagaatgtaagcttttc

SEQ ID NO: 668931 - DNA, 475 bp, Homo sapiens
  misc_feature (17)..(17): n is a, c, g, or t
  misc_feature (92)..(92): n is a, c, g, or t
  misc_feature (104)..(104): n is a, c, g, or t
  misc_feature (135)..(135): n is a, c, g, or t
  misc_feature (146)..(146): n is a, c, g, or t
  misc_feature (148)..(148): n is a, c, g, or t
  misc_feature (154)..(154): n is a, c, g, or t
  misc_feature (157)..(157): n is a, c, g, or t
  misc_feature (162)..(162): n is a, c, g, or t
  misc_feature (167)..(167): n is a, c, g, or t
  misc_feature (173)..(173): n is a, c, g, or t
  misc_feature (190)..(190): n is a, c, g, or t
  misc_feature (194)..(194): n is a, c, g, or t
  misc_feature (306)..(306): n is a, c, g, or t
  misc_feature (364)..(364): n is a, c, g, or t
  misc_feature (385)..(385): n is a, c, g, or t
  misc_feature (399)..(399): n is a, c, g, or t
  misc_feature (403)..(403): n is a, c, g, or t
  misc_feature (411)..(411): n is a, c, g, or t
  misc_feature (468)..(468): n is a, c, g, or t
gggacaatataataagngaaattaatgatgatgtccattaatgctttaaaaaacattaaaaatattaagtatcctgttttaaaagtagaganatatttttaaanaactatttctatttcaaatagttacaatgangtaactcttantncttaanaanataanctttnattatntggataatccatttgtntggncatctcatttattttccaataatgtaggataagatggggcgtatcaaagtaactcaaaatcaatggactaatcaatttatgtataatgatatggttcatcagaataaatgtnatgaatttaaaaatcaccaccaattcctttattttctatattatattcttttaaagtncccttttctcctgtacttgantatgccataaaaanatgnactttttnatttagaatatccagttcattttgcatctttaatatgctattatcatactggattcnttcaagg

SEQ ID NO: 668932 - DNA, 331 bp, Homo sapiens
caggcgactctagttgatccaccctagctatatgtcgtgcactctatccttgacttactgctagatcctcctttgggtgttagtttcataaaaactttcgcatgggcgttattcttatgtagaaaatgcagcccatttctttccaacccataagctacaccttgacctaacgtttttatgtgttatgattgtgcttactattgttcctttttagggcttgctgaagatggcggtatataggctgaattggcaagggttggtaaggtctatcggggtttatcgattatagaacaggctcctctaggtggatgtgaagcaccgccaagtcctt

SEQ ID NO: 668933 - DNA, 1088 bp, Homo sapiens
  misc_feature (700)..(700): n is a, c, g, or t
  misc_feature (734)..(734): n is a, c, g, or t
  misc_feature (770)..(770): n is a, c, g, or t
gggctataaacgtagggtttttgaatggtcctcctgtgctggttgaacccggctattttcatggtttccaaacagggtttttccttctccccagagttcctcagactggctgtgtgtgtggctcacggagaggtcagaatctgtgcactggatgggtaattccaaggcaacaactccgggccaatcgtctgtgcaaagaacgaagaaacggttaaaacaagcacgcacggaagtaagcacgcaaggtaaacacggaaggtaaacgaagaagaagaaagaacgtttgagattccaagcgtctcttccgtccgtccttccaacgtccgtctcctttaacaaacgccacgggggaaattccgggaatctcccctttcacaacctcggtctccttctggccctggaggggtttcaggtgggctggctatccagacccacggtatccggaatatcagacagaaaggctggcggtatttggaagcaaacacccctgggaagagtttggtagaggggtattggaatggcgcaaagaaatgggctgtgagaggaaatctctctctctcgttcctctcgtccctccatccttccaaccaaactgtgctgcgaaccatcctccaaggaggcagcgcaactttataaacattcagagagtatattaagtctccttcctggtggccttccggggggcatctcatgcgcaaangaggcctaaggcccaatccttcttaaccaacggnctcttaggctttgggttaaccaggcaaaacctgggngtctggctacagacagtgtaggcgagtcacggaacctttacaggattacgcctaaatttaccggaaaaatttaaccggaatgaaaccctggacaaaaactggaagaaagccgtgggaaggtattacgaaatagtagtctcagttaggtcccctttgaaggaacctctcagggtggtcctcgggtcctacgttcgggcactttccacacgtgggcacactcgcgacaaccatcagccgcggctatctaccaagagtgctgcagcagtagcttttccacacgaatatcgcgggagccagcacaatactcggcccgttgcg

SEQ ID NO: 668934 - DNA, 420 bp, Homo sapiens
  misc_feature (5)..(5): n is a, c, g, or t
  misc_feature (347)..(347): n is a, c, g, or t
ccttnccctaaggtaggggtgaatgcctaaaagacgggttggagaccacgagaggaactcctgactttgcctcctcccatcccttcctatgaggttgacacaaaagtaattgcagttttttcccattaaaagtaatagtaatggccgggcacagtggctcatgactgtaatccccagcacttgggagactgaggcaggcagatcacccaaggtcaggggttcgagagcaaccctggccaacatggtgaaaccctgcctctactaaaaatacaaacattagccgggtatggtggcacacgcctataatcccagctacttgggaggctgaggcatgagaatcacttgancctgggagacagaagttggagtgagccgagatcatgccactgcactccagactgggtgacagagataagactg

SEQ ID NO: 668935 - DNA, 273 bp, Homo sapiens
tgcattcattttactcatttagcagtgtgctccctgatcccatcccaaggcagaattaattccaaacccttttagttctttctcaaattcctaatcctagccctactggatccggtaagatcactcattatttacatgaaattctctcagttatctctcaaatacatatctatacttttgcatctcttcttggcactcttctctatcctagctagatagcttctctgtgttcaagatttaggtttccatttgcatccttggcggtaaaagctt

SEQ ID NO: 668936 - DNA, 418 bp, Homo sapiens
gtataaacaagctcacgatacggtacatcatgttgaacttgacaccgtgagcggtgtctgtgaaggtgtgcaacaagacggtgctctagcaccaatgaatcaagtgacgttggcagcctatgaatatgacgctaatagtggcggtttcgacagcgctgatctacagcatgatattgtcctgcagatagagccctattgtgcctagttagtgcatggtgatacaggtttcagacaacttagccggcagcagttctccatgactatggatatgctcggtaggcagtatctcttcgcacagccatctgcatagcataagcaacagcacgagcggtgaccacctatacgtctcggcagtcaatgtgccgcacaaagtatcaatcgcgtgccagtctagactagtagtcagtgcgcgcgtgtt

SEQ ID NO: 668937 - DNA, 684 bp, Homo sapiens
  misc_feature (1)..(1): n is a, c, g, or t
  misc_feature (43)..(43): n is a, c, g, or t
  misc_feature (98)..(99): n is a, c, g, or t
  misc_feature (156)..(156): n is a, c, g, or t
  misc_feature (172)..(172): n is a, c, g, or t
  misc_feature (190)..(191): n is a, c, g, or t
  misc_feature (221)..(221): n is a, c, g, or t
  misc_feature (248)..(248): n is a, c, g, or t
  misc_feature (296)..(296): n is a, c, g, or t
  misc_feature (301)..(301): n is a, c, g, or t
  misc_feature (320)..(320): n is a, c, g, or t
  misc_feature (363)..(363): n is a, c, g, or t
  misc_feature (379)..(379): n is a, c, g, or t
  misc_feature (423)..(423): n is a, c, g, or t
naatggtcctccatccttctcactgttaggtgttgctccagtnatcctatgaattcacatatgctctcttgagtcttctgatgaatcatgtaagtatnnttggccttcattcatagaggatgtcaattgctccatagaacgaatcatatcactatnctcttccagaatctgngtgacttcttctggaagnngcatggctcgaacactaagcgtggcaagtntattggagttagttatggtgattagcncgtcagagtcaacttggattccttcagggattatgctgtgatcttctntcatntggtgtatgactgcaactntatgctgtatgcctatatcttcattgaccatgtcaacttatgngggttatgtgattgtntctctgaatggaataataggttcagatacactgatatgaatctntgcaaacctttcttataagtcatccaggcatcgctgaaggtggacttctcctgctgtgactaaaacgtgctctcccgtctccacgagctgaggcatttcacttggatgttttggttcaacagcaactctcacaataggagtggcttcgaagttgagtggtataaatggtgggcaggatggcaggctacacagtgttgcagatttcagcacaaaatcttgaaggcctcctattcctagcacatttcctcgtgccgaattcct

SEQ ID NO: 668938 - DNA, 1010 bp, Homo sapiens
gggggagcgcatgtcagccatggcaagccgtctccggtctcaactagcggcgcctagatgcccatcctggggttgggtacctggaagtcccactccagggcaggtgactgaggcctgtgaagggtgtgccatttgagcgtcgaggttagcctgatcacattcgagctgttgcccattgtgtgaccagaatgtactaatgaggtgcggtgtgcgcatgtctaggagaagctcagaggaatgacaagcgttgagtgcaagcgatgtagagatcatcttgcaatcgatcgagcaacgtctgttgtgtgtcacgataaccattgcaagcataggtgcgctggatgaaacagcagtagctctgtcgcagcaacggacaacttcagtcagcaccttggatacgctgcgacatacgctgggaacgctctgactctgtcattgcaacatggagccagacgctgggctttctaaagacacgtgtggcacagagcaactatcttgtcaccagttgggactagagtcgaggccacatgatggttacaccgagatgactcaccagaccacttcatgagaccacagatgggtcgggccactggcacaggacgctggatggactgaccgggcctggatgaacagctactagagacatctcactgagattatcaacacagtcctccgaccgatgtacgagcatgagtcgtgtacagccaagacacgtgagatcatgaaatctactaaagcgtgcgagcgttatacgcagacttggcagtggccaaccactatactcctcaggtcgagcgaggcacggtgacgtacaagtaacttggccaggatccacaccgggacataaggagggatagagcaggcataacaggcccacacgtcggggctccaccatgcagaggaccctggagccaacaacccgaaggcaccattgaagaccaggaggcatcccaggaatcaagggcgaacacaagcagggagacaaacaacaaaaaacagcgcacgaaccaggg

SEQ ID NO: 668939 - DNA, 944 bp, Homo sapiens
tggacgcgtgggttactatgggccacacaaaggccatggataaccctacccgctttatgtgattacccatgggaaacacaagaggctacttctgttagggtacatggaccttggtcaagcatcttaaaaaaaggcaaccctagatagagagctgtcttggctgaatagatctgcaccacaagttgtgatgtcctagtcgctaccactaaagtgagcaatggttacagccgtgtgctaaaagtataataatggggtgtggcaagtgctctatctagtgtctggaggggtggtctatatagctacgagtgtgacgagtagtgcatccgggatgggtgtggaaaaagtaggacaagagatcagagaatctgcatgatgaggtgcgcttacttttagtgactttatgtacttatattaacagctggaaataggttgtgggttttgagcaggctgttatagtgaggaatgttcatttttaaatgttcctaacagatttgcttttgaaaaatgcttgttacatgaataatttgtggaccaggattgcttttctgaaggcagtatagggaacatgaatattcaagatgaaatacaaaaattatgtttaagggtcatagtgtataagtagcttcctaggaaaccctttgtgtatcttttcagactggggtgggggctgagcatgcttgtgcagaaaagaaggcatagcagaaaggacagaatctcttccccaatcccttggccaattaacaaaataagctagcaagtcttggtctaataaatggaattacaatagggtgaagtaggcttatattcaagggacgaagtctgggagagtaaatagaaagggaatagaccctttatttggagggttggaattggtaaaatatggaaattgggggctagggcaaaataaaccgggttacaaggttttaaaaaaagatttgtaacag

SEQ ID NO: 668940 - DNA, 486 bp, Homo sapiens
  misc_feature (447)..(447): n is a, c, g, or t
  misc_feature (465)..(465): n is a, c, g, or t
cagaagcagctggccgcctggtgctctctggttctgtccttctgccgcctgcacaaacagtccagcatgacggtgatggaagcccaggagagcccgcttttcaacaacgtcaagctacagcggaaacttcctgtggagtcaattcagattgtattagaagaactgagaaagaaagggaacctcgagtggttggataagaataagtctagcttcctgatcatgtggcggaggcaagaaagaatgggggaaactcatttaccaatgggtttccaggaagtggccaagaataactctgttgtttactctgtatgaacttgacgagtggggaagacacagaggatgaagagttccatgggctggacgaggcgaccctgctgcgcgctctgcaggccctacagcaagagcacaaggctgagattatcactgtcagcgatggccgaagagtcnagttcttctagcagaganctggctcctttacttcttacc

SEQ ID NO: 668941 - DNA, 135 bp, Homo sapiens
atctgagacaagaccatttaactgcaaactgttgtcgttagtcaactggagttgtcttcctgaagatatgaatccggtatgtattgtgtgcgcagagagcattaccgtattagaatcttcatcactaaaacaggg

SEQ ID NO: 668942 - DNA, 554 bp, Homo sapiens
gagagagagagagagagagagagagagtgagagagagagagagcgagagagagagtagagagagacagagatagagagcgcgatatacagacctagagagtctctgtctcagagacacccagagttgcctacctctttagagcactcgcttctcagtactttcagaccgatactgcctttggcacggacctcgtggattatgccaagagcccacatgtttctgcctaggcccagacttactctgtgacgtcacaggtgtccctctcacccctcatcatgagcgcttgttcggagctgcgcatactttcgagctatatctggcaacttggcacactacctgacaccctgtgttacgcccacacctttgtctttctaccccggctggcctttaggacacccactggcccttgctttagcttctgtccctacccactctctgcttcaatacatgctgaacggatccacagatgtgcttcgagttccatattcagcttgatgtctccacatgtttattatcccttttttgcatcatctttacctccgattatgctcgg

SEQ ID NO: 668943 - DNA, 131 bp, Homo sapiens
cctgagggaggatacgatcatagaggagggaagcgagccgagatcaggtagcctggctgggcggacaacgcaaacagaaagaccccaaaaggggcagccgcgacacacgccggcatgaaagcaaacgacgg

SEQ ID NO: 668944 - DNA, 120 bp, Homo sapiens
  misc_feature (31)..(31): n is a, c, g, or t
  misc_feature (49)..(49): n is a, c, g, or t
  misc_feature (78)..(78): n is a, c, g, or t
tatatgatctatacatcatgggcgcgttccncgtctgacgggaaaccgncgttaccaataatcgcctgcacacatccntttcgcagcggcgtatacgaaaagccgcacgatcgccttcca

SEQ ID NO: 668945 - DNA, 641 bp, Homo sapiens
  misc_feature (343)..(343): n is a, c, g, or t
ccccggaccgcatcttcaacttccggcctaatggatcccccgtcgagttcccgtacgccgcctttgcccccagatttccacccggtaaccgagccaatttcccggtgtgtacaactcgacacagaaccgtagggttgcaaacgtagtcccgtcccctctaacacactcaaagtcaaattggccaggccaattaggtatctgaaacctatcgagtaacaacacgacatagcggctggagcataaatctatcaacgtcactatcatagcttgcctcaccatttattgcctaggaatcgcagggcgaccatgcgagcgtccttgaatcgattgagcaacttcagangtagtaagctctcacggacttgaagtcctccacagttcgtatgaataacttacagtcaacgatacgacgtcattgcaactcagtgagtctgtcgcccagcattaacggcttaagaaacagatgcaattcgccggacgtctaaaccaaaccacgtttcaccgctacactacctgggggtatactagcggtcaatgctctgaaatgctgtggagcaaaccacagtttatgcccatcgtcctagaataattcccctaaaatcttgaataggccctaactacccataacccctacctgctcg

SEQ ID NO: 668946 - DNA, 374 bp, Homo sapiens
actcgagctcggtaccgagtgactcgactcgggtactggaggatctctagagtcgacaggctccagtgtaaacgagtattaggagggcagcacggtgctcacgtgtcgacggaacttgtacagggaggcatgcaccgcagtggtgaatacacgtcgaccaggatgcatgtatgcgagattgggaggtgagcgaggagctcatgtattgaaggaacttgtatagggaggtatgcaccgcagtggtgaatacacgtcgagctggaggcatgcatgcatgctcgggtactggaggatgctctaaagtcgaccaggctccagcttaacgatattgggaggtcagcacggagctcaccgtgtcgacggaacttgctaca

SEQ ID NO: 668947 - DNA, 247 bp, Homo sapiens
agtgatgcagtatatgtgtgaagtgtgtacagtgggtgcttattagtggggtgtgtgtgattaacgagtgccgtgagtagagagtggtgtatgtagtggcaggcatttagtggaattatgtgtgagtggtggagtatgtagtagtgggttgtatgtgtgtaggggtgtatagtagtatgtttttagtaacatgtatttgtaagaagtggggagtgtgtgaatggtgggtatgtgtgctgagtggggt

SEQ ID NO: 668948 - DNA, 405 bp, Homo sapiens
  misc_feature (305)..(305): n is a, c, g, or t
  misc_feature (347)..(347): n is a, c, g, or t
  misc_feature (356)..(357): n is a, c, g, or t
  misc_feature (386)..(386): n is a, c, g, or t
  misc_feature (398)..(398): n is a, c, g, or t
gagaatgaatagaaaacagtaacaaatatagtagatattaatccaatgatatcaataatcactttgaatgttaatggtatgaatgtaccaattcaaaggtagagattgtcagagtctatcaaaagacagacacatcttgtttcactgcactttgctttattgtgttttgtgaccatgtgttttacgtattgaaggtttgtggccaccctgcaataagcaggtctcactggcaccattgttcctacagcacgtgctcacttcacgtctctgtgtcacatttcggtcattctcacagtattttaagntttttattattggaatctgttgtgggtgatctgtaatcagtnatctttaanngctactgttgtcattgttttgggggaccnccaatcacaccnggggtta

SEQ ID NO: 668949 - DNA, 955 bp, Homo sapiens
attcctgggcacacccacaattcccctaattctttgaaaaccctttttttttctgcgacacctcgttgtaatacctccctgaaatacagttatatcccgccctgtgtcccccccccactggggtggtaaatttggcagattatcacacccacccacatgcgttggtgtagttacacatattcgccataagttgccccaaccagcttgggaacagataacctgttttgctgggctgtcatgtaagaatataagagaccgccgctccctatatactacctcgccctctatgtttgaatacccgccccgtccgaaatttcatatattaattggagaaggaatgcgattacgttgttattctcttcccctcctaagtattgattcgatattttcttatctctacgaaacaaaaatggaaactctggtccgctcctctcctcacacctcaccccttttgcgtgggtgtctcgcgactcaacaatgaatgttgataccctcccccgccgtttatagacgtaataatcacaacaagagcccctccctttagagaaaggacccctttcgcaccccgtaatttgtgttcttttttcaactccccatctaagaatacgctattgataaataaaacaagagcctcacttagtttaaaatccatagcgcgccccctcctaagccatgagatgcccaactcgtgggggcatcaccacacaagagcgcccccaagattcttttccgagcgtgttgtatcaaaagtttactatctgtatcgtcagcggccagtagatggggtggtttgtttagtatttcatgacaataggcgtgaaagggaaagggcggtcatgtatctatgaaagacacgcttaacgccctacaggctggggtttatggccccccactcccccagaatattttacttccttggagacaaaaaacatggggttttccacccacaaaacaa

SEQ ID NO: 668950 - DNA, 1079 bp, Homo sapiens
caggatgagctctgctgtctctgggtggatcatcacagatttagccgggcaggcacgtaaagggtgtcctcttactattcaacaaagtgtagactttcttacatattcgcgaatacgttcagcagtgtgtgcactctttacaaataagttctgtcacaacggagctaagctgacacatttcaccgttgagtgcaactggcgcatcatacatatagacttgagcaagctcctgttatgacgtaccgtgtccagctgacttcaacaacatttgactaacgggacaacgtcagacttttaagcacgttattactatacgtgtaaccgaacaacgcctattcctattgggacttaactactaaggtaaggaatgcgtagccttgtcggccaccgcaaatgacttaccgcacggctcattccccattctgtcaattccctcagacagacaattctatgacagtcacccaagtgtatcacttttacgctggctcatgcggcattatatatccaagtaacacttacgaaccgcaaggactttctgattctaacaactatgttcaaacactcttggttctcacatatatttaccctcgataaccaacttacaccgactctatttcttcttcacttctattgatgacacactacgatcatccccttcatttcaacatgtgcctcctacagcactcttacattctctacgcacacagacctttctctacactaagttggacctggtcatcatttcctcctttatgatacgactcccaacccatcattggcattcttggtatacaacacccctcgggtccctacgaacacaccccacttcacgtcacaagccattttggcaccagtactgagcttcaagacgcgacgaaggattatcaacgtcctcaaacacgcacccctcccgtgtgaattagatacgggtcaacgacagtcacatttatcacgccactctggccgtctcaccttcccgtccacccgtatatgaccgtctgagcactttccccatacccgtggcaccttcgcttccacggtacgcatcgatatgcaccacttacattagcataccagtt

SEQ ID NO: 668951 - DNA, 109 bp, Homo sapiens
atttgaacaagccgagcttttgcggcctgggatcgctgaaagtgatggctgtcgtcccggcgtctctctcaaggacaaggacgtaggatcaatttgcatattcttacaa

SEQ ID NO: 668952 - DNA, 121 bp, Homo sapiens
ctcgggggtggggaaaggggtcggctgtccatgctcatttgttggtccgtgggccggtgcccaaaccaaaggctgggttcatttgtgtaacgccaataaacggttcttgtcctttcgggca

SEQ ID NO: 668953 - DNA, 108 bp, Homo sapiens
ggctggcgaagggcttattgaagtatattcccaggcagttaaaaatcggttatattccactttctatcttacaaaatgtgaaaaggcacatggttttctattcactcc

SEQ ID NO: 668954 - DNA, 454 bp, Homo sapiens
gtctcatacaggatcccccttacatctcacattgataattactggttgaaggacttgattattatcccccattagatcatgcgaatcaaggtaaagtaactattcagtctcacactgctattcatagcattgtactgtaagctatagctagcacaataaggcgaattaatttatagcattcagattcttatggaagaagttaagcatccttattcacagatgacatgatcctgtatcttataaaatcctaaggaacccacaaaaaaaccctactagaatgaataatactagtttactcaggtttgcaggatacaaaaaccaatatatagaaatcaattgtatttctatgcaaaaatgaaattgtgagaattccactgacaattgcatcaaaaagaatagaatgtttaggaataaatctaactgagagaaattaatgatctaaataaatagtccg

SEQ ID NO: 668955 - DNA, 124 bp, Homo sapiens
agagtcgatcactaacttgaatgctttctggaagcgtcggctgccatttcccattagtagcaagtgtatccaatgcatcaacacgagtcaatgagtagttccctagtacatcattgatgttcag

SEQ ID NO: 668956 - DNA, 780 bp, Homo sapiens
cttgaacccagtaggtcgaggtttcagtgagctgaaattgcaccactgtactccagcctaggccaactaggagctaaggactcctgtctccaaaagaaaaaaaaaaaaccccgacgaggtattaacgacctctccaaggttccaacattgaacgggtttcacctacacgtacaactatattgtttttttgattacaccacggtttacccgggtggaagcactcacttactgttgccgggatgtaattcttttccgacaaacataagtgccgggggggtgaaaaattaactgttattgtaagcaccaaagaactgttactgtctggaagttgacattgaagaacattgtttcccacctaaattcccgtattgaaaattagttaaatttcctcttccagctcctcaagttcattaggcaaagtacacctctttaaaccctacttttggctcaccgtggaatgtattagtcgccaggtgtaattaaggtggccatacagttgttcatactcacacaattaccccacgatttaaattatacattttttgcggcagaatttatttaaccccctttgggttaatactaccaggggaaaggccacaccatttgggcaactgggctcctgtggaacagcatcaactggcccactttttttgggaattcccttcaaattcatgttccattcaagttttacataagggtaaaagtgggtccttggcgccaaagtttacctgggaccccaacttggttggtctcctagaagttcgacaggatacccggtga

SEQ ID NO: 668957 - DNA, 473 bp, Homo sapiens
atttctgttcctcagtaggatccttgggtgtgctcatctcatccctccatttggtcaaggtttgcccatcaatgtgcaggacccaggcaagttcacggcctgtcctggagaaggggggaagcaatgacattaacggcagtcccctcgctccttgccagtgacgctggggtcttaaccaaggtgtttgcaagtggtgacttcgaaactggcagggcactcatagcaaaagaagccgcacaccacggaggttccttggccagcattatttgcacaacagggggtggcccgttcccgtaataacttatagggtacatcatagcctcagttttttgtagcccgctgtatccacctcccttatatttggtatttttcctcctttcctatatgtctcgatggccttagttcttatgtattaatcctgtctttcgtctatgatatttcattttattctcttccctcttatgttaacattc

SEQ ID NO: 668958 - DNA, 777 bp, Homo sapiens
gacctcaacatttggaagttagaagtaatacaaaaatttgcttcagtatataatacatatgtttttcagattcctacaaagcataaaaattataactttcaaaggccgggtgcattggctcatgcctgtaacactagcactttgggaggcccaggcaggcggattgcctgagctcaggagttccagaccagcctgagcaacatggtgaaaccctgtctctactaaaatacaaaagaaattagccaggcgtggcagtgtgcgcctatagtcccagctactcgggaggctgaggcaggagaattgcttgagcccgggaggcagaggttgcagcgagccaagatcacgccactgcattccagcctgggcaacagagcaagactccatctctaccgaaaaaaaaaaaaaaacaacacaaaacaaacttttggggcgggcctgggcctagaagagaaaggttttctaaaacccattccggtgtgggcgcgcgcgcagggcccccaagtagggggtacaagtgcagacacgtgtgcggcaacagcgggtggtctccccaaagagagaaaaccccgcggccataggaacatcacgccgctggggtgtttttctcacccccaatataaaaaaacaccgccgcgggggcgcaccccccaggcgtgtcttcggacacaaactcccgaggaggggaaggtgccgaaggggccgacagcacgaccggggcgctctcccacacagacgggggccccaaggaggaggcgcaggaaataaattacgagaggg

SEQ ID NO: 668959 - DNA, 504 bp, Homo sapiens
agatgaatttctttacctgcagaatgggttaaactgtgcttaacagctttaaggtttttgtgagattaacagattgtgaaaaattaaacttagccaaatctcatgtgaggattaaagaaagcgatgtcccagataagtcaatgtgacactaaagatctaaacaattttttttaacttttaagttttatatcaaatttcagcacccagcaaataataggcactgttaatatttgcttaatataacgtagctgtgaatttttacccacatttaggcggacgggaaaattaacgccagaatatcccgaaagtcaaattttgtcatcttacacttaggaagttacgttaaaaaattctcaagtctcgtagtatttttcttaagcgcaatttgggaatttccagttacctcgtggtttccgtcatcaggttcttggcaaagattgcaatacagtagttttagaactatattaactaggtattccattaactaggtaaaaaccactcgac

SEQ ID NO: 668960 - DNA, 127 bp, Homo sapiens
ctaaactgccccttctagcacgtgggcctcactaggccagtgtaggtgcactaggcaaacgtaacctagtgttgtaggctcagacagtagttgtatctcaagatagttaactcttacaggtagtaag

SEQ ID NO: 668961 - DNA, 682 bp, Homo sapiens
gggggatcccgccgtcggtgttgaactataagagctcgtggtgtgtccggtctggctttatagggtcggagatgcctgcctctcagttgcagaagtttgtgcggtagagaacaaaccccgtgatgtgtactcgacgccccaggagggtccttgttggaggtggaaactcaaggagaatttgccctgcaagaaaaacatgaagaaaacccaggaatttagcaaggtgagagaggaaagaggatagcttgattggctctcagaggaaagctagagggactctgaggatcatgcaagaaatgcagaaggcagctattgagaagaagtctatgcatgaccaagagaaaagtgaatgactgcgtatttgaagaaacgtggggtgttactggccagttgggtgtatcataaggactctaagatcaagatttgggtagagtggacaagtcagttacgatatgttataatcttatcctttaaaaactattttaaactttatccttttcagctttacttagtggatgttagaagcagtcttcaaagaataaaagtaagcatgctgtgacatattggtgaacattatttgtattatgagcgttcatatttattattaggtactatgatcagatactaggactctattataaagaacttttggcggtcaggacagcagtgctgaccaaacaca

SEQ ID NO: 668962 - DNA, 303 bp, Homo sapiens
gccatgggataaaatgacataccaccaatgggtttcccccctggatatttttttaaagacttttttcctgtttcccctacataaaacccggtttgataattggatgtttgggagataaattggatggtgagcccttaaacccaggggggctggagaaaatataatgggggcatgattttaatttaggggcaggttgggtgatgtccctgaacccaaaggggtttttctgagggaagggaagggaaaaaggaggtttttggatttttttgggaccaaatataaatgaagatttttttccctgga

SEQ ID NO: 668963 - DNA, 117 bp, Homo sapiens
ccccttaaaaaggtttttttctctttttggggggccggggggggcggttcccagggtcgggggtttgggcccctttggggtaccggggtgaattcctttttttttttaaccccccca

SEQ ID NO: 668964 - DNA, 624 bp, Homo sapiens
agagcaaacagacgccccccccccaatcgcatgggcatgagcgaaaaagcgagggaacatggagtaacgacgggcactaaaggaaacggggcgtaggagcgtataagagagacagaggataagagagacacacgacgagacgacagtggggaagcacgaagagagaaaagacgaacaggaagagcgagggaaaacacgagaaagagagggggaggacacacgagaagagcaacgaagaaaagaggacgaacaagcagagaacggaggagagaaggaaagaagacaacagagagaagcgatgaacaggagacaaaagaaagaaaagagagaaagagagacgaagaacagagaagaggaacggaggagaagaacggcacgcagaaagcagaaaacagaaggacgacacgaacaggagaaaaggagaggagaaacaaagagaaagaggaaaagagaagaaaggcacgagagcaacgcagaggaaggaggcagacgaagaagaaaagagaacagaagagaaaaaagaaagaaaaagaggcagaaaggagaagagaacggagaaggcagagcaaggcacagcggagaagagagagaaagaaacaaagacgaaagaagaaagcgacgcac

SEQ ID NO: 668965 - DNA, 854 bp, Homo sapiens
cttagaacaacttcacaaatggagcatccaagaagtaatatgatgattgctctctaattgggtgagcgagtcggatacatgtattcatccatgcaaccgatgcctgcagaatattctctgcgcgctcgtatctgtcgcagggtgctgtgggcgcaggacgaagtccaagacagattacgatgcctattttcttgaagtctttactctagagggagacatagaatataattaagttaattttaaaaaatcaaatggtgaacatgctatgtgagtccaactatatgacattcaggcaccaagtcaagcctatagaacaatatcagtggtgggccagagatttcagagaaagggccacgattaggtaggggacagcagatacagggcagtgaaactatctattttctgtactgatgactacatgagcattgtgaattgtcaaaaacctgtacacaggtatgaagaatgagctctaatctagaatatctacactatggacttaataataatacatcaatattggttcatcagttgcaccacatgaatcacaaccaatgcccagatgttcatacccgggacccctgcagagatagggacgcacgggtatgtgagaaccttggatttctgctccgttttctgtaaaccttaaaatactctacacaatagtattttgaatttcaacacctccactgctgtcagtgcttggacgcagaacaacacaacacacaacacaaacactgtcgcgccccgccctgaaactctcacccgtctggcccgcccacaggcctgtccctggcagcaccggctaattcgtcgcacaaacccggcggctcaccacggtcgctgtcacggcacaa

SEQ ID NO: 668966 - DNA, 472 bp, Homo sapiens
cagacatgtagtcttttctagttattgtatttaacgggtattgtgtccttgcatttcttcttagaaaaaaactaattttaggtgctgattggcatgtctggtacacagtctatgcaagtcatgctgaatactggtcctctcttctcttgggccctctcccttcctgggcccagtctgggtcactgcttcgcttctggtatctggcgttctttggtacacagttctggtgttcctaccaggactcaagagacagcccttcctgctgacattcccatcacaacattcctcagacaagcctgtaaactaaaatctgttaccattctgatggcacagaaggatcttaattcccatctctatacttctcctttggacatggaaagaaaagttatagctggtgcaaagatagatggctgaacatcagggtgtggcatttagttcccttatccgtattacaactaaaatggtagtagta

SEQ ID NO: 668967 - DNA, 154 bp, Homo sapiens
ccccgtattatcaatcgcacacattggatgaatgacagagtattaccatatacacaaccatacaatctaaaacattatttataaacctgctggccgctcctgagtatattatcttcagtgaggcggcgggtattataacacacgtctggcggct

SEQ ID NO: 668968 - DNA, 784 bp, Homo sapiens
taattctaaattacagagtcatttgagctttctccccatcccgctagtatctttacaggagcagggaacgagcacgtacgatggctgtactaactcttttggcgcgaacgttaacattacaaatttacttctgagtgttattccctacaaccgtcatttacttctggcttgtcttttggacggacgatcacacactaagagaacgttgattgcctcggctatatgtgcttgtgcttggacacttatggtcactttttgaacgcatgttaataaatgtcactgattaaaacagctggagcatttccttccctttccagtgaatggagcagcatagtgaaatcctggcacccctcaccttatttgtgatgacaagatggctgacagtcacggagtccaggagaaggtgctgctctccttgctttctgagtacaacagagtaatgtacaactttcttattttcccaaatgaaatgaacacgggggaaactatatacagtatgtccagaccagccaaattctgtcatgatctttacgtatcaacctgctgtatattagagcaactgaatctcaatatggcactaacgttgaccgtggtccagtttcaggcattacgtgaacttcctttaccaacagttctatatatctaccatctttcctagttatattccaacttcgactgatccatcctgtgcaacactccagattacgtgatggcggcctacttgacgagtattacccgcatccctctgttgcatcctgtaaagacctgaaatttatgccctcta

SEQ ID NO: 668969 - DNA, 572 bp, Homo sapiens
  misc_feature (443)..(443): n is a, c, g, or t
aaatattagaaagtcacactcgtatgatttaaaagtcaaagtagtagtatttatccaaataaactttaagcagatttcatatttcctctattggagaaagcatttcctaatgtgattttcctgtgactacttgttttccagttcatttatttttcagctcccaccctgtcacagtacttaccaatctttattagttaccaaagttaaacacattttttgaatcaactagccatgtgtatgtttttctctgaccagctttccattaccaccataaaacaatgataggtaaaccactgctaaatttgaaaagtaaatactatgcaaaactacactcagagtgagaagattaattttacaagagaccactttaccttagtagcaacactcaagtcttcatcatccaatgtaggcaatgaatccacacacagttcatgcaaaatgcntgagagcaaaaatacacaatgaaaatgagcaagttgatttctttacaatttttttaactgccagtttatatccagcttccccctcaaaaaaaggaaaacattatctggggaaaggtcagtggccatctg

SEQ ID NO: 668970 - DNA, 544 bp, Homo sapiens
tcaataaatccttatatccttgtgtcctaccacatacaactaaacctaaatgcacattttactaagtatattgcttcactggattgatatggtttggtatgtgtccccacccaatatctcatcttgaaattgtacctcaccataatccccacatgccaagggagggacccagtgggaggtaactgaatcacaggggtggttaccctcgtgttgttctagtgagagtgatctgatggttttataagggacttttccccgactttgctcagcacttctctctcctgccgccatatgaagaaggacatgtttctttccccttccaccatgactggacgtttcctgtggcctcctcagccatgctgaactatgagtcaattaaacctctttcctttataaattacccagtctcaggtatgtctttattagcagcatgagaacagactaatacactggtctacaaatgtttaagtaacagattgactgaatattttcaagtacaatttaaacacttatctgtaactcccaaagtaagaacaatgcatta

SEQ ID NO: 668971 - DNA, 536 bp, Homo sapiens
  misc_feature (420)..(420): n is a, c, g, or t
  misc_feature (456)..(457): n is a, c, g, or t
  misc_feature (501)..(501): n is a, c, g, or t
  misc_feature (508)..(508): n is a, c, g, or t
  misc_feature (534)..(534): n is a, c, g, or t
atgggtacaaacataaagtagatagaagaaatatattccagtgtttgatagcacactagggtgatgatagttgtaataatttattgcatatttaaaaatagctagaagatttgaaatgtttccaacacaaataaatgataaacgtttgaggtgatgggtatcataatcaatgtgatttgatcattgcacattgtattcgtgtgtaaatatcaaaatacgacatgtccccatatataggtcaattattcatatccatcgatcaactaggggggcattctcacctcacgcacttctcctaactattgccgcttccagaaccttatcttgctctgcagtttatttcttattctaatacctattctgacttcttttatgtgctttccttctggtttcccccgtgatatgtctccctaccctgcnaactttctgaaaggctgcattgctcacttccctgcnntcgtcctcttgactgagtggatttgaccccatactccttcatcntaccgtnccacttgcctcttatctgcgcggctntg

SEQ ID NO: 668972 - DNA, 108 bp, Homo sapiens
gtgtgtctggcctgtgctctaacttctccaccaaattcagattcctttacttctttgggtgttgtgggaaacaaccacacacacacacacaaaattaaatatagatgg

SEQ ID NO: 668973 - DNA, 522 bp, Homo sapiens
tatggccgaattgcaaaggatgtttcattcctcatgttctaattatggacaggactgaacgccttgctcgagatgtgaggaaggagatggcaggccatcacattgtagccctctgtgtgctcaaggggcgctataaattctttgctgacctgatggattacatcaaagcactgaattgaaatagtgctagatccattcctatgactgtagattttatcagactgaagagctattgtaatgaccagtcaacaggggacataaaagttattggtggagacgatctctcaactctaactggaaagaatgtcttgattgtggaagatattcttgccactggcacaacaatgcatactttgctttccttggtcaggcagtataacccaaagatggtcaagggcgcaagcttgcttgtgaaaaggccctcacgaagcgttggacttaagccagactctgctggatttgaaattccaaacaggttcgcagcagatatgcccttggctataaacccacttccaggatgga

SEQ ID NO: 668974 - DNA, 190 bp, Homo sapiens
gatacggaggctagtatgaggagcgttatggagtggaagtgcaatcacatggctagtcccggaggtcattcaggagggctgagagggccctgttagggtcatgggctagggggtttttacgtatatgataggccattgtgattggtgggccattatgtgtagtcgtgccagtagaggcttaactagaaag

SEQ ID NO: 668975 - DNA, 248 bp, Homo sapiens
  misc_feature (221)..(221): n is a, c, g, or t
cagaatcatatatagtacatgtagcatgtatatacatcgtcttcagtctggaataattcctcattcctcccttaacttcaaaaaaaaaagaaaaaggttggaatcgaagcccagtgggtgaaccacccccgtatgtccccagccttttggggagggctagagccggccggagtcactaaaagggccagggattatcaaacccagcccgtgatcaacatggncaaaccccccgtactctaacaagacaa

SEQ ID NO: 668976 - DNA, 212 bp, Homo sapiens
aggatccccagactctgatttggctggtagagacttggatgtttggtgttgataactcactgttatcgttggttggtgggaaaaagttcgaagttcttctttgtgctcttgcattgctgttactaggaacggtagtgctagtgctgtggatgattggtacattggtaaaactggcgaatgactgtgagattactgctttggctccatcttct

SEQ ID NO: 668977 - DNA, 403 bp, Homo sapiens
  misc_feature (91)..(91): n is a, c, g, or t
  misc_feature (391)..(391): n is a, c, g, or t
gccaaaggtcccttccccaagacatctggaacactgggcatagatttctcaagaaggaagactcccctgcctcccccagggcctctgctcncccgggagacaaagcaataataaaaggaagtgtttgtaatccccagcactttgggaggccgaggtgggcggatcacgaggtcaggagatggagacccatccctggctaacacggtgaaaccccttatctatgcgcctgtagtcccagctacccaggaggctgaagcaggataatcgcttgaacccgggcggcggagattgcagtgagccgaggtcatgccactgcactgcagcctgggcgacagagcgagattctgcctcaaaaataaacaaataaattttaaaaataaataaataaatntaaggaagtgtt

SEQ ID NO: 668978 - DNA, 248 bp, Homo sapiens
cgacactacctgtctgctgcacgatcacgatgaacggctgcatgaggctgtgttcctccgtggtttgtacttttttacacgcctgctgcctgacccttgccatgtgtgcctgccctgcccagctgacagctgagccctggaactcctaaagctttgcccctagggcttccatcccaaccagtgccaaggacctcctcttttccccttccaaataatagacgtctatggtaccattggcctttttctta

SEQ ID NO: 668979 - DNA, 675 bp, Homo sapiens
gcatcacccgcctcaaactgctgctccagaacattctgaagagaacacagcctgtgctcctcggtaggaggcatgatggccacgaaggcacaccacgccctggagcagctgatccgggactgcaataacaatgtccagagtatgcgacggacagaggagctaagtctacctgagccatgaagattgagtttcgagtgcagaaatattcccgctcatttctcagtcacgctggctggtgaaaagtggggagcgtgacagccttggtagttcaggtgcttccccagggctacgaaggaagctgaacactgcgtccagtcacacactgcgacctcattcagatgacttgtctgcttgctgtcgtcggccccgtagagggtagccgatttcctggtatttgacgcatgctacccttctccgtcctattcgtggggtgaaaagtgtgtaaatgaagctacatgggagcctctagtaaaaagtcttgttccagactctttctgctggctagaacagctcagggctgcccatggccgagttcctcttccgcacggagactcagatgagatggggctgggcagaggagctgggggtgggggaagatgggcagccgagaaaagaagtgagaccaaggcagaaaatgtgtccaggaagacagccaaagcctcatgttagcccatc

SEQ ID NO: 668980 - DNA, 553 bp, Homo sapiens
  misc_feature (147)..(147): n is a, c, g, or t
cctcacagtattggcttgcaacacctccaggcgcactgatcacattctacctggcattatttcatctgagtccctgtcctagcccttctgcccattagactgtaaccttgtttagggaaagatctgtgtcttactcatctgtgattngtgatgtggtgtttgagacagggtcttgccctgtttgcccaggctggagagcagtggtgcaatcttggctcactgacagcctcaaccttgttggggtcaagccatcctcccacctcagtttccaagtagctgagactacaggcctgtgccaccaaacccagctagtttttgtattaagtagagatggggtttgtgccatgttgccccaggcttctctttgaactcctgagctcaaggggatctgcctgcctcgtgcctccccaaagtgctggggattacaggcgtgagccattgtgccttgaaccaactcacctgtcattggtagtacttaaagatgccttggtcattttattggtgcctgtgcaattaaatacacccttgattttggttatacaaacacacaaac

SEQ ID NO: 668981 - DNA, 115 bp, Homo sapiens
ggttgcatctgagcccagtctcattttttgtcatgtgtgacaaagcatgccaattcattgttacacattacgtaatcactccagacaacttccatagctaaaacaaccaccacac

SEQ ID NO: 668982 - DNA, 583 bp, Homo sapiens
  misc_feature (426)..(426): n is a, c, g, or t
  misc_feature (503)..(503): n is a, c, g, or t
  misc_feature (518)..(518): n is a, c, g, or t
  misc_feature (537)..(537): n is a, c, g, or t
  misc_feature (557)..(557): n is a, c, g, or t
  misc_feature (579)..(579): n is a, c, g, or t
gtctattcctggacagctagccatcgcgtagattatgacttagttgtgtatgcctagagtgaatccactgctctacaatggagagtcatggatgcagttttcagccttgctctcagcctttctttaagcaacaaagcacatacacgcatcgtccctttgcgttccagggactgatgatgtgtcactcagggaacctgtgaccacaggttaggcaagtctctgtcctgctgcttcctctgacctatgtacatagtcaggggagggccctgtcaacgtgcccacaaggttcctttatcctttgtcattacgtcattgtccaaggtgacaggaggaactcagtcgttaaaatgacgagccttattttcatgaaataaccaggctcactgaggtaaatggtgctgcctggggaaagagttatttattggnaacccctagcttccatcggccttccctctcgagcctgcctagcctgctttcgggaagggcagcctgcttgcctcccntggccatattgcccnggtccaatgtcccttcagntgatgggtcagttaaagcanaagctgccattgttaaaagccnagtt

SEQ ID NO: 668983 - DNA, 290 bp, Homo sapiens
  misc_feature (67)..(67): n is a, c, g, or t
  misc_feature (104)..(104): n is a, c, g, or t
  misc_feature (120)..(120): n is a, c, g, or t
  misc_feature (199)..(199): n is a, c, g, or t
  misc_feature (239)..(239): n is a, c, g, or t
ttcggacgaggacaaccagaggagggagagttttccaggaccagtttggagagccatgtagaatggnatgtttggagagaaagaggaactttcaggtacatgtnacagcaagaaataggnaatctccagggagaagccaagggaatacacaccccaacctcactttctgccctcactctgatctcctgccacaactctncatgggccaaactcgaccaaaaagccagtgagctagaagnccctgttgatgtggttcattcagttcaccttttccagggcaagagagtaaa

SEQ ID NO: 668984 - DNA, 1252 bp, Homo sapiens
cccactccaccttactaccaggacatttcttaacaaaccagtatacccaaataaagtataggcgatagaaatagaaacctggcgcaatagatatagtaccgacaagggacaagatgaaaaattataaccaagcataatatagcaaggactaacccctataccttctgacatacaatgaatcaactagaaagtaactctagcaaggtatgagccaaagctaagaacaccgaaaccagaccgagcataaacataagcaacagcttaaaaagagcaacacccgacgtatgctacgcaaaacatagcgcggaccgcaatacaatacggatagagagcgaccaacaccatacacagaagacctgcgtgactacgaccggatagaccaaagacatacgcacagtccaagagaaaacaaccactataccacccacagcccacacaacgaacagcccttcgaaaagatacgcaccgtgcaaaaacctgccacctggacacgaacccaaacacaggaaacaagaatcaacacgcaacccacaaaagagaaaaaaccaccacagaaaaaacgaaagaagatacccacacaagataacaagcaccccgaagaaaaactaggaccataaaataacagacaggcaacaacaaaatccacaggaacaagcaggaaaaaagacaacaaaaagaacccaaaaaaaactaaacaccagcacaaaacgataatacaatcgaaaagacagtcaacagaccaacaacgaacccaacgcaaacaacaagaaccacaacaaaaaaaaacaaagacacgaaacaaaaaaaaaagaaaaagacgcacaaccacacacacaaccacaggagaccaaccacacaacaaccgagcagacgagcgcacaacaaggcacaacacaacaggcaaacacccacaaaggcagacacaaaaccacaaaggaacaccaaacaaacgcgacatgacccgcacgccaagggaacaaaaaagcaagacaccagacccgtaaacccaccgaaaaacaaaaaacgaacaacgaaagaacaacagaaaagaagacagaaaacaaggaaaaagcaaaggacacagaaaacaaagagaaaagagaaaaaacagacaaccaagcgagacaggagacacagagaaagcaaaacaagaaaaaaaccgacagccaaaaaacaagaacacaacaagaaaaacctaacggaagccacacaaaggacagacaagcagctagagaagcagacacgaaaccaa

SEQ ID NO: 668985 - DNA, 184 bp, Homo sapiens
  misc_feature (50)..(50): n is a, c, g, or t
  misc_feature (154)..(154): n is a, c, g, or t
  misc_feature (170)..(170): n is a, c, g, or t
gaaagattgccaaggaatcatcgaggacgtcatcctgctgggtgcgcctntggagggagaagccaagcattgggagcctttccggaaggtggtgtccgggaggatcatcaacggctactgcaggggagactggctgctgagtttcgtgtaccgnacatcctcggtgcagntccacgtcgccggc

SEQ ID NO: 668986 - DNA, 234 bp, Homo sapiens
gctgtcttgaggatcccgaggtgtctggtgcagaacacggagaatggggcccaatgcagagcatgctgctggcagcgtgctgaaggcagagctgcccagctgagcagcaggagcagtgggaagccttcgtatcggggcccctgtgtggagaccaacaatgaagaacatggtggacctgtgtgaacacccaccaccttacactctctccatgtgacgatgatggacgacctggct

SEQ ID NO: 668987 - DNA, 463 bp, Homo sapiens
gccatgtataacatgtgataacaatccttacctcctagggggtggctgagacggcctattaacacccttatccattttcctttcctgtatgttgtaatcctcccaatttttaagccaaaggaaatgactgcccaaaataaagactccatttcccatcctcccttagagctgggtgtgtccacgtgactctgcccagcatcccttcatcctcctaccctcggggtgtgcactgtgggtgagggtgagctgctcagggccttgcagatgaggacactctcctcagggggacacgcacagcaaggcggagggagctggagcccctgtggactttgcagatcagagcttgggcttccatgagcgagagaaatggacttttgtttattggagtcttggttagacgcggttcaaaccatataatttctaatgcagatttttgaggttaagagcacggttatcataattt

SEQ ID NO: 668988 - DNA, 954 bp, Homo sapiens
  misc_feature (372)..(372): n is a, c, g, or t
gtgaatgaggaaggaaacttgtcgatgtgccgggcagctcgaaagtggaattagtatgggtgatgtagaaaaaggcaagaagattactaagtgaatgtccccagtgccagtagcgtgtaatagggaggctgagcactaagacatgggccaaatctctcatttctccgcttcgagccgggaagacagtgtctgagcccctggattctcgttatacaggcgccaatgttggaacaaaggcatcatctggctgcagagggatacactgatgggattatttggattaatcccgaagcaaggtactatccctgtgacacgagaaatgatctgggtcgcgattaattaccaaggatatgacacgcggcaggacttaantaggcttatctcaaaagaggtactactgagatacataggtagtccactgcctgtatttattacaatagtgagaacatgtcctcatgcacttttagagtgctgtaccatcctttaatagatctcagtactccagaattcggatcatgactgacctgcaccgactacattgtgtggtccggcctgattataactaagactggctggtgtgtaatgactatgtccgggtgcttgaccttgtacctggtcaccttccgactgcagttaattgggtatactgtgtataccccctttgtacagatttcatagaactcgaaggagtgtcacttttcccatgatggtaagtgcatctaaaaattactgcgattgctaaatttctcatgttatactgcacgtgggtacgagacagggaaagctgcttgtcaaccaccaatcctgaatggggagggcatgcctaaggagggtcaacaaaggtcagctatctgggacacaataaatccgtatgttggtcaagtctgttgaacataacacttcagcaagtgaatcagaaaaatgaaattaatatacacacttaaaattacttca

SEQ ID NO: 668989 - DNA, 212 bp, Homo sapiens
  misc_feature (204)..(204): n is a, c, g, or t
ctgcccctactactaccagaagcagcgggtctcacaccctccagaggatgtacggctgcgacgtggggccggacgggcgcctcctccgcgggcatgaccagtccgcctacgaacggcaaggagttacatctgcgcctgaacgaggacctgatgctcctgtgaccgcggctggacacctgcggctcagaatcacccacgcgtagntagtagtg

SEQ ID NO: 668990 - DNA, 127 bp, Homo sapiens
taatggtgatgcataacttgtggtttctgggattgagccacagaccttgtgtgagaaggatggagcctcctgccctcagtcgtgctgctagtagtgggtgattcagtgctgtgctccatgcatggtc

SEQ ID NO: 668991 - DNA, 337 bp, Homo sapiens
ttttttggccttaaaagggggtgggcccccccccccccccggggtgggggaagaccccctcccgggcagggggggcccctccgccctgtggtttcccccccttttgttttttaaagggctgtcccttttttgtttctccctaactccctgaccttggaaccctgggggctggggggggttttggccccctttcccttttttgggtggctccccaaaccctggcccctggggggggccaggtgtgtttgtccttggggcctgggggggtttttttcctccgctccctccccccgccctgccccttttggcccttttaactgcccttttttgggcccca

SEQ ID NO: 668992 - DNA, 166 bp, Homo sapiens
tccactaggaaaaatcccaggaagttcctccatcattcacattggctccacatcatctagtccgtccttcatcctcactcgctcctccgttgtcctccctcattctacctccatactgccttggcaccttcctataccgctaccctgtgcgccttggacagtacca

SEQ ID NO: 668993 - DNA, 387 bp, Homo sapiens
  misc_feature (17)..(17): n is a, c, g, or t
  misc_feature (39)..(39): n is a, c, g, or t
  misc_feature (48)..(48): n is a, c, g, or t
  misc_feature (157)..(157): n is a, c, g, or t
  misc_feature (341)..(341): n is a, c, g, or t
  misc_feature (345)..(345): n is a, c, g, or t
  misc_feature (348)..(348): n is a, c, g, or t
  misc_feature (353)..(353): n is a, c, g, or t
gggggttgcaaccgccncgtttaacccgcccgggaatgncccggccgncgcgtgcctgcggaagcgaaggatgtgtcgggctcaaatggaaccgtccacgcggcgcccacggatgcttccaagtcgatatgcggtgcgttttcgtcgcgcgggaatntggcgccgatgctcctgccacagttcgtcggaaaacagcgccgcgacgatgacgagcggcagcacgaggaatattccgagtatcacttgctcgaacacgatagcctccttgcggtggcaggaacccttgctcccattctaggctctgaacctcgcccgcgttcattttcttacagtgcgaaacngtgnccngtggnccgtgccgcgcggcgttcgcacgtacgccggcat

SEQ ID NO: 668994 - DNA, 112 bp, Homo sapiens
caggtttccggtggtcagctgggtgacgacctcatggaccgtgacgcctacctcaagctcacgccgagtgatgatcatgactgaccacgctagaatcggtgcggcctcgaag

SEQ ID NO: 668995 - DNA, 237 bp, Homo sapiens
ctcatcaggaatgtgtatacaacatgagagaacttttctaaggactgatacatagaaaagattttattttacaatgagttgtaacgcttgtgttatctttgtcgctgcacgctatctgcccaagttaatgcaactggacacattttttatgtcagaaaaacacacacacacacacacacacacacacacacacacaaaacacacagaaaacaatgcttgacgctttctcatacactt

SEQ ID NO: 668996 - DNA, 357 bp, Homo sapiens
ctcctctctgtctcgtctttgttggtaatcaagcctactactgttgtgacgtctgcaaacttgattattgagttggaggcatgcatggtcacacagtgagtacaggagggggctgagcacgcacccttgtggcaaccaagtgtcgaggatcagcaaagtggagatattgtgtcctaccttcaccacctgagggcggcccatcaggaagtccatgacccaattgaacagggcggggttgagacccagggcctcaaactgatttctgccctgtgtactttgggctggttagacagtatttgtacatgctctgtgtggtcatactgaaggtatggtatctaatcacttactggtcgacgc

SEQ ID NO: 668997 - DNA, 860 bp, Homo sapiens
agacatgaggagttactagtctcgagctgtcggtctgtcaatttatcacccttgacacactccggtggcttcattattaacggactgccatacggcacctttcccagaaaccgcgctaaaggcgggcgcccagaaggcagcaggacactacagctccttcctctggggcaaaaaggagggtgcctgggaagttcgagggctgcagtggggcaggcagaggctcccagcaacatggctcaagggcaggcagcggcaggaggggcgaggcgtgggcgagctccagtgagctccagtgaggcggcgcgacatcacatagaggcggtagaaaaccgtgcgctgcatgcgagagcatggactctcgcagagccgaagcatgagctgcaagaacaccttgtggaatggcgtgaccaccggagatataaactgctagggtagaagccccttgaatgatgccatgatgctcagaccaccgtgggagcccaatgtggcacagacggccgccttgaagcatgcattctcgaatgcggctcagcaatctccgggtccactgtggctggagaagcccctcacaccccatgaagagagggtaccgggacaaggcagcttccaaggtggaccacttgagaagagccgcaggggcctcactccaaattctgcctctgtggcaaagggctgcagatacatcttgctagaaggcccacggaggggcacaagggccccagttggccggcaagtgatggggaattcggaaccaggagcatgcccctctgaggtagagggccccgccgatgaaatagcgtctaccatattagaccttgggaagcgggcactttatgagtggaaaacttaatggagaaaat

SEQ ID NO: 668998 - DNA, 826 bp, Homo sapiens
agtccgagtggagagagcgagctgagtggttgtgtggtcgcgtctcggaaaccggtagcgcttgcagcatggctgaccaactgactgaagagcagattgcagaattcaaagaagctttttcactatttgacaaagatggtgatggaactataacaacaaaggaattgggaactgtaatgagatctcttgggcagaatcccacagaagcagagttacaggacatgattaatgaagtagatgctgatggtaatggcacaattgacttccctgaatttctgacaatgatggcaagaaaaatgaaagacacagacagtgaagaagaaattagagaagcattccgtgtgtttgataaggatggcaatggctatattagtgctgcagaacttcgccatgtgatgacaaaccttgggagagaagttaacagatgaagaagttgatgaaatgatcagggaagcagatattgatggtgatggtcaagtaaactatgaagagtttgtacaaatgatgacagcaaagtgaagaccttgtacagaatgtgttaaatttcttgtacaaaaattgtttatttggcttttctttgtttgtaacttatctgtaaaaggtttctccctactgtcaaacaaatatgcatgtatagtaattaggacttcattcctccatgttttcttccctttatcttactgtcattggtcctaaaaccttattttagaaaattgatcaagtaacatgttgcatgtggggcttactctggatattatcctgaaggccccttcctgcccatctaaaacttagaatgggggttggggccaaatgggggcgacctccc

SEQ ID NO: 668999 - DNA, 456 bp, Homo sapiens
  misc_feature (1)..(1): n is a, c, g, or t
  misc_feature (49)..(49): n is a, c, g, or t
  misc_feature (180)..(180): n is a, c, g, or t
  misc_feature (422)..(422): n is a, c, g, or t
  misc_feature (438)..(438): n is a, c, g, or t
  misc_feature (443)..(443): n is a, c, g, or t
  misc_feature (451)..(452): n is a, c, g, or t
naccctcatttcactcttttcccccaatcttgggaaaaattcccagccnaattctggttttaaagattccatatcaaattcaaagtcccctcccctcccttttggccgaggaaagacaacccctttggagcgaaacacaaaagagcaaatgtaaaatcccatctggggcggggccattgngttgtcacgccctgtaatcccagcactttgggaggccaaggcaggcagatcacgaggtcaagagatcgagaccatccctggccaacatggtgaaaccccgtctctactaaaaatacaaaaattagcttggcgtggtggcacatgcctgtaatcccagctactcgggaggctgaggtaggagaatcgcttgaacccgggaggcagattttgcagtgagtcgagatcatgccactacactccancctggcgacagggaangttcngtctccannaaaa

SEQ ID NO: 669000 - DNA, 606 bp, Homo sapiens
agtccgagtggagagagcgagctgagtggttgtgtggtcgcgtctcggaaaccggtagcgcttgcagcatggctgaccaactgactgaagagcagattgcagaattcaaagaagctttttcactatttgacaaagatggtgatggaactataacaacaaaggaattgggaactgtaatgagatctcttgggcagaatcccacagaagcagagttacaggacatgattaatgaagtagatgctgatggtaatggcacaattgacttccctgaatttctgacaatgatggcaagaaaaatgaaagacacagacagtgaagaagaaattagagaagcattccgtgtgtttgataaggatggcaatggctatattagtgctgcagaacttcgccatgtgatgacaaaccttgggagagaagttaacagatgaagaagttgatgaaatgatcagggaagcagatattgatggtgatggtcaagtaaactatgaagagtttgtacaaatgatgacagcaaagtgaagaccttgtacagaacgaggaaaaattcttgaccattgtttatttgcctttcctttgtttgccttatttggggtttctccctctggc

SEQ ID NO: 669001 - DNA, 519 bp, Homo sapiens
  misc_feature (300)..(300): n is a, c, g, or t
  misc_feature (317)..(317): n is a, c, g, or t
  misc_feature (320)..(320): n is a, c, g, or t
  misc_feature (329)..(329): n is a, c, g, or t
agtccgagtggagagagcgagctgagtggttgtgtggtcgcgtctcggaaaccggtagcgcttgcagcatggctgaccaactgactgaagagcagattgcagaattcaaagaagctttttcactatttgacaaagatggtgatggaactataacaacaaaggaattgggaactgtaatgagatctcttgggcagaatcccacagaagcagagttacaggacatgattaatgaagtagatgctgatggtaatggcacaattgacttccctgaatttctgacaatgatggcaagaaatgagncaagcagtgagagaatnggnagcatccgntgtgataaggatggaaggtatatagtgctgagaattcgcagtgagacaactgggagagtacgagagaatgatgatgatcggagcgattgtggtgaggtagtaatatagagtgtcatgagacagaggagactgtgatggtaatctgtaatgtatgcttctgggtatattgaagtctcctagaaaattgtga

SEQ ID NO: 669002 - DNA, 267 bp, Homo sapiens
taaagaaagacttttaaaaggagggtggaaaaaatttaaatagagggtagttggaattactatgggtagtctaaggcatgataatattatgggggtaaaggaaggaaaattgtcctggtcccagggtgatgtctccataaaggagaggaggggtggcaatatgggaccagtaactgggcgagtgcctaaggaaaaaaacacgtctgggggggccgggggggtgtgagtgagtgtgcgggggagtagagagggtgggtgtgtccctcc

SEQ ID NO: 669003 - DNA, 314 bp, Homo sapiens
  misc_feature (17)..(17): n is a, c, g, or t
  misc_feature (96)..(96): n is a, c, g, or t
  misc_feature (105)..(105): n is a, c, g, or t
  misc_feature (121)..(121): n is a, c, g, or t
  misc_feature (124)..(125): n is a, c, g, or t
  misc_feature (133)..(133): n is a, c, g, or t
  misc_feature (136)..(136): n is a, c, g, or t
  misc_feature (142)..(143): n is a, c, g, or t
  misc_feature (145)..(145): n is a, c, g, or t
  misc_feature (151)..(151): n is a, c, g, or t
  misc_feature (154)..(154): n is a, c, g, or t
  misc_feature (164)..(164): n is a, c, g, or t
  misc_feature (176)..(176): n is a, c, g, or t
  misc_feature (182)..(182): n is a, c, g, or t
  misc_feature (312)..(312): n is a, c, g, or t
ttgtgccttggagagangcccagctcctccaccagtgtgagaacacgtggcccaccaggcacctgctgtggggattgtgtctttggttggccagancttcatccngagctcactggaaggnggnntggcaggnagngggggnntncctacngcnctcctccccnggggacagaggntggggncagagaaggaggcatttaagctttgctagcctcctgctgcctctgaggctgtaggacacgtcattcaaacctaccatcaaagtaggcttctgatttcaacttggatctcacggtagcccagtgataccgnag

SEQ ID NO: 669004 - DNA, 1112 bp, Homo sapiens
agtccgagtggagagagcgagctgagtggttgtgtggtcgcgtctcggaaaccggtagcgcttgcagcatggctgaccaactgactgaagagcagattgcagacattccaacagtacagctttttccactcatttgcaccacaagcatggtgcatggcaactcatcacaccacacacacaggcacatcgggcaactgctaatgcagcatctcatatgggccagcaatccccaccagcaagccagcagttcccaggcaccatgcattcaatgcacacgtcagcattgctgcatggtcacttggcccacaattggcacttcccttgcaatttcctgcacacatgcactggcccagcacacaccatggcacacagcaccacagccacagtcgcaccgcacatgcaacttcagcagcacagcccattaccgctgtcgctactgcatcacagcgcatgaggccacctcggcatcatcacttccacctggcctgcccagcacacttatcagccccaactgctggcacctgcacccacacacccatatgccgccacaccgaacagtttcaccccatgcacttgcacacgcacaagctactcgcatgcaacacgtaggaatccaagggcgcacacaacacagcaatcactaccgccatgcgctccactcacgtccacagctacagcgacctaaattggaccacacggttcaatgcaccgccacacctcgcaaattgaaccactacataaccaaaacgcaacgaaccccttcagcgaccacaacaacatgccacataccaacaactcacaccccgctattcacatatacccaaccaagtacacataaacacatcacggccaccattctatccatctacgatcaccacccaaacaaacataaataactcatcaaacataccaccacgcatacacaatacaccactaccctccaccaacactatcaaacaacatttaaactcacacacacaacaatcacccataccacaaccaccacacaccctcactacatactactcatcacacaaccgtcctacacctcaatctacccacccacttcaaaccacacaaccacaccacacaaaacttcatccaatcacata

SEQ ID NO: 669005 - DNA, 259 bp, Homo sapiens
agtccgagtggagagagcgagctgagtggttgtgtggtcgcgtctcggaaaccggtagcgcttgcagcatggctgaccaactgactgaagagcagattgcagacggagcttcactctcttgcccaggctggagtgcagtagcatgatcttggctcactgcaacctttgctgtccaacttcaagcaattctcctggctcagtctcccaagtagctgggattacaggcgtgcaccaccacacccggctagttttgtatttt

SEQ ID NO: 669006 - DNA, 194 bp, Homo sapiens
gcattgaccgtagtatacccccggtcgtgtagcggtgaaagtggtttggattgagacgtgccggtgaaattgcatctgtctctataagctctaatgtgaggagagcagctgcatgagatgcatagtaggtctctgtgatgtaactgcatctatgacggacatgggggcttcaaatcgggagataactaactcga

SEQ ID NO: 669007 - DNA, 140 bp, Homo sapiens
gcgctgctgagcatcaggtgtacaaacacttcacagacattgtctacaattggtccctgggcttatttaaagatgaggatggacacaccgtggcggggccgatggggaactttttctatgcagcgtaccccctgacggag

SEQ ID NO: 669008 - DNA, 775 bp, Homo sapiens
agtccgagtggagagagcgagctgagtggttgtgtggtcgcgtctcggaaaccggtagcgcttgcagcatggctgaccaactgactgaagagcagattgcagaattcaaagaagctttttcactatttgacaaagatggtgatggaactataacaacaaaggaattgggaactgtaatgagatctcttgggcagaatcccacagaagcagagttacaggacatgattaatgaagtagatgctgatggtaatggcacaattgacttccctgaatttctgacaatgatggcaagaaatgataaggatggcaatggctatattagtgctgcagaacttcgccatgtgatgacaaaccttgggagagaagttaacagatgaagaagttgatgaaatgatcagggaagcagatattgatggtgatggtcaagtaaactatgaagagtttgtacaaatgatgacagcaaagtgaagaccttgtacagaatgtgttaaatttcttgtacaaaaattgtttatttggcttttctttgtttgtaacttatctgtaaaaggtttctccctactgtcaaacaaatatgcatgtatagtaattaggacttcattcctccatgttttcttccctttatcttactgtcattggtcctaaaaccttattttagaaaattgatcaagtaacatgttgcatgtggggcttactctggatattatcctgaaggccccttcctgcccatctaaaacttagaatgggggttggggccaaatgggggcgacctccc

SEQ ID NO: 669009 - DNA, 910 bp, Homo sapiens
gttattattctcgtcgccctccacataacccattagatgtagcttctctcacttctctactactaaggggcctccccgccgtctcctcgcggggtggataaaatgtgtgttccgcgggcggcgcgccaacaaactacctcgtgtgtcggcgacgcagaattattttgtttttgcgccgcgacaaggagagcccccctcctcgagagaagagagaaaatatttttttttctctcgttggtctcttcttgttctcgccccttctctcttcgctcgagaagacctcatcttgatttttgtcccccccacctttttgtgagcctctcgtgtgatcgcccacgcgcgggttttttgctcccccgcgggttataatgagagcacacacgcgcccacacaaaaaaagagtgtttgctcccacacgagcgcgcgtgtgactgctacacacacgcccctcgtggggagcgcacctggtgtggacacacaaaatgtctccacacgcgccgcgtttttctcagcccccttgagaggggtacccgctgtacagacgggccgcccacacagtgtttttgtggggggggaggcaccgcggggtgtacactgttctagaggtttctatatagacccctgtgctctctctggtgtggggacacctggcgcgccgcccacacctctctctcccccgcgggtgtttacaccctctcgcggggacacgccctctctcctggtgacaagattttctgtgggttttgtggggacccgcgggggtagcgctctcccacaaacccgttaaactggggcctctcgcgggggcacacgattttttgccccctggggcttcccccccacccctttttccctttttgtgaccccgaccccccgcgggttttgtgaaaaaatttgggggggggggcca

SEQ ID NO: 669010 - DNA, 122 bp, Homo sapiens
acgcgtatctatagaggtgacgtgtctctccattcctctccaaccctgcccaccaccctgtaccagagctgtgatctctcagtggggggcccatctctgctgacctgggggcgggcagaggg

SEQ ID NO: 669011 - DNA, 858 bp, Homo sapiens
  misc_feature (28)..(28): n is a, c, g, or t
  misc_feature (35)..(36): n is a, c, g, or t
  misc_feature (38)..(38): n is a, c, g, or t
  misc_feature (80)..(80): n is a, c, g, or t
aaaattttttttagtgccagtccctgancatatcnngnaagttaattttcttgcattttaaaatatctggattatgaagnaaaagtgatgaaaataaattaaaactgaattaccttttctaatgttttttttttttaagtaatggtaattctatttggtgttttatggtatggtgatatctggtttctggtggagatttggggagttattggaaatctctggtaatggtggtatgggttagaaaatttctggtggaccttaaaattttaccagttatttatagaaagagaaaatgggggaaatggtttataggctttttactagcagtatcagtgaacactgtgaactccattattcatgaaaataacacgttaggatgggaatacgtctattcaaaagtgaaagaatataaagggtttagtttttggtttttactctaaagatagaatgggggagtaaacttcaagtttgttagagtggtctgaatatttaaaatcctataataatttcggaatcttcattcttggagtatgggatgtaaaagacaaatatatcctacaggtagtatcatcatgcagtatcaaggtccctttgcttcttactggaaaggtatcacaaactcataaaatctattcacagtacaaagagtgattgcaaagttggttttttcctagcgttcatttcatcattacgacaatggaagttaaagtccggtggaatggggcgagaaaaagtgctgtttgacaaatgattgtattagggctgcttaaatgtgaaaatgtaggatggtggcaaagtggaaatgtcggggtgtatagaaaagagaggtgcattaaaactgtcttgttttttattttt

SEQ ID NO: 669012 - DNA, 578 bp, Homo sapiens
attggatactctggtatcaactcatcacagctgatccatgatgaacaacggcaggacatagaataagatgtaagtacataaatataacttgtctcaaaaagtgctccaagggagcccgacgaggactaactagcaatgccctgacatccaactgaccttctacagaaaagtgattgactagacaagtggtcttcccagtcataagtagaggctctatgtagacttctccatactcctcttgggtgatgtcatcagggtttctggtccaaataggctatggtctatgtaatagttcttcctgatcaatgtatttctcttagatctatcttagtatatcttcttcttatccttaccgctgtcatcctcctcatctgaacccacatcttcgatctatggagttaaacttcatcatctttatcttcctcttctttctcacctttctcttcctctgactcatcatcactaatatcctatctctcgttccttctccaaataaagggtgatgggatagcctatgaactgcgaatgcttcttcactacttctttgacccgcctctctactaggtactctgtctgat

SEQ ID NO: 669013 - DNA, 212 bp, Homo sapiens
caatctcgttcaggactctgtagaagtacagatcaggcatgacctcccagtgtgtgtacactgggaaatgtgtgccacgacatgctcaagaacttcccgagccagcatccaccacatcaaacccagtgagtgaggctcccttgtttgatgcatgggaatggcaaatgtcccacatatgcgcagagggacgaatcttgtgttacacaggcgca

SEQ ID NO: 669014 - DNA, 405 bp, Homo sapiens
tagctgtcagaggatccaagcttacgagggacgtgacagaaattaccaaaaaaaaaaaaatctgaagaccagtacaattttattatctcatgagatttttattctggacaagtcaaggaatggatgtctctatattagaagctaatgggtatttctctaagctctagattctgtgtaacgcagatatcaaacccagtcttagaacatttaccaattatgaaacgcagttttcacccattttggtatccagagcgcctcggggacccaggcagaactatgggcagggttaaagggttccagtttacggggctgacggtgagtctatcattcagtaattcaaaagttaagtaaaatgaactcacagtatttatagagttttcctagtgaaccctgcctcgtatagct

SEQ ID NO: 669015 - DNA, 309 bp, Homo sapiens
  misc_feature (39)..(39): n is a, c, g, or t
ttactacttagtccctcctatagtctgtcatgccaaccnttagatccctttggagatgacactaaaagtaatttcagagttcttttacagtggatctaagatgtgatagaggaactttggcaccctacgagagagggggctttccctcagacagacaaaactcctgcgagataccacggacaagatattaactcgtatccaggctcttacagctccacacgtgaaattacagtgctgatgaaaatgaccaacttgatactgaagaaattagatagagtgtactgtttgttactgcttctacatctgaat

SEQ ID NO: 669016 - DNA, 1095 bp, Homo sapiens
gatgatattaaagatgaatcttcggagttttcaagccattcaagtcagtccatcttgaagacaaagctctgatggcaccaaatcttgactcctttggacgcgatcgggcactgtatcaagagcatgcaaaacgtcgcattgcagagcgggaggccaggaggactcgtcgtagacaagccagagaacaaaccggtaaaggactcgtcgtagacaagccagagaacaaaccggtaagatggcagatcaccttgaaggcctttccagtgatgatgaagaaacttctacagatattactaatttcaatctggaaaaagatcgaatttcaaaagaatccggcaaagtttttgaagatgtccttgaaagtttctattcaattgactgtattaaatcacagtttgaagcatggcgttcaaaatactacacatcctacaaagatgcttacattggcctttgtttgccaaaattattcaaccccctcatacgacttcagctcctcacttggactcctcttgaggcaaaatgtcgtgactttgagaatatgctgtggtttgaatctttgctgttttatggttgtgaagaacgagagcaagaaaaagatgatgtagatgttgccctactacctaccattgtggaaaaggtgattcttcctaaactaacagtgatactaaaattaatcaatggatatccttcagtagtgaatgcagaaaataaaaatacacaggtatacctaaaggcacttttattgagaatgagaagaactttagatgatgatgtatttatgcccttatatcccaaaaatgtcttagaaaataaaaattctgggccttacttgttttttcaacgacagttttggtcttcagttaaggtcataaaacccccattccagagagggtcctgccccatacccagaaggaaagaatgctgctcagagaggccaagaagaatctggacggacaggccttgtgttgtcttctcttgagcagtagatcatacctttttgtccagtcatgtttctgcatgcctgtacatatttcgttaaacctaaacatagtagacaatttctcctccatctttgggtcttcattctgaaggctg

SEQ ID NO: 669017 - DNA, 113 bp, Homo sapiens
tgtcccgggctatactggattgtttgagagaggatactagctcaaccttatcaggcagctgtatcaccccttgctacagagcggtctatcaaggtgcaggaaggtctatcctg

SEQ ID NO: 669018 - DNA, 553 bp, Homo sapiens
  misc_feature (36)..(36): n is a, c, g, or t
aatcgagctcggtaccggtgtttcctttgtctcaanagcaaaaaaggaactcaaacaacctaacagtgagaaaacaaataatccaatattaaaaaatgggcaaagggcccaggtgcggtggcgcatgcctgtaatcccagcactttgggaggcctaagtgggaggatcgcatgagcacaggagttcaagatcagcctgggcgacacagggagactctgtctctacaaaataaaaaaacaaaaaattgactgggcataatgatgcacgcctgtaatcccagcaacttgggaggccgaggaaggagaatcacttgaacctgggaggcagaggtttcattgagccgagatcacaccactgcactccagcctgggtgacagagcaagactccgtttcaaaaaaaaaaaaaacaaacgggccagatgtggtggcttatgcctgtaatccagcacttggggaggctgaggggggaggatcgctggggatcgggagtccaagacaagccgggcaacataacgggactcggtctctacaaaaattgaggacacggggaaac

SEQ ID NO: 669019 - DNA, 621 bp, Homo sapiens
  misc_feature (67)..(67): n is a, c, g, or t
  misc_feature (80)..(80): n is a, c, g, or t
  misc_feature (99)..(99): n is a, c, g, or t
  misc_feature (437)..(437): n is a, c, g, or t
  misc_feature (495)..(495): n is a, c, g, or t
  misc_feature (562)..(562): n is a, c, g, or t
  misc_feature (580)..(580): n is a, c, g, or t
ctcaacgctttatactctcataaaatttatcccagtagcactatttgtcacctgatctcttataganttcttgatatatnaaatcagatcctaacattnatcgatttttcaaatatttacttattttcctcaccacaatattaattctagttaccaccaacaacattttttcaactttttatcagatgagaaggtgtaggaattatgtctggttttactaactggctgatgacacagctgagcagatgctaatacagcagccctccaagcgattctgtataaccgcattggcgatattggcttcattttagctatagcatgattcctctcatcttacaatacatgagaacctcaacgagcatttatcctaaatcctacccctgatctgccattaattggccttctcttagcagcagtcgggaaagtcagctcaattnggcctctacccctgacctccttccgccatggaaggtccaaccccagtctcagccctantccactcaagcgctgtagttgtagcaaggaattgtactgcttatccacttccaccccttaaataganaataatatgttaatccanacccttaaaatgtgtttaggggtgaagtataaagcgttgag

SEQ ID NO: 669020 - DNA, 91 bp, Homo sapiens
gcggccgcctactactactactgctcgaattcaagcttctaacgatgtacggggacatgccacagtatattaaaccaagaagtacaaatcc

SEQ ID NO: 669021 - DNA, 959 bp, Homo sapiens
gatgagttgagccaggcacggcataatggtgaaggcagttaccactccctctgctgatttcggaaaccaatatatatacttccgatatggatactgaatgtgcgaaaggacttgtaccttcagaccgctctgaatcaatgctacgccttccgaagtccctagagctgagctgtgaggtcaataggtctccgatcgaggaaaaacctggctgacgttcaggagacacaagggttcatgtagcagaagctaaatcgacgaatagtgtgacgcgtatgcataattcttaagtagtgatatctcacctgacggggatcgtcgctttgacgtgactagcctattcgacgtgtgtcggatagtttttgcatcagtgtatattttgcgcattctctagaaagtgcactactatcattcccgtcgaccattggtctattcagtactactggagttgagagccaactcatggaaagaaatcgccctgaactgtgtggcaaccgtattactctacattctacaagcccttgatatggactctcatgtccgatttgttcagtcgcagcattaattgtaccgaaataccttgaccatcactacgcttctgcaacggaaaaacattggtattatttactcaatctactctaaatggctacgctatatctttggtcgtttattcaactgacggcacaacaaagatggttgattgacctgatgcgtcacaaatggacattgatggcattcaaatgacgatataggacttacataggcctttgtatcgaacagttgactttccctggctttatgggacgtacctcgtacctaagtacccgtgattcgaattggggggagcgaaaacggcaacggtgtcgggctccgtttactctggcccttcgcgtggcccccattgtcagcccatcttgtcgcgtgatatggcgtggtttactggacgcttcaaaaccttcatg

SEQ ID NO: 669022 - DNA, 419 bp, Homo sapiens
ctgtttcataaaataagcaaacaactgccaggtgagagccacaggtggagaaggctttatacttcccatctgacgatggaattcttggaatggaggagacaattttatagtaagacaaaaggatccctgaaatgggaagaaaaccaaatatagggatatctaaaatacataatatgttattgatgatgctgtcagaacaggcaaggttgagaagttgagatgggtcacagaaaaaaaattatagatttccacattcttgaagaaggtgagttgtgtaacacaatccagctgtgcagctgggaatccaacaggctaaggaaaaaggacaccaaaactaagaagacacagaggttgtggtgagctgagatcacaccattgcactccagcataggcaacaagagcaaaactccacctcaatt

SEQ ID NO: 669023 - DNA, 998 bp, Homo sapiens
gcatcaaatggcggatgacgccgtgtgcatgggtggggcccggaggccctggatggtcctgctgatggtgaaccgcggtggcttccgcggaggtatcggcagtgccctttcggggtcgggttcagttggccgtggacggtggccggggaccgacggccggtacgttcgttgagagagaagtgccgtatgataattgtcgtgttagtgcccgatcatcgaaggttggggccgcattgcgtccagaggcacgatgcaatgattaagatcctctctggcaagggacgaatctagtcattcttctactcatgcccacatgtatcgcggaatccaggatggaatccattgagtttcctttgcttggcgcgtacgtcttttccaagggactgagtcggttttgcataaaattactcgccatctgccaagatagcgagacccggagccctcgcccagtggggaactcaaggtacattgcgcgattttgtgtcgctactcgtggtaactaaggaatcggtccaggttcagaggtgcattgtgagatggtttaatgatggtttcactactgggaagtgttcggggaacacgggactatactcgctagggtgcgcattcactcacttgtacctaagacatacttcccattccgcttgcccgtagccggggaaggaggattaactgtaggggaactaaaaggattcgggaaaggcgcccctatcacctggttactttgatagggatgacttcggccctgatgtagtgattctgtgcttgcgtaccgcctcgattcccgttgtaccgccagagggagtagcgtggaaatccggcgtccgcacctgttgacttaaaaagtttgctcaatgaatgggttggaaattcgattgaacttgataaagcattagcacggggcatgctctgacaccttgttgtacctctgctaggccgcactttgattccattgtaaacgcacggttacttaccgcgatctctggaaggggaggggc

SEQ ID NO: 669024 - DNA, 695 bp, Homo sapiens
  misc_feature (444)..(444): n is a, c, g, or t
  misc_feature (464)..(464): n is a, c, g, or t
  misc_feature (548)..(548): n is a, c, g, or t
  misc_feature (556)..(556): n is a, c, g, or t
  misc_feature (560)..(560): n is a, c, g, or t
  misc_feature (572)..(572): n is a, c, g, or t
  misc_feature (584)..(584): n is a, c, g, or t
tcgtttgaaaggcacaggtaatgcttctgcctgtgcagcgggtgtgctggtacagtggctgctctctctctctctctttttggggggctcattttgctgtttgattcccgggcttaccaggtgagaagtgagggaggaagaaggcagtgtccctttgctagagctgacagcttgttcgcgtgggcagagccttccacagtgaatgtgtctggacctcatgttgttgaggctgtcacagtcctgagtgtggacttggcaggtgcctgttgaatctgagctgcaggttccttatctgtcacacctgtgcctcctcagaggacagtttttttgttgtgttttattttttttattttttggggtaaaatgcatgacttggtgttgtgatgagagaatgggagacagagtcccggggtcctctactggtttaacaacatgggcttcctnatttcggttgcgacatggtnaattcacagaatagcacaaactacatattaaacactaagcacaaagccattctaagtcatgggggaaacggggtgaaactctcnggtggtgngganacagaatagagngaaggaagcgtnggcagaaactcctttggcactggtgtgtgattagacggcccggacggggcatggggcgcctctcgaaagggcgcaaccttaaagatggcgaacggggaagggcgcaagcgg

SEQ ID NO: 669025 - DNA, 238 bp, Homo sapiens
gaatgttggaccgcacggagggggaggagttcatggccaaggcggtggccattgaaaaccagtatatgatgattccgaggaccatggtaaacgtcactgcaatcattaagattatggaaaccaagttagtgaggtagtttttgaaccgatctctccatgtcaccttcacttatgtagtctctctgattctgcactctttcttcagagactcccctgaaggcccatgggctatcctgta

SEQ ID NO: 669026 - DNA, 102 bp, Homo sapiens
gacagaagacgtggccatccagtagacatgtgtagctcagaacacaaaggcccaccgttcctgacggatgccagcttgggcactgatgtcatactgatcccc

SEQ ID NO: 669027 - DNA, 212 bp, Homo sapiens
cgggggggggggggggggggggggggccccccgtttttttcccccccccttccccgggggggggggggggggggccccccccttttttttttttccccaaagcccccgggcgtcccccccccgtgcgtggaggaaggtgggtttttttttttcccccccggggggggtgggcccccccttttttgccctttttaagggggtggggggccccc

SEQ ID NO: 669028 - DNA, 235 bp, Homo sapiens
cgatctaaaggatcccttggggctccattcaggaaagaccgggttcatggagtcgagggagcgggagatggagctgcgggggctggcctgtggaggaggagcggcggaggcgtgagcaggtagaagggaggctgcagagtgagagtgccgggaggcagcagttggttgagaaggaggtcaagatgcgggagaaacaattttcccatggcacgaccccttgacccggttacctggc

SEQ ID NO: 669029 - DNA, 615 bp, Homo sapiens
cgctcaagccgaacgttttcagcctccacagccggtcttgcctcctgaagatttacgatcggcgtccaccttatcgaagatcccctgtcagttgccttcacgtttggagcgggtaatggggaagccgtcggtggatatgccgcagagtgaggattgcctactgctggatatcactttgccagcgggcaacgttgaaaaccgtgcggtgatggtctggtttcatggcggtggctacttcagtggcggtggaggaatgccctggtacggggctgaaaagcttgcgcaggaaggtaacgttatcgttgtcaatgtgagctatcggttgggcgtattcggctacttgatgctggatggagtctgccagggcaaccatggggctgctggatcagattgaggccgttcgctgggtgaaccgccatatcgcaaaactggggggtaaccaaacaacatcacattattcgggcagtctgcgggcgctcattcgattgcttatatgatggcgatgggaaaagaccgtccactgttcgcccatgcattttgcaagtccaccatggatcccacagatcaaaactgccaggcgtcgtacgtttccagcatctggcaagacgccaggca

SEQ ID NO: 669030 - DNA, 146 bp, Homo sapiens
acagtgggagtggaacctggcgattaagaaggagtggacagaatgaatgcatccagccccttgccccacccttggcacctggaagaattctctcaggcgtgattcagcaccctggtccctcctccctggtccacagcgtgggtccc

SEQ ID NO: 669031 - DNA, 373 bp, Homo sapiens
gggtttttctttcaaagtttgggtttttcccccccgtcccgtctatttattattcaaataggaaaaattcctttccaggttgttttcctggagcttataatgaaacgggagttattcccgttactagtttactgtcagagggccccctttttcaaataaaaattgccaaaaaaaccgaagttatttttataagaaaacccagtatataaatctaggaaaggggtcttctagtttttgggttgtttagacccaaaaaatcccaaatttgcccgtaacagggagttgtttagttataattcagaggggccagaatggtaaaaattcccacccgtcaaaaagggccaatgaattaaaaggcttgcccctttttcca

SEQ ID NO: 669032 - DNA, 142 bp, Homo sapiens
  misc_feature (19)..(19): n is a, c, g, or t
  misc_feature (84)..(84): n is a, c, g, or t
  misc_feature (116)..(116): n is a, c, g, or t
acgcgtcaagtaacatttnaacatcagagaaaggggataggaaaaagggtttaacaaaccagtccaggaagagccacgaagatnaaaagagtctcctggtgtgagctgggtcattntgtcggtcttgccgcgggaacgagtt

SEQ ID NO: 669033 - DNA, 267 bp, Homo sapiens
aaactcatcctctaacgcatcgtcaagcactgatctaaggcagctctgacggttcgtcatcgtcttgtcgccgaccttgtactggggaaagccggtcacgcacatgctttcgcgatagctcacccagcgataagtggccgaacatgggtatcagccgaccatctatcatttccgggtagtgtcgggaggtgctggagttgagctgagcctttttctggtccagccactcaaccaagtaaacgcccaggctctggctatctaaatcta

SEQ ID NO: 669034 - DNA, 391 bp, Homo sapiens
gctggaggaggcccctcaggccggggatttggggagggctagcccaaaacctcccgcatcgggcaggcaccccctgaagtacttccttcagggtttcccctttgtgagggggtcgagtagcctccccggcctgtttggaggaacaactggctttgcttttaaaaactttggccagtgggcgcccatttttttgcccttagagattccctgctttttcctacaaccgccaggcctggggtcctgaaaggaccttgggtggtaaaactgtacttggtgggagtgagggggtggggaggaaccatgccaatccccctccatgggttttaaatgcagtaaataacctttttggatgagacctggttcccaaataaacccgctatatctgttttga

SEQ ID NO: 669035 - DNA, 262 bp, Homo sapiens
  misc_feature (12)..(12): n is a, c, g, or t
ccaaattgttgntaatggcgcggctacaggtaccttgtgactatgaagattgacgaaaagttgacgggcacgatgaattctctctcagaacttacatcccagaagggccttccctaattcgggtcctcctagaaagtggagaagactgctggccttgaagaaagcaacaggcatgttgtgagctggctaaggctctaggtcttgagggaagcttaccgtttaaaaccagcaaaaggccagggcctacatcgcttatccaatg

SEQ ID NO: 669036 - DNA, 128 bp, Homo sapiens
  misc_feature (117)..(117): n is a, c, g, or t
tggtcagagttgaatggagataaaacacacacacacacacacacacacacacacattttaccttatttaggatctcccagaagataattttaactactttgtcatttctatatattnttaaatagctg

SEQ ID NO: 669037 - DNA, 121 bp, Homo sapiens
cctggcaaatggagatatgtgtgaggagggtaccccagcagttgagcgagggcactgtgtgcagctccgatggcaatggcccgggtctgaacaataaacagagtcagcttcatggcggccg

SEQ ID NO: 669038 - DNA, 291 bp, Homo sapiens
aaaagggagaaatacgaggaagggaaatagaacctgaaccgtacccaaaagcagtcaagatgggaaataccccaagcaagacagggagcaagggagatacagatggtaacaaagacatccccctggatatctccctaggtctcatgctaataacactggaaggatggcgaaaggactaaacttaggaaaaagcaacaaatgataacaatattgatgttatatttggactcagggacccaccttcaaaccctcaatcttctgaccaaactttgggtcgaatgaggatgtaac

SEQ ID NO: 669039 - DNA, 383 bp, Homo sapiens
  misc_feature (9)..(9): n is a, c, g, or t
tatgcacanattgtgttgaagatatgaatgaagaagtttccacacctttatgtggagactgataagtaagcaacaataaggaagggtccccaggttggggagagccccaagttgagaacaataatgaacaattattgtatgaacaattgttagagacagctaatcacaaacaacctgcgggcacaatgacctcattccacacgtagcaccctttagcaggaccctataaaactttcctccagcccttgcctctttgcaggtagccccttctctgctgagctgcccactgcaacatattttcacaatttctctaataaatctgcccttctttacctacaactatcttggtaaatggctttaccacctgcaaaactgaccctagg

SEQ ID NO: 669040 - DNA, 234 bp, Homo sapiens
ttcttttcccctcaaactccatgatatgcttctgttcacttattaaaatacactgggccagcgcagtggctcacgcctgtatcccagcactttggtgagcccgaggtcgggcagatcacttgaggtcaggagttcaagaccagcctggccaacatggagaaaccctgtctctactataaatacaaataaattaaccaggctgtggtggtgcatgcctgtaatcccagctgcgtt

SEQ ID NO: 669041 - DNA, 1045 bp, Homo sapiens
gagcgaaagacaaggttgtccaagaatctactgcgcatgaagtttatgcaaaggggcactggcatccagcaacaccaagcaaaccaactcagcacagcaagcacagcacaacagcacacaatccattcagtgcaagcagcacgtggtactttggcattttgcccagcagcttcacaagcagcaacagcagcagatttccatcaatcagcacagcagccagcagtttcattcactcatgtgcacagcatccttcgtcatcatggcacagcacatgtccattccagcaggcatttcacatccgtgcagcgttgcagcacacattggcatagcttccagcatgcacatgcatcaagccaccacaagccagcacaagcacagttgcaagcatgcacacaccagtcagcagccttgcatcgatagatcaagcatgcacagcagcatagggctcagcacagcatcatcgcaagcaccgtgtggatggggagcaccacattcgggcaaacacagcttggcccagcacacagcagcagaaccatgcccacattcatgcacagaagcatgcaacacatggcagccaccatcaacacccaattaacagccaacagccacagcatgttctctcaacagccccaaggcattccagcatggcatgccttcaagctgcatgggcccagggagtgccttggtgagaaagtcagcgagggacatcatggaagcttcaatcgccaaaaaggtggtcatctattaggtagattaaatacctggtaaccggtttactatgatacaggaagatatatcactttataggaaaagcaatgctggtgtacttagacaacacgaattgtgtcgatgggactgtttgtaccactccctgtgtgctgaacaaggaggaatcccattcacgacgtgggatttttaagaccccatggagttacacaaatggtacattggtaacatcagacttgcgttcctacaaacttgtataaacacacaagttcctcatacacaacgttctccagatcaatggacctgcacttggcttcaa

SEQ ID NO: 669042 - DNA, 335 bp, Homo sapiens
tccactctagaagatcccccaattcccgctctctgggtgctcgcgcaggaggctgcagcgggggatgggtgcatcaatattacaactcatcaccagaaggtgtacgtgccaaatttgcacttgctgacattgacttctggccagaaacaaacttctttgccgcatttatgatatcagcattagccactgaatcaatctgctgactgactgtggatggtggcatgtaagaaccagcaactagagcctgggacccgacttcttccaggaaacactcagacgactccactgacattaggtatccagctatcagcttgttcttggcagcttggacatct

SEQ ID NO: 669043 - DNA, 188 bp, Homo sapiens
cccccccccccggtttttttttccccccccccccccctttgccgggggggggggcggggggggggccccccccttggttttttttttttaaaattcccccgttttttttgggcctttttttcggggggggcctttttttcccccccttttttggggggtttttttttttttttttttcttggaaatta

SEQ ID NO: 669044 - DNA, 1722 bp, Homo sapiens
gtgacctgtgccacctagccctgccctgcccgctcgctcgctcgcccgccgcgccgcgctgcctgacctgccagcatgctgccgagagtgggctgcccctgctgctgcctgctgcctgccgcctgcctgctgcttgccagctgctgcctgctgctgcattgcttgctacttgtggctgctgagtggctggctggctggcgggggcgcgctgcggaggtgcttgttccggcttgccctgctccttgcagcagccctgagtgctgccttagtgccttgccttgcagtgtgccctcctgtcactgtgtttgctgccatgccactgtcctgctgggattgggcctgcattgtttgtgcactgggaatgtgcagcgcctgcagttgccaattggcgctgtgatgcatctgtcactgggtgaaggtccttggtggcttgcggagtcgttggcttgcgtctgtggttgttgcttgcgcctgtgactttgcggagggctgtcgatgtggctcgttgcagtgccggttcgtagctaactcgctcttgctggcttgctggtgtcccattgggtggcttgcaggcttgtctaagtacgccccgaccccctgggtggccttccctggatgtgctttagtgcccccgtttggccgagggtgcctgggcttgggtacagtttgtgcgcccgcagggggttgccatccttttggttagaacggagattgtctggctctgtggtgtaacttgccctggagtggttactttggggccagcgccaatgggccctctgtggaaggggccgagggtggtttttggcgcgatggaagccagagttaagaggcctgagttagaaggcgcaaagacttacaagggaagaatcgggggaagtggccctatggggctttgggcgacggcagaagcccaagtctggtttttggaacccataggctaaccccatttcgaacagccagttagtatatgggggggctcggtgctgggtggaatgtggccacagcttttggctttggtgcccctggtgaaatggcccccctttccaagcacgtacccggggcgcttacgtccacgatctgcggacggccttagggccgcctggttggttatcccggtctggcgagggagcaccgtcgttccagccttttgagtgccaatggcaagccccgtgggccgagcgaagtttgtgtgcgcaacattggttgtttgggcgcagagatgccattatcaaccccttattatgtggcccttttgggaatggtgaatgcccccaaatgaaacgtgtctttgcgcgaaacgccaagcccccccgccttgtgccaagatggcacctatcccccgtcgtcccagaacggggtgtagaaactttggctagccccaagggttgcctgttgggcaggccgtggaaatctttccccaacccgattttcctgcccttctccggggcatttcacgctgggggtccccccttcttgttgatgtcgccctatattaagttaccctgttggcgcatttccactctaacttggttcgacaagtccttgtggcctttgttacgaaccctcagacgcgattgccagggagagtgtactcttaggcacggcgtcacgagttgtgggtgggagtggatcctgttgtgtgatgttagcacccgccacacgacgtgcaggagctgtaaatccgggtggcgctcccgcacgaccggtgacggagaccccgaa

SEQ ID NO: 669045 - DNA, 194 bp, Homo sapiens
ccacaaaggagtatccctgaaagattcgggggtccccaggtgggggtctgtccagggggtgagtagacaggctccagcgagtgaattcctccgcaaagtttgcccacatccagcgtctgagctggaggttggtggctcggaagtggggcgttggagtcgttccgtggtcagcctagagcccacccaagtcgatg

SEQ ID NO: 669046 - DNA, 340 bp, Homo sapiens
  misc_feature (11)..(11): n is a, c, g, or t
ctgcgatatancgtaaatatcattgggcacaggctttactcggattacagttggattcatatccctaacatattagataagaatggaagccacagcacagagatgggtagtcctgttcaaaatctgtatctttttgggactgcccgtggcaatataacaagaggtgcagggctagtatggtggtgtatggcgtggatgctgaatacttaatgaacttacgataatgaagccctagacaaggttaaaatatatgagttaacttcgaggacggctagcgtagcctctttttttgttcttcaaattattgaacatattcgcacggtggagggggtaacccccg

SEQ ID NO: 669047 - DNA, 362 bp, Homo sapiens
tcaagcaatcctcttgccttgacctcccaaagtcctgggattataggcgtgagccactgtgcccagctgatgctgattttccaaactctcaagaaatacctggagagagacattttcttaaaagtctgatgatttgagggccgggcatggtggctcacacctgtaatcccagcacttcgggagaccaaggcaggcggatcacgagtgcaggagatcaagaccatcctggctaacacggtgaaaccctgtctctactacaaataccaaaaattagccaggcatggggcacctgtaggcccaactacttgggaggctcaagcaggagaatggctgaacttgggaggcagagcttgcagtgagcc

SEQ ID NO: 669048 - DNA, 1174 bp, Homo sapiens
gcagcacttcactatgtcaccggcctgcacaaggggaccacactacatcttccggcttgttgccaatgaaccgtggcgtggcttgaggtgacggacgttcgatgaatggagagtctagggacctcccgtaggatctgcccagtcgtgctttccccgcaacaatgcatgctactggtgagcatggactgactctctctcttagccactaaggatacgtgcccttgtggaaccctggtcatttgccttggacgcgacgatgcgaatctgggctgtcactctagttcgatgggctagccacctgtgagttggttcccggatgcaacacttcatagcatgtctaatcaggtgtagtcttgcaagatagcagtcagcgaaacaagtagctatcccgagcatgttacccttttagctgtgcctcataggccaagagcaaccagtgcttacgaccagtcagaggtttccgccgtccagttggaccaggcgaaaggggctcttggccacaccttctatgcgctccaagcatttccatgtccctggactcaaatgccgtgtgcgaggtcaagggtgttatgccaaaggaatctatcctgggttgtgctggctttgcacacttgacacgaacgttcttgttgcctgactcgagctaggcgcagggttcccctgaactttccttattaaagttcacgcttgtaggcccctttcacagatttcttgtaccaattgggtgcagcacgtcgttcgcgacggttgggacccggtcgccagcttcgcaattgccgcgcaaggtccttgacttcgccctggcactccgttgcatgtcccgcagcctcaccaggatgttacccttcggtgtcgctgccttgacctgaatcgcgttgtggtcatgtcagtctgtccagggggcgccttgcgaggcaccctgtggtggtaccattcgccgagcaccaggcccccccggaagaccttccgtttggccctccacccaagtgacccggccttggcctttgccatttctttggcctacacatttacgcacggcatccgcgggccctggttttctggactgcctcttcctcattgcgcctcctcttgtgttggcatgcgagtgccccttgagggttcggtgtccagcagtcaggggacctcaccctgtcgtgtcctgaggtgtacccca

SEQ ID NO: 669049 - DNA, 219 bp, Homo sapiens
tgtgggtgacgagcgaaaatccgtctcaaccaagaaaaaagaaaaaaagaaaaagaaaacttaactggcctttggggcacatgcctgtaatcccagcttcttgggaggctgaggcatgagaaaaaaaataaacctgggaggtggaggttgcagtgagttgagattgtgccactgcactccagcttaggcaataaaacaagactgtctcaaaaaaaaaaa

SEQ ID NO: 669050 - DNA, 101 bp, Homo sapiens
gttaaccacacacacacacacacacacacacagagagagagagagagaacgagctcagtgtattgtccagtgtcacgcactgatgagggagtaacaggaca

SEQ ID NO: 669051 - DNA, 962 bp, Homo sapiens
gagaggcttctgggtcaaaggaccagtctggagagggatcctgtggcctggaagcgaggaggatccacacggcgttgcagctaccgcagacaggatctgggcatccaggcacggacatgacccctccgaggctcttctgggtgtggctgctggttgcgaggaacccaagggcgtgaacgatggtgatcatgcggctgggcgatgggggctgccacaaaccgaggggcgcgcgtggagatcttctacagtaggccagtggtggcactgtgtgtgacaacctgtgtggactctgactgatgccagcgtctgctctgacgggccctgggtcttctgagaacgccgatccgaggctctgggcagagctgtcttcgggcaaggatcaggccccatcatgctgtgacgaggtccagtgcacgggacaccgaggcctcactgggcgactgccaagtccctgtggctgcgctgacatgagcaattgcagggcggacgagagagacgctggtgtggtctgcaccaatgaaaccaggagcacccacaccctggacctctccaggagctctcgtgaggcccttggcagatctttgacagccagcggggctgcgacctgtccatcagcgtgaatgtgcaggctgaggacgccctgggcttctgtgggccacacggtcagtcctggagtgcaaactggagggccaggccctgtggaaggagctggcagaatgtccccatgaagtgtggatgcctgtgtgtttgccctggtctggggccttcaggactctaatccgaaggattgggttccctgtgttggtcaatgcttcacaagcggccttgcattggccaggggtgcgggactggcgacccttggcacctccccgggccgtgaatccggcgttctttagcggcggacgccggggaatctcccgtggcgggaccgacgcgcgcggccccctctttgcgccgcgtca

SEQ ID NO: 669052 - DNA, 211 bp, Homo sapiens
agacgctaatagtggaaagaggagataagttgaggggaatctatagtgaaggaaatccccctgtgcaggaggttcaagttctgtatcttcaaacgagtcattcagtaataacatgcgattgaatcagacttctcgaacactgtgctatctcttgcctgctgctcgtttcacgggtggtccggagtaccgacgctcgacattcgttaatcac

SEQ ID NO: 669053 - DNA, 401 bp, Homo sapiens
  misc_feature (401)..(401): n is a, c, g, or t
cggagacctgagccttcggagagacgtggactaatgtaagcaatgccgagaactggtgagcaggagtggcgtgcgagtggacacgtatcgggactacatatgctattgcaggaacggatactattactacacacagtggatggagtgcattgataatgactagtgcgcctatgttgaactcggctgagatggcggtcgacgtgtcaacactgacagcgctgatcactgtgcctgcgagccatgactggtgctggatggatcgcagcgccgctgcgtcttcgacgagagccagagcctcgatgacactctatgaggaggctgacaacaagtgacggctgaccgagtacgcagtcaccctctgctgccgtggggcacctaccagagtgctgtgcctgttgccn

SEQ ID NO: 669054 - DNA, 859 bp, Homo sapiens
  misc_feature (149)..(149): n is a, c, g, or t
  misc_feature (607)..(607): n is a, c, g, or t
gggcctggaggagactgagtggcgatctccggcatggagttgaacgtcctcgctgagttcccgctctgcgtggaagaacttgaagaattgacaacaccaagtagtagggaagctgggtacatgatgagcttgtggtgcccttcagggantgaaatgaaggtaatatgacaacttttactcagggtggacgagagcgagtgagtctatgggggccaacccagaaggtacgacaccgttttggaagagcccgaaaattatattaggccgggattaggctagaaagtgttgagccccataaattcacccgagaaagctctctcggtttaggtttgcgacgatcggtgcgactgggaaactttaactaattgtagcgggaataatggttaactttgcgcatggttgccgaagtcgagtggaagattgcccaccgagaatacgtttgacctcgtgttggttcaggtcagaaatagttggggaggaattgcataattacgacctgtttaacaggttttgttggcgttacaacgaaggcttacatggaccggttctcacaatggcctgtgtcccaaagtagacatactttattggaagcctatccaagcgtggnccaactcaagaagggggaggtaaaagtagtaacgaaggcaagtgtaaaatttccacagggtgaggttcctgcaaacaggtggtagtctttgaacaagttcgaccccaaatcccttgcattacttccagtgttccagtgctcatgtgggctcccattttggttcacccattttgtctagaaatacttccatttttacgttagcttagccatttccagttggggtacaggaattgaacctggcatgattggggc

SEQ ID NO: 669055 - DNA, 608 bp, Homo sapiens
aatgactctcagcctaataattttggttagtgggtgataatgtattggaggtgaggatgagacacatacatccaaaatctaacagcttggaaaggatgtggtccaacagtgctattttatttatttatttatttgagacagggtcccattctgttacccaggctggagtgcactggcatgactgaggctcactgaagcctaaaccacctcaggttcagttggctttcccacctcggattcctgagtagctgagactacaagcatgtgccatcatgcccagttaagttttgaattttttaatagtgacggggtttcaccatgtttcccaggctggtcttacaggcatgagccaccacactaggcccataaggaagagttcctgagatgtgcgacagtgattaggcaggccagggcctttttttaggatataattggggccacgctgtggtttctgatatttgaggaatttggaattctggattatttatgcctaagacacctaattttttggaaacaaattccacatttataaatgatagggttggatctgatggcctgggctttgtaaacccttttgtcctggagtcccataaatttggaatttgggt

SEQ ID NO: 669056 - DNA, 375 bp, Homo sapiens
  misc_feature (353)..(353): n is a, c, g, or t
gaatttatttttctacaaaattatttagatgtagtaaagaaaattgctttactcagtgcaggtgggggtgtagtgggctgttgactttgaatactttattaagctctactttttttttatgggaggtattgatttaaggcattctaaatcatttattagatcagtatattgcttggaaactaaaagatctggagagtttgtgcttctgtacaagtctacagataaaccgagattggaaagtacagtctggtgtttggaggcagacgtgatcttgggcagggcgaaccagaaggctgggtttagcttctacttacaccagcactgctagctgtgggctttggatctattacttntctttatcaccttcatcttccc

SEQ ID NO: 669057 - DNA, 267 bp, Homo sapiens
  misc_feature (146)..(146): n is a, c, g, or t
  misc_feature (226)..(226): n is a, c, g, or t
gacaccaatgtttcatgagtatattttgtgttgagcagaattgtgggaagggagtgtctctgggtgatcatatcaagctagagctgagattctccttcctgctccagttcaagtctgactctcagtcaatccttaaagccacctgngctggtccttggaacctgaagaacagagacagaggttatttgtgagatgcagggagtgtgtgcccggggtaggggggtcnagactaaatgtgtgttccaggaaccatcccatgggtgtccc

SEQ ID NO: 669058 - DNA, 194 bp, Homo sapiens
taagcgagagtcttttcatgtggaaacgaggctaggtgattaagagagaaaaagggagagtctaaaaacaggattagtgaaaacaaggttggttattacaacacaaggaacaaacttttgtttagaatcacgaggaaagagattttggagcaaacgtaatggaaccagttttgagggagcaaagaagaaaaagg

SEQ ID NO: 669059 - DNA, 459 bp, Homo sapiens
gccattctcctgcctcagcctccagagtagctgagactacaggcgcccgccaccatgcctggctaatttttttgtatttttagtagagatggggtttcaccgtgttagccaggatggtctttatctgctgacctcgtgatccgcctgcctcggcctcccactcgggaggctgaggcaggagaatcggctttggccggggaaggcagaggttgtggggagctgagatgacaccgatttgcagtccagcctgggcaataatagtagaaagtgccatctcgaaaaaaagaaaagagaattaacccaggcaatggggggacgcacctgtgagtcccagctactgggggagagggacggtggcaagggtctaggatgcaaggatcatttgagcccgggaagtcgagggctatcagaggagccaggtccctggccacttggacgtcaaagccttgggtagacggg

SEQ ID NO: 669060 - DNA, 658 bp, Homo sapiens
  misc_feature (38)..(38): n is a, c, g, or t
  misc_feature (108)..(110): n is a, c, g, or t
  misc_feature (112)..(114): n is a, c, g, or t
  misc_feature (130)..(130): n is a, c, g, or t
  misc_feature (136)..(136): n is a, c, g, or t
  misc_feature (138)..(138): n is a, c, g, or t
  misc_feature (144)..(145): n is a, c, g, or t
  misc_feature (164)..(164): n is a, c, g, or t
  misc_feature (166)..(166): n is a, c, g, or t
  misc_feature (170)..(170): n is a, c, g, or t
  misc_feature (182)..(182): n is a, c, g, or t
  misc_feature (191)..(191): n is a, c, g, or t
  misc_feature (213)..(213): n is a, c, g, or t
  misc_feature (218)..(220): n is a, c, g, or t
  misc_feature (225)..(225): n is a, c, g, or t
  misc_feature (233)..(233): n is a, c, g, or t
  misc_feature (235)..(235): n is a, c, g, or t
  misc_feature (242)..(242): n is a, c, g, or t
  misc_feature (246)..(246): n is a, c, g, or t
  misc_feature (248)..(248): n is a, c, g, or t
  misc_feature (250)..(250): n is a, c, g, or t
  misc_feature (255)..(255): n is a, c, g, or t
  misc_feature (264)..(264): n is a, c, g, or t
  misc_feature (267)..(267): n is a, c, g, or t
  misc_feature (277)..(277): n is a, c, g, or t
  misc_feature (280)..(280): n is a, c, g, or t
  misc_feature (292)..(292): n is a, c, g, or t
  misc_feature (295)..(295): n is a, c, g, or t
  misc_feature (300)..(300): n is a, c, g, or t
  misc_feature (319)..(319): n is a, c, g, or t
  misc_feature (325)..(325): n is a, c, g, or t
  misc_feature (335)..(335): n is a, c, g, or t
  misc_feature (337)..(337): n is a, c, g, or t
  misc_feature (362)..(362): n is a, c, g, or t
  misc_feature (368)..(368): n is a, c, g, or t
  misc_feature (372)..(372): n is a, c, g, or t
  misc_feature (415)..(415): n is a, c, g, or t
  misc_feature (471)..(471): n is a, c, g, or t
  misc_feature (489)..(489): n is a, c, g, or t
  misc_feature (498)..(498): n is a, c, g, or t
  misc_feature (506)..(506): n is a, c, g, or t
  misc_feature (526)..(526): n is a, c, g, or t
  misc_feature (560)..(560): n is a, c, g, or t
tttggtaaactgtacagggagaactcacagctccaagngcttccctccaaattatgatgaagttcctgtaaataactagatttcctacagcctggtcctctgcccatnnnannntggggttttggttgtnaaaagnantgtggnntgccctcctgtcattcatngnttcngttctgggcacngctcgtgtnatctaccagttcctcagggtgnaacannngccgntttccttntntgctctntccncngnttcantgccatgtntantgttcctgcnaanttgtttgcggangtntccangggtggtcccagggttggngtttgnggggttggtntncccgggcttgatttggcccgttttnaccatntttngcccctcccagaccatggcaactaccggccctgagtgcatgtntttcaccaggccggcaaagaatggacggtccttcaggtcaacgtagttgtccttgngagagatcttgcggaagnttgcttgantttcagancaacaaggcggaatcctttntgctcaaaacgcttgttaatctctcccacaagancccgctggtccccatttggtttgatcgcaatgaaggtacgctcacagttggccatggttccttccagctgcttaggtttgaactccggctgcagcgcc

SEQ ID NO: 669061 - DNA, 212 bp, Homo sapiens
atgatcagtaatacacacaggctatggcagaagagcattgagattgctcaaaggtggaatcgcttaatggcaggggattgacagatgagtggagtttggctagtgtagaggaagggaagagtgtcccaggcagagggaacagcaaatgcaaagtctcttgcaaactttctgtttcctggccccctacaaaatgtggattggcccttatcgag

SEQ ID NO: 669062 - DNA, 1173 bp, Homo sapiens
gtatttcatgggaggtatattttgatagagctttttgggctttcttatttttcccacagtcaactgccaatgaaggactgaatccccttttttaaaaaggttcgttgattgtcgtgtggttttacttgtgacttttgatgttacgtgacgcggcatagactatgatgagagtccgatttgatagatagatttatcttcttaagaaaagctaagacgagaacgtaacttagtgctttccgtgtgacccttcgtcttgtttactaggcatcttatcgttgttcctactttgactgttagtcaaatttgcgtcgtaatacggtggggcttccatatttcaacacgtggaacgcttctcttctactgaacgtcagatcattatggtttctgaactttactagcaggctttggtcccggtgatttgcttccctatattgtcacatgagcggcaccacttgagaactgcgtgcactcacgtgagcctctaagaatatcgcaatatttaggcagggcctcaacaagtacacgcttccctcatggctagttcctttccccccttatacttaccacatttctcagtcttaaataaacgttcaattcatgctgtcccgtgcaatattttcccactcaactttttccaggagttcattctaccaaaacactttttttcctttctccttcaagcaaacaagaagctttcctttttgccctttgatttcctttaatgtctttcccccaacttggctattggaggggttctcgactcaactaccacagttgggtaaggaacacaacaaatactgctaaccttcccattagaaagcgaaaagcgctttcaccccaactcaattttccaagtgttgcccaacgtggctaaagccaggattattatttccaacgaacttggctcaacttgtcactgttgcaacaccatgttagggttctaattcttacaacttaaagccctcttatcctaaacttagaaaccattttaatttttcccttgttccaccatttacacatccttgttccttcttctaccctgacaaattgggttttctacacacaatacttcttgacactatctctctaaccaaccaacttattaacctaatccctctatttttcctgatcacatttcgaattgcataacaaatctaatttcctactattcca

SEQ ID NO: 669063 - DNA, 394 bp, Homo sapiens
tcgtaccaggactgctgagacacatagtgagacttcatctcttaaaaaaaaaaacacaaaaacccggcacgatggctcacgcctgtaatcccagcactttgggaggccaaagcaggcggatcacctgaggtcaggagttcgagaccagcctgaccaacatggtgaactctggtctctactaaaaattcaaaaatcagccggaccgtagtggctcgcacctgtaatcccagctactcaggaggctgaggcaggagaatcgcttgaacccgggaggcagaggttgcagtgagttgagaccgtgccactgcgctccaacctgggtgacagagcgggactccgtctccaaaaaaacaaaaaaagggtgaaaaccccttaaggcggcttgaaaactgca

SEQ ID NO: 669064 - DNA, 437 bp, Homo sapiens
  misc_feature (55)..(56): n is a, c, g, or t
gtcgaccgtcgtaacccaggttgccaccgtcttcgatctgcaggcggacgccganntggtgcccaggccttgtaccggcggaggcggaagatcgccatgtaggcttcctggatcccggcgaacttgccgttcagggaccggcaatggcaccggcggactggctcgggtccttgcgctggtcgaaaggcttcagggtcacgaacacgataccggcgttcgggctgttggtgaaacgttgatcgacaggccagggaaggcaccgcgctttccacgccaggctgtttcagggccaggtcggacatgcgcttgatcacgtcttcggtacggtccaggctcgcgcatccggcagttgggcgaaggcaccaggtattgcttgtcctgggccgggacgaaaccggtcggggtgctggcgaaaccgaaccaggtcaggacgtcga

SEQ ID NO: 669065 - DNA, 310 bp, Homo sapiens
  misc_feature (191)..(191): n is a, c, g, or t
  misc_feature (197)..(197): n is a, c, g, or t
  misc_feature (228)..(228): n is a, c, g, or t
  misc_feature (242)..(242): n is a, c, g, or t
  misc_feature (258)..(258): n is a, c, g, or t
tactccagtacttcctgccctggaggaagttgtggggagatccattgggacccccaacattttgccctcacctttgtgcccagcctggaaacctacagacaaggaggagttcccccatgagctcacccgtgtttatgacgcaaagatccccagccatgggccttagtgtcctttttaacagactcaaaccncatggnccccgaatattctttttgtccagaagggctnctttccccatatanagctccagggactgtnttttttgtattcgctgttcaataaacattgagtgagcccctccccagatgga

SEQ ID NO: 669066 - DNA, 251 bp, Homo sapiens
  misc_feature (1)..(1): n is a, c, g, or t
natagctgcagcgactctcttaatttccccgctcagctcaagttatgaagtttcaggatgaattggaatctggaaaggggaggggaccaggccagagttttcaggagcaagtagaacactacagagataaacttcttcaacgagagaaagagaaagagttagaaagagaacgagaaagagacaagaaagataaagaaaaattggaatctcgctccaaagacaagaaggaaaaagatgagggtggtccgaca

SEQ ID NO: 669067 - DNA, 404 bp, Homo sapiens
  misc_feature (345)..(345): n is a, c, g, or t
cccagcctgttctgcagctgggtgcaactgtgtcctgtccctcctgaattgcgacaagccaaatggtcaaggaagggcccgggcaggggcttagaagtggtatatgggtttgtgtttgccttgaaccaataccgggttcccttgaatagcacctttccagggtcattgtggaagggaccacccaaaaggccttgttagtgttccttaaaccaaggcagctccatctgtcaagatggcaggggccggagtgagggggctgctggcttaacagcaggcatctgggccaggccagtcctcaaagcagctcctgaaggtctgtgttgcactgtcaccagtctcaagctntgcctctaatttcaccagggatattgactaagaagacaataaaatctttttctttgtgt

SEQ ID NO: 669068 - DNA, 259 bp, Homo sapiens
gtagatgttttttgctgggaggaaggaattttctaattgacgtcttctccccacagaggttgaagtatagctcttacagtggagacatggttgatgtgttaataccaccaagatagcaggactgaaggcatggaagaaagagtgttggaatgctatttaaggctgttttggcttttttggtgttgcaccatgcctgttaaactaaaaaaacttttccagtgacccatctaatggtcttaggtcctttaaggagagtcag

SEQ ID NO: 669069 - DNA, 303 bp, Homo sapiens
cagtcagctatcgctggccgctatgtcctcgactggacgaaatgaatagtgagcgtgtcgaaagccatgacggacaaaatacaccccatttctgaatcacctaccttcagcatctgtatatacgaagaattcttcgtacgcttgtcttatttgctatagaaaacaatacagagcatatgggaatggactcactgagttttggggcttttccatctctttcctcctagactctgtgatctgagggtataaagacatctccaccaagtctgagccctcaaaatgtccttgataagcgcgtgctgt

SEQ ID NO: 669070 - DNA, 117 bp, Homo sapiens
  misc_feature (58)..(58): n is a, c, g, or t
aattagaggcatagcttgagactggtgacagtgcaacacagaccttcaggagctgctntgcctctaatttcaccagggatattgactaagaagacaataaaatctttttctttgtgt

SEQ ID NO: 669071 - DNA, 187 bp, Homo sapiens
cagggactcggcacagctgagtagatatgggggcaatggcaccagcacgggcagcagctggcaccttattgcccagcaacatgtaccctagatctacagtagaggtcctccttaggtgaacacaaatgcccacatatccccctggatatagaggcagcagtttctaccagaagctgggtttgttttc

SEQ ID NO: 669072 - DNA, 373 bp, Homo sapiens
gtgatacatgggactgtgtctcagtaggtgtatgggatatgggagggctctatttattcaatagagtttctcagttattttcctcccttgccttgcatctccagcaaaaggtgggatctaggaagaaagaatccagtgtagaagctgagaagaacttgaacgttttggttctggataaggtcactgtcctacgtgctacgtggaccgagcaaaagactcagtggatgaactggtgcagtgcctgacagaataaagaacagtattaatccctttgagaaagcatagtccagcaggacagtggccatttggacagaagcccacttagtttcttgggatgcacagcacgtatcagaagccagacttgctcttcggt

SEQ ID NO: 669073 - DNA, 168 bp, Homo sapiens
aggggtatgctatgtgttctgtcaggaggtttagaatgagctgtgacggcgtattataccatagccgcctagttttaacagtactgcggcgagtactattgacccagcgattggggcttcgacattggctttagtgagtcttacttgttccccgtttagaagtatctt

SEQ ID NO: 669074 - DNA, 631 bp, Homo sapiens
gtcgactcttagcttgtcgatggacggtgacaccgtggtacccggatgtactggctcctgtcgccttcggctcctaatccctagaccatcgatgcagtgagtgcatctgccatccaggttggaccagggtgagtgtcgcaaattggcgaggcctgctgggcagctcatagcatgccatggtacactacagtgctatccagacccagaatggaccagaaatgctcactgtgacgagaccgtcgggggagtgacgatgactcgttcgacgccttctatcagtgagacgggcgctggacaaggcgacggtggccccgggctgtggtctgtagacgttggacacccacaggtcatggatgaagttcgcaactggcgacgctatcgtgcagtctcattaccaccctggaagcgagctcgatcacaggcaaggacgatgctgccgataagtatgcccgagggcactacagccattggcaaggagatcagttgaccttgtgtgggaccgacattcgcaagctggctgaccagtgcaccggtcgttcagtggcttcttggttttccacagcttatggctgggggaactggttctgggttcagcctccctgctcatggaagcgtctctcagttgatcatg

SEQ ID NO: 669075 - DNA, 217 bp, Homo sapiens
agctgggactacaagcgcgcaccaccacacccgactaatttttgtatggtttagtagagaagggatttcactatatgttggccaggctagtttcgaactcctggcctcaggtgatccgcccgtctcggactcccaaagtactgggattataggtgtgagccactgtacccgtccagcccacctttttcaaggccctaggaatacttgctcgtccggg

SEQ ID NO: 669076 - DNA, 953 bp, Homo sapiens
atgacccaccaatcgcatgcctatcatatagtaaaaagccagcccatgacccctagcaggggccctctcagccctcctaatgacctccggcgctagccatgtgcatattcagcttgcccgacgtccatgaaacgctcctctatgacctaggccgtactaaccgaggaacatcactgaaccgatataccaatgtatggcggcgcagggtatcgcgagaaagcacgataccaaggacacaccacacgaccgatgctgtccaaagaaggccttcgcatgacgggataaggcctatgtattagctcagaaatttgtttcttcgcaggatatatcatgaggcttttaccactcgcagcctgagacccctaacccgcccaaataaagagaagggcaacgaggcacaccaagatggaatcacaatcattgttaattcctcctaagacatggtcgcattccttaaaacagtatgccgtattactcgcaatcgtgggagtatgcaatacagtggatgactcatctgacgtctaatagcagaatcaaccgaggatagtatgaatgtcaagcgcgtgctttatgacattattacagggggcctctattgtaacctgcctagcgaggccgcaacagttacatgccgaaggtcctccctatcgagcaatcgccgaggcgccactctacgagactcaaccagggggtgtcgcccacagggcatcctagggaatttgaggacatgcatggctcgattcccccatgacggtgttgtccgccaggtaacattgcatgacgtgcgcgatcagtgaggctaaacgcggccgagagggtcgtgcagggacggataggaggcaccacggggggggctcgaaaacagaaggaacgggagccggccaatcacgggggggcggccaggaaagaacaagagagaccagaggccaaacgggaggaacgggacgaaagga

SEQ ID NO: 669077 - DNA, 705 bp, Homo sapiens
gctcccccagtgcagacacctgcagtccctggtctcctctattactcagggcgcattcatgcctggagcttagacaatactatgttatcttcttcttttattttgctaatgagtgtcgctgggcagagatgtgaataaggcctcgttccgtgagttccatactgtcctaaggcgtgcttttcattgcaagagtcactgacgttgctgctctaattgctatcgcccgtcgagggggccctgtaggatcgttgtctttcgcatgcacagagaatctaaaagctttgggctttctctgatggggcggagcgagggaacttgtgcagagctctgatggggcgcggtctcagtgcagtgcggaacgggtcaacctccttggctcacgaagaagagccaagtctcttgggcgtgtgtgcaagttagctgcgatgacatttgtcgctcgctgattgatgaatggtaggggtagacatttaaattttcggggtgcgttgcagtaatcgttagattgaaggaaaatttatctgcgtgtaccccctatacacagaagtattgccagcttgagagcgaatcgcttttcgcgtgcactaacatactatctatccctattggggaagcacaggaatgtaataagctcgtgagatgacgtggctgaccaggtgactccgctgttgacgagggatgggcgtcaaagaggctacaggggaa

SEQ ID NO: 669078 - DNA, 126 bp, Homo sapiens
agaggaccccggcactgttcggatggagggaggtgtctaggacaagtctgtacatgtctgtacactttcaccctgtgtctctttttcttccttcttactcattctctgctctacctccaagtagtt

SEQ ID NO: 669079 - DNA, 2196 bp, Homo sapiens
aaattatgcataccctggagttcttctgattggcactgactcccacacccccaatggtggtggcctaggaggcatctcgattggagtagggggtcgtgatcgtgtggatgtcatggctgggatcccctgcgagttgaagtgtaccaaggtgattgcgatgaagctgacaggctccctctctggttggacctcacccaaagatgtgatcctgaaagtggcaggaatcctgacagtaaaaggtggtacaggtgccattgtagaataccatgggcctggtgtcgactccatctcctgcacgggcatggcaacaatctgcaacatgggtgcagaaattggggccaccacatcagtgttcccatacaatcacaggatgaagaagtacctgagcaagactggccgagcagacattgccagtctacgtgaagaattcaaggatcacctagtgcctgaccctggctgccagtatgaccaagtgattgaaattaacctcaatgagctaaagccacatatcaatggaccttttacccctgacttggctcacccagtagcagaagtgggcactgtggcagagaaggaaggttggcctctggacatcagagtgggtttgattggcagctgcaccaattcaagctatgaggatatgggacggtcagcagctgtggccaagcaggcactggcccatggactcaagtgcaagtcccagttcaccatcacaccaggctctgagcagatccgcgccaccattgagcgggatggctatgcacagatcctgagggatgtgggaggcattgttttggccaatgcctgtggcccttgcattggccagcgggacagaaaggacatcaagaagggggagaagaatacaatggtcacttcctacaacaggaacttcacaggccgcaatgacgctttccctgagacccatgcttttgtcacatccccagagattgtcacagccctggccattgcaggaacccttaagttcaacccagaaaccgacttcttgacaggcaaggatggcaagaagttcaagctggaagctccagatgcagatgagcttccccgatcgagctttgacccagggcaggacacctaccagcaaccccccaaggacagcagtgggcagcgggtagacgtgagccctaccagccagcgcctgcagctcttggagccttttgacaagtgggacggcaaagacctggaggacctgcaaatcctcatcaaggtcaaagggaagtgcaccaccgaccacatttctgctgcgttcccctggctcaagttccgtggacatctggacaacatctctaataacctgctcattggtgccatcaacattgaaaacggcaaggccaactccgtgcgtaatgctgtcacccaggagtttggccctgtgcctgacactgctcgatactacaagaaacatggcatcaggtgggtggtgattggagacgagaactatggtgaaggctcaagccgggaacatgcagcactggagcctcgccaccttgggggccgggccatcatcaccaagagctttgccaggatccatgagacgattaagaaacagggcttgctgcccctcacctttgctgacccctctgactacaacaagatccatccagtggacaaactgactattcaaggcctgaaggactttgcccctggcaagcctctgaaatgcatcatcaagcaccctaatgggacccaggaaaccatcctcttgaaccacaccttcaatgagacccagatcgaatggttccgtgcaggcagtgccctaaacaggatgaaggagctgcagcaataaggaaggtcccggcaagctggctgtcatgtcccactctggacccactctggaccctgctggatgtcagaagtacaggtccgtgtgcatcctcagagccagagctggtctatccagcatggcctagctctgagatgacgaccagacctgcttcctgctctctccatcctcagccactgagtgatccaccgtggagggcacttgagattaagtcccagcccctgcctttcagcttggttcttccttcaaaaatgccatgcaacctgtatttatttttaatgacagcactccctctaaaaaaaagttttcatcctgcctgatcatttcactggtggctgaaggattttagagaacctttgttctcataagaaaaaaaaaaagccaaatccattgac

SEQ ID NO: 669080 - DNA, 143 bp, Homo sapiens
ttttttgggccccccttgtttttttttttcgccggggggcgttttagtttctttgtttttaaaacccggccttttttttggggaaacctccccccaaaatttttcccccgtttttgggccccctttaaaagttttgtcgggga

SEQ ID NO: 669081 - DNA, 848 bp, Homo sapiens
ataggctagaactccaaggaattgagaattgaatttgtacgcgtcacagattgaacttttcaatgacaaagagtaatactcatgaagttgtagtaaaactagtgaaaagaactagccttacctggagaactgactcattagcagaagttatgattttggaatttcatgcaatagttagaaaagccagtatgaatcttacatcggtgccaatgtccgcttgaggtattctcttaaagtgacgatagtgagaagactagacagatttaggtcaaagagagtatgatcttattgtctcaccagcttgccacctatcctgatgttaacagctctattaagatggaagtgggcattgaagattgtctacatatagaatttgaatataataaatcagaagtatcatttaaaggatgtgattgtggaaaaatttacttcttattagtaagaagtaaacaatacaacatatggagttacagctgatcaaagaagagatcacaggaattggacccagtaccacaagcagaaacaagaaacaatcgccaaaatatgaaataatggattggtgcacccagtaaaaggttgaatccaactctcgcaataaagggctattgtttaagcctaggactcattgtacccaaactcccaaacaatagagcaagatgtgaacaacaagaatcttgcaggtaacgcgttacttttgtgaaattttacgtgcttgttgatgaaggaaagaccgggaggttacttaaaaacaaggcaggccgcatacttttattggagaaaagctccctgaaaaaactgagggaaacagagaacaaacttttcaccaaagcgatttgaatctcccagag

SEQ ID NO: 669082 - DNA, 996 bp, Homo sapiens
gggtcctcggagacacgcggcgggttctgtgtgggccgatgggcgactaccgtgattagtgggggcacgtcctacgtgccagacgagggactcacagcacagcagctcttcaacctgcggagacggactcacctacaagtgactttactcagttctccctgggtacatcgacttcagtggagaccaaggtggacctgacttcatgctctgacctaagaaaatcacgtcttaagacccaagtggtttcctctcccatggacacagtctacagaggctgggatggcatagcaagtggcgcttcccaggcggtagttggcgttcatccaccgacgaagtgtacacctgaattccaggccaatgaagttcggaaagtgcaagaaatatgaacaagggcattcatcacagaccctgtggtcctcagcacccaaggatcgcgtgcgggaatgtttttgaggccaaggcccggtatggtttcttgcggtatcccaatcacagacagcaggccggatggggagccgcttggtgggcagtcatctcctcccaggacattgattttctcacagaggaggaaccatgactgtttcttggaagagataatgacaaaggagggaagacttggtggtagtcccaggcgaggcatcacagcaggacggaggaacatgaagattctgcaggcggcaagcaagggacagtgcccatgctagagtcagaatgattgaagctgtgggaccaacatcggccgaaaggaacctgaagaacagaatgggacataaccataggcgtccaagatgcacgaaaaccggggggaggtgccgcatggcgccacgaggcaaccaagattcgcggctgcacccacgcggtggacatagggaggagcacaaggagcacacgacgcaaggacggactcagcaaacctatacacactaagagatagcggccagcaaccatcgcggcacgagcgaaagccaccaaagcgcgccccacaaggcacaggga

SEQ ID NO: 669083 - DNA, 663 bp, Homo sapiens
ctgtttccggtgtcttaacgccgcggaccggtgattcctgtggccttggtcgtcctcctatcccctgtgcaacgcgggactctgcttgctctcttgtcccttttctgcttttcgctcagttcacattggctcaacctcaatatccatgtcagtgcccacctccatccacccttgtacctccagtaccccttctcttcaggaaggcttccatgttaactccagctgagttaaactcagctacctttggatggtcaaactactgtttgcttcaacctctgacatagcccatggcctactttctgtgggaggaatttctgtccgtgccaagtactctcacagaatgtaactcctacaaggcaaaaacggcttacgacataatcacattttccaaatctcttatactttccccatagtgggtggagaagaatgtgaattataattctttcctaacaactggttactaggtcaatccctctatcatgggaaaatccctctggagagttctcccttcctttaacttaagcagcttatgggtgtacagactcctggcttatggaatgaactcgaatcatgaggatgggagttagcccatagactaatgctgtctttagggagctgtaaccttaattcattttcccttcagatcaggggaagagttgccgt

SEQ ID NO: 669084 - DNA, 409 bp, Homo sapiens
gaggatccggcgctgggtctgtacatgactgcttgaataagctctattgtcacacaaaagcctaagggaggtaatcaattctctccaaattcctgaaaacagttccccttttcctgtccagtcaaaccagtcactcatggacttcatcaagatgggtggtgaacacgcctgggacagcatctgaacgcacagaaggatatgggatgaatgcaggggctctggggaatcacgactaacattttctaggattccgctgaggctggttttatttgaactgcactggggccacgtgacccagaactctgtctctgagtgtgcacccagagctgtgtgtcagagagcaggtgtctgatgaggcgggggcctcaatcttcaggggttccttccaggttcctgatgagctgttggt

SEQ ID NO: 669085 - DNA, 507 bp, Homo sapiens
  misc_feature (19)..(19): n is a, c, g, or t
attctgttgtgttgacttncaaccccagaaacagacatcatggtgcacctgactgatgctgagaaggctgctgtctctggcctgtggggaaaggtgaacgccgatgaagttggtggtgaggccctgggcaggctgctggttgtctacccttggacccagcggtactttgatagctttggagacctatcctctgcctctgctatcatgggtaatgccaaagtgaaggcccatggcaagaaagtgataactgcctttaacgatggcctgaatcacttggacagcctcaagggcacctttgccagcctcagtgagctccactgtgacaagctgcatgtggatcctgagaacttcaggctcctgggcaatatgatcgtgattgtgcttgggccaccaccttgggcaaggatttcacccccgctgcacaggctgccttccagaaggtggtggcttggagtggccgcttgccctggctcacaagtaccactaaaccccctttcctgctcttgc

SEQ ID NO: 669086 - DNA, 357 bp, Homo sapiens
  misc_feature (82)..(82): n is a, c, g, or t
  misc_feature (233)..(233): n is a, c, g, or t
  misc_feature (238)..(238): n is a, c, g, or t
  misc_feature (242)..(242): n is a, c, g, or t
  misc_feature (250)..(250): n is a, c, g, or t
  misc_feature (258)..(258): n is a, c, g, or t
  misc_feature (357)..(357): n is a, c, g, or t
gcggcggcagcggcggcggcagcggcggaggcagcggcagaggaggtaatggcggaaggcggtgcgcagggtggagactgtnacagcgcggctggtgaccctgacagcgcggctggtcagatggctgaggagccccagacccctgcagagaatgcccaaagcctaaaaatgactttatcgagagcctgcctaattcggtgaaatgcccagtcctggccttaaaaaagcttcanaagcnatgntatagatnaacccaanttgataaggaattcagcttttggttaatgccattataagccctacttgccaagatccagacttaccgccagatggggtgtgcatggcccttgggggggn

SEQ ID NO: 669087 - DNA, 651 bp, Homo sapiens
agctgggcggactgaggcagggggaggtttgcactcgtgtgtggcgcgggtgagccgcgtgctctcgggcacccggccgccagtttcggatgcttccgatcctcggggagccggggcgctgcgccggagtcacttcagcccatgttgttcaggttgacaccctggggcaaggagcatgactccagttgtgctaaacactgtttcgcgcggtttcctgggcctagcggttccgggcgcgcctcgcgggcggcgtgcgcataactacaacccccaggctccctggcgtggcggcacgtgggccctgagccgggcggcggggatatacaagcgcggcgtgcggctgccgcggcggagcggctgcacggacaagagcggaggcctggacaggggaaactgaacgcagaaacgaggttacttaatgggctcaaaggtcaccgtacctgacctaccagcagctcaactggccgttcccaagagaagaaacttcagggtcttgtgcgctgcaaccatcacgccaatgactgagaatggagacaatcaactttgcagtacttggtcacgtatgtggattatcttgtgcaaagaacagggagtgacagaacatttccgtgaatggcacaacaggacgaaggcctgtccctgagcgtctca

SEQ ID NO: 669088 - DNA, 151 bp, Homo sapiens
caagcataactgccccccccagagcaaaaccaatacaaaagaaacccatcatgtgtatatgataaatatatacaatttttatcacatttagtttttaaaacggaataaaaatcctgttttgtatgtgactattaaaaatggaagatgctgg

SEQ ID NO: 669089 - DNA, 344 bp, Homo sapiens
tcccctttaaatgggcacagaaattatactgtgagagcactagtaaatagttaaaccagatactgagtcatgccttcgtactactagacataaggtgattcctcttgattcagcaacctacaggaacgtagaaattcgtgaacatagaacaaccgtgacgactgtctaacttagagcaacgtctggagaaaagtcagaatgaacaagaagcttttcgcaataacctgaagacactcttagaaattctggatggaaagatatttgaactaacagaattacgagataacttggcacagcttactagaatgcagctcagggaagttaaatttctgtgcccgtttcaa

SEQ ID NO: 669090 - DNA, 114 bp, Homo sapiens
tcccgagacatcaccactttattgtagtctttcaggatttatgtagtaccccacacagttgagtaccttacctggacgtgctggtcggcagctgtcagtcctggtggagactcc

SEQ ID NO: 669091 - DNA, 287 bp, Homo sapiens
aacacgaagaaaaatataaaaacaggggaactggctgcgtgcagcagctcatgcctgtaatctgagtactgtgggaggctgaggcaggaggatcacttgaagccaggagttcaagactagcctggccacacatagggagaccctgtctctatttgttgcaaaacaagactatataaaggcaaggtctttttaaggttttgtaaagcaactccttaaactgggttttcattatggcttcggaattgggaccatatcttaaaaaacaaattcagctttcaggccaaaag

SEQ ID NO: 669092 - DNA, 1465 bp, Homo sapiens
gacgtgaagcgtgatctagctcttccaagccctgggccgcacctcacactgacgcacagcaatttgcatgcacactcatgttttgcacatttggtctggcagcttgcatgcaaattcacatctgcagcacaggcaacatcaatcaagtcaacagcacaccaaggtcaatgtcacacaggccagccaggcagcctcgtgatgttgttcctttcaccacaacattcgcacagtacccatgccccaatcagcatcatgcatctacctggtgctctggcacagcgcattaggtatcgcagggcacttccaggatcttcaaaagcaacaggcatcaaaggcttccagatggtataaacaccgggctcaattgccgttgcatgggcacacacagatcccagcagacatgtgcatatcatcggaccagcacagcagcaccagctccaagcatcaccggtccctgtataagcaagggtcagcacagcccaagtcttctcgcggtacaagtcatcacaaacgtttttcagctcacaaagcaatccggacatacgtggaacgaggcgttgcaagtatgacaaccatttcaaggaagaaaaagattacaagttcaagaaacttatttatcgcaagggaaaaaaaggaagacacatgagattatgaccaattttggattaaaccaagtggaatatatgggaaaaacattacggttcgggggacccaagttttagctattaattaccgtggcaacacagccggttcccttaccaaggaattaatcgcacattagcaaaggcccctctacaaattacaaggaccgcaacagagcagatcatacacaggccctggtgaaccctggagtggcacacgcatacttaccacggacacctgggcccacacatcaccctggaccaccattcgattataccagtaatccattcggaaaacaccaaatcgccccaggtaagtcgcaagtataacagacttgaactcggccacaggggtgatacgagcacctagacaacgtgccgtacccaatcacatacaacgggggggacatcagcatcccagaaataaacgaggacaaataagatcgcagaccactacaacaaggacacggcccgcgagaaccaggaagcaaccaccaggaaaacaaaggggaggaacaataaaaggacccaaggacagaggacacaatgggagggcacctacaataatgacgacacacagcacgaccagccaccaaagggaaaagcatgaccagacgaataacgacatcaacgacagagcagcagccacacaccacaacggaaacagaaaaccaccatgacaccagacgagacgactcacaacgatgaggaccaagcgccacaccaacccaccaagcaacgaagcaagagaaccacaagaccaccaacgacactggcagcgagcggacgatggagtccgtggcgcagacaagggaaagagcaag

SEQ ID NO: 669093 - DNA, 140 bp, Homo sapiens
gccgaagcgggagcggccaaaatgaagttaatcctttgtgacttccgaccgaggaagatcgcaaaaggcatttcaatgcaccttccacattcgagggaggatatgtcttccctcttttcaagagctagacagagtacacg

SEQ ID NO: 669094 - DNA, 657 bp, Homo sapiens
  misc_feature (522)..(522): n is a, c, g, or t
ttttctgtactggaggcctcctgaggccaggaacgtgcaaatttgcaggtgctgcatcccaagcccctcatgctcctgccttcctgagggccagaggggagccccaggacccattaagccacccccgtgttcctgccgtcagtgccaactgccgcatgtggaagcatctacccgttcactccagtcccaccccacgcctgactcccctctggaaactgcaggccagatggttgctgccacaacttgtgtaccttcagggatggggctcttactccctcctgaggcccaggaaccctttaagccacccccgtgttcctgccgtcagtgccaactgccgcatgtggaagcatctacccgttcactccagtcccaccccacgcctgactcccctctggaaactgcaggccagatggttgctgccacaacttgtgtaccttcagggatggggctcttactccctcctgaggccagctgctctaatatcgatggtcctgcttgccagagagttcctctacccagcanatatgagtgtcttcagaagtgtgctcctcttggctcagttcttctcttttggtacaacataaaaacaaatttatttttctacccctctggggatatctgctcacccaatggaaaaattgggttcaaccagcccct

SEQ ID NO: 669095 - DNA, 711 bp, Homo sapiens
  misc_feature (1)..(1): n is a, c, g, or t
ngattcgccagccttgaaatccggcaacaggggttaaactccattttggttctttgaagagagaaaacctttggcataatgtgactcagcccccagaggtcttttaaccattttctcttaaattaaaattaattagcctcgcgacgccaggtaaaagattttagaatatggtcgggcccccctacggttgtcttttgtcaggaataacatggggcatttttgcatagggacgtgcaagtcaggcttggcattctagatttacttatcttactatgaaacatggcctgtttgggagtgagggattcacaggtggtcccgctgctgcccttcttgcaaatggcagtttactgcttatcttttggcttctgcagatggttgcaattgatccttacacaataatggtcagtcctcatctctgtcccgcttcataggtgccgccatgtgtgtttaaaaaagggaatctttgtacctttagagtgtaggtaaaatgaatgaatggcttggagtgcactgagatcagcatatgatttcttgctttggggaaaaagaatgatgctatgaaattggtgggtggtgtatctgacaagataatctgggcctatgtcaaatgtagctgattttgataacacctcaaaattcagctatgaagcgctcggcaagtttgctttttttctgatgttacatacatctaacaatcatttaataaattta

SEQ ID NO: 669096 - DNA, 301 bp, Homo sapiens
  misc_feature (66)..(66): n is a, c, g, or t
cctgatacattcatatctcaggccacaatctccctgcttttcacttacttcctaccatctctaggncctacatcaccattctgttatccatatttactacccttctattacagttgttttgcctccacagcatgcatgctagatttccacaaattctttatgtcttatgtagccaaacattctcaattcatgacagaactaaatgtccaaaataattaatatcggggaaaaggaaatagtttgattacagaggaataataattataacatggcttgatcataaaaatatttttatattaaa

SEQ ID NO: 669097 - DNA, 136 bp, Homo sapiens
gatccttcacctcctaccccacgatactgacgaagaaggctgtgtggcaggtgaactccttgattttcctctgctcataggtccactgctgcgccgtagctgccttccacatcgttgatccagcggtcatcccagt

SEQ ID NO: 669098 - DNA, 328 bp, Homo sapiens
tacaggatacacacatccttggctgggtgcggtggcccagcactttcggaggccaaggcgggcggatcacctgaggtcaggagtttgagaccaacctggccaacacggtgaaaccccgtctctactaaaaatacaaaattagccgggcatggtggcgggtgcctatagtcccagctacttaggagactgaggcaggagaatcgcttgaacccaggaggcgaaggttgcagtgagccaagatcacgccactgcactccagcctgggtgacaaaagcgagactctgtctcaaaaataaataataataaaatccaatgcaataaaaaagca

SEQ ID NO: 669099 - DNA, 175 bp, Homo sapiens
taccaatattcccagttggaaataagcaagaggccgaagagcattagaagaacagcatccatcaccttggtcacctgcagctagtcctcaaagcagatgcatatagcgatacacatcaaagtggaggtagtgacattgaaatggatgagcaacttattaatagacccaaacatgt

SEQ ID NO: 669100 - DNA, 500 bp, Homo sapiens
tgtctatgaggatccctgtatctccgatatcagtgcagcaagggtgcatcgtgcgtgggtatgcatatcgctgccggcaagctccgcctaatcgagttgcgtgcgaacgcgaaaaactcttcgcaacgggttcgacggagggccggcaaaagctcaggaactgtcagatctgaccacgctcattgccaccctcgataagcgggttggtgatctcttggcgtcgcaaacagaacgcctatcaaacgctgccagctatcaggatggtgcaagcaaacaaatttggcactgataggacaaatttcactcaattcgttctgtgacaatttccttgcctggaagagatcttccatgttgtccgcttgcgtaaatttgaccagcgcaatgcagaaagagctcgcacgagatattgatgacactaaccaataccctcctcaagtcgaatgccaaactcttgtatcaggagctctgtcgataccgccccccggaagggttccagggta

SEQ ID NO: 669101 - DNA, 324 bp, Homo sapiens
aaaggcttgccttgttcctgcagggctaagtgcccaggttcgtcctaatctagctaaacactagtcactgggttccacgattctcttccatgacccacagcttctaatagagctataacactcgccgcttggccaagattccattccttggaatccatgaggccaagaccccaggtcagagacacaagacttgccaccatctcggaagtggccgtcaccatcttggaagcgacctgccaccatcttgggaacttggggagcaaggaccccagtaacatagtgaccaggaggaatcttccttacagctaatgcagcaggatctta

SEQ ID NO: 669102 - DNA, 450 bp, Homo sapiens
gttttgttcactgtatttagtagacataactgttgaataggtagttgatccatgatgtaaagaatatgtgaccatcttcaggtatgggatttctgaacgtttcagggttcggtcgatgaggcgctggcaacgcccacaggagagaataaaacgacctgtgcaaaggtgtattgtggtgtgtgtaacttaagagtacagggctgtttgagagttgagtgatgtcatgggtcaggtggtatgctgcttgcaggattttgttatgtgctgaggggtacccatttgtgttgtctgactttcgtatgatttaattgagccaaatttgggtcagaacacaaatttgaagatgacttttcagtatatgatgggtatttacatttgaacactagaattttaggtctctcaaataattaagaatagagccagttttgaataaagtctagcagaactaaa

SEQ ID NO: 669103 - DNA, 879 bp, Homo sapiens
gagagcgagtccacgtgcgctacccactgccacctcagggccccatagaagcgcgggagtagctcgtgccgctgaccaagggatccagaaaccataagaaccctccggaatctgagcgaacacaagcgtggtatcttcagtagatgttgtatctgagtgaaagctgagacagtacatatggtatgattacacgtggtacatgggtgtgtacgatcgttgaagagtgttcgcttttatggttccagttgccagtaggaattacactacatatgcacacggaacgtcgaggtatctgtggggataagtggtagtatataattgagatgtcatcgagataatcgatatagatgttcacgtatagacattacttgccagttatctcctatcaggtccttcgtagacgaagtacttagaattagccagatgaacgtgacgtttaggttttcattgttatgttgtttggtccacatggctggtgatgctgagaatacctataagttggcccacaatgcagacatcatagaagcaggctaggaaaatggtaaaaactgagatgaatacacaggtgtataaaccagtttcaagaaatataaaaattgggctagaatctcaagttatgtgtttctatattggtataagcatataagtgaaaagttcttataagtgtaatagagaaaagatttgtcagtgtgtttttttaaatgaaataactagtctgtgctactttatgtcaatataaaaattggtaaacatagaagtaacttgtccacaaccctcagttatgatacttatgtgcgtgtttttttttttccaaagtttttcccataggagaagatacaaatatatggtagctattgtttaaaaatacttcgatggact

SEQ ID NO: 669104 - DNA, 137 bp, Homo sapiens
tgatgggagcagcccagtcttgtatcagcagcatcaccctgtgtcttgtacactgaccaaagtccacaatttgtcaattgttgaccgttgtgcagacgctctggttcctctttaagtggtaatgcttcatcacaact

SEQ ID NO: 669105 - DNA, 668 bp, Homo sapiens
  misc_feature (262)..(262): n is a, c, g, or t
  misc_feature (355)..(355): n is a, c, g, or t
  misc_feature (409)..(409): n is a, c, g, or t
  misc_feature (518)..(518): n is a, c, g, or t
  misc_feature (529)..(529): n is a, c, g, or t
cacatacagacatgcacacacatagtacttgtcaggtcagcttgtcttctgagatttgtttctgaagtctggaagcagaggtttcactttgccccaaaccagtaactcccctacttctcactctagtccctagacactgcccccccaccatttctccaggctgagacacatcctgatcctgggggtccctgagcccacacatggtgactgactatggccacctggaacaaggttgggaggtgggaaatcatataaggctgangcagccataaataggaagaacatatgtgaggtgtgggctcaaacctctgctcaactggacagtgggcataacccccagacaggggcctataanttctcataatggtgggagaagtgagtccagtcctgcctgttgatgagctaacangccttttccacattcttggtcataccatgggggccacaactaaacaccccaatcttccagacctgttgcatgatgaataaatggaggctaactctttactcagaggcanggataacacantgttcagaggaagggggtactccctaattcaagacccacctaggcaacattacaacatcccttactctaattttttatgtttaaatacccaaccatagtagtacacctctatattcccactacctaggaggcttaagca

SEQ ID NO: 669106 - DNA, 247 bp, Homo sapiens
ggtccaaaacagaagctatatttggcatattgggactcagccatccattaagaacccatgtggtcctcgggacatatttatcaatataatggggttttaaatagtataaaagaaaactggtgatctatataatttatgtatcaccttcatggtaaatttagcaggaaatgcatcacaattatgatttttttttttggcaccagtggaaacaatcaaagatggctatggaaacttctaaaaactgagg

SEQ ID NO: 669107 - DNA, 336 bp, Homo sapiens
gtagaaccttctcgctccccttcctaacctctaaattctggagtgagcacagttcagggctcttcgagtcatttattcctgagggaatctcttctcatttgtcaatactaaaaaaaattttatatatatatatatatatatatatatatatatatatacacagagacaaatctctaagcgagagggttttatttgagagaaatatacagagagtgggctctctatatgcacacacacacagagaccagggcagtttacagtgtgtccaaaaaacaaagaaaagggctggtgttttattgagaaaggagagagaagatgtatgttgtttacaaagag

SEQ ID NO: 669108 - DNA, 319 bp, Homo sapiens
cacttaaatggagctgtatgaggctaaatccattactcagtctgagctaggcctcctacagtatacttgcctttaccaagaggtgcttccttccactgcccagcttgccatgagcatttctcttctaataccctatatataataacttcatggtgaggtttgccctgtgttatagcagctatcaaatccagttcctttgcttcaaagaaaatacagtttttattcatatctaactttattaggagatttatcaagcataccaaaaagtgaagaaagtatataataaatccccgagtatttatcatctttaaaaaaaaaa

SEQ ID NO: 669109 - DNA, 346 bp, Homo sapiens
tgttatcgaatgccaccacttagccaagcgtggactagtggtgtttatcgatgccactactgatcagcacgggagtttagacgtgctccgtttccgacctgggccggttcaccctccttaggcaacctggtgtgctttgcatgtctttctgtatggtcagtagcaaactttgctgcaggcctccatcttgttttacgtcctatggaagtgtgacctgtaaccatgtggcaatgctttgtttagcctccgccattttacaatggtggcccaggctcaatcctgtgtggcatcgataaacacggtgtctatcgatgccaccataaggtaaggtcctagacctttctat

SEQ ID NO: 669110 - DNA, 679 bp, Homo sapiens
  misc_feature (158)..(158): n is a, c, g, or t
  misc_feature (190)..(192): n is a, c, g, or t
ttgttggtgtgaaacaaaccccccccctcctctcctcttataaaaatttttttgtgggggggggggggaggtaaaacactgggggcgcgcggcgttttaaaaaaaataaaatctttttctaataaaagaaaaaaaaaaagggggccgagaaaaaaaantttttttttaagaaaaagaaaaaagccgcccnnnccctttttttttttttttttaacacgcaggggggggggggggttttttttttttttttaaaaaaaaaaaacacactttcccccggggtgtttttcccccccacccaccccccccttctctccttgtgtttaataaaaaaaaaaggcgtgtggatttttttttttctcaaaaaaagaggaagaaaaagggggggggaatatattatcgccgcccccccacaaaaaaacaattttttgtaaaaaaaaagaagccccccccctccccaatattaacaaacctcccacaaaaaggcgcccctcgaaaaattttgaaaaagaaaaaaaacccccggggggttttaaaaatttttttccccaaaattttaagcgaggaggcaccccctctttgggggggattcccgaaaaacccccccctggaaaaaccccgggtaaaaggaaaaagaagggaaataaagggtacccacctcactggggcaaaagcggtgctc

SEQ ID NO: 669111 - DNA, 272 bp, Homo sapiens
acgaagtaggtagcagatctgctgacttatataaagcttttgattcctactaagctttaagatttaaaaatgttcagtgtgaaatttctgtgaggctctattttagcttgggctttctggtgagagagtgaggaagcattctttccttcactaagttggtcttctctgctcttctggcatagattgcatttaacgagactaagggaaatttacaaacctaaagacttttagctcactctggctggcatagggctggctatcaggggagtacc

SEQ ID NO: 669112 - DNA, 615 bp, Homo sapiens
  misc_feature (565)..(565): n is a, c, g, or t
gttacctgccatcagcaaaatttcccccgatactaattccgaaaattcttgcgttcccgccaaatcttctcatctggatgtcccagtgttttaaacacccttttcacatactatgttcttcttaaccttcctcctagcaccatttattttacgccaatatcccatataagccccgtcctcttgcacacctttaaatttaaagcgagacatatatcctttttatttcccccccgtgcccttcaacagtgttcccataaaaataatatccttctggaaaatataaaataattgccttctattttttcgcgctccccccacgcctataagaattcaccacccccacgccccgccccccttttttcatacgatcgcttacgccatttagccccactgatcctcctactgttctcgccccccggttattctatttgtttctatttgaaccctcctctaatgccaccccgattcttgatatctcaccgtagactcgctctcgcctctttctactcctttgtatattatgaaatgtcgctcccaccatgtcgatctcattaaaaatgttttntacctccaccaccactcataaacccactttttcttcccaccaaagaacaa

SEQ ID NO: 669113 - DNA, 882 bp, Homo sapiens
tagtcacggtgaggcgatggacccacattctctaaacctgccctccctgactcgctcccggaggtcttcgcgtcacccccgcctgtaaggctccaggtgccgctaccgaagcgtgagtaccctggggctcctgcaggggtccagtagccctccatcctctacagctcagcatcagaacattctcttttaagactccgagtatggggtcctccaagaaagttactctctcagtgctcacgcgggagcaaggtcggaaggggtgtgagcgagggtccggagaagcatgggagacccgagttaaaaaatctgatccgtttttactgtggatgcacttaccgggaggtagaccaagggaggatttccgtgatcatcccacatcgcaggtttgaaacagttatccctacctcctgaaagggggggcaagcatgccccatgaaagacttctgtggacacactgtgtaaaatgaccccaggagatttgccaggtgatgacctgcggggccggggcattctggcacgcctgagaatgccttgctcaagaggggagccaagcccatgccttaccaaattgtgggttacttgtgacggacgtccgacgaaagatgggtggggccctcagtacccaggacctgacaagtggaagaaatccctaaacccagtaatggctggtgtgacacggtggcggcccttctggaagacccgggaataaacgccactgttacactcgccacccaccttatattggggttcaatgggtccaggggcacaatttcacctcatctaagggtgggagctctctccgcaccggcgatgttttgggcctcgtgcaacaataccctccacagggggggaggaggccgggggaggcgccacagacatttt

SEQ ID NO: 669114 - DNA, 159 bp, Homo sapiens
  misc_feature (19)..(19): n is a, c, g, or t
ccgagttctggagaacgcnatcagctcgctgcttaaaattaaaccacaggttccattatgggtcgacttgatgggaagtatcatcctgacggccgctgctcaggggattggcaagagctgtcttagcttttgcagagaggtgccaagtcatagccacag

SEQ ID NO: 669115 - DNA, 224 bp, Homo sapiens
cagtcatactaggacctcgggaacaccagccatctcttttctctgatatttagactgtgtatcatccattcgtgctctgcactctctcactaccatcgtctcatcttctccaatttcagacattcagataatttcttcctagatttattttaccaggccctcttcatatcactttcaccaatggagaacatacatcacatggccactcaataccgggcatcctc

SEQ ID NO: 669116 - DNA, 864 bp, Homo sapiens
  misc_feature (487)..(487): n is a, c, g, or t
tgcagtggtatacacttgtagtctcagctacttgggaggctgaagcaggaagatagcttgagcccaggagtttaagcccagcctgggcagcaaagtgagaccttgtttctttgaaaatatttattttttaatatttaaattattcacaaataatgtctattttttacaaatgtgcagttgtgttttatattctaaagtaactagaaattaatcaaaatacatacaaaatccttatttatgggagtcataaccgattccaaaacttattctggaaacttattctggaaaatgaggccacccttgcaagtttaaaaaaatcaaaataaataaaattttcctttaaattgataaacaatgatgtcaaagaaaaatctgcttaaatgctcattgaatgaataactttaggcaagcaacacaaaacagaagcatcttgttaaatgaattagaactttttcagttcagtgactatttttattcatttgttcantcatcaaatatttattgaatgccttctttgagctggataccagaagtacagcactaatgttagacaaaggctgtggccttataggaattacaatcttagtggaagtaattatatagctctttcaaacattggcttccacaacacaaggcagtgttttggccatgcggcactccgcgcgaacctgggtcccttgcggcgggaacacgtggcctcccaagttccagccgtctgggacccttgaaaggtttctccggagaacccaggcctttgagcgccccgagagacacgcgcgtcgcgcagccggcggggggggcgggtgggcccgacaggagagaccccaccttgaggagaaagaggtggcgccacaaggaaagaga

SEQ ID NO: 669117 - DNA, 122 bp, Homo sapiens
ttactctagaggagcgtatgaccttctgctctgctcgaccttctgctcgtgtctctgctctatttaacagccctcatcactgtcttaatttacctgcataagcatctgtttgtttcctgtgt

SEQ ID NO: 669118 - DNA, 263 bp, Homo sapiens
aagacacacaacaatggggatgagttgcatgaacattacgtgaagcactactcagcaggtaaaaggaaaggagccatcaagacacacaacaatggggatgaattgcaagaacattatgctgagccactctcaaaaagatacaagcggccgggcgcggtggctcacgcctattatcccagcactttgagaagctgaggcggcagatcacttgaggccaggagttcgagaccagtctcgtcaacatggcgaaaccctgtctctac

SEQ ID NO: 669119 - DNA, 373 bp, Homo sapiens
  misc_feature (125)..(125): n is a, c, g, or t
  misc_feature (171)..(172): n is a, c, g, or t
  misc_feature (197)..(197): n is a, c, g, or t
  misc_feature (201)..(201): n is a, c, g, or t
  misc_feature (212)..(213): n is a, c, g, or t
cgcttcactgaaagcaaatgtgaacctcttcaaatcccaggatgcagccttagataaataagccaagaagtcagtaacggttattgtcgtgggtaatccagccaatcacaactgcctgcactgcntccaagtcagctccatccatccccaaggagaacttcagttgcttgnntcgtttggatcacacccgagctaangctnaaattgctctnnaaacttggcgtgcactgctaatgcattgtcacagcacatgtcattcatctggggaaccattcctcgcatccagcatcccacatgtcacccatgcccaaggtgaaattgccaggaacggacattggttgtttatgacgctctgcaaacatgaccgctggcc

SEQ ID NO: 669120 - DNA, 224 bp, Homo sapiens
  misc_feature (50)..(50): n is a, c, g, or t
  misc_feature (72)..(72): n is a, c, g, or t
  misc_feature (98)..(98): n is a, c, g, or t
  misc_feature (126)..(126): n is a, c, g, or t
  misc_feature (144)..(144): n is a, c, g, or t
cttttaactgtttggtagcagatcccaggaaaggctccaaaatgtatggnctaaagagctacatcgaatatnagctaacacctactaacactaatcgntctgtaaaccacaggtataagcactttnactggttatatgagcgtntcctggttaagtttgggtcagccattccaatcccttcttttccagacaaacaagtcacaggccgctttgaagaggaattt

SEQ ID NO: 669121 - DNA, 412 bp, Homo sapiens
tctctgctcgtaatcatgcgcctgaggattctccatatctacatacatgatacgatgtttttctctctataaagactcgttgagtgatgatctatgagagcaactgactgtttaacattatagagaagccaaagatgcccctgcaagccaccttcttggtatcttggccaactttaaatacatcttggcaagtaaaggtatcaatagcaaagtatcaatagcaaatacactaaaaaaaaacaaaacaacaacaacaaaaaaacaaaaaaacgcttaaggtaaacaagtattctcctaagcctcagaaattgagtattcacaataacagctaggtgacagagatgaacttaagaaagaaaacgctgagaaataagccctgaatctataactacttggtgttcattagagagga

SEQ ID NO: 669122 - DNA, 425 bp, Homo sapiens
atagcatactatagtccctccttatccttgcaggatacattccaggacccctaatggatgcctgaaacctcagaaataccaaaccctgtatatactatgtttttttcctacacatatatacttattataaagtttaatctataaagtgggcccagcaagagattaacaacaactaataaaatagaactataacaatgtattgtaataagttatgtaaatgtaggccaggcatggtggctcacacctgtaatcccagcactttagaaggcccacgtgggaagatcccttgagtccaagagtttgagaccagcctgggaaaggtagtgagacttcatccctacaaaaaataaacaaaaaattagctaggcatggtggcacatgcccatagtaccagtggactcagaagaggtggaaggatggcttga

SEQ ID NO: 669123 - DNA, 284 bp, Homo sapiens
ctctagaggcataccgctccatacatgtgtgcccatgtggcatgtggctcaacacaggactatctgctttcagttctagatcgctgacagtcggacaccatgatctgaatagaggttcacagttaaggccaggcatggaggcgcatgcctgtaattccaacactttgggaggccaaggcaggtggatcacctgagatcaggagttcgagaccagcctgcccaacatggcaaaaccctatctctactataaatacaaaataagacactgggcacacattatggag

SEQ ID NO: 669124 - DNA, 190 bp, Homo sapiens
atgtaatgttctcagatggtctttccggcaggctatggaggctggactgtggctcagaggccttagtcagctctacaatcccagttttgactgccacgtcacgagcgccaagtgatcctggacatctccaataacacaccgcagaaggtgaagcagcagacggctgtgtcggaaaccttctctgagtcat

SEQ ID NO: 669125 - DNA, 659 bp, Homo sapiens
gcggcggcagcggcggcggcggctagtaggcagaagtactagtagcctagtagggcaggtagacggcggcgggagcaagcgctagccctacgcagagcagcctatggggtacgccggccgctacgcagcgtaatgtaggaggggcgggccggacgctagagccggagcagcctagctgtccacgggtagtgcatatagtagtagtacccaggagtaggccgggagacgagtacccagcaagcagaggcgtaggctaaatgatctcagagctgctaggtgttatgctatacagtccagtggcatagaactacctctatacctcccctagtctttccagggcctagctagatgtcaacctagcagtcaagtctgtcctacaggcactactagcgtgaacgctccaatactgccccatcacataatagcaatctattccacacaacgttcttaatccttagtctccggaacctgctacgcgcaggccctagtaggctcctcattcgcaaccactgtcggcgcgcgcgaaccaatacccgtacgaaagcgggctacatcccggcaaaaccggcaatcgccaaagttgttagcacttcttcgcacatcgtaggcgctataccaacgcgctcataatgcctattaacttgggccacacacaccac

SEQ ID NO: 669126 - DNA, 863 bp, Homo sapiens
gtctatagtattagacatgacatcgccacactccacggaagcaatgatgacaatgatctgctgcagtgctctgagccctaggattcatctttctttgcaccgtagggcggcctgactggcctgtttagcaaactcatcactagacatcgtactacacgaaacgtacctacgttgtagctcacttccactatgtcctatcaatagcgagctgtattctgccatcataggaggcttcattcactgatttccctattctcaggctacacccctagaacacaaacctacgccaaaaatccatttccactatcatattcatcggagtaacatctaactttcttcccaaaaaaatttctcggctatccggaatgccccgagttactcggactaccccgatgcatacaccacatgaaaacatcctatcatctgtaggctcattcatttctcctaacagcagtaatattcactcacttccatgattgagaagccttcgttgaagacgaaaaagtcctaatagtagaaagcaacctccataaaacttggagttgcctatatgattgccccccaactaccaccattcgaagacccggtatacctaaatctagacacagaagggaaggcgttgaacccccccaaagctggttaagccagcccatggcctcagaccttgtcacaacaaaaacggacacaatgacacaccaaaccagtggccggccaaaaaattaaacatatgtggcgggccaaataaaatgaacagccaaaacgcagaaggcctccaaaagcggccgcgcatcaaccacatggcccgaacacacgcaccacccgaggcacccaacacacacacaacaacacccacgccacaccgc

SEQ ID NO: 669127 - DNA, 298 bp, Homo sapiens
  misc_feature (91)..(91): n is a, c, g, or t
  misc_feature (158)..(158): n is a, c, g, or t
  misc_feature (219)..(219): n is a, c, g, or t
  misc_feature (258)..(258): n is a, c, g, or t
tcaggcgcccgagactttaaaagaaatatttaaagcatgtacaggagacactgcagcccctcatgccaaacccagggaaaaatgtcccggnttcttgaaacaaccctatgaagaggagactattatgattcctagtttccaggtgagaaaaccgaggntcagaatcattaaattacctcaccaaggtcgaacagatggaatatggtccagccaggcccngagccctgactatgctggactttaaagttgatgctactnactacggatgagtggtgtgcacctgtgtgcccgtacctgt

SEQ ID NO: 669128 - DNA, 989 bp, Homo sapiens
  misc_feature (10)..(10): n is a, c, g, or t
cctccacatntcttacacaacatcacccctctttcatgtatgctcacgattgtgcattccacactgtaccgtttcacacagaatagcgcctcatatccttcttgtgcgtaaacctatcactcccccgtttttggcacacacacggtttcctgagaagctctcttggtataacgccccaactcttgtttcccaaaactgcacacttgtcccccccaatctcatgttcatttttgcgccccaacccggtgttaacgtttgcataccccctgtcgcccccgtggcaaactcttaagcttgacaccaccctcttcctcaatgggtcgcaccccactttgtgtgaagaccgtccggtttttgccagacgaggtgttgttttgcacagggacacctaccacgcgggtctactatgcccagcgtcgaactactttcccggaaggtttgtttcaaacactggaagtagactacccgtggtgatgtctccagaaaaaaaccttgggccccacaaagaggttctccctgcaattttctgtgctcccctaggtaggagggcccctcccatggcgacacaggttttctccacaaagacactctttggctccccagttactttctgcgcgccatttcaaacgaggtggttcttattatgcacagccccccggcggtttatagtctatagaaaacatcacgcccctctgtcgttaagggggtcaatcctctggctggctcccgcactgttttgtttgctcttgtaaaactatcagggcacacgcctcgatgcgcccgttgtccccactcgcccttatacgttagctactgcgtgaataataaacgcccaggaggattgaatcacgtatgttttttcaacaaaagggggggataatggacaccgcttttccatgctcacgggtgaataccaggagcagcccgtttgttgcagccccgcccgggggtggtcccaaaaaacaaatagaaaaccgaaaaacataaca

SEQ ID NO: 669129 - DNA, 1006 bp, Homo sapiens
ggctttagtgccttcccgcgggcaggctcgggaactggagcccgccatgcctgagatcccccactctccgtgagctactgggcagccaagcctcccccaagagcgccacctcctgctaccaggcgccagtcccatcgacacccaagggctgagaagtgcaggcacagggcgcgggactgacaggcagtccactggatgaagccagctacgctcctgactgtggtggggacgtcgcgagcaactttatgtactagctcagggatatgtagaccacaccaatcggacactctgtatctacctcagaagttgtaaacacaccaattcagaaccctgtgactagcatcagggtagtgaatgcacacaaacccacactctgtatctaagctaacctggtggggccttggaacacctttatgttctagactcaaggattgtacacggcaccaactcaagaaccctgttcaagaaagaccccaatatggcatcctacccaatcagaaacgatgtgaggtgggcgcacagactacgagtatcacaaagacggcgtggccatcaccccgacagagcaaacgaacgcaggatacgtatcccatgccctgtgacaggaaagtatcatcatcgctctcaatgtcaccagcttcagtgatgtaatctatcatggttacactgagtgatgaagttgtaccagtcgtacacaaggggctgcacatatccaatctgcctcggccgcacgatgaagcccccagacacgaggtagcggcagacccaccacaggtcgtgcgagggtatgaatcgacacaccccaatggggacatcaggtgaacgcgaaccacatgggggcaacagggacaaacctacccacgggccacgggcaccagacccatcggcaagctcgcgaagacacaaagaaacagaaaggagccagcaaaaaccaacagaccagcaaacacacacgcggcgaacacagcagcaaaaaagcaaccccctacagcagacacgccgacac

SEQ ID NO: 669130 - DNA, 121 bp, Homo sapiens
  misc_feature (1)..(1): n is a, c, g, or t
  misc_feature (16)..(16): n is a, c, g, or t
ntttacacatatgctnactcttcttcatttatccatttaccttttcgtataatcgtgttccttcgcgtgttcatacactttcacgtactctttcgcgttcgcatacgcgtttttacgtgtg

SEQ ID NO: 669131 - DNA, 325 bp, Homo sapiens
ggggttttccaatttgggggccccccccacccctttaattgggggggggggggggggtttcccctggacccccgggcctttttttgttcaaaaaaaggggggttttggggaaaacccggggcccccccccccggggggttgggggggggtttccccggggggtttgggcccccccctttgggtggattaatttgtggggggtttgggggggggggttttagggggggttttttttttttcctttttttggccggggcccgggggggaaattttgggggggtttccctttcctttttttcccctgggatttttttttttgggggga

SEQ ID NO: 669132 - DNA, 200 bp, Homo sapiens
  misc_feature (99)..(99): n is a, c, g, or t
  misc_feature (175)..(175): n is a, c, g, or t
tgacgcccagcagcctatttatatgcgtgtgcagaccttccattaggatgctgagcggaatcggcctcgctgtcagaaagagctctacagcttgctgantccggactagttcacgagagcctccagatacctcattatagaagatgtgtgagtgaagaggccacatgtctgccgnggcagcaccataatgccgggtaccg

SEQ ID NO: 669133 - DNA, 1012 bp, Homo sapiens
cgtgttcttctttcccagagttttttaagggtacccaattttgtatttgccgggcaatactacctcccggtctaaatccaagtcggtaaatcacgacaaagagggatagacgggtagctgttccggatcgtaaaatagaaattgaaaggatcattaactagcgtgcatttacctaaatttgtcaatcagttaattgtccaatagggaatttactgcgagtattgaacacatacaggagtatggaggcaattctctgcaaaccaattagctagatttaatttgaaggagaggtgggctgatggctgagtgtatgttactacttggtcctgactggttgagcaaccatgcctcatttctttgctacatgtagttaagatatactttattctaatgcaggcctttctaaatttgtccactgcattcttggtatttcagctatctcttctagtcagtcagaacttcgtagaccgacctgaagtttctttttgaatacttgtttcttttagcaccttgtgacagcactagaaagaaccactttgataagtactcagtcatcatcttgccttgaaagtttcctctgcattgggtttgaagtagtttagttatgtctttttctctgtatgtaagtagtataatttgttactttcaaatacccgtactttgaatgtaggtttttttgttgttgttatctataaaaattgagggaaatggcttatgcaaaaaaatattttgctggtggaccatatttcttaagcatcaagaagagtgctcagtttagcttgcattccttgagaatgtatattatgctgcaaagatcagaagacaaacaatccagatgtataagtactaggcagaagccaactttttaaatttccttgaataatccatgaaaggcataattcaaatccagataaacagagttggcagtatattatagtgataattttgtattttcacaaaattaaagttaaactcttcttttctttttattataattaccgctcttggtata

SEQ ID NO: 669134 - DNA, 529 bp, Homo sapiens
caggctgacaaaagcgtcctcggatgcggcctggttccccacccttgaggggagccagggtctgtgatatatagaaaatggaagaatcagacccggaaagttctaaacggcactgagaggaaaactcccatggaaatccatctttgttttcccagttcggaggcgcgtgggccctgcgtgcgcgggcctcggtctgagcggccggcctcggcagacagcaccaaatctgtaaacggagctaagctcacacgaggactctcggcggctgcttttgttcgtagatgagccagcagtcgatactggagggtctggggctgcagaaacaggcatatatagcagagataattaaaacatttcatgattatgacagccacattctgctgctgcaagctggaggattcatgccacccaaatatttagcaagcatcaaataaaacactggtggcaaaataaaagtaatagaaaaaaaaaacagagcgtaatacatttcaaaggcaaaggagtcaaggggaggaacgggggatcctct

SEQ ID NO: 669135 - DNA, 156 bp, Homo sapiens
tacgcacagacccgtcaggccagtaaggactaagaacattaggtcctggcaaggtgcagccctagagagcagcacgagagagcatcaagctgcacaggcggctccaggatgtcggtccgggagcggggcataagagggttagcgagtgattctcga

SEQ ID NO: 669136 - DNA, 404 bp, Homo sapiens
caggctgacaaaagcgtcctcggatgcggcctggttccccacccttgaggggagccagggtctgtgatatatagaaaatggaagaatcagacccggaaagttctaaacggcactgagaggaaaactcccatggaaatccatctttgttttcccagttcggaggcgcgtgggccctgcgtgcgcgggcctcggtctgagcggccggcctcggcagagataattaaaacatttcatgattatgacagccacattctgctgctgcaagctggaggattcatgccacccaaatatttagcaagcatcaaataaaacactggtggcaaaataaaagtaatagaaaaaaaaaacagagcgtaatacatttcaaaggcaaaggagtcaaggggaggaacgggggatcctct

SEQ ID NO: 669137 - DNA, 684 bp, Homo sapiens
cgcggagcggaacaaggatcccatcttgcacgtgctgcggcagtacctggatccggcgcggggtggcgtccgcgtcctcgaggtggcctcgggctccggccagcacgcagcgcacttcgcgcgggccttcccccctgtgcctgatgtatgcatgcctgtctggactgttggaccagctgctgccatggacatgtgggctcttcagatgcagcaggaggggcttgctcaaacccaagtggcccttgctcatcaccgtacgtggccctatgccatcacatggggaatgatctccccccagagacaacgtggtactttgacctgattgctcagatgcaggaacccagaaatgggggcttcgggacacagcgcctcctggtatgaccttggtaaagtgccagtttgcctgctcctggagagggatggtgggacattgccaggccacacaaacaaataggcttgatcttctcggaaaaactaaagacccctcctttcacccccgcgacacacttagcaatcccctatgcctgggaaggcttcaagagtgaagagcacggaagaccattgggctcccctatgtggagcgggacctttgttggactgaaagaaccccaacacaaatactggtgggtctcagcctgcttggcccgaaagggcccaagcttgctcagaataaagcatgtcctg

SEQ ID NO: 669138 - DNA, 524 bp, Homo sapiens
gatgtgctattgtgtgctagatactatacagtgctcacacgatacttatggatatagtatagtgacacacatctcttcaaggcagatattattcccaagctaaaatgaatatgaggcaggagaatagggtctgtaggcaagaaacctaaggccgagtacatgctgagtatcacagaactagaatcacaaggtaacgcctcgaactttacatgcccaggtaataacatgaccagattttactaacatgagcgacctcccgtctcctaagtgacatatggaaaaattgaaggtgcctctgctttgtcccctctgagaaacaatcaggctggttgccgggcaagtttatcatattgcatagtagtgataactttgaaacttcactatcgagcctctgattggtcactttctggcaccaaacaaaccttagcataaggtgtaactttgtaaccttgcttcagactctgattgtccctctcctgaaatcaatcagactgatctcaagccactactaccttcacctaggg

SEQ ID NO: 669139 - DNA, 686 bp, Homo sapiens
caatgaaggaagtggtcttgtctgcaggtgggctgctgagggtctgggatctgttactggaagtgtgcacggtataaacacaccctctgtgcttgtgaccgaaacgtggcagttaccgtgctcattgctaaccagtgtctgtccctgaattcccagaaccactacatctggcttcgtggcaggtctgagataggaaacgatctaaaggtaggcagaccctggacccagcctcagatccaggcaggagccacgaggtctggccaagggtggcacggggtggtcgaggatctcaggagcccgttgcggtttcctggagggtgacagaagaaaccttaaacatagtcagctctgatcacatcccctgtctactcatccagacccctatgcctgtaggcttatcagggagttaccggttacaatgtgttacagtgatgttcccaactcagtctgctcacgggtgagaagagcagggaggtatggacatttaataaagtcttacaagcacttataatcttccaattcctacagatattaacaaggacagacaccttttgtgtggccgctctttggcaccttaagaagaaggtttttcaatgcagcacattcttatgggcggggggggccccctaccaggttctagttgacccatggtgccatgacggttacacaaggggcatccgggtaca

SEQ ID NO: 669140 - DNA, 566 bp, Homo sapiens
  misc_feature (524)..(524): n is a, c, g, or t
ctccaccaggtttcagctgactgttacttataaccagtgataatgacctgaccgtgatgaggcgctcatgacacagcaagacctgaagaccctatggagctataatctattaatgcattcagaacctagcaaacccacaggtcctaaactaccaaacctgcattactacagacttcaccatgtagcgcgtactactatactcaattgatccaataacttgaccaattgaacatgttaccctaggaataacagcgcagtcctatactagaggccatatcagcactaggatctacgacctacgtggttgatcaggacatcccgatggtgcaaccgctattaacggcacgtatgatcaacgccttaagtcctacctgatctgaggtcagaccgaagtaatgcaggtcgagttctatctactccaaattgactcatgtacataggacaagagaaggtaggtctacttcacgaagtgcctatcaccgtcaatgtaccatctcacttaagtatatagccaacactaccantgaccggtttatatcaatgactctagacttgaagcgagaccc

SEQ ID NO: 669141 - DNA, 137 bp, Homo sapiens
tatatgatatccggccattgatgtattgccagaataactacacaagcgtaatgatgtggccctgtgatttccatgatttcccatctgtgccatcggattccttgcataccagcgtgtacacgcgctttcttacagcc

SEQ ID NO: 669142 - DNA, 890 bp, Homo sapiens
gcgaagacctggcttctgtgaacaaactgctgaaaaagcatcaactgctggaagcagatatatctgcccatgaggatcgcgcgtgaaggacctgaagcagccaggcagactagcctgtatgaccgagcatgctgccttcgacacctcccaagtacaaggacaagcagggacatcctatcagactggtgcgcgttccagaaaatcaagagcttggcgggcctctcgctggcgagccaatgctgaatgaatcccgatcgtctgtgaccagtgtcttccgggacatggatgacgaggagtcctggatcgaggagaagaagctgtcgtgggtagggctcacgaggactacgtgctcgtggatcctaaaccgttgcaggtgcagaacctgaggaaagaaggcacaagcggctggaagtcatgagacttggactgacgtcatgagccgaagctattgcagggtgtacctggacacttggcaatgaagctgtccgatgacgagacgaccgataagcggtaatagaggacgatcctagcaggcgcgactggccgcatgttggtgtgagcactcggaaagagctgagggcaggctggcagctgcccggggtacagctggctggaagatgtccttggaatatcatgcagtttgtatgccaactgtgggaagaggaaggaagccctggactcaggtgagagcactgaccctgtgctggccatgcgaatgatttatggcctgacgacgtctgtgtccgcccatccaggggcttactgaaagaaagcgtgaaggcttatgaagacagactttcaaccgtccagaaggattcggtgttgaatgatgtcttgcaccaaatggggcgagacctcattaagaagcaaccaatcaccatgaggagaac

SEQ ID NO: 669143 - DNA, 122 bp, Homo sapiens
  misc_feature (117)..(118): n is a, c, g, or t
gcagatatttggggagaagagcattccaggtggaaggcccagcaggtgtcactgcctggaggtggggcagagctggcatgttcaagaagagtcagaaagaggggtttgcccaagcanngaga

SEQ ID NO: 669144 - DNA, 304 bp, Homo sapiens
gattttacagaatcctgagttttaagtccttacgttaagaattgactgattaacacagggttgaatgcactatgtctatcaaactgcaggcaggtaatggaaaaacacttttagggtgattttaaccacttccggttggtccaggaagcttagaatcaacacaggtagacctcacactggcctgatggactgttaccaaagacaggttcatacggcattcataacccatatagacttcaggttgaatttaggggtaaaggcaatgtattcctatggggagagagtcgacgcggccgcgaattta

SEQ ID NO: 669145 - DNA, 176 bp, Homo sapiens
tatgatgtatccctgcttatagtggattgcatctgacgacgatgtctcaggtagcccagaaaatctgaggagttcaatcaacaagttcttacataccagaaagactgcaatttatgaggagactaagcaaaggggggagttctcctggggtttcctgacactgtctggatgaatga

SEQ ID NO: 669146 - DNA, 607 bp, Homo sapiens
  misc_feature (554)..(554): n is a, c, g, or t
  misc_feature (584)..(584): n is a, c, g, or t
aattcgcggccgcgtcgacacggctgcgagaacgacagaagggaagtatgaacatacttgaaacaaatagtttttctaaagtcccagcaaagcaatagaaagtctcagcaaagaaatggaaaatgtaaaaaaataaccaacggaaattctggaattaaaaaatataaaaaccaaaataaaaaactcaatggattgactcagtagcatagtgtaggagacaaaggaaaaaataatcagtgaacttaaagatagagtataaaattatacaatctaagcaacacagagtaaataaaccaaaacaaaaaacaacaaaaacacccagatccttaggcatctgtgagactaccacaaaagacctaactttatgtctttgagtcttgacagaaaaggaaaaccagtggagctgaaaaagtttttgagaaaataacgtggtggcactttgacaatgacataaactattcagaagctgagcaaccccaaacagataagctaagaatcccaccagacaatcaagtcaacttctgcaaactaagtgagaagatctggaacaatgngggaaacacttttctataaggccattgttngcatggcatacttgcgtggggcg

SEQ ID NO: 669147 - DNA, 88 bp, Homo sapiens
catggatttgctggtgcagtacaactaggcttaatagggacatgctagtctgcttctggcctttagtaatttgttaaaagcgttagaa

SEQ ID NO: 669148 - DNA, 1013 bp, Homo sapiens
gtgttggctatgtgaaggaatatttcaactacaatggaatggtctgcttttcacccttgaagtttgacgaggctcttgatatgtattaacattatcatggcagggaaatactataacgaagaacaatattactacattaaacctataaactaaaaattcgtcaaatcgaccaatactttcggtctattcatcaagaacaacacttatcgtaatgtatcgtcgtcagtctatatagccagtctgtctgcgactgcctcaaaaagttcaatagtaagccactgctgaagatgatatatgagcatcgcaaactaagactactgaccccattaaagacagcacaaatatactacctattaaactgatcgcatgtcacacggtaactacagtctcactacaacacaaccacaaccacaaaaccacactacaccacacccacccacgcccacaacaccacaagacacccacacaccccaaccccaatatgagcaagataaggatacataggagaaagataaatacagacctcaaaaagagagtctaacaaagaaacacggcgagtatctatcaaagagatagagaatagcacacacaatacagacacacctgtgatcatacaaaataattaaaaaaaatccaacagaacaaaaccagaagaaacacaagacgacaaaacaaaacagagaatacaaaccacacaacaaacacagctacgccagaagaagacacaaaacacagacaacaccaaataaacagaacccaataaaaatgacacaggacgcgcacggaacggacagaggcaagaacaaaaaaagacaaagatgaagcacgcaaaaagccgacaacacgcacgagaggacacggcagaacagaacaatcaggcaagccaagcagcgctagcgccacgagcgaggaaggcgaggcagggcgaggacagagatgagagagcttacgacgcgaggcgcagacggcgacggagagaaacagagatacagaggagcaccgacaaacgaagc

SEQ ID NO: 669149 - DNA, 657 bp, Homo sapiens
ggacgccgcgacggctgcggagccgatgcggcctccgcttaaagttgctgggttgtgctccgtgtgtctcaaacatgattgaacgatctgtggtggaagcacagtccagaatgcagtcagtctgtgatgaaactatagagcacgtatcaatatcataggagcatagatattccacgcttagtgtatcatcatgagaagaaccaaaatttcttcctctgttaaatgaccaaccaccctgcaccaaatttattgggaacaccaagagataaagcagagatgtttcgtgagcgatataccattttgcaccaggaggacccacaggcatgaattatttactcctccggtgataggttctcaccctgatgaaagcgtgaagcaaattccacgcttacaacaatagaaaccttatagggtagtacaaccaaaatcggagatgcgattgttcttggaatgataacgcagtttaacagagggcaaatcccttctggaagatcctactgtaaacagtccaatctacacccttagtaaacgctcagttccatagtgttctatacacagagtgcatgctttgtcttagcagcaccggttcggtcttgacaggatccaagttgttccatcgtccaattgcctttgtactttcccacgccaactgagccc

SEQ ID NO: 669150 - DNA, 112 bp, Homo sapiens
cagtttacagcggggcagtttacagcgtcagggcattaaccagtggccggttgccactctcctcccctccctcagagacaccaaacgccactggttaatggaagaggatgcg

SEQ ID NO: 669151 - DNA, 201 bp, Homo sapiens
ccactagtcagtccatctccatctccatccccatcctcacccactttccagcctttaaaatgagtagggatagcattaggagaaatacctaatgtaaatgacaaattaatgggtgcagtaaaccaacacggcacatatatacatatgtaacaaatctgcacgttgtgcacatgtaccctagaacttaaagtataattaaaa

SEQ ID NO: 669152 - DNA, 1931 bp, Homo sapiens
  misc_feature (387)..(387): n is a, c, g, or t
  misc_feature (1931)..(1931): n is a, c, g, or t
tggtgaaaaacaaagtctccactcctgttctctctacaaaaaaaaaaaacacacaaaggtttcccccagggggaggggagccatcccctctctattgtctggggcacgcatagaaccggtgttccctgtgtgcagtgggactacacaggtggagaggagagcagccgttttatataaattcaccaaaatctatagatatacacaacatatataaaaacaacaatgtagctctctgggggggcatctctctctttctctctttctacctcctggtggtctctctctgtgtgcgcaagagagagagagcggttggcgcgctcatctatctatcatgacgagatgttgtttctcttcttgtgttgtgctcaccgcgcgtgcgctctctcncgagagagatctcccctatatatctctctcgcggtggtgtggtgtgtctctctcacgtgtgtgtgttctctctctctcatctctctcacacccgtgtgtgtctctcacacacacgacgcgtgtgtgtgtgtcgagacgacacgagagagaaaaacaccataacacaaaaaaacacaaaccactctctctcacgagagagcatctcatctctgctgtcgtcgcgcggcgcgtgtgacgatgagagaaaacaacgagagtagtagtactaatataagtagaaaagtgttgttgcgcaccaccacggtggttgtgcaccacactaactggtgtgatgtgcttccctctgctgcgaccaccccccaccctgtctttctctgtgttgttgttgcacaacaagcagggtggtgtcgctcaacacactctgcgcgagcgagagagcactccccctactatatagtgggggagggaagccgtgcaatactataatattatattctcctcctcctaatcataaaccccgcccccgcgtcgttgataattaaccacacccgcctgctgctgactataattttatatgtactcctttctctcttccttctcactcacataacacactctattcctctctaccatcaacaacctcaccacatacacatacaccacacaaccatacttctctcactcacttcacatcatacccatataactctaacaacaaacatccactcacacagcaacctatcacaactataaacctgatacctcacaaaacttaatatctaccttaacatacatactacaatatctaactaactcaataaatcattaccatactatgtcaccacaccataacacaacaatcaacaagacactatacatcacctcacagaaatattaatacatacctacccaaccaagcctaccaatctaacatcaacacaaatccatcactcactaatatgtatccaactatatcatcataacaccaaatacctctcttattttatcaactcgaccaaaatcaaaatataaaacacttactcatacttacacacaaaattaccacaatacacctattatattcactaatcatctcactaccactatctaactatacccgcccacactcatcactatcgacaacacatactttactccatgacatatccctactttctatcttctcatcttctattagcacacatttcactatcatcttactatactataataaagaaaactattatatacaacagtatccaccaagctaattattatataataaccaatattataacaatattaactaaatacataaatccactatcatcaattagtctatcacaactacactacaccacatctagaaacatctcagatttatatagtacattatccttcacaacatccaaactaacatcaacaaatcacaatccagtcataacttatcacacatatcaaatcaactctactaacttcaagattaattcactacatatctaaaaaaatatatctcataacacatacccatatacaatctatcn

SEQ ID NO: 669153 - DNA, 281 bp, Homo sapiens
accccctgccctttttttgccccatccctaccctaaccttgttttcaaccccctttaaaatccctgggccccctgtgattttttaccctgacacccctcccttggactttgcctggggtggagtttaaggctgggggtacatttggtttttgtactggctaaggacaggggagggaattaagttggtttggggtggcctttttttcccctttcagccccccccatttgcattttttggtgggcccccccccctcccaataaagtcccccttttttttttta

SEQ ID NO: 669154 - DNA, 692 bp, Homo sapiens
  misc_feature (303)..(303): n is a, c, g, or t
  misc_feature (432)..(432): n is a, c, g, or t
acattggtgtgcaggataaagtttggacagtatactcgttccgtgtctcattggcgtatagtacataggaatgaaatcgctgaggttatgtggtaacactgatattcacgcatctaggcaggacctcgtcgataatgtgtcttccatacggtagctgatcccgattttagctatacatgatcttcctgtagtgatgagcggacgatcctccagctcgtgttgtgaccacagggcctgagatccagcagtgctgcgtcatcagcaatctaacagagtcttcacattgaagacgcatcatgtgtntcgctggtttcgaatcgaatgtctacctggcgctctaagtcttcgcgtgaagaataagtacggaagactgtgactagagtcattggttgtcacacgcagcagcgcgcagcatgacaacacttctacttntgtctatggttctacagtagtgcttacaggatccacatgccagctccaattgggcgtggaaggtgccatgggtcgtcgtaatctctcgggaactcgacgtgaagacgtggtacccggaaccgtcaccgttgagtagcaaggtcgcaatcattgccagtgcttctcaggctgcccccaatcgtagcgcctatttaagtcaggaaatctaattcggtggggggaagcccagtgtgttggaccgagtcgtttacgggtgacgg

SEQ ID NO: 669155 - DNA, 849 bp, Homo sapiens
tccccggtactttcgtttggcgcgccggtctttaacgacgtctaccattctcggggaactttaaaaatggggcgcgccccttcttcgccccccaaggaactttgggcccaccaccgtcttcccacggtgggaaaaggagcatgtcctccccgagtgcagcaattcttgtagttctctcgcttctcgaggtgtattaatagccgccactaaattgctctccgagtgaatattcctactgtattttacagtccctgcacaagaagtaaaaacatcgtgctctgtgaaacagcgtcaatcacacaggtctcaacaccgccgggggcacccctccagaggagcgcgccaagtcttccgccgggaagtaggagaacccgggtggtggtcacccccccgccacagaaccctgttattaaacgccatttcttggttgtgccccccctcacacgagtctaattctgggaggagagaactccgccgcttcttcttaaaaatattttatgtggagaaggcttttctggaattccttcatacctcattgttggagactcagcgctgttgttgacacccacacaagaggtcttaagtcgtttcacccacgttcgcgataagtctgttgccagattgacgacggcatggacaatttggggacatagtccacaggatagcatcttgtctttcccggcgctcttacttatatcaccacagagggccctccagcaccacgtttccttggaggctcatctgggtgcgccgccgttgaagaaaggagataaagaagcacgccctgtttcggggaagaaactgtccttctaccgcccttataaactaatcccttctggggacaaaaca

SEQ ID NO: 669156 - DNA, 420 bp, Homo sapiens
aatactcgggggatggagcaaggtaggtgagggaccctccatggtgggcaggggtatgagcgagagagtgccatgaagagtccggaggaagagtgcatcgtcgtagagtgaggcacaattactctttgatgtactggtagtgagggctggcattctggagtgtggagcagaacatctgagccaccgtgtggtacaggaacctgtactgctccatgtaggggtgagggaccatcaagaagggaaggcatgggcaaatgacagcagtgtgtgccactgtccctgaagattaggagacccagggttcacctctgtctgcacggccgcaggccgctgcttcctcatcttaaggaccacatcaaagagactgaagtcaggtgggctcatctggggcagacagacaaggcacttgagcaggacacg

SEQ ID NO: 669157 - DNA, 160 bp, Homo sapiens
atagcaagagacagagaagtcaaagaaataagcaaagagaaacactatgagattcttttttttggagacgggagtctcgcccgtgtcgcccaggcgggagtgcaagggtgtgatctcggctcacggcaagctccgcctccggggtcacgagattctccgg

SEQ ID NO: 669158 - DNA, 287 bp, Homo sapiens
caagagcatgtcatcggggtgctgtgggacctcaaagtatgcatatcgtcaccattcttcaacggtaaagatgccactgggggaaagaaggaccaaccttggaagacagagtcagtctggaggcaagatcttgtttcaccagcatggggccagttccatggtgacaccttccccaggcaatcacctttctgagcccactttatatcctaggcctggattcaaagacacttgagccctgctacatcacttcttttgaggtgctatcttgatgcctttcctatagtcac

SEQ ID NO: 669159 - DNA, 1383 bp, Homo sapiens
  misc_feature (293)..(293): n is a, c, g, or t
  misc_feature (295)..(295): n is a, c, g, or t
  misc_feature (304)..(304): n is a, c, g, or t
  misc_feature (313)..(313): n is a, c, g, or t
  misc_feature (366)..(366): n is a, c, g, or t
  misc_feature (694)..(694): n is a, c, g, or t
  misc_feature (811)..(811): n is a, c, g, or t
tgagctctctggagaatctccaatcggtcagggatgcgtgtgccttcattgtaccattcctcagccacctgctgacgtagtaataccattcttcaagactcacagtcacactgccagctccagaagtccccatgaccctgtgtacacgacctaggagtgaaggggagccatactatggctggaaggacatatctacctagctattgtagctgccttcttgccatttctggaactgtaggctcctagtgcgttactgatcaagtcggactaaggttgatttgagacctcatccnanagcctgcgncagattagntgtgaatttagaagtcacgacatcctacctcactcgctagggcctccccgtgntagagtgatgaaacattcaagcggacattctgcgttagtccagaacagcactcgcactcttgcggcaataaatcctaggaggtccaggatgttctcgccgtagacttaggcattgaccataggtatggagagggacgaaccgatgaatggcgatccatttgagttattgccagacgcaacattattaccggcaccaaaaaggaacacctatgcgctaaaatgtgtgttacgaatttacctttataataagagattcgcacctgtgaactagaacgtgctcaactagccacgagttctttggtacccctggggatagcttcgcatcccnttggcagaaaggtggcacgaaccacgagcttaggtgtccatacctggcctccccagattaaaagcgtttcttgacagacacgtttggcgaagggcgacactctgtgcgcaatagcantagtcccttaaattgcacctctatcattgcatagtgagttaccacttggcttgatagagctcgctcccgacgtcattcccgtgtggtagctaagatagttgaaacaataccgtcctgctcgattaggcttagagctggctatgagaatcaagtgttagtactaatcgcttgagctattaacacgaaggagactacttgtcccgagcccctgctagcgaaatttaccctaaagtttcccagaactttagaggaacaggactgggccattaaatttcttcccatattgtaccaaaacgcgttgtagcgacccttgtagggcgactttcgcaaccggggggtgtggtacccctttctttggccctggctaacgtcccaaatattgcgcgaaggacttgtctttctcgggcaacgcgcattggttggggttcacaggaaggcccgcgtgctataggcccccgcgttggaaaggccttcgggtttggttatcgccattgcttgggcggtttgcgttgggcttatttagcggtatggcgttggggccattcttgggcgcattcttgggttggttcccc

SEQ ID NO: 669160 - DNA, 128 bp, Homo sapiens
tgtgtgtatataggatactatatatcctattcgttctgtcctctgagagaaccctaatacagattttggtcccaggagtggttctagaatattaaggatggagttatttccttggttttgagtctaat

SEQ ID NO: 669161 - DNA, 230 bp, Homo sapiens
catctcctcctcctgccagatgttagctaccccttccttgtacatatccctatgatggcatacttataccaagctccatctgcctctgacaaacagagctacaatctgctccttgcctactcttcaatcagccacatagccctcgtagtaacagccattctcatccaaagcccctgaagcttcaccggtgcagtcaatactcataatcgcccaggaggaggcggacttcg

SEQ ID NO: 669162 - DNA, 320 bp, Homo sapiens
  misc_feature (1)..(1): n is a, c, g, or t
  misc_feature (10)..(10): n is a, c, g, or t
naaaaagaanaaaaagggaggggcaaaccacaaaaaaaaccgtcctggagggaccgagaaaccttaccgagaacaaagttgctaagagataaagaccgccttctttctgcggctgccacacgaaccccagtgactcggacaagcagtccaaaatgactctcttatttaattgtggagcgggaaagagactacaggtagccactgagcatgactggatcccactttactcctcttcccctcgcatgatctttttttaccatggccctcccctggcgcctagcgccctctaacacccacaatcaaatgctgtatccgcctgc

SEQ ID NO: 669163 - DNA, 771 bp, Homo sapiens
  misc_feature (650)..(650): n is a, c, g, or t
aagggtgttgggcctgtaagtgcacagaaatcaagaattgaggtttgggaatctctgcccagatttcagaggatgcatggaactgcctggatgtccaggcaaaaatttgctgcaggggtggagccctcatggagacctctgttagggcagtgtggaagggaaatgaggggtgggagcctccacacagagtctccactggagcactgcctaatggagctgtgagaagagggccaccatcttccagaccccggaatggtagatccactgacagcttgcaccgagcacctggaaaagccacagacactcaatgctagcccatgaaagcagccaggagggcagctgtaccctgcaaagccacggggtggagctgcccaaggccatgggagcccaccttttgcatcagcatgacctggatttggagcatggagttaaaaaaatactattttggaactttgagatttaatgactgtcctattggatttcggacttgcatggggcctgcagccccttcattttggccaatttctcccatttggaagaggtctatttacccaatgcctgtacccccattatatctagaagtaactaacttgcttttgattttacaggctaatagacaaaagggacttgccttgtctcagatgagactntggacttgaacttttgagttaatgctgaaatgagttagacgtgggggactgttggagagtgtggtggtgtttgaaactgtggggacctgcagattgcgagaaaccagcggtggaatgatcg

SEQ ID NO: 669164 - DNA, 363 bp, Homo sapiens
tctcgcaccatgggtatctatgatctactgtcttcatccctccttgacgctatggcagcccactttacattcacccctccgcgcaacccgggccacaacacggttggagcgctgcaggccatgctgaagggcgacgccaaagtgcttatctgcctcggcggtaacttagcgccggcggcaccggacaccatgcgcaccgagaaggcgctaagcaatctcgacctgtcagtgcaaatcagcaccaagctgaaccgcagccacttaacgccgggccgcgaagccttgatcctgcctacccttggtcgtaccgagctggatatgcaggccacgggttcgcagtttattaccgttgaaggtcgacgc

SEQ ID NO: 669165 - DNA, 131 bp, Homo sapiens
atttagagtatcccccggccgccacagctttctctctggtcagtaatatattttaaatatatatgctttatatgtattgtctcagagactgtcaaagagtagtggtaccgcaggctcgaacttcgtaaatc

SEQ ID NO: 669166 - DNA, 161 bp, Homo sapiens
ggtgtgtggtgaagcttctgtgaaacgtggaagggtcttctgtgcgtgtgtctgatgaaaacaagagtacagcccatgactgggcagtgcgctccggacctcacagatttagatgtagatgtagataacccaaagaagaaaagaaagaagctgctggagga

SEQ ID NO: 669167 - DNA, 251 bp, Homo sapiens
atgttgctgggagtgtccatacttgggacgacataatttgtataatcgcacggttactggacggaggagaatctatgtgatccagtccatgtgcacaatgaaaatcagcatatcacccgggggaacattttagtccccaagtcttggggtaatgacggatggtaaaaaacactagctgtcaatttttttccagtaatgggcttcaggtgtttttttttttccaactcggatgagagggtagttccactcaa

SEQ ID NO: 669168 - DNA, 199 bp, Homo sapiens
cgtatttctcctggctgactcttgaggatccccattatggcagcgtaggccatcgcaaagacctgtacgccaacacagtgctgtcttggcttgcaacaccatgtaccctgtgcattgccgacagcgatgcagaatggagatcacttgccctgtgcacccatgcacaagtgaatgatcaatgatcatttgctcctacctg

SEQ ID NO: 669169 - DNA, 429 bp, Homo sapiens
ggggattatccggaatttaactagttaattggatccttcttttaggggcctgggaactttaactgatgcttttcctgattttagagcaaaggtgtggaaaggggaaatggaggaatgccttcctgtctgggccgttttttgggccacagttccagatgcaaaaggtttttttggatagaacacttttgaatgtaaatcatgataaaagggttatttggaaactaactcttaagttgggattaagggggaatttttacttttggactgcctaaatatcaagggctgaaactttggaattttgaatattcgtggggtttaatgttaaaaagcctgtggtttaggagggctattcagggttccttttcctgataaacactttgaatatttttttggggttttggtttccttttttgaagttgttcctccttt

SEQ ID NO: 669170 - DNA, 161 bp, Homo sapiens
gccccggcaggttccctcggggctctttgggctttggctcaccgcagcctcttgcgcggggtctgctccagcgagccacagcccaggggcggcgcttggagagggacacggcgcggggacatcgtccgacgacttctcaggctctgatctcttgccttggc

SEQ ID NO: 669171 - DNA, 141 bp, Homo sapiens
ccctggcggattgggtggtgcgcggtgccgcatttggtccaagttgtccgtggccgtgcaagtcatgaacgcgctgctcttgcccatcgtgctgggcttcttgtttttgctggcacgtcgcgcacttcgtggtccgcaccg

SEQ ID NO: 669172 - DNA, 549 bp, Homo sapiens
ctgtttcggacttcttcattaaaacagctacttccaaagcccaagtcattaacagtttcctgaaacacaaaatatacagttgactgtacattaaaaacaataacaaaaacaaaaaaacgttaaaagcctagtcttcttacattggttttctcttggtttttcaaacatctcaaacaataaaaaataaaaataaagaatgaaactatagaaattactgtcaaaattgttgtgtgccttttaagaaaaccccccaacgcagcatgataatagcaaagaggccgggcgtggtggcttacctgaggtcaggagttcaagaccagcctggccaacaacatggtgaaacaccatctctactaaaaatacaaaaattagctgggcatgatggctgggtgcctgtagtcccaactactttgggaggctggggcacgggaatcacttgaacccggaagcctgggtgacagagcgagaccctgcctcagaaaaataaataaaaattaaaaagtggggaaaaaaagtatgccttccctattggagtagacactacaccat

SEQ ID NO: 669173 - DNA, 245 bp, Homo sapiens
  misc_feature (59)..(59): n is a, c, g, or t
  misc_feature (114)..(114): n is a, c, g, or t
  misc_feature (129)..(129): n is a, c, g, or t
  misc_feature (183)..(183): n is a, c, g, or t
  misc_feature (186)..(186): n is a, c, g, or t
  misc_feature (225)..(225): n is a, c, g, or t
gtggggatgataacgtttcagcagagttatcagcaccgggtgggggaagggcgtttgtnacgttgccatgcccgatgcgcaagttatcgggcctacaaaggcaataaatgtctnatgcgacgctaacgngtcttatcagacctatagccgctgccagatgtgtgctggataaggtgttcacgncgnatctggcaataagacgcgatgatattatttacactccgncagcgttttaaatcgcctta

SEQ ID NO: 669174 - DNA, 110 bp, Homo sapiens
gtaaaatgtgaatgactttttttgtgaatgaaaatttaaaatctttgtaactttttaaatctgcttttgtttccccaaaaaaacctaaaatcctttttttaaaaaaaaaa

SEQ ID NO: 669175 - DNA, 436 bp, Homo sapiens
atcacgaaatgttcaatgaatatgagaatgaatcaagtctgaatcctgcctcatcctatatcaaaatatagctgtacggacgataacacgtcttcataaatagccaactatgagtaacatgtcaccttaagtctctcattatgcttgtgcttctacgcttacgtaaaagtaagttggtgatcacaaccgtaagtgagcttcctgttttgcagaacgtggaatcttgtagaaggaagatcagcattcataaaaaactataaaacaaaatgctcacatagtagaatggtccccaagaggagagcagtcatgtagtaatcatacagaatgaaatagacatctatcagcttgacactgcatccattagtggcaccatcacaaatgaaacgagaatttcctctgtaaaattactttcagagtctgtccttgcagtggctgg

SEQ ID NO: 669176 - DNA, 181 bp, Homo sapiens
catcgagctcggcccgaatcctaattacggaaacaagagtagaaaggtggttgtgagggctgaggggttggagggaaaggagcgctgttgatcaaaggacacagactcccagttacaagatgaatatgttctggggatcagattatagaatagtgagtgtagttaacaatgctatgcaggg

SEQ ID NO: 669177 - DNA, 255 bp, Homo sapiens
agtcgattcctagaggatcccccatcaaccacccgacgctgccgattgcgctgtttgtcgcccgccggccgggcaccgagagctacctgatcgacttgcgcgacggggcgctgctgcagaccatcacctcgaagaccaatcgacacttttatgggcacgcggtggtgcacaaggatggcgagtggttgtatgccacggaaaacgacacgtctgatccggggcgcggcttgcttggggtatatcggttcgagggtg

SEQ ID NO: 669178 - DNA, 954 bp, Homo sapiens
ccaagataacaattctgagagatgccatatagttaaaagctcctagattatgagcataaggatgctcctataataagttgatcatggattttgtgctataatataaagcgatataaaacattgctcgttggcttgctgatttgcacgaacacctttttagcatagagagcttctggagtgtacctagacatgaattggctagtactatgtagggattcagagcctatcgttatcgtattacgcctgctgccttgccgagacagggtctcactcggtcacccaggctggagtgcagtggtgagattgtagcttactgctgcctcaaactcgtggcctcaagcgattctcctgcctcatgcctgtaatcccagcattttgggaggccgaggcaggaggattgcttgagcccgggaggtcaaggctgcagtgagctgtgatcacactgctgcattctagcctgggtggcagggtgagactttgtctgaaaaaacaaagcaaaaaaacccaaattaatgggcaatgatagtatttagctatttttgttccatgaggaagtgattcacttattttttgaaacagtcttgcttctgttgcctaggctggagtacagtggtgcagtcctcggctcactgagctggctccggattcaatgcgattctcctgtcctccggcaccttgaagttagtggataacaggcgtgtcccactatggcctggcacaatctaagaaagagcggagataggcatgttagacaggtgccctgcgctacagaccggaataaactctgctagctcccaagtggatttatcggtgaccagtaccccggacttgattataagacaaatccaggggacagcaaacaaattaaccttaaaaaagaaatatataggaggatctaacatcacaaggagtcaacacatcaatcagacagacacatcaacaccacacgactaa

SEQ ID NO: 669179 - DNA, 160 bp, Homo sapiens
  misc_feature (71)..(71): n is a, c, g, or t
acggacctcccaaagtgttgggattagaggcgcgagcaccgcgcttcgcagactccagattgtttccactncctgagtggccttaagctccgcttggagtttggtgctttcactatttcttttctagcctctccgtgattaaagcggatgaatatgtttt

SEQ ID NO: 669180 - DNA, 400 bp, Homo sapiens
ctaattagcatggatgttaagtcatcatgtacggattcaacttcctacaacttagataacagtggtactccattacctaccacactcatctctcatgtgcgccacacacccacgcttcctcctgtctatctagaaattctgccaatagcatcactactctttcacctgtttcagtgattctcacatctcactgtgacactatagtcatctaacaaagatttattaacaaaaatgcacaggacttacactacgtcttttttataactggtgtggggtgggacacaggtatggaacttgtttttataacgtcccccaggtaattttaatgcacgccagcttgagcacctctgcccttattggttttccggttcaggtgattctaatgtctaccttactcctt

SEQ ID NO: 669181 - DNA, 708 bp, Homo sapiens
ccaccccgtctgggaagtgaggagcgtctctgcctgggcgcccattgtctgggatgtgaggagcccctctgcctggccgcccagtctgggaagtgaggagcgcctcttcccggccgccatcccatctaggaagtgaggagcatctctgccgggccgcccatcgtctgagatgtggggagcgcctctgccccgtcgccacgtctgggatgtgaggagcgcctctgcccagccgcgaccccgtctgggaggtgaggagcgtctctgcccggccgccccgtctgagaagtgaagagcccctccgcccggcagccgccaccgtctgggaagtgaggagcatctccggccggcagacgcccgtcaggagggaggtgggggggcagccaccacgccggacagccgaccatgtccgggaggtgaggggcaacataccggacggaagacacagactgggaagtgaggagcccgtctgaccggcagaccagcccgactgggaggtgaacccaacagcgtcatcgagaaccgggcatgcatgacgatggcggcacgtcgacctagaaaggggggaaatgtggggaaacgatagacgaaaatcagattggtagctgtgtctgagatagaagggaagtagaccaggggagagtccattgtgcctgtactaagacaaattcttctgcctgggatgctgatatctataacttaccccaagcc

SEQ ID NO: 669182 - DNA, 180 bp, Homo sapiens
aacgggtggttgtcatgtgatgggtcccctccaggttactaaagggtgcatgtcccctgcttgaacactgaagggcaggtggtgggccatggccatggtccccagctgaggagcaggtgtccctgagaacccaaacttcccagagagtatgtgagaaccaaccgcatcacccgttcgggt

SEQ ID NO: 669183 - DNA, 1337 bp, Homo sapiens
  misc_feature (370)..(370): n is a, c, g, or t
  misc_feature (670)..(670): n is a, c, g, or t
  misc_feature (750)..(750): n is a, c, g, or t
  misc_feature (814)..(815): n is a, c, g, or t
gtcgtaatatcagttgtgatactaccccggcgtgtgaatgtgtgtgtctgtcttccctcccctcccctccaccagaggttgtttgtctccgcgcctctctgaccctgtggtgtgttgggtggggccgcccaccacacagcacagctcgtgcgggcgagcacagcatacatcggtgctgtggttctttcctgttagttaataatattattggggggctgtgtgggcgtccgctcgtgtggaatgaaggaggggcgcctttctttctgtcgcctcatcggtggacccccccgtcgtgtgtatcgcccagcccgacccccccccccgtcgttgttgttggtgttaataagagctgttaaataagtggttgttnttataacagccaccagtgcggtggcccccccccccgcctggttttttttgtgaggaggaggagcttccttcgtgaagattttctttctccgcaagatggtccccaccagcggttgtgaggagattttcctccctctcctccttcgaaggaggaaattcctcctctcgagtatatagcgcgccccgtcgttaaccacacgcggagatatgtagcagaggtataaagaggggcctcacagcgtctgtctgtgtgtctgtgggtatcgtgtagagatatttctctcaccacaccggcgctctngtagagaggtgagaccaccacacggccccacatcatagagagacatatggttataggcgctcgagagagatatagagagnggggagatcaccgccgtcgagaagagagagatagggggccccccagcgcgccgcgcacacaggnncccacacaacgcctctctcgctctcacacagtgtgagagatatgtctccgcgctgtgtgtgtccttctcacacacacgtgagagaccaccagagagtgtgagacgacctttacacacagggcacacagtgtgggcgtcacacacacttctccccttctctttcacgccactctcccccggctgatacccgcacactctgttctcgctctcgtagaaagagacctcgcccacgccacgcgtataggagcccccacagagagggcccccaccacatatgtagaaagcgcttgtagaattttcccctcacactcggctctctgcgcttttgtctcgagagagatctcgtataggagaaaggagatgcttccacccaacctcgagaggtaagagataaatgctatatgctcgtcgcttggtgaaacacactccacatgaaatttttatagtaaattgctctcccaagccaattgatatgtttgataaatttaagtttttaggtaaattaaaacctttttaaaattt

SEQ ID NO: 669184 - DNA, 165 bp, Homo sapiens
ctcagaaagcaatacatgtaatactatgctagaaatccctacatgccttcccattgtatctgcacaaaccagaccagcgtaatacttaaaggcttgtctaaacgcgtacttctctacccagtctccatgttcccgtggacctggagacaaggtacgacgccgacg

SEQ ID NO: 669185 - DNA, 1198 bp, Homo sapiens
gccgggcgcggtggctcgtgactgtaattccagcactttaggaggctgaggtgggagcatcacttgagcctaagagttcaagaccagctcgggcaatatattgagattcccccatctctaccaaaaaaaaaaaaaaaaaaaaaattaaggggggaaaaggggggtggcgtggggggccccggctcacttaaaaaggctggaggggggggcatccattgtggacccgggggagggccgaaaatgtggcgagtggacgccatttttggtgccccatgtggcgcgccccaacgccgtggggcacaccacagcgggagagcggagcaccattctcaaaaacaccgagaaggacacagagcaagcgaagagagaaaaacagggttttaccaatactgtggattccacagagaaagcgccctgggagaagaacattcacaacgcacagcctttattctcttgacattctacattacccagggtcaggataccttacacatctatatatgggcgccgtgagaattccacggtggtgctactttgttagagagaccctttatactctctacaagatatctttttccacaaatcccttatacacacccctttttggcgctgttaatagttcgcccacataaataagtgtgccacaaaagggtttttttgttataaccctaagcgggggcgccagggacacctgtaaccctaagggggagaacaccgtctccacaaaagctcacccccgggggggcgcccaatttttctcgcccgaagttataccaccgggtgggctagacaactcgtctctgcagcgcggggaacacttacacccttctcaaccaggcgcttgtacacccgctacagaacacattttccttcgttcaacacagcgggcggcggcccggggggctacaacacgggagtacggtacctaaaccccgccggtgggcgaaaatatcatacacacggcccaccttttggtggcgaacagccgccccaggaggacgcacagcggggtgggcaagccaacacctggaggggggccggcaccacagacagagctgctcaacaagtatccgcagccgtgcctgggtggcccaacccgtggtgtggtggtgaaaaaccccccggtgggctgctctctaacacgtaaacaacaatgttcacagaagaaatataaatcggggcgcggggacatagttgg

SEQ ID NO: 669186 - DNA, 245 bp, Homo sapiens
tgaccgcatatatttccataataaggtttatattcatattcatttactgagagacagtcttactgtggcacccaagccagagcgcagtgacaccatctcagctcactgcagcctgcgcctcccaggctcaaaggattctcctgcctcagccttctgagtagctgagactacaggggtgtaccaccacacccaagcaattctctggatttgtagtagagacggtctcacgaagctgtccgcgttgc

SEQ ID NO: 669187 - DNA, 818 bp, Homo sapiens
  misc_feature (31)..(31): n is a, c, g, or t
  misc_feature (78)..(78): n is a, c, g, or t
  misc_feature (85)..(86): n is a, c, g, or t
  misc_feature (90)..(90): n is a, c, g, or t
  misc_feature (92)..(92): n is a, c, g, or t
  misc_feature (126)..(127): n is a, c, g, or t
  misc_feature (129)..(129): n is a, c, g, or t
  misc_feature (132)..(132): n is a, c, g, or t
  misc_feature (135)..(135): n is a, c, g, or t
  misc_feature (138)..(141): n is a, c, g, or t
  misc_feature (145)..(145): n is a, c, g, or t
  misc_feature (172)..(172): n is a, c, g, or t
  misc_feature (221)..(221): n is a, c, g, or t
  misc_feature (227)..(228): n is a, c, g, or t
  misc_feature (247)..(247): n is a, c, g, or t
  misc_feature (252)..(252): n is a, c, g, or t
  misc_feature (257)..(257): n is a, c, g, or t
  misc_feature (262)..(262): n is a, c, g, or t
  misc_feature (267)..(267): n is a, c, g, or t
  misc_feature (269)..(269): n is a, c, g, or t
  misc_feature (276)..(276): n is a, c, g, or t
  misc_feature (282)..(282): n is a, c, g, or t
  misc_feature (288)..(288): n is a, c, g, or t
  misc_feature (291)..(291): n is a, c, g, or t
  misc_feature (293)..(293): n is a, c, g, or t
  misc_feature (310)..(310): n is a, c, g, or t
  misc_feature (393)..(393): n is a, c, g, or t
  misc_feature (411)..(411): n is a, c, g, or t
  misc_feature (425)..(425): n is a, c, g, or t
  misc_feature (460)..(460): n is a, c, g, or t
  misc_feature (497)..(497): n is a, c, g, or t
  misc_feature (514)..(514): n is a, c, g, or t
  misc_feature (520)..(520): n is a, c, g, or t
  misc_feature (555)..(555): n is a, c, g, or t
  misc_feature (564)..(564): n is a, c, g, or t
  misc_feature (567)..(567): n is a, c, g, or t
  misc_feature (667)..(669): n is a, c, g, or t
  misc_feature (676)..(676): n is a, c, g, or t
  misc_feature (684)..(684): n is a, c, g, or t
  misc_feature (689)..(689): n is a, c, g, or t
  misc_feature (694)..(694): n is a, c, g, or t
  misc_feature (697)..(697): n is a, c, g, or t
  misc_feature (700)..(701): n is a, c, g, or t
  misc_feature (703)..(705): n is a, c, g, or t
  misc_feature (724)..(724): n is a, c, g, or t
  misc_feature (727)..(727): n is a, c, g, or t
  misc_feature (809)..(809): n is a, c, g, or t
aaaaagagtctggccatcagcagaccagggnggggaggtgcactggggtggttctgccttgctgctggtactgataanttcttgnntcantncatctacaatgatctttccctctaaatcccaaanntnaangcnggnnnntgtngcagcacacagccagtagcggttaggnctgaagcacagggcgttgatgatgtccccaccatctagcgtgtaaaaangtttannttcattgaaatcccataanatggnctggncatcnttgcntncagaagnacaganggatcnatntngagatatatttaccgtntttagatatttttttttgttaattttgtttttttttagcttgcagttagctaggttttatactttgatcagcttgttccagcnacaggagatgatgatagnttttttgttttttnttgatatttggacacaagatatccacttttatttntttttattttggatattttatttttacacacccaggntattttatagttttatntttttnttttgagatctagatataatttgccggttgttatntgagaaggncanactcagcacatccttggtatggcccacaaatcgcctcgtggtggtgcccgttgtgagatcccagaggcgcagggttccatcccaggagcctgagagggcnnnctggccntctgaggngatanccacntcnctnncnnngtgggagtgaccccgccgngcncgctgtggaattccatagttggtctcatccctggtcagtttccacatgatgatggtcttatctcgagaggcggagaggatcntgtccggga

SEQ ID NO: 669188 - DNA, 641 bp, Homo sapiens
tttttttttggagatggagtcttactctgttgcccaggctggagtgcggtgggtagcgtgatctctgctcactgcaacctccgcctcccaggttcaagtgattctcctgcctcagcctaccaagtagctgggattacaggcatgcaccaccacacccagctaattttttgtatttttagtagagacggggtttcaccatgttggtcaggctggtctcgaactcctgacctcaggtgatctgccggccttggctcccaaggtgttgtgaacttatcgtagcctagaaaagaaggccaccctggagtcttccaaatggtacgataagtaaacgtggaaaagactattgcatgtatgaaagatggcttttgtaaaagtgttgcgttgtcgttggtttttctggactagggcaaatcttctggcatctggcagcagagctcagcactgtgtctgggctgtgactcgggagacacagctgggaggtgcctcctgatggggcacctgggagtaggggatgctccaggcgctcgtgccttctgagaacgcctctcctgggggcatcttccgagtccagtgccccagtctgagaaggcccagaatgggaatgaccagactgatagaggcgacagtcctcctctaccgag

SEQ ID NO: 669189 - DNA, 189 bp, Homo sapiens
cttattatccttctttattgggcttctggccacctgtggcctgaaagctactaatcatttttacactttttaacatattcaagaaaaaaatcaaatggggtaatgttgatcaaggtgtacaagttttagttcttcaggatgattgagctccagagactatatgcaaagcctgctaacgggtaccgagct

SEQ ID NO: 669190 - DNA, 290 bp, Homo sapiens
cccagaggttacaggctataccaccacacctggctaatttttgtattttttgtagagatggggtttcgccatgttggccaggctggtctcccaataccggggcccaagccgtctgcccaccttgtgctctcaaaatgctgggattacaggcatgagccactgtgcccagcctaaaagggttttctgtttctactctgtacctaagtcactgtactcctaggaatttatcctaagacactattggccactagcaagttatgagtttttgggggtggtatagggtggtatag

SEQ ID NO: 669191 - DNA, 1724 bp, Homo sapiens
cctgcttcaacagtgcttggacggaacccggacgctcgttcaccaccccggacggacgaccatagccagccctccgtcacctcttcaccgcaccactcggactgcacccaaggccaccacaacgacgcatccagcgccgagcagacaaccgacggacgcacgacgtcctcatccttagatcgccgccatgacgaccgaggtccaccttcgaaaggtgcgccaagaaagttacacaccagagacctcaagagtgccggaccatacaacccgccacgattcaaaccttggagctcttaacgcactcctacggttatacctttgtcccatggtcatttacctacactttttggacccggcagaaatagatcgatggagcatacaggacgaggcaacacttttggcaccaaaagtcactttacatcatccaaacccacatacgatcaattgaaggagacagatggcgcgacacatttggactggcacgcaaaacacatggaattgaaacggacattgacaagaccaaccacaaaccagacgtgttgccaccagcaaataccgtatcccccttatgcccagcggcaataattacaaaaggtaaacaacacgccaggcacaactggattgacattcgaaacgtggggcgcaaacaatgaagggcagatttagaacaattgacaaaaatatggcgaacgattggttggacacattgtacacctatttttaggagaacacaacacacaaacattggtttggaactataccaggttcacacacgttacaacatgaggaacacatatggacaacaaaataatacacttgggaaaccaagaagtgcaaccaaacaacgagaatgtggaacaaccccagcaatttgtcgtcggtggcattgaacacatatccaatattataggaggaaaacataaatattttttcacgccgttggacatagttggaaagcacaatgtagatggtcaacaatcgccccatatacaacagacggacaaactctggcacgtggctggaacacaccactgtgttgatacccctaaacatgttttgtcaaacaaacagagagttggaggagaaccaacacgcccacctggaaaaatttcattggtgagcattatgtggacgggcgaaacaatcatgtcatcactttgatgagaacacaggacaaaccaaaccaccattggggaaaagacaacagggtaaatataatggacacaagagcttaaacagcccatcctggaggcatgatacatttataccacccagtataataccgactgaggtagaatgaaacttaacccagtgtgaatacaccaagagacaatgagacttcacatgtataggagcgttacacatttacccagtaccatatacagtttgtgtcccacacaacaacatccacgattaagaaattcgttgcagaaggtgcacaccaacacctgatcagagaaaaaacaaatttggggacccaatcaataacacaagaagaacaacgaaatgagacaaagtaaaacaacacacacagcgccgcggcgcatagatacatccttagacgaacagcacagataacgtacacatcaatactatacatcgacacacatgaggtatagatcattaacgaacagagcggcattaaacaagctacgacagacacgatagtagatactgacacactctgtggtgtaagacaacccaagaaggatatattgtcattg

SEQ ID NO: 669192 - DNA, 1032 bp, Homo sapiens
tttttttttggagatggagtcttactctgttgcccaggctggagtgcggtgggtagcgtgatctctgctcactgcaacctccgcctcccaggttcaagtgattctcctgcctcagcctaccaagtagctgggattacaggcatgcaccaccacacccagctaattttttgtatttttagtagagacggggtttcaccatgttggtcaggctggtctcgaactcctgacctcaggtgatctgccggccttggctcccaaggtgttgtgaaccactgcacctggcctaggatatttttccagtggaataaaataaaggaaggcggaaacagtgtcaaatttaggtcagaaacagccaagctagccccaaagagaaacatctagataagactgagttgtatgttgcatggctacattgtatgttgcatggctacaggtcacagcatgcttcaggaacccccgggtccaagtaaattaggaacaagtgggctgctcttcaggggctgggggtcacagagcatgcaagccagaaagatctggcttctagtgggcggggtgcagcccctaattcgcatgctgtcatagaaaagcagggtcagttggggtattgtcctgagaaaggaatatgctcatgaggagagagactgctttgagaaaaagtggcagaatggtaacctagaaaagaaggccaccctgagtcttccaaatggtacgataagtaaacgtggaaaagactattgcatgtatgaaagatggcttttgtaaaagtgttgcgttgtcgttggtttttctggactagggcaaatcttctggcatctggcagcagagctcagcactgtgtctgggctgtgactcgggagacacagctgggaggtgcctcctgatggggcacctgggagtaggggatgctccaggcgctcgtgccttctgagaacgcctctcctgggggcatcttccgagtccagtgccccagtctgagaaggcccagaatgggaatgaccagactgatagaggcgacagtcctcctctaccgag

SEQ ID NO: 669193 - DNA, 429 bp, Homo sapiens
agatcggtggtcccgatcacttcgactagtgcgctcgcctcccgcggattctccacaacctggtcgaattctgttgcggtgcggcagatccatccgtaaactagcacatatgttcggacatgtggggatcggggctggcggtgcgaaggtccacgatgcctctgtgcccgacgccatcatccatttcgcgcgagtggaggcggaatcggccttgggtcgattcgcggcgatcgcggatttggtggcgttgcgggatgatgatcagggtgatcggcagtggtgggcgtgtgatgggtgggatgccgcggtcgctgaagtcggggccgcgctgggcatcgggcgcagggaagcctccgggcaacagtctgtcgcggtcgcattgcgagaccggtagccgagggtgtccgcggtgttcggcgacggcaaaga

SEQ ID NO: 669194 - DNA, 711 bp, Homo sapiens
tggggctctaaagggggtaaagggggtgctatagggtaaatacgggccctatttaccaaaaattttaaggggaattaattctagtgacgatgggcatgaaacgggggttgtgctccacatgatttcaagatgcatttgtgaccctgtagtatacccccgggtcgttgtacgcggtgtagaaacgtgtggtttgggttaaaaacgtcctgggaatggcatctggttttataagcgcctaatggtggtgggacagctcactgagttgcaagacgtctgtggtgattgtacttatttatcaccgaatgggggggctatcaactccgggagtcacataccctcagaatgtgtcaaacgagctcacagggaggctccgcatgggtcagcattgggggatcataagagaactaaacggggggcggacaggtacttgtaagcgacgttgagacaagactcacgcctcggccaggaaccaccgggtgtaacccccgggaacggctcacaaagcacacccattggggggggccacaacattggcaatcttgcgagagggtaaaaagagggaaggcgactcagtgcgaacccatacgacctgcggcagattgatcaacagcgaaatcacatacgaggcatgtgcacgggcgagaatgaacgggcaccaacgaaatcgaacgcgccggcgcaagcgaatagacacaaaacgcgcccctaata

SEQ ID NO: 669195 - DNA, 620 bp, Homo sapiens
  misc_feature (262)..(262): n is a, c, g, or t
  misc_feature (545)..(545): n is a, c, g, or t
aaacttagggagtgggggggccagggaaaataagtggaagtggttctgaaataagccccaggtgattttcagtaatgaaagggaacagagatcattttcttataaggctcagcctcagagagaacaatttgggaggcaagaaattaataatttagtaacaaagtgaagctccatgggtgaatactttatgatgtaaaatcaagggtggatcggagggtgagcaaggggtgctcagatggggcaggtatagacagagagaagngagggcactaagcatccatacccagctctacctcggagagcagggaagactagaggccaggagacgacaggcaaccggagaagacggctctgcagccagagaagggcctgaggacggtgggaccgagagccggaggcagcactttagggctggtagctcttccggcgggaggaggaggggggggtgtactggaggggggaatggcgcctccaacagagctgagggcacccccaatggctctgccatgttggaatggaagcacctccaagtgcaagaccattgncataggagtagctgttcctccaccaaggctaagccatggcgaacgcatggcaccgcatagcactggcgatgtggc

SEQ ID NO: 669196 - DNA, 169 bp, Homo sapiens
taatccaaaaggtatttataaaaaacccattaaaaccctactacttcatgaccctgccccccgggctctttaaccccaaaacttgccctacaaaccgggggaaaggggcataaaccccaattgagtcctaaacctctaccatttaaaaaataaaacaatgaacgcaatt

SEQ ID NO: 669197 - DNA, 497 bp, Homo sapiens
cgaggatcccgccagtagagatgatgacgctaaaatcaacaatacattctcacagaaatattcgagagcagcaaatacttacataatttcgtgagaactttgagacatcatttacagtaatggagcttgtaaacattatctacaagaatactcctgagaaattacatgaaatggctaaacataatctcttacttcatttgaaaaaactagaaaaaagaaggaaaaatatttagcaacacagatcctgacaagaaatggaaagctcatctttagtttcagattacagaaagctttgttttatatttgctttcagagaaatggtatgttttcttaactataggttattttatagagaatataacagtataaaacattaaaaataaccctagatatactttaaaataaatgttatatttatgctaaaatatgtaaattacactatacaaccatatgataggttatatctctaaccttgtcttctaacgttttaccacaaa

SEQ ID NO: 669198 - DNA, 144 bp, Homo sapiens
ctcgatcgcggagaaagatctgccgctgtcgtctttgcttcagccgcagtctgtcgactggctgactgctgtggtcttacagcctgttccaagtgtggcttaatccgtctccaccaccagatctttctccgcgatcgaagtgtg

SEQ ID NO: 669199 - DNA, 447 bp, Homo sapiens
  misc_feature (89)..(89): n is a, c, g, or t
  misc_feature (372)..(372): n is a, c, g, or t
cacttaccatatacggatcactgcccgtcatttcgccgtcttgacttgaaaaaccttgcgagatggggcaggtatagacagagagaagngagggcactaagcatccatacccagctctacctcggagagcagggaagactagaggccaggagacgacaggcaaccggagaagacggctctgcagccagagaagggcctgaggacggtgggaccgagagccggaggcagcactttagggctggtagctcttccggcgggaggaggaggggggggtgtactggaggggggaatggcgcctccaacagagctgagggcacccccaatggctctgccatgttggaatggaagcacctccaagtgcaagaccattgncataggagtagctgttcctccaccaaggctaagccatggcgaacgcatggcaccgcatagcactggcgatgtggc

SEQ ID NO: 669200 - DNA, 315 bp, Homo sapiens
ggggcccctaaagggttttttccaaaataaaaaaaaaaattttggggagggttccctcataaaaaaatttgggggattttttccccaaaaaaattttggggcccacccccggtgttgtttaatggccccggtaaaacccccccccttttggcccctcccgttttagggccaaaacaaaatttttttggggaaaccccctccccttttgggaagaaacgccgggtttatttgctggaaccaaaaaaccaaaaaaaagggggctcccgggccccccaagggaaaaggggtttagggataattttccccccggggttc

SEQ ID NO: 669201 - DNA, 595 bp, Homo sapiens
  misc_feature (135)..(135): n is a, c, g, or t
  misc_feature (156)..(156): n is a, c, g, or t
  misc_feature (177)..(178): n is a, c, g, or t
  misc_feature (202)..(204): n is a, c, g, or t
  misc_feature (228)..(228): n is a, c, g, or t
  misc_feature (250)..(250): n is a, c, g, or t
  misc_feature (439)..(439): n is a, c, g, or t
  misc_feature (446)..(446): n is a, c, g, or t
  misc_feature (568)..(568): n is a, c, g, or t
  misc_feature (586)..(586): n is a, c, g, or t
  misc_feature (593)..(593): n is a, c, g, or t
cggtgaggtcagcttcacattctcaggaactctccttctttgggccacggaattaacccgagcaggcatggaggcctctgctctcacctcatcagcagtgaccagtgtggccaaagtggtcagggtggcctctgntctgcgtagttttgcccctgncaggattgctacagttgtgannggaggagttgtggccatggcgggnnntgccatggtgctcagtgccatggnttcactgcggcgggaatcgctncgtcctccatagcagccaagatgatgtccgcggcgccattgcaatgggggtggagttgcctcgggagccttgtggctaactctgcagtcactggggagcaactggactctccggattgaccaagttcatcctgggctccattgggtctgccattgcggctgtcattgcgaggttctactagctccctgnccctcgncctgcagagaagagaaccatgccaggggagaaggcaccagcatcctgacccagcgaggagccaactatccaaaaatactggggtgaaatataccaaattctgatctccagaggaaattaggnattaagatgaattgttgnaactctnaa

SEQ ID NO: 669202 - DNA, 622 bp, Homo sapiens
gagtggtggagtggcgtagacgagtaagtcctggtctgcgtgaaggtcgacgactccgtccgcagatacggacctgtctgggtctcagccgccaaagaccccgtccgaagtactagccggacatcatgagtgctgtcgggtatccatcgggagactaatccagcgccaggagagggaggtgaaagattcttcaggggatatggagggataagagatatggatctgaaaagaggctgggtttggtggaatgtgaggatccaggggttgcagatgatgctgtgtatgagcttgatggaaaagaactctgtagtgaaagggttcactatggaacatgctagggtcggtcacgagggggaaagaggtagaggaggatactcttgaccggtttaagtagtcggcagacctcgaaattgattagaggaaaattgttccacctgtaggaacagaaaaatcgtctaatagtggagaattaatcctcaagaagtcagtgcaggatctcaaagatttcatgagacacgctggggagagtaacgtgggggatgaaaccggcctaaataaatgaggggggtgagtttgccctaatggggttaaagatggtttgaaaactttctggacggatagg

SEQ ID NO: 669203 - DNA, 569 bp, Homo sapiens
  misc_feature (22)..(22): n is a, c, g, or t
  misc_feature (92)..(92): n is a, c, g, or t
  misc_feature (116)..(116): n is a, c, g, or t
accagcgggccgtagatcgcanagtaaggccggcaagcaaggcgccccgcatcccccgcgctccgggttgggtccatctggcccatcgtggnatgccccacggttcggtacccacnaaggtgcgcgccggcccagggttcaacctggaggagctcagggtggccggcattcacaaaaaagtggcccggaccattggcatttctgtggatccgaggaggcggaacaagtccccggagtccctgcaggccaacgtgcagcgggtaaaggagtaccgctccaaaatcatcctcttccccaggaagccctcggccccccaagaagggagacagttttgttgaaaaactgaaactggccccccagctggccgggccggtcatgcccgtccggaacgtttataaaaaggagaaagctcgagtcttccctgaggaaaagaagaatttcaaagccttcgctagtctccgtatgggccgggccaacgcccggctttttggcatacgggcaaaaaaagccaaggaacccccaaaacagggtgttgaaaaaaaaaaataaagccctcctggggccttgga

SEQ ID NO: 669204 - DNA, 110 bp, Homo sapiens
tcgactaaaatcctgtgtccggttgtacactgaagtgattacaagatttgttttgaggtttatgacctgtttattttcactgatactcttgagtatgtcattttataaat

SEQ ID NO: 669205 - DNA, 558 bp, Homo sapiens
  misc_feature (515)..(515): n is a, c, g, or t
  misc_feature (522)..(522): n is a, c, g, or t
  misc_feature (526)..(526): n is a, c, g, or t
gggtgcttccggtctttctgcctgccagtgcggccttcttgactcagacggtctgctccattgcggtcacttcctaggactcagacggtcctgctccccctgtgtcacttgctaggactcagacggtcctgctcccactgcggtcacttcctaggactcagacggtcctgctcccactgcggtcacttcctaggactcagacggtcctgctcccactgcggtcacttcctaggactcagacggtcctgctcccactgcggtcacttcctaggactcagacggtcctgctcccactgcggtcacttcctaggactcagacggtcctgctcccagtgcggtcacttcctaggactcagacggtcctgctcccactgcggtcacttcctaggactcagacggtcctgctcccactgcggtcacttcctaggactcagacggtcctgctcccactgcggtcacttcctaggactcagacggtcctgctcccactgcggtcacttcctagactcagacgntcctgcncccnctgtgtcaacttgctagactcgtcaagtccgt

SEQ ID NO: 669206 - DNA, 218 bp, Homo sapiens
ctgagatggtgccactgcactccagcctgggcaacaaagcgagactctgtctcaaaaaaaaaaaatttgtgaaggcttctctgatttttttttcccaacagttgtcctgaatcttaagcttgcccagtatttttaaataccttctaataatggtcgtaaaaccataaattcactgatcttacccatatttaggtgtacaatagtgtcaatatcaaact

SEQ ID NO: 669207 - DNA, 116 bp, Homo sapiens
tgacgggccatttgttgatggtattcttactaaagatgtgagggggaaatactgttttctcaataacctcaagtttgcagtctgtcatctcccgcgtagaggaagaggggggccga

SEQ ID NO: 669208 - DNA, 108 bp, Homo sapiens
aaaaaaaaaaaggaattaactaattggtagataaaataacacaattactggagtactaaaaaaattggcaattgggggatcagaaggaattggccattttacaaccat

SEQ ID NO: 669209 - DNA, 107 bp, Homo sapiens
gaggtgactctacagacttccggagccttacctttgcccagtacttacactaataaatacaacataaacgtcctagtgtgatgcatgagagcactaatggtgtggta

SEQ ID NO: 669210 - DNA, 812 bp, Homo sapiens
  misc_feature (777)..(777): n is a, c, g, or t
aggaaatttccaagaaagcaaaggtttccctttgcacaattttggcgttttttaagggcaatttttcaattcctaatgtcccgtttctccaaccctagatgctttaaaacaaaaaataatactataaaataaacctcccctttttatcatggcttaccttccctcctatggtgcctctgacccaaaattgcttctcttctgttctagtatattcgtcacaatacccattccttcagtttcagtgatctcatccatattttgaaagaaagcaaagtgacttaattatgttcaagtatgaatggttggttggttgagtcaacctgaaatactggcatatggaaagttgtaacccctttacctaaatgagtattttaatttaactattttagacaagcatgactaagtaaaaagaacttcaggctaagcaagaaaaaaaatgtgtggacaggaagagaagtgataccacctagggtatattgtaacttactgcaaaattcagacctggggctatggtgctgctgcctctcaccctctcttcatgccgacgggagattctgtgagtaaacatagcatgctttccatttagacaggactttgaaagtgctctaggaaatcccgctcagtgctctagggaagacactaccatttgtttcaagttgatccatcttcatggaaacttatttcccatttctggttttaaaaccttagggctttttacccacttttattaacacttgttcttatttggatgggatgttgttggcttttaaaaaaaantttaacttgttccctgccactttaggatggggaaa

SEQ ID NO: 669211 - DNA, 396 bp, Homo sapiens
ggcccccccttttggtgggtttttttcaacccctttcccaaagggttttttgggttttccaagttccccaattttcccccgaaatttcgggggggaaatgggattttttcccaaaacccccccccccccttttttttttttttggggggaccgttttccaaattttttttttcatttgcccctttaatttttttttaaaaaggttttttttttttccccattctttttaaccccccccgggggaaggggggtttttttttggccccctttggtttttttttttgggggggcccgttttaatttttttttttttaaaacccccctttttttttgggacccctttgccccaaattttttcccggatttttgggcccctttaaaaaatttttttgggga

SEQ ID NO: 669212 - DNA, 103 bp, Homo sapiens
cacaaaggtgcaggcattgtggggtcagggactgcttatttgtcacctggatcacaacagatgggactgtctgctcagagctggtggtgacaggatccttacc

SEQ ID NO: 669213 - DNA, 123 bp, Homo sapiens
gctaggctgacctagaggaccccacactgggtcgagtcttgactgtcagctcttccctcccatgaaagaatcttctcttctgatatgataatactgtgctttcccattctctttccctactag

SEQ ID NO: 669214 - DNA, 1372 bp, Homo sapiens
  misc_feature (9)..(9): n is a, c, g, or t
  misc_feature (78)..(79): n is a, c, g, or t
  misc_feature (81)..(82): n is a, c, g, or t
  misc_feature (1256)..(1256): n is a, c, g, or t
  misc_feature (1280)..(1280): n is a, c, g, or t
cagagcaangatattcggcacgaggcatggcccatatgagtcaactcacagcttgcgaggagtgggccttctcctggnntnntcttgctcataaacaggtcacttcctccatgaagagaccagtttccacgctcccatctctcactgctgactcagcgatgcctctgcctcggtctgcttttgaagactgtgaccttcaccaggaggttttacttacaccagtcgggaagattagtccctcattctgcctggagtgccccgtgtttgacttggcagcgggtgtggagccatccccgcgtcctcctggcacattgccactgtggctgtccaggaacaggatgtggctgccttggccgaatgttgtcctactctccccaaccccggcgcctcagctcctcagctcctcgggcccctgcgtctggctggtgtttgcagggctttcgctctgctctggtattgctctgcctttatagaaagtcttattgaagaagtgtaagaaagacctaaggtggggaagactcctacacacaccattagtatcagtgacaccagcaatgtaggttcccagccccttcccagtggcagcttgtgtgtccaggagataggacatcatttaacgcatcagcaaagtagcagcagatgccacatacagagtagagcgaaggcatttggtggatcggtcactagagatctatcttgcagaaagtatgtttttcctcataaaagtgcctcttaattggccattgtaccagccacttgtcctagccaaatgtccaaaacacgcccttgggccccgccacgttacaatccacagattgtctgtctgagtcgtttaaggcatttcctggtgcttgtgttccatgaataaaaggacaaagtcagaagatcactgatgtcttactgtcaacagagatattttaaaagagagaagcaggaaaagatcttccttttttgatctacaacttatatagttttctgattatgcacataatagatatgccttccagatgcataaggcaaacatctggaaagaaatatacccaaatcttagcaggggttatctttgggagtggagtacatgggattttgctttcttcatttttataattttatattactgtcttggaagatgtgtttatgtgtgtgtgttacttttacaatcaggaaaacatatttaataacatatagtcaagaaaacagacttaaaaataaatactatgtgtccattgagaaaattcacaatataaacagaaatncaaataaatacatacacaattttnaagtcacctgtagccctacccttagaggtaccccagggtaacattttggtgggatggtcttatcaatttttcccgtggaacatttagcaaat

SEQ ID NO: 669215 - DNA, 453 bp, Homo sapiens
gaccgaaactcgcgcggcgtggcgcactgcggctggtttcccggcatacctggacttgctttgcgggcaccctgccagcgtcgaggccttttccaagcgcttgttcctggcgggactgccgcgtaatcaatagctggcggatgtgtttctatcccgccctttcactttatgaaaagcctgctcaagtcggtatcggagtttatcgccgggtgctgatgacgccatcgcaggcaagccagctcccagagtagaccgagttgtctgactattgtgggagctggcttgcctgcgatgaggcgctgaaactcaacagagtggcctgcactgaaatgcaaaaagccccgccattcacagggcggggcttttgtttttcagcctgtcactcagacctgcgggtcgcccacatgcaggatcttcatgccataggtgccaccggtggtgtggtagctgtcg

SEQ ID NO: 669216 - DNA, 249 bp, Homo sapiens
tgcatgcccctgtgccaatgacatccatccagattgcatggccatctgcagattgggccaccatgtagtacagccggtcatgggtctttacgcagaaagtgagggctgggttcgggctcttggctgcactgcgcaggtagtcgtagtacacttcctcaatggcctggaaatagataactcccttcaacttcgtctcatgcttgtccacataataggaaagggtgcgctcgactgcttggattacaagga

SEQ ID NO: 669217 - DNA, 201 bp, Homo sapiens
gtctggccccttttctgtttctgtgtatcctattgctggtgactctgtgtgaactgggcctctgggaaagatcagagagggcagagtcgcacaggacataaaggaggtgctgttctggccttcagctggacaaggcttttgctgacttccaggcgggggctttgcatacgcaagatgacggctttcactgcccaagcctct

SEQ ID NO: 669218 - DNA, 749 bp, Homo sapiens
gagtctcgccctgtcaccagactggagtgcagtggtgcgatctcggctcactataagctctgcctcccggattcaagcgattctcctgcctcagcctactgagtagctgggactacaggcacgtgccaccacgcccagctaattttgtatttttagtagagacagggtttcaccatgtggccaggatggtctcgatctcttgaccttgtgatctgcccgcctcggctcccaaactgctgggattacaggcatgagccactgtgcctggctgagtacagtatatctgaatccaccaaagcgatttgctttagtggttgcatgacaatatttaaagatcaatatcccattctttttagtaaggtgtttattgttctgacaaaatatttaaaggagaaaaaacgttaagacaggtaaagagtagtgtaacatcttttttttctgaatacgaatatttaaagactaaatatgagttacatgtgagcttgtacttttggtaattttcagggatgggctgagcatataagctcccttcagttaatgaattccccattactgggatatagagtgtgattaaagtagtattttatggaatataagtctctgaaatgggtttggttggtttgtaatcctacacaaagattctttagcctctttatgcctcaggtggcctattggtaaaatttttattaccccctttggatgtggaaggttaagggggagactgggtaaaggctgaaaaagccgggtta

SEQ ID NO: 669219 - DNA, 935 bp, Homo sapiens
tcctttggtgtgattccgtcctgcgcgggtgttctctgtagcactctacttttatctctcgtacgcctcctctcctacctaactgcgtgccgcttaccctgatggaagattcgatggcactatggacatgagccccctgaggccccgagaactatcgtttgtcggtgtgtgagactaaaggccgagaaagattatcactttgcggtgggtactgatgaaaatgagcaccaggttatcttccaagaacggtcagatttaggggctgtgcaccgcgatgcagtggcacatcgttgaagcagaggcaatgagtcacgatggccgtccaattaactgtaacactgtggaacttttgacaaatgtctcgttacaatgccaactgccttaacccttggggggcttttgaggataaacaccaccaagtgcctcttcacaggtgtgaagtgtggtttcatgggccaggtgccatattactgcgacagcacttcacgttagcctgctggaggatagcatgccagacgtcggaagagggaagcaggcaggaggaatgtgaaacctctttcccgttattctggaaagccggacagcccctggaggtggtcatgcatcggttcccatcagaagagagtcaccagtgtgctgctttgaatcatggtgacggtgtctggtgtcgcgggctcacgcacgaacgaggctggttgctcgagcaccttgctgatgaggcacgtgcaaaaaagggtcgaggaagcaaacggtccgcgatatttctgcgggtgcccacccgttcttggatggggaccttcccacactccagcggggggaatctcaagagaaagagtcttacacctgccggtttccactttaggatcgctaagaagaggggccgagaaactaaatgccccgaccactccatccgggggaatacctctccgaacaag

SEQ ID NO: 669220 - DNA, 422 bp, Homo sapiens
  misc_feature (78)..(78): n is a, c, g, or t
  misc_feature (112)..(112): n is a, c, g, or t
ttaaatctgtttcaggcaccaaaagaggactgagcaggtgaactctgagttcaacaattgtaaattttggaaattatnacaagggaatcttccctctgttctttgataaccnacttgcttactcaatgcctttaagccaagtccccctgttgcctatgggaggaggtggaaggatttggcaagctcacccccatgttatttagttagcatcagttgtccccaccagtctttttgcaaagggcaggagagctttgggggaaaggaaaaggcttcccaggctgttatggtcaccttttcagaaattttcagaccaatttaaaagcgccaaaattcgctatgtttccagtgatccttttaaaaaaatgaatgtgattttgctctgtctttttaagtatgatcaaataaaaaatttgtccctccca

SEQ ID NO: 669221 - DNA, 319 bp, Homo sapiens
atcatattattcaaaaaagcaagaggagaattacaagatttaatcaccaaaacattcatgattttattcctattaagacttgtcaaaatataataaaccaaaaccttggccagattacaaggtcaggagttcgagaccagtctggccaaaatggtgaacacccatctccaccaaaaaatacaaaaattagccaggcatggtggtgtgcgcctgtaatcccagctactcaggaggctgaggcaggagaattgcttgaaccctggagatggagattgcagtgagccgagattgtatgccactgcacaccagcccggaccgg

SEQ ID NO: 669222 - DNA, 668 bp, Homo sapiens
gtgaaacttgtgtggacgacgctgaccagtcgtgttggaatcaaaacagtggggaaccctgcgccatgtcgctgactgatcgtgaagaatctcccgaatgggatgaaggaggagcgtttcagtgcagctgtttgccgcttcggcacgctgacagactgcagcctgatgttcaccaaagatggcaagttccgcaagtaatggttttattggcttcaagtccgaggaagagtgcccagaaggcacagaagcatttcagcaagagcttcatcagacacatccctgtgatcacagtggagttctagcaagtcattcggggacccggccaaacccagagcctggagcaaatgtgcccagaaaccaatgccatggccaatgcaggctccaaaagactctactactccatgaaattaggaaagatgagacgaagaaaaaggtgggcagtgtcaactgggagaagcttgaaggaggatacagagttccaggagtttcttgtcagttcatcaagattgctgtgtgctgcatggcatgccacttttgtgtccgaagttgattggcctggaatgctgagccctcgaaagggaatgaggcaaagcctggccatgtgactaccctgaacgttcgactcccgattctgggcaggagagtgaggaggagggacgcctggggag

SEQ ID NO: 669223 - DNA, 847 bp, Homo sapiens
ataacacctagtttgagtcaacctggttaagtacaaatatgagaaggcttctcattcaggtccatgcttgcctactcctctgtccactgctttcgtgaagacaagatgaagttcacaattgtctttgctggacttcttggagtctttctagctcctgccctagctaactataatatcaacgtcaatgatgacaacaacaatgctggaagtgggcagcagtcagtgagtgtcaacaatgaacacaatgtggccaatgttgacaataacaacggatgggactcctggaattccatctgggattatggaaatggctttgctgcaaccagactctttcaaaagaagacatgcattgtgcacaaaatgaacaaggaagtcatgccctccattcaatcccttgatgcactggtcaaggaaaagaagcttcagggtaagggaccaggaggaccacctcccaagggcctgatgtactcagtcaacccaaacaaagtcgatgacctgagcaagttcggaaaaaacattgcaaacatgtgtcgtgggattccaacatacatggctgaggagatgcaagaggcaagcctgtttttttactcaggaacgtgctacacgaccagtgtactatggattgtggacatttccttctgtggagacacggtggagaactaaacaattttttaaagccactatggatttagtcatctgaatatgctgtgcagaaaaaatatgggctccagtggtttttaccatgtcattctgaaatttttctctactagttatgtttgatttctttaagtttcaataaaatcatttagcattgaaacaagacaccaacaaacgcaacacgagcggg

SEQ ID NO: 669224 - DNA, 515 bp, Homo sapiens
cattccctttttacagtagctttcaggaagtcgctgagaaatggggtggagtagggaactgtaatggtcactgaagcacgtgagagaccctcgtcaagatgatgtgaaaggaccagtttcttgaagtccagtgcttccacggctggataccttgtgtgaaattgttataccgccaatcaccaagggggttaagggcatggtatcccagcgacttctagagagctaagagtatacagatgagggtgtccgctgctgctttccttcggaatccagtgctatccacagagattaggctgtagcttatatttgacattcttcactgtctgttgtatacctaccgtagcttattacctttcacttccccttccaactatgtccagatgtgcaggctcctcctctctggactttctccaaaggcactgaccctcggactctactttgtcccctcaactccaccccctcctgtgaccgggcttgtgacattcactcagagaagaccacacaagaggcggcgc

SEQ ID NO: 669225 - DNA, 764 bp, Homo sapiens
gcgtggcgtcatgaccaaggacgctggaccccgcgtcttccgcccccgcgtggaaggtgatcctgacggttctttgtggtgtgctgccatcctctggctgctctgctcccaccgcctggccccaaaaagcccacaccaaacaatagaaaaacaaaaagacatcacaccaagacactccaaccaaacaagaatacacataacatcctaccccacatatatcccaccacaaaacgacaaccagcacatgcaaatactcctactcaacctcaaccaccatatcaacaacaccatgaaaaacaaccacatacaacgacacacaaaaacacacacacacatggcaaaacaacgaataaacatgcacaaaaagagagcctcaaaccttagaaccacacatgatacagcaaaaaaagagaatgagaccaaaagcatgcgcccagctgaccaacaccagggcaacacacacacgacaccaacccagagcacccaaggcacaaatcccacgcaagacatcagaagcccgacaaccacccacgagctagcacgcaatcagcactagcaacacactcacatccaccgtcaacacataagaaatcaggccaccaaccacgccccggcgacccaccaactccctacaccaccggccagagcaaatacaacaagaaaaccgcaccgaacgaactagcccaataaccccacgcaaatacgcacaacgaccacccacacaccacacagaagccccacacgggcaagcacaccacgcaacc

SEQ ID NO: 669226 - DNA, 649 bp, Homo sapiens
agcgggggcggagcttgcagtcgagccgagatcgcaccattgtccactccagactgggcgacagagtgagactccgtctcaaaaaaaaaaaaaaacgaatttatgatctcatcagcgcacataaatgcctgtttccctcacaccctcgcaaacattgggttactgtaaaactgcaaaattggccaatctgatagctgaaaagtggtgctctctgggcgggcagatgtgatagtcatttggtggctgatttgggaggaatacatacacattggtaagaaattcaaacagtacacaatgtgtggggtatttaggatgttcccagggttatgatgagcattcacgcaacaaacttctttacattagttgcacaagttattagctgaaaaattcttagtggttattagactttcttacattaaacatttttggttgtgaaaaataacaaacacagatggcttttttttaatgtagtaagaaggctgctttcttcccactttcttgtcccacatttttaccccagaggggcccaacttttgtttttgtttttgtggacaaggtggagtcttgtgcctcgtgtcccccggtgtttggatggtgcaatgtgccagaaagtcgtgggcctccctgtgcaaagccttccgccttccgg

SEQ ID NO: 669227 - DNA, 386 bp, Homo sapiens
  misc_feature (4)..(4): n is a, c, g, or t
  misc_feature (8)..(8): n is a, c, g, or t
  misc_feature (68)..(68): n is a, c, g, or t
  misc_feature (82)..(83): n is a, c, g, or t
  misc_feature (246)..(246): n is a, c, g, or t
  misc_feature (367)..(367): n is a, c, g, or t
  misc_feature (373)..(373): n is a, c, g, or t
ctgntatngggaatctccaggatcccccgcaaatttccttccactcgttccgggtgggcgagtcgtcngtcacgctgagccnnttcgatgacggctaccgggctatcctcaccggtcctgccgtgatcctggccgctggcaaggtgaatctgccgaatggatgagagggccgaacacgctcttgtcaacctgtcaggaaccgtcctcctacacttagcgcgatggcattggggccgtgaggatggntaccgggtgagcgagatcgaacaaatcgataacgagcgcgaagacgcgctgaagaacaacaacggttttagcgaggatcagagtgactacgacggtgaccaatttgatctggatgcacgcntatcgntgacacgcgtggg

SEQ ID NO: 669228 - DNA, 211 bp, Homo sapiens
agtgcatgttttgatacatggtgatgtctcagtgatcaaatcaggatcatgagcatatcatcatctgcaagcgtctgttatgtgtgtcgggaatgttcactatcctccttcttgctgcttgacactatatgatatgtggtcaggagttcgtgtttccgtcgtcatttgtaaccgttaacattagggatcttgtgttggtggggtgtgggtg

SEQ ID NO: 669229 - DNA, 322 bp, Homo sapiens
ctctagaggatccgtgggtctgagaatcagtactgtcacaggaaatactggcttccggagactagtacatcaatgtgcgaaactggtccgtgtcctagcagcacttggctattcctaatcagttgtcaagactatcttgatccaaggacatttgactcccctacctctttatgtctgcccagtggtatcgggcagtatgactatgatgagtatgctgtgagagggtatcctgtggccgatctacttgtcattgcagacaaatatgatcctttcactacgacaaataccgactgcctctgtaaggaacccaggcggctgccgc

SEQ ID NO: 669230 - DNA, 1229 bp, Homo sapiens
tggactcgcacgacgccgccgccatattcccggtaacgggggcgcgcggtcggggagcaggttgggccgagaagaggggtcctgggccggcactgaggcgggaaggggtggcatcttccttagcttgtccatcctccggactcgcgatcttcctatccggagccatgtcagaaggagtggagcttgatcgatatatagtgctgacctgaggagtatcacacaggagcccagagttcaacaatacagatcagattgacctgtatgatgatgtgctgacagccacctcacagccctcagatgacagaagcagcaggactgaacgcacctcctcctgttcgccaggagccatctacccaatgcccaacaacaatgagccctgcaaatgcagtatacctacagtggactgcgtaatagacagagctgccgtttatgtgggcagctacttcctggtggaaccagagaccaggagctgatccacgttatacgctctataggagtctatgacgtggtggacgttgaaatagcaagagaatcgagcaaatgggcagtccaacgggtatgcctgaggtggtggtagcctctgaaaactctgtccacccacttgttggactcctaccgggacagccctactggagacaaaggtgaccgtgaagccggccaccgcgaagacctgaaacagaatgaggcccagtacggaacgaatacatcaagggccctcccgcaaaccaacggccggcgacgacagcacacccctaggactggtccacatgacgggggatacccaggtcgcacaaagacacatgacaccgagtgtccccaaacaaggacgacaaaagagaaaaccccagagcccaccgacccacaatatattcttcattttccttctctatgaaacaaaaacacaaaacaaaaacaacacaaacaaaacaaacaaaacgaaagacatgcaacaataaacacacagtacagaagtacaataaaaacaacaacaataacatacaaacacacaacgaaaagaagagacgagaagaacagaaaacaagaggacagacagaaagaagagcgcagacgagacaacagacacgaggcagacaaacaaaagcaacaaaacagaacaaaaagagcagaagggacacgaacgagaggaacaaccgaaaaaacgaaagaaagagcgaaaagcgcaaagagcaagacgcaaaaagagacagaacgaacaacgagaaaaaatc

SEQ ID NO: 669231 - DNA, 284 bp, Homo sapiens
ggccggggcggaaggattccttgagcccaggagttcaagaccagcctgggcaacacaggaagaccccatctctacaagaaattaacaaattagcctccagtgagatacccccaatgaaataaacagaaatatagtcaggtgtggtggcatgtacctgttgtcccggctactcagaaggtcgagatcagaggatcgcgagcccgagaagtcgaggctgctgcagtgagccgtgatcatgcctctgtactccagcttaggtgccagcccgagaccctatctcatgc

SEQ ID NO: 669232 - DNA, 163 bp, Homo sapiens
gagcggtcttcatatgtggctatttaaatgtaaattaattgaaactgaatacagggtgttcccgttgtagctcagtggttaaggaatatgactagcatccatgaggacacaagttcaatccctggccttgctcagtgggttaaggatctggtattgtcgtaag

SEQ ID NO: 669233 - DNA, 307 bp, Homo sapiens
gggctaacagagcgtcagtggtatgcacaagggcagaagcacgcatctatgcccgaggcatataaccctttgccgttaaaagatacatcgcagggacttattacaacatcaaaggccagtcatgcacatcgaagaactagggagatcgtacattctattaggaaactggataggggtcagataacaactgacatgctagtgactaaaaagtccatatttccacatgcatgagagataccaagaggtcttagtaaaaaaagcatagtcattaaagacaaagcaaaaagaaatattagtattaatgtaa

SEQ ID NO: 669234 - DNA, 828 bp, Homo sapiens
  misc_feature (271)..(271): n is a, c, g, or t
ctgtgtgaccctcaagtatgaaatctaaaagctgatctacgtacatctggtcatatggctgctgctggttgctaaaatgagcggggggggggggaggctcttgtcacatgatcaggtggccatgccctatcagtgggaatacccgtatttgctgagcgttttgccctctctcttgggccttctctcctttccccgcaacaacattagctacctggtgctctccatgatcagcatgggactcggggggggtcgctccactcatttatggcancatggagatgttccctgctgcacagcagctctaccggcatggcaaggcctaccgtttcctctttggttgttctggcgtgtccatcatgtacctggggttggtgttggcagtgcaagtgcatgcctggcagttgtactacgggaagaagctcctagactcttgggtcaccagcacacaggaggaagaagcataaatgaagcctcttttgggtgaagcctggacatcccatgaatgaaaggacactagttcaggcggttccaaaatcccttctgggggatttagcaactgggatgttgggacctggggcagaccagccaaaggtctggaagctcctttgccctgtgcggagggggcaaaacttaatttattcctgggggcttaaactgggtgaccgacgctatagaacaaatttacggtggtggaagggagacttgggaggtttcttaagaatggcttcgcgctggctctagtcgggatttcccattgcctccatacccttatcctgtgaattaggggatagggataatcaattcttgttttaggaacggcgaagaaat

SEQ ID NO: 669235 - DNA, 1144 bp, Homo sapiens
gcctgggaaatgtgcttggtaggcctgatcagcgtgggccgtggggcggcggcaggcgtgcggcggcggcgtgctggctggtggaggagtgcggctggtggctggtggaactggccatgcgcatcctagtgcggagtcatcagctgccatcagcgaggctggctgcgcagtacaagaccggagcccccgcaccccatgcacacattactccaacattgagcgccaacgagagtgcaggaggtccggcagttcctggagactctttgcccagctggctggagatgacatggaggtcagcgccacagaactcatgaacattctcaataaagggttgtgacaccgacagccttgatctgacgactgactggttcggcattgacacatgtcgcagccactggtggcccgtgctggatagcgacaccacaggacacagctggcgctttgcaggacttcaagctccttgtggaacaacagtcaaaaggtggcaggccatatacaaacagttcgacactgaccgatcagggaccatttgcagtagtgaactccagtgtgcctttgaggcagccagggttccacctgaatgagccatctcctataacctgatcatccgactgctactccgactcaccgtgggaaccatggatcttgacaaccttcatcagctggttggaccggctgcacgccatgctccgctgcctcccgatctcttgacaaaactggcctggaccaactcccggttcccatcccggaatcgctgcaggctggctcatgttccttgaccggagtccagaaccagcccatcaccgcttgcaataggagtacccggcgcttagcactatccccggcgcaccatcgcagcaacacctccttcgtggccgtgtgaacagcagactggatcccgacctgatacccgctctagacatcaccggcaaatctacctctgcggctcccggcgtgagccttaacactgttcagggtccccaacacgagctgaagacccattcactaccttatgcccaactacgccccccggccaatcgagcgaacaccgcaccctagccgggccgggccgcagtttcccggatgcgacaaccgtcttttttcccactgaccagcgacgaatacactacaccgtcggccacag

SEQ ID NO: 669236 - DNA, 1039 bp, Homo sapiens
atcaccacaacacgtcaagaagataatatataacgacaccagctaggctaggtacgatgccttgtcggttaatcggaagaggcacgcacgcacgtttacgcgcgcctgcgctcttttccactgtgctgaaagccccggactcgtggagttgtgaactgccgtggactccgtgagccgcacaaaccagggctcgccatgaatgccatgtgattcatgtcccctgtggttggtgtgctttgtgctggcctgagtggtgtgcttctggtgacctgtggatgtgtcgttggatgtgccgatgtgtgtgtgcttttggctggtggtgcctgactggtcgatgtgcggagtgcttttacgcagtgtctgttggactgacgtgatgtgagtgttggcatgtgcttcgtctgtgactgatgcgtcgttgggacgggcatgtgcactgctgcaactgatgtcgttgtgtcgcggatgtgcctttcccactttctttgtgttgtgcaaatcctgtgtgtgttctgtttggttcgggtgggcatgtggacaccaacagcagtgcaacacactatgtacggtgggcacacgacattgtttgcattgggttgtgaatgcccagacaaactctgtggccaacttgaacggagttaggtctttacaatttaggtactgaatgtcggacacatggtgcaaggcattgccaccttggtgttcaaccccaaagggacacccattgtggttcccccttgggtggcgaaactccaagagttttatttgtgcacgaggcaaactggagcaagtccttccgtaacattatccagtgcaaaggtgcagccacttgaacgacaaaagatatggaaaggtaagccgtagtcccatgagaaaagaccccccttttacacgaacatccccaaaaggacattagaaccaagccaggcaaattccttgcgggaagcgctgttggaacccaatgaatcgccacattcgaaaacccgtgtggggcctaatcggctttctctaaccttcgggtggactgccctcgtggtca

SEQ ID NO: 669237 - DNA, 331 bp, Homo sapiens
  misc_feature (79)..(79): n is a, c, g, or t
  misc_feature (203)..(203): n is a, c, g, or t
  misc_feature (206)..(206): n is a, c, g, or t
  misc_feature (302)..(302): n is a, c, g, or t
cggggttttataagggaagaaaatgagacaaactttgggaagttcacggttttaaaaagtacttttggctgggtgcagnggctcatgcctgtaatcccagcgctttgggaacccaaagcgggaggatcgcttgagctcaggaattctagaccagtctgacctcctttttactaaaaatttttaaaaaattagctgggtgtggnggngggtgcctgtagccctggctactgaagagcctgaggtgggaggattgcttgagccctgtagatcgaggctgcagtgagctctgactccaccactgnactgcagcctggttgaaagacctgtctct

SEQ ID NO: 669238 - DNA, 104 bp, Homo sapiens
ctcagactatgaccttatattaacttgtccaggcactctattcccagagataaatccctgttctgggaaaatagccacctccttgattagcagcagcagcagga

SEQ ID NO: 669239 - DNA, 121 bp, Homo sapiens
cgaagttgagtctgctgcggggtatgtgcagtgtgctgtgggatgtctcgacagcacagcacatctctttctgtctggagtgcgctcaagtgataagactctgctctctgcaggacccacg

SEQ ID NO: 669240 - DNA, 415 bp, Homo sapiens
gtcgaccactcgatatcggcatcggcgagcatgaagaatcgatcgtaggacgatccttcgaaggtcatgtcaaggcgttttctgatgttgctgcgggcaccgtcgcacgcgacacccagcgacaggtaaaggcttcatcgctgccctgtgcatgatgaagtgtcatccgcacggatcctggctggttttctatatcgaccagttcggtattccactcgacctctacccccaacgcgttcagtcgttcaagcaggatcttctctgtctgcggttgtggcaggctgaggagcaggggataggtcgcatccaggtaggagaagttgtagttcagcacccgtttgctgttcgattgcaccgaaaactggttgatcgtgaacccgtcaccgatgacttgatcggcaacacccaggtcccg

SEQ ID NO: 669241 - DNA, 200 bp, Homo sapiens
ttttttttttttgggggggcgggttttaatttgtttttttttaaaaacgcgccttttttggggccagcctcccgccctgggtttttccggaattttttgccccccttagatggtttttttggagaaatggaaaatgtaataagtatcataaacatcatacaaaaaacaaaataacataacaaaaaagaaaaagggaaaga

SEQ ID NO: 669242 - DNA, 140 bp, Homo sapiens
ggaggttaaaggtgcaaggagctatgatcatgccaccacactccagactgggcaacagagccagaccctgtctcaaaaagaaaagtcttgctgtaacttttttttgagacagagtctcactctgttgcagtgtgcttccg

SEQ ID NO: 669243 - DNA, 144 bp, Homo sapiens
aagtatggtaaacaatattattcatacatatattgaatatctgttctcatgtataggaaacacaacaaacgtaaattcgacagagtatcctgcctcacaagattacacagtgcaatccgcactacccctgaggcatgacaaaga

SEQ ID NO: 669244 - DNA, 861 bp, Homo sapiens
actgtgaattaccagtgtatgaataaatttctgtaccaccttatgttgggccagaaggccaccaagtgtacttatatgtaatccttaaatttcaaagtacgcttgtaatttaaaatatttctaaatctttttcttaaacccataaaataaaggctcttactacttagtcaatatcctcagtgtatcgtactcaatgtgtcagtatggcacagattactgtataaaatattctcctttcgtctcacatattaccttctgaggtaatttttcaccttagtgtgtactacaaagattgtgcaggatcttaaatcaagcactatgtaaatactgtaatatcagaatactatgtggcattcattcacaccatcttgtccaacttggcactagatacaacaacgttttaaatgctatggcttcatataatgggctatcatccactatggcattgcttatcaatcagttattaccacttaatgttgcatgagtgatatggggtctgggttcccctctaaaagataagtggtctgaataacggaaaaccgtttttactataccattcttattgtgtcccacccctccagaaattaggttgaaaatcttaactttagtgggggtctatgggggtttaatgggcccagactgtggttacatttcatgtatgtattccttttgggagtctaactacaacactggtttggactacaaaactctcaggtgggtttcccaggtctacacctcttgctcacgcacggatttgctaagattggttaggcacatgagtatgggatttgtaaccccaatctggcttaggggacactgtcacgcaatagcgctttcgcgagagacacgcccctctttgga

SEQ ID NO: 669245 - DNA, 598 bp, Homo sapiens
caaatccaatccaaggttcccaaatcagcccgcacatccacttccttttgggttctcgactacggggtggttatgggcggggtggtaacgtttggctgggagtaagacgtagtctggatgcgtgacgcgtataggtggggaggggactagcgatgtgttctaatttcggtggggtagcctgtcgagggatgaggtttcgtccccggagatgtttcgatttgtccggtgttagatggattctagggcgattttgaggggggttttctttttattgggtatagtacgctagtcggtttttatcgcgacgttttcgtgccttcgtaataagctgctgatcgctacttccgtgggtgttatttgcgaaatagagtttaatttgttcgtcttggatactatgacgggctataattcagacggcctataaagggtctatagagaaaggtaaaataaagagtataaaaaggtaataatcgagctagtagcgagtcctgagccggtatgggaggtatatgtctatgtgtgggtggtttgtcgggtgattttctctttatatctatattgatatttttgggactactcgtttcgttttatccggccg

SEQ ID NO: 669246 - DNA, 259 bp, Homo sapiens
  misc_feature (153)..(154): n is a, c, g, or t
ctgtgggaggctgaggcaggagaattgcctggacctgggaggcagaggttgcagtgagccgagatcacgccattgcactccagccagggcaacaagaacaagactccatctcaaaaaaaaaaagctgaatctctgagtgggtttttcattttnnatttttttttttaaacagatgcctcagaacctgggtaactcagtttatcagaaattcagttttcaagtttggaaggataacgcttggagctggtagtcactcata

SEQ ID NO: 669247 - DNA, 622 bp, Homo sapiens
  misc_feature (444)..(444): n is a, c, g, or t
gtacccccccgcgtgtgttgtgtgcgtgtgtggagaacttagaaacgtgatgtggcctttatttatgcaaaacacctcagaatccagtttaccctgtgctggtccagcttctccctgtgggaaaaagtctctccgtgttctctctcctccttccagctcccctccctccatcacctcaggcctttctgttcctgtgtcctcacacttactcccctcaggacctacccagcctcttgtgaaaagacaaagctctgcttacatagaagactttttaattttaaccaaaagttactgttgtacacacgggagttggggggaaaaccattacagttaccaacagtgggttttcccccaaggtcccctttggagacttcaacggggggaattggcgcaaccgatttttctcacgttaaaaccggtggttgtcttacacaacgtggtgtnaaacacacagacgaacagacccatagcgcacaccaacatcttctctccactagacacagaaaacacttttctctcgtgcggaggccggggggaccacaacaacacaacactcggtcggctgtcgcctcgtggcttgtcgagacacacactgagggcgaagcgcgagcagcggcgacaa

SEQ ID NO: 669248 - DNA, 420 bp, Homo sapiens
  misc_feature (412)..(412): n is a, c, g, or t
tgcttaattctctcctttgttttaattttgggttttgtgtgtgtgtcatcgtaggcgtgttttgtggatttgggatgtcagttctttgttttattcctttttctacctcccactcctgtttttccatttatctttggtcctgagggatacatgaggaagaaacaaagcaagaaagttggggaagaaagcaatgtctcttacgggaactgaagtaaacacttattttcttagttctggaagtggaattaatggtggaacagtatagtagaaagagcataaatgttggagtcaggcctttgttcttatccctgctccactgcttactacccacataactcatcctgctacttcagctccctggcccttggtttcatgtgtaaagcctgtctttgtgtggtgttgtatgactcangtggtgtg

SEQ ID NO: 669249 - DNA, 134 bp, Homo sapiens
ataccttttactggtagcagttatttatttagctttaaaaagtgacttcttgcaggctgagttagagactagcctggtcaacatagtgagagccctgtctctaccagaaaaaaaaaaggtgacttccgtccttt

SEQ ID NO: 669250 - DNA, 197 bp, Homo sapiens
tgtcatagtggtctccatggggatctatgttgcttccacctaccacgtggcttgtgcactctttactcagtggccatgtacggtggattagtgcttcagcatgttcctatctgtatgatacccagaaagtaatccggcgtgcagaagtatccacaatgtatggagttcaaaacatatgcatcccaatcactcgcatg

SEQ ID NO: 669251 - DNA, 84 bp, Homo sapiens
acttgaacctgcagaccccagcaacttcatgataagttcacggtcttcttcatcctggtctttgtatttttctgtcgtcttctc

SEQ ID NO: 669252 - DNA, 1566 bp, Homo sapiens
  misc_feature (144)..(144): n is a, c, g, or t
  misc_feature (152)..(152): n is a, c, g, or t
  misc_feature (494)..(494): n is a, c, g, or t
cacgattctcgtgtgttcttgttttttgtcgtttgtgtttttgtttgttgttggagttctattgtggaaagaaaaagaaagagaagagtaaatagagatactagagtggcgcggggcagtagggaagagggagggaggagggangttgcaancatgctcaattgatgtttgtgatgtataggctgtgctagctctcgcgtgtgttgcctcctgctccctctgttgtgggtgtgttagctgcacactgaacaacagtcggtgtgtggtgggtgaccaaacaaaacactgcgtggttgtgttgtggtgataagcactctcttggagtatgtatgtcaccgcccccccccctttcgttcggggtggtggtgagttcctgtcctgcaagcacgacgcactttcttgttgggttgaggtgtgttcttcctccccctggagacacgcagacactggtgggggggctctgtatatatgttagtatgttgtctgctccctanagagaagcgtggtggctgtctacaaaaagacgctcgccttttgtttccatagatgttagacaggttgttggttcacaactgaggttcttcagcagcgcgtgtgggctgtgctccgcggttcgtttggttaccggcgtaaaaaaccgcctggctgttttgttgggtctgctgttgtgcccgcgcaagcgatgcagttgtttaacctcgcgctgggtgggtcccgcccccctgtttagccaacatgcgtggtccctcgtggtgtttgctgctatataggacgagcatgtgcccagcagccgtgtgtgtgtggtgtttgctatggtgcatgttgtcctcccgcgcaagtatgtgcagccaccacgggcggggtcggtgtcgtgtaggcaggacgccgaaaattttgtgtgtgtccccccccgcagtgatatggtgtcccccgccctcgcttttacattatcgggcggatacctatctctgagataaagttgcggccccccccccccattgtgggtgcgtcgcacgccctcgagtataaggagaacacgcggcgcagcagtcgtgtgttgtgcgtaggaagcacacgacgattatgggctccgtccctgcgacgtcaaatgtgtgtgatttgggaaataatatattttgtttgtcgcctgcccccggcgggcgaaatttttttctcttttgttaagggcaagcacccacagcgtggcgtgcgtgcgagtatagagtcacacgtgtgcggagtatagaatatcatgtcagtgggcgtcgcacgtgttagtgtggtggcacctatcatgtacgatatacacacctatggatatatatcatagtgaatgtgatagatttacagacgcactcacgcgcgcgtgtggcatagtgtgggacaatgaaaacatagtattgttagatggtggtgattcgggtccacagcgggtattgttgtgggcttataaattcacgcgcggtgaatatatatgctcgtcgcgtctttaaacgagtggttcttatctctcaaattaaaagaaattgaggagcattcaactatcgaacaaacaatgaacaagaa

SEQ ID NO: 669253 - DNA, 190 bp, Homo sapiens
ggctgtctagaggatccctgttcatgtatactgaaagtgatggggactcagccaataaaaaaaaaaaaaaaagcccaaaaaaaaacaccaaaaaaacttcaatgatccccccacttgggctcccaaaggggtcggggaatcacgggggtaaccatgggcacttgcccaagatttttttttactgggactt

SEQ ID NO: 669254 - DNA, 678 bp, Homo sapiens
ggtatacgttcacgtaaaaactaaagagaagcgttcacagaaacttctgagtgatgattgcattcaagtcacacagttgaaccctccttttgattgagcagttttgaaactgtctttttgtagaatctgtaagtggatgcatggacctctttgaagatttctttggaaacgggaatatttccacagaaaaactaaactgaagcattctcagaaactgctttgtgatgtttgtgttcgagccgcagagtttaacattgcttttcatagagcagttttgaaatattcttttggcagaatctgcaagtggacatttggagcgctttcaggcctgtggtggggcctgaaagccttttcctttatcttcgcagaaagacgagagagaagcattgtcagaaacttctttgtgatgattgctttcaactcacagagttgaagattccttttgaaacagcagtttcgaaacactctttctgtgggatccgcaaggggatatttggacctctctgaaggtttcgttggaaccggataatcttacctacagctaaacggaagcattctcagcttctttgggatgttgcaattacctcacagagttgaacttttccctttgatagcgcaactttgacacactttttctacaatgtgcaagtggatatttccggcttggaggctgcgtcg

SEQ ID NO: 669255 - DNA, 238 bp, Homo sapiens
ccactgtactccagcatgaacagcagagtgagaccccatctttctttattgttgttgagatgaagtctcactccatcacccaggctggagtgcagtggccaatcttggctcaccgtaacctctgcctctgagcttcaagcgattctcctgcctctgcctcccaagtagctgggattacaggcacccgcaccatgcccggctaatttttgtatttttagtagagatggggtttcacatg

SEQ ID NO: 669256 - DNA, 111 bp, Homo sapiens
gttagcatgatacaatcgagctctgtaccccaggtagaccgtaatctagaagtgtgaaacgttagcttgattaaggcgaccgcgaatttccaagatagtccgtagaattag

SEQ ID NO: 669257 - DNA, 1008 bp, Homo sapiens
ttctactagacgatgaccaaatacttagttgtacaaaagcccacaacgtcagctctgcttatggctacttgcatgataatccttgaccgactgtgcagtaccgagagtaccatcttagactctattacgattccgtgcaactaacgtgccgtagctagccgctacgccagtattgtgcaagccatcgcagtactacttcgaacgttgcagacgtgcaggttgtgcaagtacggggcattacacataggaaagcataggctagttcagggtcttccagtggtcctagctggtttctcatagggttctgatcggtgataactgcttgacacttggatcgatgagtgttgtgtacatcagggacaatagccataagagttcattaagtgtaattccattatgatagaagtggaatctcttcgttgaataagctcgagcaatgaatgcttagcatataatcgatcttctgttccaggaaccctatcagggaatatccctgtaatttccctagattgataatttagttcgtactatcacattacttaaggactcgactcattggcaccatcgagtgcatacattgcagaagccttaacaccaaccctaaacactaacgttggatccctgaatacccctaaggaacccgtttcttcttgctatacctgtcagttgcatactagcgtatggaccgaagctaagttgcttggtccgtaaccatttcgtgacaaaacttatttcacctaaaaaacgacaaccacacatgctcgcaagtgtgtgcgctttaaaagacgccattttgctcactacttttagttaaaagcacagcctgttttagtgtccacggtgccaaaatgcttaccggcattaggtacaggggccaatcggtgaaacgacccgctaggtcttaggataccgcggaaacgggaattatggaacatgtagccgtatacaggtacgggaaaaactggggtttagagtgtcacacgctctgaagggatagcgtacacccca

SEQ ID NO: 669258 - DNA, 102 bp, Homo sapiens
gtaaccctgccccgcacaacctggccccataacgctcctagcgaaagggaatttccgcgtcctggtacgacccgttacgccgtgctcacccgcgcaaacatc

SEQ ID NO: 669259 - DNA, 141 bp, Homo sapiens
tgggcatcattacatcacaacaattaacaatataaaaccccctggccatacccaattaccaaactgcccctacttctgtctaaatcctgtcctaaatcacatgcatgtcctcacttactacctatactactacccatgtcc

SEQ ID NO: 669260 - DNA, 270 bp, Homo sapiens
ctcactggaactccatctcccaggttgaagtatactcctgcctcagtcctcccgagtagctaggattacaggtgcctgccactacgcccagctaatttttgtatttttagtagagacggggtttcaccatgttggccaggctggtcttgaactcctgatcttgtgatccacccatctcagcctcccaaagtgctgggattacaggcgtgagccaccgcacctagccaggaggtggtttttaaagaggaagacaaataagatttgccaata

SEQ ID NO: 669261 - DNA, 702 bp, Homo sapiens
gtcgtatcacgctcaggtaaagataacctcctctttctatgactccagatttccattcaggttatagatattattcaatagttgattttctttttaagctgggcaataaattgatgtttccagagtggtaacatggagagagggcagtataggataaaagatgagcgagaattctaccctaaaaatgttgctagctagttcacaggaatgaagatgagcggtttatataacttctcaaggtaattctagattgacatttctgaggggaaaatgggctcttgttctaagttgaacgtgagcagagaaggctataacaactatccactatgtagactgtacaggcgttccagagagtaaaacaaactaactgactgcagatgtacttgcttcagtgtgattcattcagtacttcaaacttgtatacttttggcataggtccaatgttcatgaaacacatgtgctgtcatagtgtgtgtgtatgagggttggtcttcgtctcgtatcgcttcagatttagctctaaattctggcaactccttgtaatgccaatgtatttgatacatgaacaatcatgtctgaatgcattctgtgatctgggagacttgcctcgtcttccagggaaggaaggatgtgcgagccctgaaggcactgaaatatcccagtgtgtacggagccagtggaactatgggatacccatactga

SEQ ID NO: 669262 - DNA, 214 bp, Homo sapiens
  misc_feature (176)..(176): n is a, c, g, or t
taattgtgtatcattcccatacagaaggtaagtactcaaattattttcctcataaaacctgacattcagcatcttaaaggtaggtatacatttggtactttcttatgttcactcctatacccactagatcaaaaatataaggtactgagtgattttaaaacttaaatgaaaaattntaataaggaaaaagtaatagacaatatcagtatgataa

SEQ ID NO: 669263 - DNA, 391 bp, Homo sapiens
taacctccgcctggtagccggcgttctgcaaacgttcgacgatgttcactgcataacggctgaattgagcgcgctgcagcgaatgctggctgctattgagcacttcagtgcgtgctgcgttttgtgttgcgttcgacgcaagggagaacggaatgactgggacaacttctttcgcatgggatgccctggttggagggattgttcgggcaaacgaagaatgaccgcatgatgggcggggattcctagcatttagtcaggggatggtgtaggaacaagctaaagggatagtgcgcacatagcgcttggagggttcaaatcccggaaactacaaggggagccgaagctccccccagaagtagttgcgtgctctatttttattattgatgtcggg

SEQ ID NO: 669264 - DNA, 356 bp, Homo sapiens
ctctgtgtaccgtttgtgaggagcgcacatttgcacatctgtattatactatgcactcacgccactcatgtctgtgtgtgaatgcacatcctgccaggttctgctccatctatgcgttctgtctccccagagctgacagctcccacctgactatgagctcagggaaagaaccgacaagcctagttccatccctcaggctctggacgcctgtactgggactgctgggatctcagcagtgctgccaggggaagtgagccaaacgtgggcaataccatcctctgggcacactgtccccatctgccagtgacctccaggccagggctcactcctccactccccacatgcatgcacccagg

SEQ ID NO: 669265 - DNA, 350 bp, Homo sapiens
tcagaccatgtctgaagcacacgctgactttgttcttaggtatttccctctgggtactctctgagtttctaagaacttgacggcagccactccaagagagttcccgacacaaataaatgataaatgttagagatgatgggtatttgaatcactgtgatctgatcgccatacattacatgtgtcagaatatcagtatgttcccaataaatatgtataattatgtgtacgccaatttttaaaaaagccagttaaagtcatgaagacgcaaacatggaaagccctccttttcaagaacaggagtctcttctgtatgtggagaagcccaaggaccaaaaaatataccactctct

SEQ ID NO: 669266 - DNA, 407 bp, Homo sapiens
ggtcgatcagcttccgatgagaagtctgccgttactgccctgatgtgggcaaggtgaactgttgagtaagttggtggtgaggccctgttgcacgctggtggtggtctacccttgtcacccataggttctttgagtcctttggggatctgtccactcctgatgctgttatgggcaaccctatggtgaaggctcatggcaagaaagtgctcggtgcctttagtgataggcctggctcacctggtacgacctcaagggcacctttgccacactgagtgagctggactgtgacaagctgtacgtggatcctgagaacttcaggctcctgggcaaggtgctggtctgtgtgctggcccatcacttttgcccagaattcaccccaccagtgcatgctgcctatcaggaagctg

SEQ ID NO: 669267 - DNA, 313 bp, Homo sapiens
aaggaattctttggccagaaattcaagaacatgtctgaacaacatagctcgaccccatctcttcaaaaaatgaaaaaaaattagctgatgaggtggctgaagtgagctgtgatcgtgtcactgcactccagcctgggtgacagagcaagacttagtctcaaaaaaaaaaaaaaaaggaggaggaagaggaaggaaaaaaaaggcccggccttggggggctaaccctggaaaccccagcttttggggggcccaggggggccaaatcattgggggccaggggttaaagaccggcctgcccaacaggggaaaccct

SEQ ID NO: 669268 - DNA, 272 bp, Homo sapiens
cccaggtgtagtgcgtggcgcgatctctgcccactgcaaggctcacaccattctcctgcctcagtctcccaagtagcagggactgcaggcgccaccaccatgcccggctaattttttgtatttttacgtagagacggggtgttagccaggatgatctcgatctcctgaccttgtgatccgcccacctcgggctcccaaagtgctgggattacaggcgtgagccaccgtgcccggccagtagcttatcttttaccttcctttaaaatatcttt

SEQ ID NO: 669269 - DNA, 335 bp, Homo sapiens
  misc_feature (28)..(28): n is a, c, g, or t
  misc_feature (109)..(109): n is a, c, g, or t
  misc_feature (113)..(113): n is a, c, g, or t
  misc_feature (134)..(134): n is a, c, g, or t
  misc_feature (160)..(160): n is a, c, g, or t
  misc_feature (174)..(175): n is a, c, g, or t
  misc_feature (190)..(190): n is a, c, g, or t
  misc_feature (238)..(238): n is a, c, g, or t
  misc_feature (266)..(266): n is a, c, g, or t
  misc_feature (271)..(271): n is a, c, g, or t
cacccccacccccaccgaaagaatcaanctacgcaaataactggaatgaaattctcaggcaatttcagcaggggaaatggggttatctcatctgggtctcacatccganctcntcaagacaagaccttccctanacttcacctgaacacctggacacacngtcatgtcttgccnnttcttgttactgganatccaatgatgatgtctttatacaatttataggtctttctataagtgncaagataaatgtcatctctgtacctgcntatcnttcagaggtaggcaagcttctatgtaaagtgctagatagtaaatattataaacttttaaaaaaa

SEQ ID NO: 669270 - DNA, 340 bp, Homo sapiens
tttgattcaatcttgtcctttggaccgacaaggcgtccgcaaccacatccgtattgacgttgtacatcagtgtgccgtggcagaaggttttaccatcacgggtgtacatggcgttaccagagaacttcttaccatcaatgacgatgtcgttacgccccgtcgccatcgctccggtggcccccatgtcgtggagggcgaccacaacgggttgcacgagttgcttgaagtaaccgaagcgaacttcatcggccgggacgataaaggagaagcacatattccccatgtcttgatacatcgctccaccaccggagaggcggcggttatggtaactccgttttct

SEQ ID NO: 669271 - DNA, 1126 bp, Homo sapiens
  misc_feature (746)..(746): n is a, c, g, or t
ttttctccccacagataagtaaagatggggccctacgcacaacaggagggggagcgactctccagcgcagcaaaagttggggggggagaagaaatataccattgtgggggggggagaaaccaaaaagagagggggcacctcgtcaaccacgcggaggactatagagcgagcagcgccttgtgtctcccagagaagagaggaggcgcagccatattagaagagagaacaaacgagggctctttatttggaggggaggaagcagctaagcaaccacacaaaacgagcgggtgggtgtcgccaccccgcccgcgcggacaacactatgtaggatagcttgtaggagacaacaccacgaggtcgttcctactggtgacgagtctattacaacacacgacagggtggtgagtatgatgtttctccgcccattgggacacatcatagtgacgctcggggggagatattctcctctgacgccacatagtgtagagagcgcgctacacccctctcctcttgccagcagtattcttcgggcggccacaccacggagaccgcccttgttttgggcaaaacaagaaggggggcgccgtgacacacgttgagaaaacaacatcgggtggggagaacacaggcagcacaggcacccagcggcacgtgtgaaaccattcgcgcgggacacacgagatatgcctacgcgcgagacacatctgttataataagagaaaagaatatcgaagaaagagttgggnagacacacacagagtggagatttgggaacgaaagaggttgcaggagaaaaatatggcgccacccgtgaggagagcgtctcacgcacgccactcggagaggccaaggccgtgaggaacggtgcccggtcaacaaggaggaacaaatcagcgttcaagggcaccactggcccccgaacatctaccccccaaggagccacgggcacacaaaagtaagagagagagagaaacgatcccgatcctccacaccgtcacaaaaatagttgtggaggttgcaccaaaatagtatgacaaaagatgggggatggttgaaaaaaaatttattgcacaccaaccttgggagaatttggcgctgaatacccagagattttcccttttaaata

SEQ ID NO: 669272 - DNA, 615 bp, Homo sapiens
  misc_feature (399)..(399): n is a, c, g, or t
tactactaacagaccgcaacctcaacaccaccttcttcgaccccgccggaggaggagaccccatgctataccaacacctatcctgatttttcggtcaccctgaagtgtatattcttatcctagccaggcttcggaataagtctcccatagtgtaacttactactccggtaaacagaagaaccattgggatacataggtatggtctgagctatgagtatcaattggcttccgtagggtgtatcgtgtgagcacaccatatatgttacagtaggaatagacgtagacacacagagcatatttcacctccggctaccataatcatcgctatccccaccgggcgtcaaatgtattgtagctggactcggccacactccacggaagcaatatggaaaggatctngctgcgagtgctcggagccctagtgattcatctcttctgtttcaccgtaggtggcctgactgggatgagtattagcaaactcatcactagacatcgtagctacacgacgagcgtactacgtgtgtagcccagcttccacgtatgtcctatgcaactagggagctgtatgtgccatcataggaggcttcaattcagtgatttcgcctattctcaggc

SEQ ID NO: 669273 - DNA, 118 bp, Homo sapiens
actccgtttgacagtgacgcggttgcatccgttgacagtgagcggttgcatccgttgcagtgagcggttgcatccgttgacatgtgagcggttgaatccgcttgaagtgagcggttag

SEQ ID NO: 669274 - DNA, 211 bp, Homo sapiens
  misc_feature (45)..(45): n is a, c, g, or t
tactgctatgcaagttagaagaatttgacaaggtcaggtacacanagtggttgatggtttttcaccaaagccagtgactcttttggcctcattattcaaagtacaagatgatgtcacaaaattggatttgaggttgaagatcgcgaaagaggagaaaaacctggggtttgttttttctggggggggtttgttttttggggccggattgttt

SEQ ID NO: 669275 - DNA, 128 bp, Homo sapiens
ctcctgaggtatctaaggtgctacaaggcatctctctctgcaaacgagtaaacatcaccctccaactccttacagagtggagcaacaggaaaactccttcacctcattggcttgtgctgcttgggagg

SEQ ID NO: 669276 - DNA, 103 bp, Homo sapiens
ccacgttccacagagtcaagagcccctttatatctaggcccctgtgtaaagcgatgtgctactgccatgcctagaatcctatatcactgatagctgaaaaaga

SEQ ID NO: 669277 - DNA, 151 bp, Homo sapiens
aagctatacggttcatcacttgaggtcaggagtcgaaacagctgtcacacatggaacaatccgttcttattaaaattaaaaattagccggcgtgtggcatgactttatccagttactcaggaggttgaagcaggagaatcactttgaaccg

SEQ ID NO: 669278 - DNA, 134 bp, Homo sapiens
  misc_feature (49)..(49): n is a, c, g, or t
  misc_feature (55)..(55): n is a, c, g, or t
  misc_feature (74)..(74): n is a, c, g, or t
  misc_feature (87)..(87): n is a, c, g, or t
gatcagctttgtttttcccagagttcatgcaaatagaatctggcttctntaagtnagcatcatggacttggttnaaattcgcccgtnttgctgagtgtatctttagcttgtcccttttaactgacgagtagtat

SEQ ID NO: 669279 - DNA, 100 bp, Homo sapiens
tcggtacccccttgtgtagcaggagaggcggtgatggggcatcgagcggtcagggactgaggtggggggctgggttggacgcagctgggccctggcttag

SEQ ID NO: 669280 - DNA, 199 bp, Homo sapiens
tcatcctttatgcatacaacctaccaagcctaaatcagaaataaaaagtgtcccatcaaagaaaagcctaggacctgatggcttcactgctgaatgctaccaaatatttaatgaaggactaataccaaatcttctcaaactgattcaagaaattgaagaggagggaatactttcaaactcatttataatgccacaatca

SEQ ID NO: 669281 - DNA, 194 bp, Homo sapiens
catgctgactagtcattatcaaaaccatacctgcagattcactattcatcaggacggaagttgtcatgcatagcatgagctgggatgtgtcgatggcctcaaaaatgattctgcccttaagatgaacaggactgactctgaaatacaatactcctgattctgaaactgtcacttgcctgactcactgtaaactc

SEQ ID NO: 669282 - DNA, 1058 bp, Homo sapiens
  misc_feature (540)..(540): n is a, c, g, or t
ggtccagactccatcactgtgctcctctcgcggcccggagccctgtcgatgtgacaccaaggagagggtccaactgctccagaagttcacgcgtagtgatgagatcgccatacgtgcggccataggttctagccagaggaatgtccttgatagcgtcttgggattacagtgaatatctgtgcgcaacggtcggatggaacctcgttgcattgagcatctaacttacattggattgacgctgttcccatcttactcgatgtcgacccaataggcggtattctcaattgtgcccatcgccgttgccaagggacgtggtaggaaaacagagtggagatggcgtcttgctcctatgcgagattggggcaaaagtacacgcgagttcgatcgcaatccttttcccatggggagtgccgtaggattgccgcgtaccctatagacactccgaatgtgggtcgcgagtacatggacgtcctcgagggtacccgttcgagattgagtatgggtccagctctgagtccagatcgtatctaggctcagacnctagttggaatcgatatgggcttgtgaggtctcatctctgtgcacgggggaggggaagacctagatacaccggggatcagtccactccgatctgctccctcgtccatgcaatgaagtgccacaccgaagtggttcgggtcgaattgtgagtttggtggaaaaccccatctggaacggaaacgtctaattgaacagagccagggcccttccaaagggagttcaagttcagaggcaaaatttggcctcggtaaccgttgccaaacgctaagcccaaaaggccgtagtccgatattagggcctagcagcccccttgtggcgcctagatgggcttccaattcacaagtttggaacgaaatcgtaatttgaggcaaagttccggattagcgcagaaggggaacctttccaagttggaaccccaacaaggatttgcaatttggccccaaggtccaccgttgccgcaagcccccaagggaaaacggaacctggattggcgacttggggctcccccctacccacgg

SEQ ID NO: 669283 - DNA, 181 bp, Homo sapiens
ttatcatatagctaatctggattgaccactaattgaatagcatctagggtttgtttattattaaaatctgaaaaaatactatatttaaatatgacattgatgtgttgagtttacttatttatttgcctttttagggcatatggaggggtaggtatgatgaaggtaggtatgatgaaggacg

SEQ ID NO: 669284 - DNA, 433 bp, Homo sapiens
gactatcgggctgacgttgccagatatattcgttcaccggggatcaggcgcctgaccgagatagtgccaccgattgacggggatattgtgctggtttcgcctgctccatcgcaattgcacctgatgatcgcggggatgggcggctttgtgcatgcccatgcagggttacgccgcgtcgtgcctggccctgcatttcccgactggccgatgctcgatcgctggcgtgtagtgggaggttggagtggcgacactggttttgaccgcgttgggcacggcgattggctgggcccgtcgggcgggtgctgttggggccatgcttggccagcagctcgatcgcgctatagtttggactggcccccgccgcgacggcccgcgcctgcaggaactggaactgcaaacgtcgagttatggcactgcatttccagcgatattt

SEQ ID NO: 669285 - DNA, 324 bp, Homo sapiens
  misc_feature (44)..(44): n is a, c, g, or t
caacattggaactcccagggtatataaacattaatagatccaanggggctgggcgcagtggctcacgcctgtaatcccaacacttcaggaggccgaggttggtggatccaacgtcaggagattgagaccagcctggccaacatggtgaaaccccatctccacaaaaataccaaaattagctgggcatgatggcgggtgcctgtaatctagctactcaggaggctgaggtgggagaatcacttgaagctgggaggtgaaggttgcagtgagccaagatcgtgctattgcactgcagcctgggtgacagagtgagactccatctca

SEQ ID NO: 669286 - DNA, 102 bp, Homo sapiens
aattagatcccctatttcatgttcagtatctagtgtgagagacttccatcttatgtaagatctggattcctgtagtcccagctacttcggaggctgagattg

SEQ ID NO: 669287 - DNA, 96 bp, Homo sapiens
gggtaaatcttttcaagacagaaaagcaggtgactcagccctgtgagctctgtgactgacatgacccaaaccaccagcgattttctccttctccag

SEQ ID NO: 669288 - DNA, 591 bp, Homo sapiens
ggggtgacattgcaccgcgcccctcgtggggtcgcgtgccaccgctacgcggactccccagatggcgcgccccatcctattggcctgtctggtaaggtccagaaccccgcttgccacctgaacagccatgggggctgagggtgatattcggcgtgtactttcatcagcgcttcggtaccggaccttcgcgctttactagaacactgtggctggggacccgcttcgctgtaatcatcctggatcgcagggaggtgttccgcatttgcctactacaagctgcttaagaaggcagatgaggggttagcatcgctgagtgaggacggaagatcacccatctccatccgacagatggcctatgcctttctgacagcagccattatcctgctccataccttttggggagttgtgtactttgatgcctgtgagcaggagacggtactgggcttagggcctggatggattgggagtcacctactgacatcgggcactgacattccgtgaacccctggtatgaggccaagcctgctgcccatcgtatgcacgtcacatgatatccatggggctctgggcacttcatcacagctggagggt

SEQ ID NO: 669289 - DNA, 130 bp, Homo sapiens
cttcttctggcctcagaagtaggactgaagtgtactattgctaggtgtgagaaaggggcacttctcaaaacacagaccaggtagcaaatctccactgctctaaggttctcaccaccactttctgtcgacg

SEQ ID NO: 669290 - DNA, 848 bp, Homo sapiens
agcaccatcttccctcgcctgctgctggcagcctttccttgccttgcttgttagcagagcatgctgcttacccatgtggctcccagaggttagcagccccggctcttggatttcttgattcttctcccctgtgatctcagaggtgctgcagaggacattcccctttagagcaagtcatgtttctattcaggccacaaaactgggatgtacatgcagtgactttggtgttccttgtcttgttcaggggaacgggtgggactgtgtgtgctgtcaccctcttcattccatgagcaccttgttcacttagggtctgctgccttttttttttcttttcttttttttttttttaagttgggggctcgggtttccctcctgtggcgcaggcgtgagtgcgagcctccaaagtagcggggatggtaggcgtgcgccaccagccgggttaatttaatatttggggcagcgacgggggtttggccatgtgggccagcatgggtctcaaacctctgacctcgtgtttgacccccctgggctcccaattgcggggattaccccccagctcgggtgctttacattattccccatctgtttaggggtccactctcataacggtcacactttctcattttactttaacttacccttagagttgaccccaatgtaagaagtcactctccgtcaaaagaatcatggcttaaactctcagaatctgtagtgcgaaaacttattgaatttttcacacttgtgcgttgttcacagaaagatctggcatgccactgtgggctcccccttattaaccgccttgggacggggggggacactggggggttaaaacctggcggttgaacgta

SEQ ID NO: 669291 - DNA, 312 bp, Homo sapiens
  misc_feature (243)..(243): n is a, c, g, or t
  misc_feature (274)..(274): n is a, c, g, or t
tgacacatgtattaggagatgggtcacctgtgaccaggcttgactacagtagtgctatcacagctcactgcagcccaggactgcctggagacaagcacgcgccatcacacccaggctaattttttatttttatagagacagggtctcactctattgcccaggctggtcttgaactcctcggattccagcgatccttccaccttggcttcccaatactgcaatgattacaggcatgagccactngcacctcggccgaatctttgtattgtctcangacagtcctgggcggatccttctagcagtcgtacctgc

SEQ ID NO: 669292 - DNA, 91 bp, Homo sapiens
cgcccgcatgaggtgctgctgcgctcggacctggtcaaggcacaccagccccgcgtgagcgccgcccacaagggctgaggagcacgcatca

SEQ ID NO: 669293 - DNA, 296 bp, Homo sapiens
gtacaggaatggggtgtgtagtactagactaaatacaccaaatagtcttcaaagagattgtaccatttaatacacctaacttaccaaacatcatagcttagtctagctcaccttaaacatgttcaggacacttacgttagcccacagttgggcacatcatctaatgcaatgcctgtattataacaaagtcttgaatatctcataaaatttattgaatactgtatcgaaagtgaaaaacagactggtttatgggtactatacaggaggatgtgtgtaggttatatgcaaatgctatg

SEQ ID NO: 669294 - DNA, 150 bp, Homo sapiens
gggtaggtcggcacgccgtggcaggtatggtcagggcctggagagatgttcctgtccttcccaccacagacctacttccgccttcgacctggccacggcctgccaggttaagggcacgcagaaggtgacgacgcgatgaccaccactggc

SEQ ID NO: 669295 - DNA, 263 bp, Homo sapiens
cctcaaagtgaacatgggttgtatgttacatgcatgtttgttcaataagcatgagtcaggatgaccttcataattattcatagctcctcctgtaacctgttgaatatgtatgtttagccaacctattcagcatcaagttcctacccctgctcctcctttgaagggcctgtttttggtttttgccaaagattgtacttcctggcctgtgggatggcccccttgcaggcctttaaccctttataagaaataaagtttcctctcca

SEQ ID NO: 669296 - DNA, 405 bp, Homo sapiens
  misc_feature (243)..(243): n is a, c, g, or t
  misc_feature (378)..(378): n is a, c, g, or t
  misc_feature (399)..(399): n is a, c, g, or t
acgaggttgatgaaaaaaatggttttattgtacttcatttcattttatagatggcaactgaggcaaaaagaaggcagtaactgccaaaggtcagacaggcagtaagtggcagagttgggatctggctcccaagtccctgttcttcagtaacattatgctgcctctcataatgttctttttttcaataaactgtgtgtgggcttctaaaatagtaacagttctttatataaaaggggaaaaaangttttaaaattagagcagggttgaataaacgttcaacttaaacttaacatttgactgaattttatctgactttttccatgtaatattgacatcatcgaaacatactgtagttatttaaaccgtgtccgtgggtcnaaatggcctgcatccaatggntaaaat

SEQ ID NO: 669297 - DNA, 378 bp, Homo sapiens
gtccccctgagaaaaatttttgggcttatgcccggagcttccggtttaagtaaagggcatgtgcccaaaaaccggcatgtttgccctgagtagcgagtccatgtccctcaaaagggcttttaggtagtccaaagtcctttttcatgccaaaggccagttaggaaaaacatgtccctcaaaaaactatggaattgagggcccctcctttgtgggtttccctccaataaaactcagtggggcaagcaaaaaaaaaaaaaaaaaaaaagttttggggagggatgttttgttagtgtataatcaataacttttaacctttagcttgtatttagtaccctttccttgtgttttgaaaaaaagtaaaaattttttttaagccca

SEQ ID NO: 669298 - DNA, 201 bp, Homo sapiens
ccgtggtagctgtggtaccaaaaatgttgagccgtagatgccgtcggcaatggtgaagggcgactcgaagtactctgaggcttgtaggagggtacaatagagaccccgtaaaattgtaataagcagtgcttgaattatttgggtttcgggtgttatctattagactatggagagctcaggtgattgatactccctgatgct

SEQ ID NO: 669299 - DNA, 181 bp, Homo sapiens
cgaggtgaaatatgctcgtgtgtctacgtctattcctatgtaaatatatggtgtgctcacacgaatagtttatgctgtaatagtttatgctgtaatagtttatgctgtaatagtttatgctgtaatagtttatgctgtaatagtttatgctgtaatagtttatgctgtaatagtttatgcg

SEQ ID NO: 669300 - DNA, 104 bp, Homo sapiens
gctctcgcactgtacttcgcatctcttcctcacagactgacacctctctatcatcagaagacagatctataagaactgttccacataccagaggtgtacaccgt

SEQ ID NO: 669301 - DNA, 282 bp, Homo sapiens
ctcggctcccaaagtgttaggataaggcgtgcaccacggcgccgggcctcaaaataatttttttaaaaaaattcagggtctcattcggtcatccaggcgggggtgcaggggcatgatcacagctcacggcagcctcgacctccagggactcgagtgatcctctcacctcagcctcccaagtagctgggactataggcatatactaccacacccagctaatttttaattttttggtagagatggggtatctcactatgttgctcaggctgatgtcgaactccg

SEQ ID NO: 669302 - DNA, 207 bp, Homo sapiens
tgtttcactattatctttactcttttgtagtaatttgtcgtaaggcagtgtacatcagtagccttggccgcagggtatagataatgggtttttctttgatcaagtgtaccataccaattccatagttctagcccacaacgatattagtataaggtttaattgcctataagatggggtatatttgattatacactctatcaatagaga

SEQ ID NO: 669303 - DNA, 199 bp, Homo sapiens
taaaccctttttaaaggggtttttttttttgggcccccccctttttaaaaatggggtttttgccccccctttttttttgggggggggggggtttttttaaattttccggggggccccctttttttaacctaattggaggaaatttgtttccccccccccggtttccttttgggccaccccaaaaatcttttgtttttta

SEQ ID NO: 669304 - DNA, 294 bp, Homo sapiens
ccccgggaggcccccccccccgttttttttccccctttaaaaacccggggggggcccccccccccggtttttttcttggggggggggggggggaaattttttcccccgggaccccctttcccccctggcccctttttggggccccttttaaccagttttttcccaaaaaccggggggggccgggccgggtttcccccggggtccaaaaattttttttttttttggttttgggggggttttgggggggggggggcccccggtttaaaaaaatttttgggttttttccctgtggga

SEQ ID NO: 669305 - DNA, 90 bp, Homo sapiens
  misc_feature (17)..(17): n is a, c, g, or t
  misc_feature (52)..(52): n is a, c, g, or t
  misc_feature (87)..(87): n is a, c, g, or t
tggttttgccccccagnaattaaggcttttaatgcccctttgccatcctagnggggggctttgtccaaaaaatggttttgccctccngga

SEQ ID NO: 669306 - DNA, 552 bp, Homo sapiens
ggtccggctactttgcctggtctctctttgtgggttggcccagaggttccccccgcacccgtgttggggagaccttggggcccgcgcctttctggtctggtatatatgctatgatgttgttgttgccttttttaacccaggagggcgcccgtggagttcccccacgcacccaccggtcccctctccactgcccttgggatgcctcaccacaccccaggtcgtcttccattgctctgaggtcccttcaaggcctcccccatcccaggcccaagcccccatgtgccttgtcccgggactgcctgggcccagcgaggggcccaacagagggcgcccacccaccaacctgacggctgggggccccaccccagcccctctcccctctctgctccccagactcacttgcccttgcccggagatggcccccaccagcaccccgcttttcacacagaggactgagttggcaaaccgggcccccctgaaccgcaccccatcccaccaaccccggccttgctttgtctggcctcacgtgtttcagattttttaagaacccca

SEQ ID NO: 669307 - DNA, 861 bp, Homo sapiens
  misc_feature (861)..(861): n is a, c, g, or t
ttctgttttcatgttaatgcatttatgggaattaaagtagttatatgtgtaaagatttttcataatttacaggctgaccataaattatcttttgtatgatcatcgtaattcgctctcttatcttcatagtatgcctattaactttctagcatttatttgaggactttttttttttttaaactttttttccaatggaccaaataagatatgcttattgttttggcggggggtgaaattaaattatctttggagttggctaaagggtgatcactttttttttagaaaccaagttaggtaaaattaacatagtggataaatattcggtggatgggggtcgaattatatctacctctaggtaaaagagcttatctggaaatggtttattggaagatgggctggtagactatcgggttccaatatgtattttcaaaacatttatctgtgataatagcacattctatttgatattaatattatgtataattaataattaaacgggatatgattgatgaccaagtgtggcatattaccacaattattaggcacccctaagtggcgttgtgaggagtttgggagtaagcggaataccaccaggggtgcggacatcactcacacagtgcgcgcaatcatcccggcaaatcgcgaacaccgttactctacagggcagcactaagtaacacacaggggtgctgaaacccaattgtgaaaagccggcagaatggacacacactcaggtagagacactggtccgcacaccctgcgtctttcagacagaccacgcgcgagagggaacgaacaccgccgaggccgagcccatacggcaccacgatcggggccaaaaagcgcaccgatagtcgaccn

SEQ ID NO: 669308 - DNA, 498 bp, Homo sapiens
  misc_feature (340)..(340): n is a, c, g, or t
  misc_feature (491)..(491): n is a, c, g, or t
tgatgcataatcaaagataattatagcaagttgcatcttcaaggagaatgccaacatcaatctcattgaacctctttgaattagtttactatcctataactaaaagaagagatttatagtttactgaagtcaaaaagtgggcttgaattaaggctgcttatattgtataagtgaaatgccagagtattttacttttatgtttctgtggcccaagggaattaaaatagatattatgccctgaatcccagtgtcactgtgactgcctgtgaaccatgtcagaaccaatatcaacaaaggcctcttcagctaagacttcccagtgttagaaagacaagaacangtaggatctctaaagcccttatcataatatgcctacacaatcaatatcactgccacaaaatcatgcagccaggtcactaaggcatctgcagtcatcactaacactgatctcacctggagaagctgtatggagactacaccactgcacccanctaagta

SEQ ID NO: 669309 - DNA, 982 bp, Homo sapiens
  misc_feature (25)..(25): n is a, c, g, or t
  misc_feature (39)..(39): n is a, c, g, or t
  misc_feature (43)..(43): n is a, c, g, or t
  misc_feature (45)..(45): n is a, c, g, or t
  misc_feature (53)..(53): n is a, c, g, or t
  misc_feature (73)..(73): n is a, c, g, or t
  misc_feature (109)..(109): n is a, c, g, or t
  misc_feature (126)..(126): n is a, c, g, or t
  misc_feature (131)..(131): n is a, c, g, or t
  misc_feature (138)..(138): n is a, c, g, or t
  misc_feature (142)..(142): n is a, c, g, or t
  misc_feature (145)..(145): n is a, c, g, or t
  misc_feature (148)..(148): n is a, c, g, or t
  misc_feature (164)..(164): n is a, c, g, or t
  misc_feature (202)..(202): n is a, c, g, or t
  misc_feature (207)..(207): n is a, c, g, or t
  misc_feature (209)..(209): n is a, c, g, or t
  misc_feature (222)..(223): n is a, c, g, or t
  misc_feature (233)..(233): n is a, c, g, or t
  misc_feature (240)..(240): n is a, c, g, or t
  misc_feature (264)..(264): n is a, c, g, or t
  misc_feature (281)..(281): n is a, c, g, or t
  misc_feature (286)..(286): n is a, c, g, or t
  misc_feature (299)..(299): n is a, c, g, or t
  misc_feature (315)..(315): n is a, c, g, or t
  misc_feature (322)..(322): n is a, c, g, or t
  misc_feature (332)..(332): n is a, c, g, or t
  misc_feature (362)..(362): n is a, c, g, or t
  misc_feature (365)..(365): n is a, c, g, or t
  misc_feature (376)..(376): n is a, c, g, or t
  misc_feature (401)..(401): n is a, c, g, or t
  misc_feature (405)..(405): n is a, c, g, or t
  misc_feature (433)..(434): n is a, c, g, or t
  misc_feature (443)..(444): n is a, c, g, or t
  misc_feature (455)..(455): n is a, c, g, or t
  misc_feature (466)..(466): n is a, c, g, or t
  misc_feature (475)..(477): n is a, c, g, or t
  misc_feature (480)..(481): n is a, c, g, or t
  misc_feature (497)..(497): n is a, c, g, or t
  misc_feature (502)..(503): n is a, c, g, or t
  misc_feature (515)..(515): n is a, c, g, or t
  misc_feature (524)..(524): n is a, c, g, or t
  misc_feature (534)..(534): n is a, c, g, or t
  misc_feature (539)..(539): n is a, c, g, or t
  misc_feature (541)..(541): n is a, c, g, or t
  misc_feature (553)..(553): n is a, c, g, or t
  misc_feature (556)..(556): n is a, c, g, or t
  misc_feature (585)..(585): n is a, c, g, or t
  misc_feature (602)..(602): n is a, c, g, or t
  misc_feature (606)..(606): n is a, c, g, or t
  misc_feature (608)..(608): n is a, c, g, or t
  misc_feature (623)..(623): n is a, c, g, or t
  misc_feature (677)..(677): n is a, c, g, or t
  misc_feature (753)..(753): n is a, c, g, or t
  misc_feature (899)..(899): n is a, c, g, or t
  misc_feature (902)..(902): n is a, c, g, or t
  misc_feature (920)..(920): n is a, c, g, or t
  misc_feature (980)..(980): n is a, c, g, or t
tggcgtgaactgcttcctgcagggnggcgatgggggttnacgntnccaagggnccgggctttgccgagatggncaaggagggagcgaaacacttttcaggattagaagngggtgtgtatagaaacntacanggttggnaggngcntgnccgaaaccacgtcggncagcgaggatggaccaagatggaatgagacaaaatggntatcnancacttgggggggnngtttgtgacnaacggangcgagcaactattttaagagagantagaagtacagcatccnggtgnaaaaatgattgtnatggcttcgcatatgngagagcnagaagtgggngatgggacaaactttgttctggtatttgcnggngctctcctggnattagctgaaggggttctgaggatnggcntgggagtttcagaggtcggagaaggttnngagatagcnngcagaaaagcncatgagattcntcgcgtaannnggnntgtggttcggcaaaangcgcnncgagagggtggngagagtctnagcgtctacntcgtncntccataatgagnagncgaagtagtggtaatgaagtatttctggncaagcttattgctcagncatncntatctatttttcctnattccggccatttcaatgttgataacatcagagtttgtaaaattctgggctctngtatcagttcctcttcagtattgcatggcatggtttttaagaaggaaaccgaagtgaatgtaacatctgtcaaaanatgcaaaaatagcagtgtactcttgtccttttgatggcatgataacagaaactaaggggacagtgttgataaagactgctgaagaattgatgaattttagtaagggagaagaaaacctcatggatgcacaagtcaaagctattgcnganactgggtgcaaatgtcgnagtaacaggtggcaaagtggcagacatggctcttcattatgcaataaatataatatcatntt

SEQ ID NO: 669310 - DNA, 491 bp, Homo sapiens
tcccagggggagggaggaaaggaaggagggggatcaaagctgtcccaaaaagggaaagcggtgaggttggaggaggggcaaaaccgggccggcaagaggtggtaccttcataaggtggtatggggggtgggggtcaggccctgaattcgcctactggagaatctgtcgggggaacaacgctcagggggacgcaggaggaagagccagaggggccagaggcagagaagagatggagtcttaggggccagggttgagcgaggggtccaggcctagaggtgctctccggggggcgggggaatgcagccagttgtccccctcccttcttccacccaaagttccagcccgtggtctgtgttttacatccctcttccccacgacagaagaagtggtgggcccgcggccaggtcatcgtgtcccggtgtccctggtatgtaccccaccctcaaccccttcctttggcgcggaccccataacaataaatttagattaac

SEQ ID NO: 669311 - DNA, 156 bp, Homo sapiens
aagggctttggatagatcaacaacgtttcatgttaaactctcaacaagctaggtattgaaggaacatacctcaaaataataagacccatctatgacaaacccacagccaacatgtgggttggctgaatgggaaaatgctggatcagcggatcgagt

SEQ ID NO: 669312 - DNA, 419 bp, Homo sapiens
tcacatgcgggtgcagtaagtgtgaagcatgcgcgatgagagatggcagcgtgttgtaggaatgcgatataggatcacgaagcagcctgttgtctaccatccacgggtgcgctgtgctcagcccgtgtgtctcggggaataatccgggagcaggtgcacgcctgtgcctactcgctaccacgcgtcttctgggaggaagtgaatgagccggttatcttctcagggagggttagtgctggccactgtgcactgccgctgccagcacgcccggtcacagccagtgtctatgggcgactggcgcggctgcgaggctgtctagaggactcctacccttctgctctgagtgcgcaagtcttcctggactctccggctgtgggctgtggtttggaaacgaggttgttcatagaggccgctctggg

SEQ ID NO: 669313 - DNA, 109 bp, Homo sapiens
gaaaggaagactgagcttaggagctggaacagaagcactcgcagctgaccgaggagaagaacctgcttcttggccgccagccgcacccgcatctcctcagcctctgcat

SEQ ID NO: 669314 - DNA, 911 bp, Homo sapiens
gacctaaaatcgctcatgcatactcttcaatcagccacatagccctcgtagtaacagccattctcatccaaaccccctgaagcttcacctggcgcagtcattctcataatctgcccagcaggactttacatcctcatgacatattgcttgcctagcaagactcgagaacttacgaacgcacgtctacgagtcagctatgcatgaatcctctctcaaggaagttcagatagctctactccctactaatagctttttgatgaactgcctgagcaagcctgcgctaacctctgccttagccccgcattattaacctactgggagaacttgcatctgtgctagtaaccacgttctcctgatcaagatatcacgtctcctacttagaggagcgtcaacatactagtcacagccctgatactccctctacatgatttaccatgaacacaatggggctcagtcacccgacaattaacaagataaaatccctcattcacaggagaaaacaccctcatgttcagtacacctatcccccattctcctcctatccctcgaaccccgacatcattaccgggtttccgtcttacgagaaaccaaacgcttccagctactccgaatctgtctcgagaggaccaccagcaaagtacaaattagaggtacggaaccctgtggcgctctccgtctcaccgagagaacttcggcaggaaatcggggagcggcggccccacgggggcagagagacgtagtttccggaacacagcgaatcagcgggtggtctccccatgaaccgcggggcccggtttccaccccaggttggggcttggctccaagagcaggcgcaccccccacaccaaagacaagaccgtctaaccgacgaggaacacactcacggagaaccatagcagaactagaaaacg

SEQ ID NO: 669315 - DNA, 944 bp, Homo sapiens
cgaataatagtgaatatttcaggctttagaagcaggcatttatcaatgtttcataaaccctgggtggcaggtaagtcagtatataataaaattagaaggatccatgaagcccctgaaaagatataattttttatgtatgtgtaatttctttctgggaaacagtccaaacgtacaaaaagcaaaccccttttccccccacctgtataatattgtctacttcctagtgtgtaaacaaagaggcatcttgactgccgttacccgatctttggtgagaccagagaacagatcttccttgaaatgccagtggcttgccaccagtagggatttaaaaggatgtcacaggcagagttccaaaaaggttttaactgaagtcttagcattagaataaatgagaacctgcctcctcccatcacagcacacaagcaaaactagttaaagtattaaaaacaaagtttagatttattacttgcagaattagggttataataaaactgtaacccctttcaatgtgtgagtacaaatttaggtcttctccaggaatattaagtactgaggtgagttccagagaagcttgatctcctcaatgggatatgtgtaacatgtaggtaagcctacctttgcaaatgtgcagggatgacaaagcaatggtttactagcgggacatacctatctcgaccatctacttaccgtgatatgctcatgtgaagagctaccttttgcaacatgcagatgggcaagttaacccaggaaagctggccctaacaggtgccaacactggtatgacctgcaggatccacagggaccccagtgaagacaatacagacgcagaacacagatgatgcccagcaagccaaaccactaaagaaggaaaaacgataacaaaaacgtaaaagccacaacctcgacaagaaagaaccaaaaacaacacaccaaggagaaagacg

SEQ ID NO: 669316 - DNA, 1004 bp, Homo sapiens
ggcatcttggcagtctctatgcctgtctgtgatgtgtgtgtgcacgtgtaactacacacacacacacacacacacacacacacacacacacacacacacagctatcacacatctcagagcctaagaaataggactaagcccagaaactcctagaaatcacctataagtgctaggcatagatggaaattagtgtgttccaccagaagcacagctccaaatctatacctaaaatatatttcgtgcacttcccaagagacctggacttcaaactttcccagtggagccgtgattatagaacttgaggggtcctatctcaggatgaagggggagacggccctggcttcacggggaagggtatcccagcattgttcgtgcttcacccttgagtgcgttgtcgtggcagtcgtcgtgtgtgcgtgccagggatattatagtggaacgtggagaagtgggacgtcgggtctctgaagctagagtctcactaattagatgtctctgtacgtgagaactattgacgtgtcgtgcaggtccatatagctaagcgtgcaggaaaaacactattatcttccaaaacttacgagagcgtgtgggagaaccctttcgtgagcgttctcttctcagcattctctcgtgcctcccagaggctggcagccagagacactgagagcatcagcagtgttctaacccatgcacgcagggcaggggctgacgggccctccacaggctttcggggagagagcaggcagggggtaggagccccttcggggtgcaagccctggtggggtgctctgcgggaactcattggtgtgagtgacgactccacagggcggtggcatggataccaacagaggcgacaaccaattagttctgaacggggacagagaatcaggccgcgggcactcaggaggaggtggcaaaagcccgggaagaaagcagcataaccatgtggccacggggggcccccaagagaggggtgacccacggcgggggagaaaacggacata

SEQ ID NO: 669317 - DNA, 858 bp, Homo sapiens
tacataagttctactatcagtatacttggcagcatgactttcttttttcttaacagtaaattaagtgaaattcagcaccattggtaaatgatagtatttggtaacaacatagttactggggtgaaggagtaggggagacactcagtaaccatctatttacctagacacttatgcaggggtacatgctaggtggcttaatccaaattcgggctcacttgggaatcacattcagtgacttggagtctgaatggcgtgtgttagcatcaagagcatttaagccaagtgcctgggtgattgagcgggaaacgtattaaaacctcattggggttgaaagctttcccgaaagtgagtgcataattaattagcacttcgtgcctttattccgtggagtaactttaagaattgagtcacgatatgactagtcataaaagtccaaaatttccggggttaaccttgggtttaatttgccatatatatattcacgtgtcggccgtggaaatagcctgggttaacctaatttatggtatatgtaaaactatcatattggatttaattccaatatatatatgagggaaaagccagaatgtctggcagaattcaatctccctgggatctctagtctcggtaaacatatcaggttccattcatcaaatttaactactgtagctctgggatctcacttccatttctggtcaaataaatggtcacttatagacacagtactgtggccacaattaagctcaaagaaatccccatttattaaaggtgcccacgtacaataacccttaatttgggcaaatgggaggtttaccaagtaaagattcactcagtacgcttactagaaagaacatctcagaa

SEQ ID NO: 669318 - DNA, 107 bp, Homo sapiens
ttgaggttgcgcaacacgggttgcgctcgtttgggcaggagaccccctgtacatcgactgggagtaccgccaccctcacccctcggcgcgcgccgtgcagcgcttgt

SEQ ID NO: 669319 - DNA, 87 bp, Homo sapiens
  misc_feature (29)..(29): n is a, c, g, or t
gccggcagtccccctggcccgggcatttntgggacaggtcctagtccggcgacttcctaatggcacagaactccgaggccgcatcgt

SEQ ID NO: 669320 - DNA, 119 bp, Homo sapiens
atcttcggtggacgacccccatcatctgtggttttctataaagcaaccctgtatcaggagatctgtgtcgtatcttctctttagcaagcatttgtgcctgcggggtatcctctagtagt

SEQ ID NO: 669321 - DNA, 198 bp, Homo sapiens
actgaatatcgagcagtaacatagacgatttccagtatcctgctgcgcgccgggtcggcgccggcaacacgcggcgactgaggaaaatggcgatccagccagtcaataatcgccagcgactggctgagagactcaccgtcgtccgtgagcagcgtcggcaccagtccgaccgggttcattcgccgatatgccagctca

SEQ ID NO: 669322 - DNA, 251 bp, Homo sapiens
ttcgattgggggcacttagcaaacgctgtctctacaaaaaaaaaatacaaaaaaattaaccatgctgtggtgggcatgcttaagatccagctacttctgtggctgaggcaggaggatcgcttgacccaggaaggtcgaggctgcagtgagccatgttcacgccactcgactccagcctgggggacaaagtgagatcctgtctcaaaaaaaaagtacgggattatcagactgaatttaaaaacaggctctaa

SEQ ID NO: 669323 - DNA, 167 bp, Homo sapiens
  misc_feature (161)..(161): n is a, c, g, or t
ctcacaggccggacagtgaaaatacttcagataaatcccaatagagaaagaaaaagggaggcaataatggaaaaaatagaagaaacagaaagaagaaaaatccatgtaagtggcagaatttcaaaatttctgcattcacgggagaagtgcaaatatatagnagcacc

SEQ ID NO: 669324 - DNA, 362 bp, Homo sapiens
gggcatatgacagggaaagtcgacatagatgttgcccccagtaagactctagggttgcaccaggaagtgctcgaacgagcgatctccatctagtcttccatgtttcaccacggtaagcttcatgtaacgggatgtctgtgcccgttaaggctatcaatgaggcctcgaaccttctcggacagtggattatccagaactggcacgaggagtcaaaccactggtgatctgactgaaggaggagacgctgaacaggctctggacaatcaccctgttggacgcttgctcccacccagaggaagaggttgagcccattctccagtaaatatatatccccattgcttagacgctcttcagaggctcga

SEQ ID NO: 669325 - DNA, 616 bp, Homo sapiens
  misc_feature (611)..(611): n is a, c, g, or t
gtccatagatgctttagggcaggcgatctatgtatactacgttgctgtgatcagtgttatgaatgaagctatactgatatcagatgcgagctgacatctaggtctggattgggatcagatgggctaataggaagggcggagtctgtacactccatcctggtggtcaatgccatggccaaagtctgaataccttgtgtggcatagagaacttgacgatcaagaacagtgtctagagacttcctggtgtactgtaccagacactatcgggaatgcttccatatgagactgcttataatctgtatttgatactgacggatgacaggcacatgaaagtggcaagagaccccgacatgacagtaatccgacgatcagtgtattcatgactctgtagaaattgaatgaactgactctctcaagattactgagctgaactgagcacagctatgcctgtatacgtgcgtatataatcgactgatgacaggtaagaaggctgcactgagtcttactcgacagtatttcagtatagcacgtacgtgaaacatatgagtgatgcagtaactagtacgatgtgaatgctatcatttcggatactcccaggattttagactaantctgg

SEQ ID NO: 669326 - DNA, 128 bp, Homo sapiens
ggtcgatggaccttgcctcagtgaggagacaggccacgcttcaagtgctgcagctcactgatttcctcctctagtttccgcacagtgcccaccagaagtctgtccgcccagcctggcagaaggccgac

SEQ ID NO: 669327 - DNA, 939 bp, Homo sapiens
gtccctgccctctcccgtgctctccatcttccctttcctttccctctgtcttttactctgtccatacccgcttcctgcctgactctctgcccccgtgtttcttgacatccatgtcactccccttcggccaacttcccattccccacctctccccgtccgtgtccctccggcactgctctctgtcctttctcggccacccgctggcccccctccgcccaccctgcctgcccccagggcaagcgctgctatcctcgatgtctcggccaatgccgtgcggctggctgcaggcggccatctgcacctccatcgccatcttcatccgcccccgctccctggagaatgtgctgtgagtatggtccggggggcctcccctttgctccccccaacactgtgagcctgggcctcacaaggcgtctgcgttcaaactactcccttcagaaacctggacagcgttttcagcaagaccctgagggggatccctggaacaccaagaggatgtggcgcggaatcgggtctatacacccatcctctcctgacttggcgtagacaaggactacatttcccagccagacccctggaggcataccaactggggcgagtcaagaactctaggcgcctgttgggaaatttggagtccgaaaatcccatctctggaggctgaacaagctagcaaaggatagaaagccccccgataagaatagtccccctggaagtaaaaccacacccagggctgaggacgggattgccgggatggcaacgagaggtagacggagtgatcacaatcagcggcccccaggaggaaaaaagaggaaatagaaataaaaacgcaaatgtgacacaactcgaaagaaaaattacaaatcccggacacacagacaaataaaaaccacgaccacagaggagatccacacccgacggacctccacccataaacaagaa

SEQ ID NO: 669328 - DNA, 114 bp, Homo sapiens
aactcttccaacctgagaaaagacttcctggctttgaaatggaaacttacagcagagagtcacaggccacggcaacaacaccgacagcaccaaacatttggattattattctca

SEQ ID NO: 669329 - DNA, 183 bp, Homo sapiens
cttcaagtaattctagtctatagtaaataattaacgttaaccccatattcaaattctagaccgcatacgggggcaccaaatcatctctgccaattctaatgatactctctactctcttagaatcaactatattaactcaatccacgcagcatctacattatccgtagagatgaaatggtagaa

SEQ ID NO: 669330 - DNA, 805 bp, Homo sapiens
tcttttgtacgcccggggttatggatatcgcgacccaggcctcggcagcgggtgcggcgcgccgacaattcgagagccagcgagcgagcgatgcgagccgagccgagcctcccgccgtcgacatgggccagaacgacctgatgggcacggccgaggacttcgccgaccagttcctccgtgatcacaaagcagtacctgccccacgtggcgctgcctctgtctgatcagcaccgttcctggagtgacggcatccgtatgatggttccagatggagacgagcagacgcgactacatcgacaccacctggaactgcggctacctgctggacctcgatccttcgtacttcctcaacattgcatgggacagctgactggatgacgtcactgggtgtagagacaggaactatacgtgcagataacgcctgcttcagggctctattggaactcatagacatactgacagaacgacttgccatacagacattaatatagggacttgaagttaaaagatagagagaacctggaccctgtggcaggaggacatgatatgctgctcctagcagtaatccccgtactgaagggaacgagcaatgtttcgcgggacgtccccgacacatgacgatgaagaggctcccaccgaagacaaggtaccatgcaacgcatcggcagtgccagggatcctctgcctaggtctccgtgaatagtaacgcatgaaacccatccctcttcacctgtatgaagcgcacagctatcataactcatatttgatacccgaacccatcgtagggacaccagaatcctaattc

SEQ ID NO: 669331 - DNA, 264 bp, Homo sapiens
atcttctccgataatttcatactctgcctcattatgcttcctcagcttaggatatataaggtccttttcaattagctaatgcataggaagtttattacaaccatttactgccttacaagatattctttataggagcactacttttcgttaggatatgctgctaccagccttattctgtcctctaacttaagtaccctgaccagtgacactatgaagcaaccactcgaacaggttggtcttttaaccagcactgggtttcgatgg

SEQ ID NO: 669332 - DNA, 171 bp, Homo sapiens
agtacgatcgagcgaggaggaataaaaccacaaaaaataagttagcttaacattatactacaaatagaacagaaatatagtacctaactacaggtgagataacagtaatcacaatacattgatagataagcctgtatagcagataatacacatactagttctagtaccaac

SEQ ID NO: 669333 - DNA, 526 bp, Homo sapiens
  misc_feature (90)..(90): n is a, c, g, or t
  misc_feature (108)..(108): n is a, c, g, or t
cgggctctggaccagttttcccctgtggtggaggccaaactgataaaacacaaaaaggggattgtcaatgaacagttttgttgcaacggntggcagacggggccatcnacctttataccatggtggtggttctctcaagggcctcaaaatcccttagtgagggccaccccccggcccagcattaaaaaattctttgttacacctggtgtattgaggctacagctcggatccaaaagggcatggccccccttcagttttacccctggcaacaaaagtttttccccaacttcaaaagcatttccaaggccttggtggaacggggtggtgtggtcaccaacaacccccttggttttttaatactcccggccagggcctgtcccagttatgtgccttccctcaaaccaaaaccgaagcccctttccttaaggccctggtttgtcccaaaagggcctagtgttcccaacactgtgcctgctttcaaaagccctttttgcctcgcaaataataaaaatttttagcccgtcca

SEQ ID NO: 669334 - DNA, 349 bp, Homo sapiens
gcccctgcttggtctctgtaccttgtgtgctcacaacggcgtgcagctctgagatgcgcactccagtgatggtgatcataggttcaaggatcccggcgaccacaatttgatgacctgcctgtcgatagctttcgctcacaatcgacagaatcgctcatcagatgatgatgttcaactaatgcatgcggtcactgcctgtgcgagaacacgtgccggtgctgtgtcaattacatctctactggccacctactgtgagagctgatggctgatgagcaacacacgcctgacattgagacgctggtagcagccactacatgactgatccacctgctcagactgatcataccct

SEQ ID NO: 669335 - DNA, 106 bp, Homo sapiens
cgtcacttttcttgggacgtgtgtctgactacggtctcttacacgggactgtggttcaccggaactttaccactttggggactcctctacgacgtcgacctgcacg

SEQ ID NO: 669336 - DNA, 1296 bp, Homo sapiens
tctcacaatgcaggcgccccagctctgacacgtgcactttcttttattgtggaaaaaaatataaagcagctcacgtgatgtgtgtggcaggggcaggacacaagcagctgtgccgctcctctcctctcccaggcgtgtgccgtggcatgtggctcgcaggggaagcgggtgtgccgtggagagtctccgcgggtgaacccacccagcgggggccaacaacgtgagagggaagctgtgaaggaagccgcggggccccgcgccgagcctctcctgtggaatgcctcaggcggaactcggtgttacttgtgttccccactttctttttctcgagggggctcgtatgaggggtctcccccaaggggggtgtggcggggggaaaaaaagtggtgccggtgggttaccttatctctcgttacacccagatctctctctacgaggcaaaccacactccttttgaccctgtggcattgtgggagaaaccttcctatcctctttttctttcccaaaagcaggggggggcgtatcccaactgtgaaaaaccaaaaccgcgggcccacaactattctgtctcctgtgttgtaaacaccctattcaaaaagagttttgttcgacacagaaccagtgtggggctccccacaacatctttatcaccccccgcgggtggccctatgtggtgtggtgacacgggaagtgaacaaaagtctcaggatagaaaaaaccctgttggtgacaactgggtgtggaggagcggggcaattgacaatcacaaagtgctccctctccctttgtgcaactgtttccccatttgtgaagctctgtgtgtctccccaaaacccctcttgtgcggggaaaactctaacaaggtcttccctcgtgtgaagaagctccttttacccgccaaaaagaggatattactgccggaaaaagcgcaccactttatacgtggcgcgaggctgaaacaactgctgctgtttcacctgttgtggtgtgtgttttgggcccctcttattttcatacctaattatcgttgggaaatcgtgtggatccccgcacacgggttgtggccccccagagagagcggacaatattccccccaaaagataaaggccgtcacacaaacggtggaaggaactccctcccagaaaatacactcccttataccaaattcttctttgtagaaacttccttctgcgcctccctagtggagagtctgagggggatatattcccccacaaacctctcccctgttagcgcccctacaaaagtctaacaaattatttttatacgagcccccga

SEQ ID NO: 669337 - DNA, 332 bp, Homo sapiens
  misc_feature (36)..(36): n is a, c, g, or t
  misc_feature (123)..(123): n is a, c, g, or t
ggaaaatagggcctagaaacagggaacttaaggccnctctgtgctaacttcctaaaagagaaaacaccagggtctggaggcaggaaatctaaggccaattcactctgacttcccaaagctggntcaaaaggaaaataccggggtctgggggcaggaaacctaaggctgattaacacaaacttcctaaagctaaaccaaaagacaaaaaccccatctttccatgctgagtaacaaaggttcagaggctactctccctacaaccatccctcttccaccacatctcagatggaaagggaggggagggtgccttgttgaccatgggccaagcaggg

SEQ ID NO: 669338 - DNA, 1712 bp, Homo sapiens
ggacgcgtgggtcgacccacgcgtccgagcaagcttagtcctaaagctgtacttcactgcaacgcagaccatcgggaattcctgctggcacaatcggactctacttcacgcaggtggccaactaatcaagacaacactggcgacttcgacgcgactggactcacgttcatgacacacagatttcgtcttcctgcaacagcagcacgaaacacctgctccccctgacagaacagcacgccaccaactgcctttgacacacacgaactgacggccactacaggacagcccacatgactgcccgtggccaccaggcaacgcggccaactgctcaccgcgctagcactgaacaacggctgcacacttctcacacctctccaataccctgctcctacacacaccgctgcgcactgcgccaacccctcaatactgcccaccctctgcacctgccgaccgacacgtgcccctcaacacacgcgctgcaaaaccgagtgggcccgcccaacgctctccacgaagcgaccacccccatgccactgaaagcgcacgccctggccccacggcgctcccgccacgccacgaaactccacccccgcagaccgctgaacgccacacgggcaagcaacagcgtcccgccgtcctcccttcatgacccggatgcgccaccccctccgtgcccacaggcgccacgccccctaaactggccctccctgccatggcacgaccggcgcaccctccaccgccccgcacgctccccccccccctgcaacacccccctctccacacaccactgccacccccgacactacacagccttacgcaccaccccacgcgcacaagatgcccaagactccccacacgcaacctggcctccaccacgctacccatactgcgcagacaccacacaccaacggcccgtcgccagccacatcccaggagcaccctggcacacacaacgcacacggccacagacaccacaccagtccacagcgcccaaccagaccaccgacgagcaggcgccaacccgcaccacccgccacccgcaacagcccacggaacgcgagagcccaccacgagccgctggccacacacaccaggcgcgacccaacatagcaagcggcagccgcaagaacgacatcaacacgccaaactggccgcgcaaaccgcacaattcccatacgccccacacggctaagacaaaagagtccgatagcgacatgcaacccacgcacacaaaacctctagcacaagcgcgcatctaccaccacttcggcgacaccacccaccgcacacgccccagcaccctgacgccaccacctacccacccacactgccgcacgcccgccgacaaacagacgcagacgacggccacccccaacccgcgcaccacccccactcccgccaccccgccgcgccccccacacccaccaccccacccaccccacccaccacggcgcgccgcacccatcgccgaccgcccccgccgccaccactccccaccacgccacacactccgcccccaccccgacacacgccgccacaacccacacacacccgctcagccaacccaccagcgagcaccacaccccacgcaccaccccacgacgcgacacaaccacccccctccacgcacccaaaccgcaccaagcacacagcaacgcgcccacaccccacccgccctgcaccaccgcccgcgccacgcctcccccgccacc

SEQ ID NO: 669339 - DNA, 343 bp, Homo sapiens
gtgggtatggggggtctctcagtctgctgctaacatcttggttgactcccaagtctctatgcaaccctatgttaccctaccaggcgagcacgaagacacttctctatagagtcccactgcctctttgtactgtgtgcccattaattaaattttgggaaacagagtccttctcctcccctgatatgagtgcagtggctatggacaggactcactgtggcgtcaccctcctggctcaagcgatcccgcctgcctctggagtagctaaaaccagaggcgtgcaccaccaaaacctaactaatatatggtatatagtaaggacactggtctcactgacaacgggctt

SEQ ID NO: 669340 - DNA, 394 bp, Homo sapiens
  misc_feature (17)..(17): n is a, c, g, or t
  misc_feature (73)..(73): n is a, c, g, or t
  misc_feature (169)..(169): n is a, c, g, or t
aaggtttttgggaaggnaggaataataagacctaggaaaaggaaaatgcagagcagtaaagggtttagatganaataagaaaagagtccgggcacggtgtcttacgccctataatccctagccaatttgggaggccgaggcaggtggatcgcttgagtcccaggagttncgagaaccagccctgggcaacatggcaaaatcctgtctctacaaaaatactacaaaaattagcccaggtatggtggcatgtggctgtagtcccagttacttggaaggctgaggtgggaggatcacctgagcctggaatgcagaggttgcagtgagctgagattgcaccaccgcactccagcctaagcctaagtcaacagagtgagactctgtattaaaaaaaaaa

SEQ ID NO: 669341 - DNA, 389 bp, Homo sapiens
gaatgcatagacatcttaagctggtagcacttcccatcttcaacttccaccaaattatttcccactgggtagagtgctattgcttcaagagtcagtatgtcaaaatgaaactatcttctccagactacatcctctttgaaaaccccccatttctgtctgtggtcccatcgttccttcaatttcctacgctagaaatctcatatttcactttagtaagaactgttatttctatcaccactacatactactatagctagaagctgccactctgctgtgtgccacccatggtgctggctggttcagttattttgcctgaaggtgacaacaaactggtaaatggaagagctggcacaagttcatttaaatgtgtgtttgtctaaatgcaatca

SEQ ID NO: 669342 - DNA, 229 bp, Homo sapiens
gacgaataacattgttctaactgcagtacattctcaatacaaagtattgatactcaggcatgaaagctgcatgtgcatgtaggggagagaaggaggtttcaccagactgacaaatggagtcatggttctgggaaggagcagggtgttgggtgcacatttgtcacctgggaatactaccagcaggggtaccgaagctctgaatatcggtaatacattggggcactaaacc

SEQ ID NO: 669343 - DNA, 827 bp, Homo sapiens
tgtactttttgtagacatgaggtctcgctatgttgcccaggccggtcttgaactcctagctcaactcatcttcctgtcttggcttcttgaagtgttgggattacaggcgtgagccacctgtgcctggcctattttttatttgtaaatataaggggtacaagtgcagttacatggaaacactgtgtagtggtgaagtcggggctgtcagtgtagccatcaccagagagcgtacatcaaacgcaccgggaactttctcatccctcgccccaccctcctgagcatccacgggtgagtgttccccactctgtgtccacgtgcacacatcatttagctcccacctgtaagtgaggacacgtgctctttgtccttctgtttctgaactgtttgactcagcactatgttctcccgttccatccacgttcctgcaaagggcacaattgtacactttttcatggctgaatagtactccatcgtgtatatgcaccacattctctttctccagccgtctgttggtggagccctaggctgattccgtgtctttgctgttgtgaacggtgctgtgatggacgtgcacgtgcaggtgtctttttgatgtaatcatttccttcgagtagctgcccggcagtgggattgctggatgagttctgttttcagttctttgataaatctctttactggggcagtgggattgctggatgagttctgttttcagttctttgataaatctctttactgtgctccacaggggctgacaatattcccggtgagggttgggagacgcaggtgtgtgcacgtctccagaactcatctcacggaactgttagatc

SEQ ID NO: 669344 - DNA, 873 bp, Homo sapiens
  misc_feature (837)..(837): n is a, c, g, or t
tgcgcttggcggatggccgtccatccgggacgctccgttctttcctgtgcctcccaggcctcctggcgtcccggtccgtgcaaggaaatggttgaactgtgcagaatctctgtttctgcccctttggcatatcctcaacccacccgggttctggagaaaggctgtacggaagtcctccttctccgctccgggcgagtccagtccgctgtctcgggatgggagtttgtgtgtggtcaggccccgtgctccggccagccgctccctgtccgggaggtgacggggcgcctctgcccggccgcccctagctgggaagtgaggagcccctctgcccggccaccaccccgtctgggaggtgtgcccaacagctcattgagaacgggccatgatgacagtggcagttttgtggaatagaaacggcgggaaaggtggggtaaagattgaaaagattgagaaatcggatggttgccgtgtctgtgtagaaagaagtagacatgggagactttgtcattttgttctgcactaagagaaattcttctgccttgggatcctgttgatcggtgaccttacccccaatcctgtgctctcatgaaacatgtgctgtgtccactgcagggttaaatggattaagggcggtgcaagatgtgctttgttaaacagacgcttgaaggcagcatgctcgttaagtgtcatcaccactccctaatctcaagtacccagggacacaaacactgcggaaggccgcagggtcgctctgcctaggaaaaccagagacctttgttcacttgtttatctgctgaccttccctccatatacgtcccaggacctgccaaatccccntttatcggacggccagatatcagcttacttttgcta

SEQ ID NO: 669345 - DNA, 407 bp, Homo sapiens
  misc_feature (286)..(286): n is a, c, g, or t
  misc_feature (322)..(322): n is a, c, g, or t
  misc_feature (343)..(343): n is a, c, g, or t
  misc_feature (359)..(359): n is a, c, g, or t
  misc_feature (363)..(363): n is a, c, g, or t
  misc_feature (381)..(381): n is a, c, g, or t
  misc_feature (390)..(390): n is a, c, g, or t
  misc_feature (399)..(399): n is a, c, g, or t
ggcggcccaaaggcaactgtgggggctccaaatttcctggggggggtcagggtagaaaaagcccctccatcccgcccttcccccagcattcctccattttagatagatgggactctccaaaggcccttccaaagggaacccggcctactgagcggacagaatgatgcccaaatattgcttatgtctttacatgggattggaatgaaaatttgctttaatatagctatccttttttttccaaaattacttctctctatttggaatttaattaatcgaaatgaatttntttgaatataggaagcatatgcccacttgtaatttntaactccttatgtttgaaaanaaacctccggtgtganatanacaaatatatttaattgngtcatattnaacttttgntttcccca

SEQ ID NO: 669346 - DNA, 130 bp, Homo sapiens
gagtcgtgtaggagtttcctgaagttgacggtgattgagccacgtggatactgaatgcgcggtcttcacacatcccagccgttgactgcagtgagcactggaagacgcaacgcagatgaggagtatgaac

SEQ ID NO: 669347 - DNA, 831 bp, Homo sapiens
  misc_feature (112)..(112): n is a, c, g, or t
  misc_feature (116)..(116): n is a, c, g, or t
  misc_feature (149)..(149): n is a, c, g, or t
  misc_feature (189)..(189): n is a, c, g, or t
  misc_feature (208)..(208): n is a, c, g, or t
  misc_feature (228)..(228): n is a, c, g, or t
  misc_feature (237)..(237): n is a, c, g, or t
  misc_feature (270)..(270): n is a, c, g, or t
  misc_feature (277)..(277): n is a, c, g, or t
  misc_feature (281)..(281): n is a, c, g, or t
  misc_feature (312)..(312): n is a, c, g, or t
  misc_feature (329)..(330): n is a, c, g, or t
  misc_feature (332)..(332): n is a, c, g, or t
  misc_feature (385)..(385): n is a, c, g, or t
  misc_feature (396)..(396): n is a, c, g, or t
  misc_feature (401)..(401): n is a, c, g, or t
  misc_feature (427)..(427): n is a, c, g, or t
  misc_feature (646)..(646): n is a, c, g, or t
  misc_feature (657)..(657): n is a, c, g, or t
  misc_feature (661)..(661): n is a, c, g, or t
  misc_feature (667)..(667): n is a, c, g, or t
  misc_feature (670)..(671): n is a, c, g, or t
  misc_feature (675)..(675): n is a, c, g, or t
  misc_feature (683)..(683): n is a, c, g, or t
ggggcatgaatatcagacgctagggggacagccactgtgttgtctgctaccctcatcctggtcactgcttctgctataacagccctaggccaggaatatgaacaagtctgcntgcntttggatctcgtgtcctcaccagcctcctgtgnaagccttgtgctcacacagacctcgagtgggaaggtgttngtatttccgtagagaatcntgtatactgatcatgtaaanttgatcacnaccgctggagaagcctctacagaacttttaccnttgtgtngtcngagccgtatagtgatctctctcgtgcctacngcctcttctcctacaannanccaaggcagggataatgagctactagtttataaagaaagagttggagagtatngtctatacatnggaangacacaaagttacatccaaagttatngaaaaagttcccgggtccagtgcacatctgtgtgagctgggagtcctcatcaggtattgctgaatgtggatcaatgggacacctgtggtgaaaaaagggtctgcgacagggttacttgtggaagctcagccaagattgtcctggggcaggaacaggatcctatgggggcaagttgataggagcagccttgtgggagagattggggattgtacatgtggnctctgtgctgncccnagaaantannctgntgctatanggtaccatctcctgcactatctggactggagggtccgacatgaactcaaggcatggaccacaaaccttgggggggaagaggtcgaccagagacgctgacataatgcgcaacaactgtcacacctgcaaaaactcaaccgctatagaca

SEQ ID NO: 669348 - DNA, 245 bp, Homo sapiens
  misc_feature (38)..(39): n is a, c, g, or t
  misc_feature (104)..(105): n is a, c, g, or t
  misc_feature (132)..(132): n is a, c, g, or t
aacttatgtagcgcatgtgactttgacatgtacacctnnaatggcactatttttatttggactatttttctataacacggtaggtagccctagaaaaagaggtnntattttgtaaacaatcatttgtgaccncagccattctctggttaatattttggctcacagcagatacttgccagatcatgtatgaggggtggtgcatgttgaattgaaactggcataaaactgcctcctttgtcttgctc

SEQ ID NO: 669349 - DNA, 901 bp, Homo sapiens
  misc_feature (112)..(112): n is a, c, g, or t
  misc_feature (116)..(116): n is a, c, g, or t
  misc_feature (149)..(149): n is a, c, g, or t
  misc_feature (189)..(189): n is a, c, g, or t
  misc_feature (208)..(208): n is a, c, g, or t
  misc_feature (228)..(228): n is a, c, g, or t
  misc_feature (237)..(237): n is a, c, g, or t
  misc_feature (270)..(270): n is a, c, g, or t
  misc_feature (277)..(277): n is a, c, g, or t
  misc_feature (281)..(281): n is a, c, g, or t
  misc_feature (716)..(716): n is a, c, g, or t
  misc_feature (727)..(727): n is a, c, g, or t
  misc_feature (731)..(731): n is a, c, g, or t
  misc_feature (737)..(737): n is a, c, g, or t
  misc_feature (740)..(741): n is a, c, g, or t
  misc_feature (745)..(745): n is a, c, g, or t
  misc_feature (753)..(753): n is a, c, g, or t
ggggcatgaatatcagacgctagggggacagccactgtgttgtctgctaccctcatcctggtcactgcttctgctataacagccctaggccaggaatatgaacaagtctgcntgcntttggatctcgtgtcctcaccagcctcctgtgnaagccttgtgctcacacagacctcgagtgggaaggtgttngtatttccgtagagaatcntgtatactgatcatgtaaanttgatcacnaccgctggagaagcctctacagaacttttaccnttgtgtngtcngagccgtatacgatgatgctcgtacctcgatgccctactagtccttcgtgtcttaccctaacgaattatccacagaggtcgaagcggtatacactggatgctagcatagttggataataacaagaaaacgagtgtaggtagcacgtcattaggtctactatcaattggggaaaggacagcaataagtttaagccattccacatagatttattcgcataggagtatcccgggtccagtgcacatctgtgtgagctgggagtcctcatcaggtattgctgaatgtggatcaatgggacacctgtggtgaaaaaagggtctgcgacagggttacttgtggaagctcagccaagattgtcctggggcaggaacaggatcctatgggggcaagttgataggagcagccttgtgggagagattggggattgtacatgtggnctctgtgctgncccnagaaantannctgntgctatanggtaccatctcctgcactatctggactggagggtccgacatgaactcaaggcatggaccacaaaccttgggggggaagaggtcgaccagagacgctgacataatgcgcaacaactgtcacacctgcaaaaactcaaccgctatagaca

SEQ ID NO: 669350 - DNA, 517 bp, Homo sapiens
  misc_feature (150)..(150): n is a, c, g, or t
  misc_feature (469)..(469): n is a, c, g, or t
ccctaaccaggttgtactaggcgtataccttgactgctcaggctggataagctctacattacagtataggtgaacttggaaagctagacagtcatcctcagagttgtgagacctatgtccaggtgagatgatgagaggtgttcctatcgngataaagctttgtccagctcatacttggagatgtgtctgtcaacaccattggccagctgcttcaggtcatcttgtgtctaggagcagaagccagttcagtcatgggatatgtccacatctagaccatagtggctatcctgtgtctccccaggtacccggtacacgatctcgaaggatcatgagtgttcttggtcatcctgaggcctcttttcggtttccggtgctggtttgatggtgaccttgaggtcgactttattacaggtgagttgatctttggccttagcatggtacattgtcaccaccgacaaggtgccttggncttttccttcagctgtgactgtgaaaccctcattttccttggtctctc

SEQ ID NO: 669351 - DNA, 336 bp, Homo sapiens
tcactttgattgtggatcagagtctgacttgagtaagttttgggccggagatgacgtctgggacaggagttgggcctggagaggccacgtgaggcataagctgcatgtagaagaggccagtgtgaggcaagacctgggcctgtctaggctgctgggagacaggcaggaatctggccagggaaggtttgcatgagacaaaagttgggcctggaaaggcccttgtgaagcattgagcttgggctaaaagaggccactgggtgggcaggagctggggtggtgtaagaaagctggtgaaagggtttgggaggcttggcttttggggggggtcccacagtt

SEQ ID NO: 669352 - DNA, 537 bp, Homo sapiens
  misc_feature (4)..(4): n is a, c, g, or t
  misc_feature (8)..(8): n is a, c, g, or t
  misc_feature (14)..(14): n is a, c, g, or t
  misc_feature (17)..(18): n is a, c, g, or t
  misc_feature (20)..(20): n is a, c, g, or t
  misc_feature (24)..(25): n is a, c, g, or t
  misc_feature (29)..(29): n is a, c, g, or t
  misc_feature (32)..(32): n is a, c, g, or t
  misc_feature (36)..(37): n is a, c, g, or t
  misc_feature (39)..(39): n is a, c, g, or t
  misc_feature (45)..(45): n is a, c, g, or t
  misc_feature (52)..(52): n is a, c, g, or t
  misc_feature (72)..(72): n is a, c, g, or t
  misc_feature (77)..(77): n is a, c, g, or t
  misc_feature (81)..(81): n is a, c, g, or t
  misc_feature (107)..(107): n is a, c, g, or t
  misc_feature (145)..(145): n is a, c, g, or t
  misc_feature (162)..(162): n is a, c, g, or t
  misc_feature (168)..(168): n is a, c, g, or t
  misc_feature (173)..(173): n is a, c, g, or t
  misc_feature (183)..(183): n is a, c, g, or t
  misc_feature (206)..(206): n is a, c, g, or t
  misc_feature (211)..(211): n is a, c, g, or t
  misc_feature (240)..(240): n is a, c, g, or t
  misc_feature (309)..(309): n is a, c, g, or t
  misc_feature (317)..(317): n is a, c, g, or t
  misc_feature (415)..(415): n is a, c, g, or t
  misc_feature (453)..(453): n is a, c, g, or t
  misc_feature (477)..(477): n is a, c, g, or t
  misc_feature (481)..(481): n is a, c, g, or t
  misc_feature (508)..(508): n is a, c, g, or t
tcgnaaanctaaancannanaatnntatnaanccannangtggancttacantgaaccgaaaccgtcccacnacacnccancctgaacaacacagcagacaccatcncgaggaaaaaaaaataaaacagacggcctgcggtgagnaaactgggcgcattttncgagtncaggngaattagccncaatcccccgtgttcacttggcncccanagccctcttgatggatcacgtaaaactgnaaggcagcggggagcagacaaagatgaggtctacactgtccttcatggggattaaagctatggttatantagcaccnaacttctacaaaccaagctcagggccccaaccctagaagggcccaaatgagagaatggtacttagggatggaaaacgggcctggctagagcttcgggngtgtgtgtctgtctgtgtgtatgcatacatatgtgtgnatatatggttttgtcaggtgtgtnaatntgcaaattgtttcctttatatatgtantgtatatatatatatgaaaatatatatat

SEQ ID NO: 669353 - DNA, 338 bp, Homo sapiens
ccaggcgagatgacataaacttatacctagtaagaggcacagcatctgcagattttccactgacactcggaaagccggtggccaggaacagaatggtacacagcaaagtcatagttgatggcatatgcgtgaacttcgaagctgagcttccatctctgatccatcgtcgtggcatcgagaatgatcccgtggactttagaggttggagattacatcctcactccagaaatgtgcgtggagcgcaagagtatcagtgatttaatcggctctttaaataacggccgcctctacagccagtgcatctccatgtcccgctactacaagcgtcccgtgcttct

SEQ ID NO: 669354 - DNA, 589 bp, Homo sapiens
gctgctgcagtgctctcgtcttctgcgggtctcgcgtgccctctccttatcgtattccggaaacatggcctcacgtatgtggctgtctctgatggtgtcatcaacgtgttcaccgacatgaaggtgcgtaagtcttcaacgccagatgaggtgaagaatcgcaggcaggcgggggtctctgctctgagtgaggactcagaagaacatcatcctggagtgagggcaatgagatcctggtggagcgatgagggcccaactgtcgaagagtccctaccgccaactttgtcacgatgctggcagttagggacgtggcgcatatgccctctatgatgccaactatgagatgcaatggatgagcatgaatggatggctctggagtatatcgtagcgagacggccccgagtctgcgcccgcttaatatccaagtgatatatgccagattccaatggaacgccactcaacgaatgaagctgactacggggtcaagcatgaattgcaagcacacgtgctacgcaggaggtcacggaccggctgcacccatggccgaggaagcctggggggcaagggcggcctctccctggaggggcaa

SEQ ID NO: 669355 - DNA, 322 bp, Homo sapiens
  misc_feature (266)..(266): n is a, c, g, or t
ttcaggtgagcagcaatgagacggagaaaggagtacagctcccgaatgtactctgaggccagttagcggctcacacctgtaatcccagcactttaggaggccaaggcagaaggacagtatgagtccgggagtctgagaccagcctgggcaatacagtgagaccccatgtctacaaaaaatacaaataaaaattagctagactgctgcttgagcacaggagttgaggttacagtgagctatgattgtgccactgcaccccaacctgngcaacagagcaagaccctgtctctttcttaaaaaaagaatctgtcggccggcacgg

SEQ ID NO: 669356 - DNA, 879 bp, Homo sapiens
cggcgcggggacgcgggtttctgcctcgggcctgccctgctctactctgcgctctctgccctgtgccgccgcgctcagcctcggcctgcgctgcgcgcccggcgcgtgctgccatggcctgccgccggaagcccgccgaggatcagagccgctgcgacggtgacgccagccctgccgtcccccgcgcgatggatgcctgggacggaagcgcagagccgacggaaggcgctggaggcccgaagacgccgaggaggcaagagcaaccgaggcgccagaagagacaagacccgagagctttaccactccttgaagggccctaaaaccccgtaccagaatgctctgactagggcaaggtgcagttgaaggaaagatgacatgaggaccaaggagtataaaaacaagagattggcaggatatagagaatggaaactccttcatcaatgactttggaaaagagagaggaaaatcgatcatcaaggaagtttctgattcaaagggagtctaatgtctacatgtgccagggtagactttgagacacgatgaaagtgtcctaatagagggagacagaagccagaatcaagtatgtgaagggaaacaccaaattagccttagcgaatcggtaaataatataccagagaaagggtcccagaggacagcctttcagaaaagccttggagattacagtcccaaagagaccccattagataaaactattaacaaggtagtaggacagaagggtacatgggcgacccaacgacacattcaaaagcgtcctacgcaaatcgtaggcgatctgacagactagtgcggatacatccagttggaaaagaagcgagtgtgctttagacacgacaatacagcaccttgaaaaccttggca

SEQ ID NO: 669357 - DNA, 178 bp, Homo sapiens
cggcctgtgcagcagagcgggttagttatcgtacgtattacgtacgagatggaggtgtgatcactctcagtcaggctagtcgcaagcgcctgacctaaagtgatgtgccagcctcagtctcccaaagtgctgggattacaggcatgaaccagcgcacctggccgaacgtttcatctta

SEQ ID NO: 669358 - DNA, 383 bp, Homo sapiens
ttgcaaagcttctaggctgtcacaaatattaagagaagccatgtttatctttgcactttgttttggttgctaagtaaacctagactgagcattcagtcaaccaaagaaatcacatgtaggtgagcatctgcaggttttcctactggtaagacatgatttttttttataactttagaaagatgtgtttacacaaatttagtctacttagtgactatggcagtgttattgttttttgggttttttttgagacggagtctcgctctgtggcccaggctggtgtgcagtggcacgatgtcagctcactgcaacctccgcctcccgggttcaagcgattctcctgttgcagcttcccgagtagctggggttacaggcgcgaaccacca

SEQ ID NO: 669359 - DNA, 165 bp, Homo sapiens
ttacctccgtctgcagtccaggccgagccagaaactcggtgtcacatagagctgacgtgataaatatctttcagcccaggagagaggggtcctgatcattaaccctttcctggtgtctcagacaactcagaatggttgggagggatacgcaagagacggtggtga

SEQ ID NO: 669360 - DNA, 122 bp, Homo sapiens
tgatcgagaatgctaccaatcaatttttacctcttattttagtgagtgcttctggaggagcacgcatgcaagaaggaagtttgagcttgatgcaaatggcaaaaatatcttccgctttatat

SEQ ID NO: 669361 - DNA, 245 bp, Homo sapiens
ctggtcagagaggcggttgatgcacgatctgatctggttctccaccgctgtactgatggcctctacgtctgagcctcccagcaatgggcctatccaacctcgtctactttgggccctcctccagaccttccccttcatcatgctgactcgctaacttcatcctgtcgtgtggactagtggtggtgaatcattacctagcatttcaggtttttgcagaagatattatccgcttcttttttcctttt

SEQ ID NO: 669362 - DNA, 649 bp, Homo sapiens
cgctgggcttgcgtgggtaattacgtgggcgctcggctccgaagtgacacagctcgccacctgaagggtcccttcccaagcccttagggaccgcagaggacttggggaccagcaagcaacccccagggcacgacgaagagctcttgcatgtctgccctgcctcaccactgccccacaccagagcccggatggcccccagcatgcatcaagctggaggcggagcgaggcacgcggagagagggtggcaccaatgggcccagggcggtgcccttccatgcccggggcatgaagacactgctgccatggacagacccgtgccagccgcagcccctaagtcaggctctccctcagttaccagggtctatcgtccagagcccttggaagcctgagccctggccgggcaggatgggagtggagagttaccctgccctgtccccttgcatcccatactaccacttgtccaggagtgcctagtgagggcctcggcagggagttgagacccccagagccacagccactctaccactgccagcactcttcgggacggttacggcggccaggatgactgatagctgcggccgatgagagtgaaggcgctgagcgatgtcaccaagggtgccacgatgccagccaggcgcacggctgagcc

SEQ ID NO: 669363 - DNA, 138 bp, Homo sapiens
gcggtgacgtcgctctgtggcgcccgtgttcgtacgcatcgcccgtggtggcctgtcgacgcgcgcaacccgccactcgtggatgtcctgcgccgggtcgatccgcgcgtcgctccggccttggtggcggttcgcttg

SEQ ID NO: 669364 - DNA, 407 bp, Homo sapiens
acactgcattgtcatccacacacacaccaggactcaacgaaaaatgggactgatgtcatcttgagctcttcattcatctcgactgctgattatatttgcgagtggaggcactgttctctacacgaaacacatgtcactgctaggttgtctacgggataaaatgcatctacactcactttgagagaatgccttttagcttcactgcactatttaaactacattgatcctgctagtgttcctggagaagctagagcctgattgtaggctactactcatcaattaacttctacagtggagactacttctgggactggaatataaaaaagaatcaaaggttctgattttgagctgcaataaagggacaagaccatgctcatagcagtgccaacatctgaagtgtggagcct

SEQ ID NO: 669365 - DNA, 1013 bp, Homo sapiens
ggtgaatttaatggaaaagtgggtaacactacattcatggggagtttttattaaattttataaattttaatagccaattatgtcctaattgtattttggggaatgaacagcagcaaatactgtaaatgtacagttttcttttttttttttttgggttatgtatacaaaagttttaactactgggggggtgttatgaaaatcattatagttgacaaggtgcctatgccattgtttaaattttctttcaagtaatttaacaacagatttgctaatttaaaaaaaaactgaaacaaacaaaatcttaccagcagttgtgtaaaggtctggcaatccacagtgtggcatcctttatccaggtctctctctctccaggtacacttaaaatgcggtgccgagccagggatataaccgtgcagcttaagctgaacaagaaaactccagcctcgcccctctaaaaaaaaaaacaaaactttcatatttttcacacacttagggggctagtggcaagtaaaacatcttcagaggcatatttaacccttcgtgaattaacccattttctagtttaaaacgaacagagacttcccatttgggaaaggtgtcacctgggtgtggacattctgcgtggccggaagttaaggttagaaccattacagaacaggcgttttcagaaaggtcaacacttttgacaacaccttctgtcgtggtgctccggggacaataagtctggaattttttactattgcccagtgttttaacgcgaggctctggacaaagtatgaagtcttccatttcacatcttggggggccccgaattgggcaccattgattaaggctcgtggcctaatgcgggataaggttacgtccaaaataggttagcttctttttgagttatacttagacaaatgccgggttaacattcgtcctctggcacaattgtcactccgggcataacctgggtacattggtagacaatattcaacgggattcaacgaagctatgccgcgtaagattat

SEQ ID NO: 669366 - DNA, 925 bp, Homo sapiens
  misc_feature (20)..(20): n is a, c, g, or t
  misc_feature (264)..(264): n is a, c, g, or t
  misc_feature (447)..(447): n is a, c, g, or t
  misc_feature (518)..(518): n is a, c, g, or t
  misc_feature (650)..(650): n is a, c, g, or t
  misc_feature (663)..(663): n is a, c, g, or t
  misc_feature (714)..(714): n is a, c, g, or t
  misc_feature (799)..(799): n is a, c, g, or t
  misc_feature (831)..(831): n is a, c, g, or t
  misc_feature (844)..(844): n is a, c, g, or t
  misc_feature (859)..(859): n is a, c, g, or t
  misc_feature (910)..(910): n is a, c, g, or t
ccaagatgtgggcgggcctngtctaaacagttgaaggcctccactatgccacccacagtaaccaccctcccacacaggcagggcctccctcctcaggtggcagaaagaagtaaggacactgggggcgggaaaccaactaataaaactgaaagggccaggacagaactgaaagcacccccccagggaggtcaggagcaggagggggtggccacagaagtccaccagcggcccaaggagcccttcccccaaatgtccatgggaacngcgtgcttggcagcaaagaggggctgtggccctccacgctggactggggaggcctggaccctctggccctcctcacacgggaaggagaggtttctccctgaatggagggcagggagggttcgggagggggcgtgggaacccacccctgcggagccttcacagagggggtccttgaccttggcnctaaggaaggagcccgtcccagcagaaactggagtgggagtgggtaaagaccctccgggctcccgagcccnagaggaaggtggtcctgaaaaggttggggagcagagaagaaaggaggttgaggttggggaatccacccctgtcctgggctgggaagcacttgcagaccacagagatttccagtgggaagtgatgtggccccnccctggctatgtncctggctggcccctgcgctgatcagagcaacagaaagtgggccactttggnggaccccctagtccccctagtgacaagagaagagaaggtggtggcaggatggtggtcaggcaggacgtgttaattcttgcccgcnggggccaggttgcgggggagcagcttggtgtngccagaaggcganaaaacggtccctgcnggggagttcagcttcaccttgttcaggatggtcttcttgaaggcggctggngaaaactgcccctgg

SEQ ID NO: 669367 - DNA, 601 bp, Homo sapiens
  misc_feature (54)..(54): n is a, c, g, or t
  misc_feature (153)..(153): n is a, c, g, or t
  misc_feature (208)..(208): n is a, c, g, or t
tactctagacgatcccgtccagggtagatttgcccactgtagattagaagtagnatttagagaaagagaagaaaaagaaaagtcataaaaagtagatataattttttaaagtgaagagtgctctggggtcacacacagctcagtaatcctgangtcagtcactgcattgtgactgatgtaataattcatttatatcttgatgacctcnaattgtcattaaatggttaaattaattttggtatatatcttttaaagtcagaaatacaaaaaaatacacttttcaactatattgttcaaactggttaaaaaacataagaagtgaacccttagctgtctagaaaacctagctacagagaattattccttttcactgggttacaaataaacaagatcctatagttaaaactactggtttcttcccagtatccattccaccattcttctgctattcagaagccatgctcttggtgggactgaccacacctctggctccagacataggctgtacttggcctaagctactcatgataatcacatctgcctgccagagtaactagtccaggaatgagcctgtagccatgccgtacaccaacagctcata

SEQ ID NO: 669368 - DNA, 277 bp, Homo sapiens
  misc_feature (91)..(91): n is a, c, g, or t
cataagctaagtttgtgtcaagatttaagctgattttctcattcttatcaaagtctcacctgggggtagggaggggtaggcctacctcccncctctatctatcattttaggaacagacaggcataaatctgttcatatggtagaacacatgatgttagagtatattttgttgaatgctatggaatattaatataattaattctaaaatatcacctaaaatatgtcaactgaagatctgactgtactaaatatgaaaaataaagcagcacatactttc

SEQ ID NO: 669369 - DNA, 124 bp, Homo sapiens
gtcatgcacctgtagtcctagctactcggggtggtgaggcacaagcattgttgagctgggaggcggaggttgcatgtgagtcacgattatgccactgtactctagcctaggcaataaagcaaga

SEQ ID NO: 669370 - DNA, 578 bp, Homo sapiens
taggcccatttgagtatttggttttcaattagggaaatagtgggtataaggattaggattgttgtgaagtatagtacggatgctactgttgtccaatgatggtaaaagggtagctaacgggttgtccttccgattcagggttacaaaatgaggaggctctgcaggcataggagctcaacataaacgtgactcggctatagcggtggggcgaaagtatcatgcatatgtgttcggtttgggactactactggagcgatggggaatcactgcgcataggcatgcagcgactgacattaggcaactcagggcgacaagggacagccctcccatagccttgtggtatgaggggaacgggacttcgcgcagacaaatggggtgtctacgagggcgcagaaataggagaaactcaatcatactcagcggcctcgacaaatggctgcgcgcgaacgggggcatgactctcacccgccgcggcttgcgccctacgggcaatcaatacaccagcgctgccacgcggctcggccccctaagcacaggcacacaaggaccgcacgcacaatcagcggcaggtcaaaggg

SEQ ID NO: 669371 - DNA, 561 bp, Homo sapiens
  misc_feature (180)..(180): n is a, c, g, or t
aggcggggtataaaactgtaaagcggtgtcggtcgatccgggaatggacagctcgatggtgtgcagaactattatgtgcttttgtactgagagctgtctagtcttgcaactgttaacattatgcagaaaagccccggggccccccgttggatttgcccataaattatttagcaaaagcgntgtaccagtttttccttggaccaggcgaggtggtcatgcctgtaatcccagcactttgggaggccaaggtgggcggatcacttgacgcgataaaagacgttgagaccagcctggctagcatggcgaaacccagtctctactaaaaatacaaaacattagccggggtggaacacttagccgggcgtggtggtgtgtgcttgtaatcccagctactcgggaggctgaggcaggagaatcgcttgaatccgggaggcagaggttgcagtgagccaagatcaggccactgcactccagcctcggggtcaagagcgaaactctgtctcaaacaaacaagaacgacaggaaggcaggaaggagggacggaaggaaggaaagagagaa

SEQ ID NO: 669372 - DNA, 434 bp, Homo sapiens
ctgctggacgcaacgtgtcccatactgggttctctgccctagaatgtattaagcagagtcacgtctcggttacttcaagacacttcttctggctgctctgaagtctcgcatcttatccccatgtttctctcgttccgctcgtacctgattcgagaagtcatcctctccattgtcatgcatcgcaattatccccccagtaaatgtgcctcttcatctgcatctcagccagacccagtcttcggcagggaagtacttgcacactcgtcgtctaccgctacacagtcacgtaagtctaccggctgctttgtctctgacatctcggactgtcctgcgcgcaaacacgtcctcagataagccgaaagagttggaaccctcactcttcctcacggaaacgccagcgttagctcaccgcctccgacacttggcatccagag

SEQ ID NO: 669373 - DNA, 383 bp, Homo sapiens
cggctgcatatagagcgtagtgcatagctgcctacaggactccaggagtgtgactacagagtgagaccttgtaacaaaacaaaacaaaacaaaacaaaataacaatgtaaagagttgtataagggcaactagctgtagcctaatatagggaatttctattgtaatccagactaaaggcagaatgaaacataactagccagtaattgaaaattgatttatttatggatttacagaatttccttatgccatattttcccatttaatgatctccagcattgtttgcacattgttttcattactgcacttagttataattcatcatttataccatccatattctttcttatcttacagattgtgatatctttagtctgaatttaaac

SEQ ID NO: 669374 - DNA, 104 bp, Homo sapiens
cacaagtcattactaagtagcgcaaacgagtttttcatctattagcataaagggcctctctggcagcagcagattaaaacactggcccaacttcattatccata

SEQ ID NO: 669375 - DNA, 149 bp, Homo sapiens
  misc_feature (37)..(37): n is a, c, g, or t
gggcaagccagcccgtgcaacggaaagccaggccaantggcccccggttttcagctgttttgcatcccccgcgcccccccactgagagctgctcctttgggggaatgtttggcaacctttgtgttacagattaaaaattcagcaattca

SEQ ID NO: 669376 - DNA, 1118 bp, Homo sapiens
ccgggtgaggcacgggtgcgcaagcgggagttccggctggagacccgtgctctgggccggcgccttcaccatggcctcggcagagctggactacaccatcgagatcccggatcagccctgctggagccagaagaacagccccagcccaggtgggaaggaggcagaaactcggcagcctgtggtgattctcttgggctggggtggctgcaaggacaagaaccttgccaagtacagtgccatctaccacaaaaggggctgcatcgtaatccgatacacagccccgtggcacatggtcttcttctccgagtcactgggtatcccttcacttcggcagcctgtggtgattctcttgggctggggtggctgcaaggacaagaaccttgccaagtacagtgccatctaccacaaaaggggctgcatcgtaatccgatacacagccccgtggcacatggtcttcttctccgagtcactgggtatcccttcacttcgtgttttggcccagaagctgctcgagctgctctttgattatgagattgagaaggagcccctgctcttccatgtcttcagcaacggtggcgtcatgctgtaccgctacgtgctggagctcctgcagacccgtcgcttctgccgcctgcgtgtggtgggcaccatctttgacagcgctcctggtgacagcaacctggtaggggctctgcgggccctggcagccatcctggagcgccgggccgccatgctgcgcctgttgctgctggtggcctttgccctggtggtcgtcctgttccacgtcctgcttgctcccatcacagccctcttccacacccacttctatgacaggctacaggacgcgggctctcgctggcccgagctctacctctactcgagggctgacgaagtagtcctggccagagacatagaacgcatggtggaggcacgcctggcacgccgggtcctggcgcgttctgtggatttcgtgtcatctgcacacgtcagccacctccgtgactaccctacttactacacaagcctctgtgtcgacttcatgcgcaactgcgtccgctgctgaggccattgctccatctcacctctgctccagaaataaatgcctgacacctccccac

SEQ ID NO: 669377 - DNA, 227 bp, Homo sapiens
tcactataattgcggggataaaatggcacgcattagttcgtctgccgtttggcttgccatcactttgggcgcacccgatccgcaatctcgctaaacctagtgttaccctttggtcccgatatatccattgaagtagtggtgcatagtaagactagcgagtcagactaattgccttgttagctcgcagtacgtcccccaggacataaggtggggaggatcgtcgagaa

SEQ ID NO: 669378 - DNA, 479 bp, Homo sapiens
catagaggacccgcaagtggttgtgggtaggagcaggaagggagagctaagagcacagaccctggagccgggtggcctgggtttgtatcctagctctgtgactttgtttttttttggttgttgttttttgggtttttttttttgaaaaaaagtttccctttttttggcccaggttggattgcaatgatgtaatctcggctcactgcaaccttccacctccggggttacaagtagatctcccgcctaaacctcccgagatgcctggatagacaggtgcccagcaccatgcccggtaaatttggtattataagaagagacggggttcaccatgtgggtcaggctgttctcgaactccctgactctcagtgtgtccacccgcttcggcctcccaaagtggctggaattacaggctgtagagccatggcgcccagccagttcagggatttggtgtcagtagattgtcctctctgggtctaagt

SEQ ID NO: 669379 - DNA, 686 bp, Homo sapiens
  misc_feature (275)..(275): n is a, c, g, or t
  misc_feature (335)..(335): n is a, c, g, or t
atacaagtaaagatgaaaatagagggttaatatagttttaaaaaaaagaagaatgtatgaaagaagaagtagcaagggtgtttaacgattagtatgtgagtgaagtcaagggaaatggtgcatgatgtaatggttatgaaaatatgtatatgaaacaaggacatataagaagtaactgaagtaaggtcacacgtgtggaatggatagtctgtagtttgatggagataatatgtaggaagtgagaaggattttattatttggaagagtacaactgntatggttttaaattaaatatatacattattaacatcctattggtatactggtatgttganttgggaatatgtcaggtttatatggcagttcagaatagtaaatatttggaagtttacaaactcttgcttccttaaaggtcagaacatcaggtcaaagtacaacgtttaatttcagaacttgccttccaatttatgcattttcaatttgctctccccatttgttgagtcagaagaagcagcattgcccagaaacaggtattacgtaacatgcacatactctaaaaagtactcatcccttgttttctgctcatttcttccagcctgaggaacagacgtcagaaaaaaagcaaccacccagacaacttccccttttagctgagctgtcttctgaccaatcaacagggaccagcc

SEQ ID NO: 669380 - DNA, 799 bp, Homo sapiens
gctctgtggcgggcgccgcagttccgcggtccgcgcgccgtcctcccagcgcagacttcaaggggctaccactggacccttcccctgtcttgaaccctgatgccggcaccatgcacggacgccgtgaaggtgaagacgtcaggaaggagcaggcggaggccaaaaggctagagcgagagcagaagctgaagctataccatgtcaggcaccacaggccgtattccacgagagcgccaggcgtggtgagctggatgacgtccgtgctggaactgacaagccagattcgtgggagccaaccctgattgttgccaccctctggaagctgccgacgagaggtgctcctagcagctggagactcagaagtctccgtgaagagttggctgctctggtgaaggcagaactgggcttcctggagagctgctgcgggtgaaccccaagtcttatggtacctggaaccgaccgatgctggctgctaggccgcctgcctgagcccaactggacccggagagctggagcgtcgtgtgcccgtttcctggaggtggatgagcggaactttgcacgtgctgggactatctggcggtggagtggccacagcatggccatgcctgtgccccgctgcaagaagggaagctgagccttgcactgagcagcctcatcacccgaaacttctccgaactgactcttgctgtgcattaccgctccttgtctacttggcccctagcgtgcaccccagccggatcctggaacacagggtgcgcctccctgaaggatgtgctgctcacaggagctggagctggtg

SEQ ID NO: 669381 - DNA, 128 bp, Homo sapiens
ctaaatggctgtcagaggacacttgctctacctgaacaggacaccttgagctgagctgccttcccctcccgggagtggcagagccgggacaacacatggcatggccctctagtgtcctgccaaagagc

SEQ ID NO: 669382 - DNA, 996 bp, Homo sapiens
  misc_feature (264)..(264): n is a, c, g, or t
  misc_feature (267)..(267): n is a, c, g, or t
ggcagagagccatcctctataagcggctgaaagtgcctccgtgcggattaaccaggttcgacccgagtgcccttgtgactcgccaaacatgcgtacttctggcgtgcttaatgctgggccctacaaacgtacatgacctacgagactagaagcgagataataaagataagataagaatataaaatcaaacaacaaaattttcgtgcacgcgctggagaggactcgtcgtagaatggttgtatatgaaccacagcatctccattnggngcgtgaacgaggggccacgccattagtgggtcaagcgtacgcatgggtggcttacacagcggagcatccgcaagggggcaatgaccttgcgtgtcccttcgaagctgaaaagggagtgcgcaggatatgccgctctcctcgataacataatccacgccgggaggtcaatccggaagttgtttctagagaggaacaattgtaatcctgctggatgaggggatagttcctactgagagggggcgctagatgaaccgcaggggggatatatctatctgcgacttagggagttgggctctacacgggtcgagaaacccatggaaatgtaaagattcaatcttctcgacgacccgcaaggccagtgggtgcgaacactgctggaaacgaaccaaaagtttcaacaaaaaattcccaaaaagacttgggttatacttacggccaatttacctatccggtccaagtgcatctgacttcgaacgggtggtttaaggacaatcaccaccaccagagggaatttgcgaggccagccgtggggacaaagccccttaattcccaaggaagcgggacctgggcccttggggcgatacttcttagaagtgcagcaaaacgcttacccacaacggacagaaacccgttgggcacttaattggggttcgccctttacatcgaatcgccacatttattcaacatggaccacgttggccacggtttcattcacacgaaccgccctat

SEQ ID NO: 669383 - DNA, 129 bp, Homo sapiens
  misc_feature (27)..(27): n is a, c, g, or t
tcctctgcacacgcgaattcagctaanttgggttgtgggcagcacgtgctggggaggtggcccctctctgtgctgccccacgttggactctaacagctgcccagcccgcacgtcacataccaaaagctc

SEQ ID NO: 669384 - DNA, 1023 bp, Homo sapiens
tgcggtgtgtgtacacatactcacgtatctgcacatattaatatacaggaagaaaaaagacagacaagatggggcttggtttataaccaccttgccctgtcttccttaactccagaagccagttggtgaggtggtgggggtgcggcatcaggtctgagctcttcctactgtggaatgtgctccagaaggcccttcacaaggagacccctcacactggatccagtcagactgatggagggctttgcccctcattgtgggcttgggcctccatcgggccacgtccaaatgctagtcacttgctactgcttcaggctcacatcgcccaccgacctgatgagcagtgcacagaccccactcttcactgcgggccatgccacaggtttattgtgttcatgcattaagtagataagaacccacatatacgcgacaggaacacgaactcaccggatcatccaagggatggtataaccaaagtgtctgttgaataaatgttcaacggcaaaaaaacatcatcacaagaggacacaaagatgaccaaagatctaaatggaacgcccgcactaggtgtgcaaattgagcccatgtgagaccagaacgcaagcaagccaaggagcccgacaggcacaaagacattcacaatagaaccaaacgtaccctcccttggactctagacaagacaccaacacagcaacaaatagacataaaccctgacggagacaacactacacaagcggcaatcagagagcaccagacacccggacggaaaggggatgagaaagagatgaactaagacggaaaccagacttacgggaatgagtcagaccaaaacactagaaggaatacagaagaacacagaagtaacacgctgagacacaacagagtcaaaggactcacatacaaaacaaaaaacaacgatccagaatccaaaagagaaaaagagaaagaaaaaacacaaagagaaagcaaacaaaaacaacaagacaaaaaagacgcacacaacaacaacaaaacaaataacacaac

SEQ ID NO: 669385 - DNA, 1249 bp, Homo sapiens
ggggaatcggtggctgccctggacccgagggtcagcgcgggcggacggccgggtgtgggtactggccgtggggtggctgtgctggctgccgggactcgctgccctccggacccagcctggacgtcgtgccctgcatggctcaactttccagtgctgtgcaccccgtgcgctgtgtgtgaatgagcttgcgaggctggggagcggtggattcgcgtccggctgtgccactcgggagccgcgatctgggaaaaccgctgccgaacctcaatttcccctgcagtaaaactggagtaggatgagcatcttggcggagactctgttgagataatataataaaacatttggcacataggaggcacttactacgtatctgggtcattgtaagctctccgacaaaatgagcgtgaagatgttatcgattgcatagggtgaggatcacgttgacgcgtgtgcatgctaaagaggtgagatcattagttagcacccaatgcaggctagctgcgtgtaaacgaggatataacgaaaagagcgtggctaaggaacggcagagagagcccaggttccaaattgaacgtttaacacctgtgttgacctattgaggcaactggcatacacctcactgatgacctagcgaatacccttaatactatcacactgaggactacagactagccaaccaactatcgatcaagctacgtacatacacagatacagcgacaacactaccactgagtcacaacggtgctaacacacaggaaaacttgacgaataaacacgaacaaagaacatatggtaccacgatcattaaaaaggttaaccaacaaacgtcacagtaacacacatttacagcagtcgagcatatgcagatataatagacaacccagcgtagcaagactacatcagccatgcacagtctaacactcacattaattacaaatcagatacaaaaaatcatacaacaaatagacatatacaaaacaaacaatcctcatactagttcaatcaaacaaaaaccacacaacacaatattagacaccatagactaatacacacagcacacccaataaaacagacgtagtccataacacaaccacacaacagcatcaaactaaacataacaccatatcaacacaatatcagatatcaacatagaactaccaatacgcactatatcgaccaaaccatcaatactcaccgacaaaattaaacattaaataacatatcatcaactcatacacatctacaagag

SEQ ID NO: 669386 - DNA, 482 bp, Homo sapiens
cccaggtatggtggcacacgtctgtaatcccagctacttgggaggctgcggtgggagaattgcttgaacccaggacggcagaggttgcagtgagccaagatcacgccatgcactccagcctgggtgacagagtgagactccatctcaaacaaaagaatttcgtgcagaacttcaagacactaaggaaacaatctttaaatatttaggactggggccaggcgtggtggctcacacctgtaatcccagcactttgggaggcggagatgggcggatcacgaggtcagaagattgagaccatcctggctaacacggtgaaaccccgtctctactaaaaatacaaaaaattagccgggcgcggtggtgagtgcctgtaatcccagatactcgggaggctgaagcaggagaatcgcttgaacccgggacacagaggttgcagtgagctgagatcacccactgcactctagcctgggccacaagagcaa

SEQ ID NO: 669387 - DNA, 157 bp, Homo sapiens
tgacctgatcaacgaggcgaccggcgagatctacatcgaagccggcgacgaagtctcggccgagaatctcgagaagctcgacaaggccggcatcgaccggatcgagctgctcgacatcgatcacatcgccaccggtccgtggatccgcaacacgctc

SEQ ID NO: 669388 - DNA, 282 bp, Homo sapiens
  misc_feature (128)..(128): n is a, c, g, or t
  misc_feature (137)..(137): n is a, c, g, or t
cgcgtgtgatctagaggatcccttttgcggtgcctttcctcgggggctgcgcaataacgctcttgcggggtcgaacagctgcggtcaccaaagcaggtgctggcctcggacctgagagccatgcaggncccatgtgntctgcaaatgggagcggctgtttttgaacacggggtcattctgcagtcaggacgaaccggtccccgtcgcagacggattgcatgtgccctgggcaaaatcctcaagctcggtggagggacgcgtgcggcggccacggtgcctacg

SEQ ID NO: 669389 - DNA, 875 bp, Homo sapiens
  misc_feature (208)..(208): n is a, c, g, or t
  misc_feature (211)..(211): n is a, c, g, or t
  misc_feature (251)..(251): n is a, c, g, or t
  misc_feature (258)..(258): n is a, c, g, or t
  misc_feature (262)..(262): n is a, c, g, or t
  misc_feature (287)..(287): n is a, c, g, or t
  misc_feature (307)..(307): n is a, c, g, or t
  misc_feature (311)..(311): n is a, c, g, or t
  misc_feature (314)..(314): n is a, c, g, or t
  misc_feature (316)..(316): n is a, c, g, or t
  misc_feature (349)..(349): n is a, c, g, or t
  misc_feature (356)..(356): n is a, c, g, or t
  misc_feature (404)..(404): n is a, c, g, or t
  misc_feature (413)..(413): n is a, c, g, or t
  misc_feature (432)..(432): n is a, c, g, or t
cgagatgctcagttccctcctccttgtggccgttgcctcaggctatggcccaccttcctctcgcccttccagccgcgttgtcaatggtgaggatgcggtcccctacagctggccctggcaggtttccctgcagtatgagaaaagtggaagcttctaccacacgtgtggcggtagcctcatcgcccccgactgggttgtgactgccggncantgtatctcgagctcctggacctaccaggtggtgttgggcngagtacnaccntggtgtgaaggagggccccgagcangtgatccccatcaactctgngganatntntgtgcatccactctggaaccgctcgtgtgtggnctgtggnaatgacatcgccctcatcaagctctcacgcagcgcccagctgggagangcgtccagntcgcctcactccctcccgntggtgacatcgcttcgccaaacgagacatcccgtgctacatcaccggctggggccgtctcgtataccaagcgggccaggtcccagacaagctgcaggaggccctgctgcccagatggtgggactatgaacactgctccaggtggacacatggtggggtacctccggtgaagacaaccattggtgtgtgctggagcgggacatccgaatccgtgctgccaacgggtgactcatggcagagatccccctcgaacatggccccacagcatggattggttggctgacacgggtcccttggtggttaaacccagcatatggaatactgacctattgggcatgcataccaaggcacgcaggaaaggcccaagggagtttcactacgaggttatccgcgctccatcgacctggaattcgaggaagacgattcgtaaggcccactggaacc

SEQ ID NO: 669390 - DNA, 946 bp, Homo sapiens
  misc_feature (279)..(279): n is a, c, g, or t
  misc_feature (282)..(282): n is a, c, g, or t
  misc_feature (322)..(322): n is a, c, g, or t
  misc_feature (329)..(329): n is a, c, g, or t
  misc_feature (333)..(333): n is a, c, g, or t
  misc_feature (358)..(358): n is a, c, g, or t
  misc_feature (378)..(378): n is a, c, g, or t
  misc_feature (382)..(382): n is a, c, g, or t
  misc_feature (385)..(385): n is a, c, g, or t
  misc_feature (387)..(387): n is a, c, g, or t
  misc_feature (420)..(420): n is a, c, g, or t
  misc_feature (427)..(427): n is a, c, g, or t
  misc_feature (475)..(475): n is a, c, g, or t
  misc_feature (484)..(484): n is a, c, g, or t
  misc_feature (503)..(503): n is a, c, g, or t
cttgtggccgttgagatgaggtcttgctatgttgcccaggctggtctcaaactcgtgcgctcaagcgatcctcccgcctcggcctctcaaagcactaggattacagcctcaggctatggcccaccttcctctcgcccttccagccgcgttgtcaatggtgaggatgcggtcccctacagctggccctggcaggtttccctgcagtatgagaaaagtggaagcttctaccacacgtgtggcggtagcctcatcgcccccgactgggttgtgactgccggncantgtatctcgagctcctggacctaccaggtggtgttgggcngagtacnaccntggtgtgaaggagggccccgagcangtgatccccatcaactctgngganatntntgtgcatccactctggaaccgctcgtgtgtggnctgtggnaatgacatcgccctcatcaagctctcacgcagcgcccagctgggagangcgtccagntcgcctcactccctcccgntggtgacatcgcttcgccaaacgagacatcccgtgctacatcaccggctggggccgtctcgtataccaagcgggccaggtcccagacaagctgcaggaggccctgctgcccagatggtgggactatgaacactgctccaggtggacacatggtggggtacctccggtgaagacaaccattggtgtgtgctggagcgggacatccgaatccgtgctgccaacgggtgactcatggcagagatccccctcgaacatggccccacagcatggattggttggctgacacgggtcccttggtggttaaacccagcatatggaatactgacctattgggcatgcataccaaggcacgcaggaaaggcccaagggagtttcactacgaggttatccgcgctccatcgacctggaattcgaggaagacgattcgtaaggcccactggaacc

SEQ ID NO: 669391 - DNA, 1065 bp, Homo sapiens
gtggttgttcctgccggctgtattcgggccttggacttggactgagaagctacggatggagaccatccatggtgaagaagccccgctgatgatacgggccccgtgcacagtgccatttggggcatattgtggccaatgagaaatggtcgcgggtcataggtggctgcaggagatgcaaggtgaaaaattaaggctcattttcgaggatggcttgacacacagacttttatctgtacgaacagatgctgacattctttagtgtcaccgaaggctgattaaggatggcaggaaatggggtacagaaagaggacttgatacgggatatagaaattccaataatcttaaaggaagtagtagtcagatagaaaaaacccggatgagtgaaacagtacttacccagacctacagacagtttactgttgctggagcttggaatggtgctgcttaccagatggccagccagatggacagccatcctgactcgtcatccagattgcgttcaagagcaaacccaaagaagccaagataaagaacccatcttactcgggcaagcacactgggcccctgaatgctgtacttgagaccatatcgcataccattccgaaggcggtgacaaggacagaattccccaagaagatctggaaacacgtcaacaagcatccacctttactaccctcccgagaaacggttataccaaagggcgattcacagtgacaaacctgtggacgttcaaattggatactgccgaaaatggacgagaaaactttgggatagccaaatgttgggtcagggaagcgaaaggcacagatatgaggacaacaaaaggacagggaatcccgaattggccccatttacctctccgaccacgcaagagagccccaaaggcgtggacaaggcgagcattgggagcacaatcaatggagggaccccaagcgtggagcacatcagatacgatacaccagagaagaagagacagcaaacagacaaacagaaggaggagtaacataggcgaaagcacaacgacgctataaaccaagaaaagccaaaaagcaagcgaacaacgga

SEQ ID NO: 669392 - DNA, 681 bp, Homo sapiens
gggcacaagtgctattgcgcgcccgccggtcgccgggccctgtctgcggacgccagccttgcggagtacggtgaaccttctgctcaggcgctccagttcgtgccggagacgcaggcttagcctgctggacaacgggcctgcgtgtgggcctccgatcaggtcctctcagcccacttgcacggctgggagtgtgtggattggatgtgtgggcagccgtgtttggagactggagaaggaatacatggggcgaggctacgttttcgggagcatctggcgtttcaaggggaacaaagaatcggcctggcagtgccctgggagaaggaggtggagagcatgggggcccatctgtaagtgcctacagcacccgggagcacacaggcttactacatcaaggcgctgtccaaggagtctgccgaagtgctgtggcgctcctgggtgacatcgtgcataactgtggtctggacggctcacagattgagtacgtgaccgtgatgtggtcctgcgggagatgctggagaatgatcgctctatgcgagctgtggtctcctactacctgcctgcctcacgcgttccacgggcgcatctctagcccaggctgtggcgcgggcccggtgaccactgtcagggaagctgtgctcggtgcggagcttgcccgggttacctcagccgccctttccatgg

SEQ ID NO: 669393 - DNA, 1005 bp, Homo sapiens
gccacgcgtacgcatctcacttctaggaatactagtatatcgctcacacctcatatcctccctactatgcctagagggaatagtactatcgcgtgctcattatagctagctctcataatgcctcaacaggccactccctcttagccagtattgtgcctatcgccagtagctagtctgttgccgcctgcgaagcacggtgggcctagtccctactagtctcaatctccaacacatatggcctagactacgtacataacctaaacctactccaatgctaaatatctaatcgtcccgactattatattactaccactgacatgactttccacataacacataatttgaatcgccacaaccacccacagcctaattattagcatcataccccctactattttttaacccaaatcatccaacaacctatttatgctgttcccctaactttcctcgcgagccgcctaacaatccccctgcgtaatacgtaacgtacctgatcgttgcataaccctgcacaatcatggcgagccaggggccactgattccagtgaaatcactatcaggagggatgacactagctctctatactaatcgtccgctactgatctccgttagtttttagcatgcactagtcactgcactaatcatattttataatctgctacgaaccatattatccctcctggtattgtccccggagtacgctattcagcaatgaacgactgacgcggcattggtcattttaaaacctggtaggtggccttccttatcatttgataatttaagcagaaacctagggcatacaatttattggcgttccaggcagtattaagttcggcgaattattgcagtacaaactttggtgagagctaaggaccttgacccagcgtgacccgtgtaatgcgactaaacggggatgcacaccgaccggaaaacctgtacagaataacgggcaatgtggagtgctccgcgcactataaccctcttgtcttttcaagaaggagaggt

SEQ ID NO: 669394 - DNA, 341 bp, Homo sapiens
gaattccggctctcaggggaaaaaaagtaaaagcatatactggtgcattcaggacatttcaatccgaacacaaacaaaaatggtatttaaatactttttttgagacggagtttcactcttgttgcccaggctggagtgcagtggtgtcatctcggctcactgcaacctctaactcccaggttcaagcgattctcctgcctcagcctcccaagtagctgggatcacaggcacccgccaccacacctggctaatgtttatacttttattagagaggaggtttcaccatgttggtcatgctggtcccgaactcctgacctcaggcgatccgcccacctcagcct

SEQ ID NO: 669395 - DNA, 687 bp, Homo sapiens
  misc_feature (30)..(30): n is a, c, g, or t
  misc_feature (92)..(92): n is a, c, g, or t
  misc_feature (94)..(94): n is a, c, g, or t
  misc_feature (98)..(98): n is a, c, g, or t
  misc_feature (153)..(153): n is a, c, g, or t
  misc_feature (158)..(158): n is a, c, g, or t
  misc_feature (164)..(164): n is a, c, g, or t
  misc_feature (183)..(184): n is a, c, g, or t
  misc_feature (194)..(194): n is a, c, g, or t
  misc_feature (213)..(214): n is a, c, g, or t
  misc_feature (218)..(218): n is a, c, g, or t
  misc_feature (286)..(286): n is a, c, g, or t
  misc_feature (356)..(356): n is a, c, g, or t
  misc_feature (402)..(402): n is a, c, g, or t
  misc_feature (407)..(407): n is a, c, g, or t
  misc_feature (409)..(409): n is a, c, g, or t
  misc_feature (433)..(433): n is a, c, g, or t
  misc_feature (461)..(461): n is a, c, g, or t
  misc_feature (469)..(469): n is a, c, g, or t
  misc_feature (477)..(477): n is a, c, g, or t
  misc_feature (501)..(501): n is a, c, g, or t
  misc_feature (570)..(570): n is a, c, g, or t
  misc_feature (572)..(572): n is a, c, g, or t
  misc_feature (687)..(687): n is a, c, g, or t
aggttaaatatgagctgaaaagtgtaaaanaggaagacgaacatcactttacaaatcattaaattaaccaaataaacaaacagaacccaaancnccanccccccatgctgagttctctccttgtgcaactctgcaaaatgagaacagaaaatnacgtnggccgncccccccccggcccccccnnggggcggganctgggagccaggaacaggnngganggggctgctggggcatggatgctggctttctgccccgtgtgcctggtggtttctggtacctggtcgtngtacctggtggctctacccaggctgggggttgaggggaggggcccccagaggcccctgccagcctgtggnattcaagcactgccaggacaagccagattggggggtggaaacacangggananggaggtggccaccagtgcccaggntggtacctgccgcagtgccagcctgcanctcttctnatctgaanttgccccaagttcacctgcgtctncctccttttcttcagactgcgccctcccagatcctgaaagcccctgcagcatcaaatggttgattttantntttgtttaaattaaaaaattaaaatatatatacatatatataatgtacacacaggacaataacagagagtgttgaaaagggaggtacaagagcgggccggggaaaagccaggggn

SEQ ID NO: 669396 - DNA, 285 bp, Homo sapiens
ctcccctatataccaatacatataattgttttactgaataaggcaagtatttccccatgttactgagtctttaaataattgttttttatacagctatatgaatcatattctttctttcagaagttatttaaacattcaccaatttggggggatttttcccctactttttgaaaattaagatgctgctgagattattcttatatattaatctttgactatgtgtctggttatatttccttagcttaactctctagaattggacttgctaggtcaaaaggcatgaat

SEQ ID NO: 669397 - DNA, 119 bp, Homo sapiens
tgtggcttactctagagtgatccctatgatatatctccacacagcagagaccaacctgaacccgccttcgcacttgctgaagggaagtcggaactagtctcaggcttacaatatcgaat

SEQ ID NO: 669398 - DNA, 571 bp, Homo sapiens
agtagagatgagcatttcctgttctctctccagagtcactcaggctgggtgaaggtaccagaattgccaggaacataactttaaaggtcaatcacgaattcttgttgtagtcactgttagtaccagttcctggcaaaaactgcctgggaaattctgatgtttcccccctccttggtacccctttaaatccattcagttaatttgaagactcaatataaattcaattcattaaaacatactcgataatttaatgggctgaagactgcacgtggttcttagagcctacagtggctgacagagtatagggtattaacgttaacggatcctgtgatgtggcggtgagctgcagctgtgatccacgaagtctctgaacagggcttagaatctgactgcactttgtatttaacaggagcctacgtgaagaagagagcacacaattttaacagttgattttatattccctgagttattcttcttgcttcaaaaaaactctaggaaatgccatacgctgcaagaacatgaccttcctcagacatctcttctctccctttccaaacacaactaggagtca

SEQ ID NO: 669399 - DNA, 4132 bp, Homo sapiens
  misc_feature (3604)..(3604): n is a, c, g, or t
  misc_feature (3608)..(3608): n is a, c, g, or t
  misc_feature (3613)..(3613): n is a, c, g, or t
  misc_feature (3617)..(3617): n is a, c, g, or t
  misc_feature (3625)..(3625): n is a, c, g, or t
  misc_feature (3636)..(3636): n is a, c, g, or t
  misc_feature (3643)..(3643): n is a, c, g, or t
  misc_feature (3735)..(3735): n is a, c, g, or t
  misc_feature (3757)..(3757): n is a, c, g, or t
  misc_feature (3960)..(3960): n is a, c, g, or t
  misc_feature (3993)..(3993): n is a, c, g, or t
ggacagccgctggactccagtcatatcgccagcatccgcatgggcaccacagtggccaccaacgcactgctggagcggaagggggagcgggtggcgctgctggtgacacgtggcttccgagacctgctgcacattggcacccaagcccgtggggacctctttgacctggccgtgcccatgcctgaggtgctgtatgaagaggtgctggaggtggacgaacgcgtggtgctgcaccgtggagaggcgggcacgggacgcctgtgaaaggccgcacgggggacctgctggaagtgcagcagcctgtggacctgggggccctgcgtgggaagctggaggggctgctatctcgaggcatccgcagcctggctgtggtgctcatgcactcgtacacgtgggcccagcatgagcagcaggtgggtgtgctggcccgggagctgggcttcacgcacgtgtcactgtcctcggaggccatgcccatggtgcgcatcgtccctcgggggcacacggcctgtgccgacgcctacctcacgcccgccatccagcgctacgtgcagggcttctgccgtggcttccagggccaactcaaggatgtgcaggtgttgttcatgcgctccgatggcggcctggcgcccatggacaccttcagcggctccagtgctgtgctctcgggcccggccggcggcgtggtgggctactcagccaccacctaccagcaggagggtggccagcctgtcatcggctttgacatgggaggcacgtccacggatgtgagccgctatgctggggaattcgagcacgtcttcgaggccagcacagctggcgtcaccctccaggccccgcagctggacatcaacaccgtggcagcgggagggggttcccgcctcttcttcaggtctggcctctttgtggttgggcccgagtcagcaggagcccacccaggacccgcctgctaccgcaaaggtaagagtcaggatctggccggcctggccttgccctccgcttgccgccgcaggcccagcccctcctgtcagccctatccctgctgcctactcctgctcccctgcctccagcccccaagccccacaccctgtccacctcccagggggccctgtgacagtgacggatgctaatctggtcctgggtcgcctgctgcctgcctccttcccctgcatttttgggccgggagagaaccaaccactttcccctgaggcctcccgcaaagccctggaggctgtggccactgaggtcaacagcttcctgaccaacgggccctgcccggcctccccgctgagcctggaggaggtggccatggggttcgtgcgcgtggccaacgaggccatgtgccggcccatccgtgcactcacgcaggtacgtccacctctgctctcccgcctgtcctgcccccagcctttgtggagcggtacatgagggagtttggctttgtcatacctgagcggccggtggtcgtggacgatgtgcgagtgcggggcaccggccgcagtggtcttcgcctcgaggatgcccccaaagcccagaccgggcctccccgggtggacaagatgacccagtgctactttgaggggggctaccaggagacccctgtgtacctgctggcagagctgggctatgggcacaagctccatgggccctgcctcatcatcgacagtaacagcaccatcctggtggagccaggttgccaggcagaggtgaccaagacaggggacatctgcatctccgtgggggccgaagtccccggcacagtgggcccccagctggaccctatccagctgtccatcttctcacaccgcttcatgagcattgctgagcagatgggccgcatcctgcagcgcacagccatctccaccaacatcaaggagcgtctggacttctcctgtgccctctttgggcccgatggggggctggtgtccaatgccccccacatccctgtgcacctgggtgccatgcaggagacggtgcagttccagattcagcacctgggggccgatctccaccctggcgacgtgctactgagcaaccatcccagtgccgggggcagccacctgccagacctgactgttatcacaccggtgttttggccgggtcagacgcggcctgtgttctatgtggccagccgagggcaccacgcagacatcgggggcatcacaccaggctccatgcccccccactccaccatgctgcaacaggagggtgccgtctttctgtccttcaaacttgtccaggggggcgtcttccaggaggaggcggtgacggaggccctgcgggcgccaggcaaggtccccaactgcagcggaaccagaaacctgcacgacaacctgtcggacctccgtgcccaggtggcagccaaccagaagggcatccagctggtgggggagctcattgggcagtacggcctggacgtggtgcaggcctacatgggccatattcaggcaaacgctgagctggccgtgcgagacatgttgcgtgcctttggaacctcccggcaggcccggggcctgcccctggaggtgtcctcggaagaccacatggacgacggttcccccatccgcctccgtgtgcagatcagcctgagtcagggcagcgctgtgtttgacttcagcggcactgggccggaggtgtttggtaatctcaacgcaccgcgggccgtaaccctgtccgccctcatctactgcctgcgctgtctggtgggccgcgacatcccactcaaccagggctgcctggcgccagtgcgcgtggtcattccccgaggctccatcctggacccgtcgcccgaggcggcggtggtgggcggcaacgtgctcacgtcgcagcgcgtggtggatgtcatcctgggggcctttggggcctgcgccgcctcccagggctgcatgaacaacgtgaccctgggcaacgcccacatgggctactacgagacggtggcgggcggcgcgggcgcgggtcccagctggcacgggcgcagcggtgtgcacagccacatgaccaacacacgcatcaccgaccctgagatcctggagagccggtacccggtcatcctgcgccgcttcgagctgcggcggggctcggggggcagaggccgcttccgaggcggcgacggcgtcacccgcgagctgctctttcgtgaggaggcgctgctgtcagtgctgaccgagcgccgcgccttccggccatacgggctccacggtgcgcggttccccagccctcgcggccctccccgcccccgcccccacccccgcccctggtctctctggactcctcgcctccctccgcagggggcgagcctggcgcccgcggcctaaacctgctgatccgcaaaaacggccggacggtgaatctgggcggcaagacgtcggtgaccgtgtaccccggggatgtgttctgtctccacacgcccggcggcggtggctatggggacccggaggaccccgccccaccgccggggtcgcccccgcaagcactggcctttcccgagcacggcagcgtctatgagtatcgccgggcccaggaggccgtgtgaggatcccgcaataaagatgccttaagtctcccggttctggggacgcagctacggcgcctagttcgtgctccnagtngtgtntgtngcgccacngcgcgcccctnatctgtncttgccttaggaggacactgagactcggagctgcaggcgcactgcccggtggtccgtgagcccctccagggcggtactgaacgtcacctgcnccacctcctgggggcgggagtnaggttgagggtcgtcccagtgccgcagccagccacccgggaactccgcggtacgtgatgtagtccaggcgccgacctctccagggcttagctcggcggcttctgccgggaaggccggccaggtagaggtggcgccctttctcctgctccagggccctggtaggggggcggtgtcatcaaggccagggcccctccgcgcgcttngggcgggcagtgcctacatccaggtcgcaactnaccgcctcggcatcttgggggaggaggccatggactggtggagcacggaggtctcagcgcggtccccagggcccagggctgcttttggcgcgtgcccagccggcagggatcctggaaacagcggaagagctcgtgctcc

SEQ ID NO: 669400 - DNA, 417 bp, Homo sapiens
gtactcgcactctagttccagcggtagccggcctgcgtgtgtgcgccatctcggtcatcccgacgacaccctgtgctggagtgcagtgcacaatctcgtgctcatcccaccgtcacccgggctgtagtgcagtgccgccatctcggattcatcccaccgtcagccgtgctggagtgcagtggcgccatctcggctcatcccaccctgtcactctggctggagtgcagtggcccaatctcggctcactgcgtcctcaaaattccaggctcaagcccatctcccacctcaggctcccgagcagctgtaaccacagggcgcatgccaccattgcttgctccactttaacatcttctgcagcagcggggtcttggaatggtgccccagggatgatctcaaaccgctttggtccatgccatc

SEQ ID NO: 669401 - DNA, 957 bp, Homo sapiens
  misc_feature (106)..(106): n is a, c, g, or t
  misc_feature (117)..(117): n is a, c, g, or t
  misc_feature (429)..(429): n is a, c, g, or t
  misc_feature (433)..(433): n is a, c, g, or t
  misc_feature (438)..(438): n is a, c, g, or t
  misc_feature (442)..(442): n is a, c, g, or t
  misc_feature (450)..(450): n is a, c, g, or t
  misc_feature (461)..(461): n is a, c, g, or t
  misc_feature (468)..(468): n is a, c, g, or t
  misc_feature (560)..(560): n is a, c, g, or t
  misc_feature (582)..(582): n is a, c, g, or t
  misc_feature (785)..(785): n is a, c, g, or t
  misc_feature (818)..(818): n is a, c, g, or t
ctcccggccccatcccacagagggggaacagttgcagacctgaccagaggccgagtttaatttggccccggaagaaagggggcggtcgggcctccgtggtccatgngggcgggtganggacgctgcccggtggggaggggactgcgcaggtgacagggaggggccacgcctgcactgagcccgcctccccgcccccccccgcgccaacaggatgtgttctgtctccacacgcccggcggcggtggctatggggacccggaggaccccgccccaccgccggggtcgcccccgcaagcactggcctttcccgagcacggcagcgtctatgagtatcgccgggcccaggaggccgtgtgaggatcccgcaataaagatgccttaagtctcccggttctggggacgcagctacggcgcctagttcgtgctccnagtngtgtntgtngcgccacngcgcgcccctnatctgtncttgccttaggaggacactgagactcggagctgcaggcgcactgcccggtggtccgtgagcccctccagggcggtactgaacgtcacctgcnccacctcctgggggcgggagtnaggttgagggtcgtcccagtgccgcagccagccacccgggaactccgcggtacgtgatgtagtccaggcgccgacctctccagggcttagctcggcggcttctgccgggaaggccggccaggtagaggtggcgccctttctcctgctccagggccctggtaggggggcggtgtcatcaaggccagggcccctccgcgcgcttngggcgggcagtgcctacatccaggtcgcaactnaccgcctcggcatcttgggggaggaggccatggactggtggagcacggaggtctcagcgcggtccccagggcccagggctgcttttggcgcgtgcccagccggcagggatcctggaaacagcggaagagctcgtgctcc

SEQ ID NO: 669402 - DNA, 523 bp, Homo sapiens
  misc_feature (65)..(65): n is a, c, g, or t
  misc_feature (90)..(90): n is a, c, g, or t
  misc_feature (105)..(105): n is a, c, g, or t
  misc_feature (429)..(429): n is a, c, g, or t
  misc_feature (437)..(437): n is a, c, g, or t
atgaggcacaggaaccctgctccctgctctacgcgcctgagaccttcgtgcagctggaccagagnctgagccgcctggaggagcagtgtntggatgctctgcagncccagggcttcgccaggtgggcttccagggtgcccctggacagagggcttacgttgtcctcaccacgcccttggtgggtgttcctcctgatgactttccaggtggtcccgggctctgcgagaagcagaacaggtgtccttgccgggcgctgggtggggtggggtcagggcagggggtttggtttgagtgcccccaaccaacctgctgcaggtcccagatcagcactgagagcttcctgcacctgcgctaccagggcacggactgtgctctgatggtgtctgcccaccagcacccagccacagcccgctcgccccgtgcgggggncttcgggnagccttcgtggacaggtacgtgcttcctgactccgagtcctggcaagggccctcccttgtgcctctggggatcctctaagtaccag

SEQ ID NO: 669403 - DNA, 131 bp, Homo sapiens
  misc_feature (1)..(1): n is a, c, g, or t
  misc_feature (63)..(63): n is a, c, g, or t
  misc_feature (88)..(88): n is a, c, g, or t
  misc_feature (98)..(98): n is a, c, g, or t
  misc_feature (113)..(113): n is a, c, g, or t
  misc_feature (121)..(121): n is a, c, g, or t
nagaccagaagctgcaatatacaatgatgaaaatgaaacgaaaaggaagtacccccatcagantctggacacccaggaataaaaaganaaaggactanattggtgaataaatnaaagtgtntggtttgggg

SEQ ID NO: 669404 - DNA, 3901 bp, Homo sapiens
  misc_feature (3373)..(3373): n is a, c, g, or t
  misc_feature (3377)..(3377): n is a, c, g, or t
  misc_feature (3382)..(3382): n is a, c, g, or t
  misc_feature (3386)..(3386): n is a, c, g, or t
  misc_feature (3394)..(3394): n is a, c, g, or t
  misc_feature (3405)..(3405): n is a, c, g, or t
  misc_feature (3412)..(3412): n is a, c, g, or t
  misc_feature (3504)..(3504): n is a, c, g, or t
  misc_feature (3526)..(3526): n is a, c, g, or t
  misc_feature (3729)..(3729): n is a, c, g, or t
  misc_feature (3762)..(3762): n is a, c, g, or t
ggacagccgctggactccagtcatatcgccagcatccgcatgggcaccacagtggccaccaacgcactgctggagcggaagggggagcgggtggcgctgctggtgacacgtggcttccgagacctgctgcacattggcacccaagcccgtggggacctctttgacctggccgtgcccatgcctgaggtgctgtatgaagaggtgctggaggtggacgaacgcgtggtgctgcaccgtggagaggcgggcacgggacgcctgtgaaaggccgcacgggggacctgctggaagtgcagcagcctgtggacctgggggccctgcgtgggaagctggaggggctgctatctcgaggcatccgcagcctggctgtggtgctcatgcactcgtacacgtgggcccagcatgagcagcaggtgggtgtgctggcccgggagctgggcttcacgcacgtgtcactgtcctcggaggccatgcccatggtgcgcatcgtccctcgggggcacacggcctgtgccgacgcctacctcacgcccgccatccagcgctacgtgcagggcttctgccgtggcttccagggccaactcaaggatgtgcaggtgttgttcatgcgctccgatggcggcctggcgcccatggacaccttcagcggctccagtgctgtgctctcgggcccggccggcggcgtggtgggctactcagccaccacctaccagcaggagggtggccagcctgtcatcggctttgacatgggaggcacgtccacggatgtgagccgctatgctggggaattcgagcacgtcttcgaggccagcacagctggcgtcaccctccaggccccgcagctggacatcaacaccgtggcagcgggagggggttcccgcctcttcttcaggtctggcctctttgtggttgggcccgagtcagcaggagcccacccaggacccgcctgctaccgcaaagggggccctgtgacagtgacggatgctaatctggtcctgggtcgcctgctgcctgcctccttcccctgcatttttgggccgggagagaaccaaccactttcccctgaggcctcccgcaaagccctggaggctgtggccactgaggtcaacagcttcctgaccaacgggccctgcccggcctccccgctgagcctggaggaggtggccatggggttcgtgcgcgtggccaacgaggccatgtgccggcccatccgtgcactcacgcaggtacgtccacctctgctctcccgcctgtcctgcccccagcctttgtggagcggtacatgagggagtttggctttgtcatacctgagcggccggtggtcgtggacgatgtgcgagtgcggggcaccggccgcagtggtcttcgcctcgaggatgcccccaaagcccagaccgggcctccccgggtggacaagatgacccagtgctactttgaggggggctaccaggagacccctgtgtacctgctggcagagctgggctatgggcacaagctccatgggccctgcctcatcatcgacagtaacagcaccatcctggtggagccaggttgccaggcagaggtgaccaagacaggggacatctgcatctccgtgggggccgaagtccccggcacagtgggcccccagctggaccctatccagctgtccatcttctcacaccgcttcatgagcattgctgagcagatgggccgcatcctgcagcgcacagccatctccaccaacatcaaggagcgtctggacttctcctgtgccctctttgggcccgatggggggctggtgtccaatgccccccacatccctgtgcacctgggtgccatgcaggagacggtgcagttccagattcagcacctgggggccgatctccaccctggcgacgtgctactgagcaaccatcccagtgccgggggcagccacctgccagacctgactgttatcacaccggtgttttggccgggtcagacgcggcctgtgttctatgtggccagccgagggcaccacgcagacatcgggggcatcacaccaggctccatgcccccccactccaccatgctgcaacaggagggtgccgtctttctgtccttcaaacttgtccaggggggcgtcttccaggaggaggcggtgacggaggccctgcgggcgccaggcaaggtccccaactgcagcggaaccagaaacctgcacgacaacctgtcggacctccgtgcccaggtggcagccaaccagaagggcatccagctggtgggggagctcattgggcagtacggcctggacgtggtgcaggcctacatgggccatattcaggcaaacgctgagctggccgtgcgagacatgttgcgtgcctttggaacctcccggcaggcccggggcctgcccctggaggtgtcctcggaagaccacatggacgacggttcccccatccgcctccgtgtgcagatcagcctgagtcagggcagcgctgtgtttgacttcagcggcactgggccggaggtgtttggtaatctcaacgcaccgcgggccgtaaccctgtccgccctcatctactgcctgcgctgtctggtgggccgcgacatcccactcaaccagggctgcctggcgccagtgcgcgtggtcattccccgaggctccatcctggacccgtcgcccgaggcggcggtggtgggcggcaacgtgctcacgtcgcagcgcgtggtggatgtcatcctgggggcctttggggcctgcgccgcctcccagggctgcatgaacaacgtgaccctgggcaacgcccacatgggctactacgagacggtggcgggcggcgcgggcgcgggtcccagctggcacgggcgcagcggtgtgcacagccacatgaccaacacacgcatcaccgaccctgagatcctggagagccggtacccggtcatcctgcgccgcttcgagctgcggcggggctcggggggcagaggccgcttccgaggcggcgacggcgtcacccgcgagctgctctttcgtgaggaggcgctgctgtcagtgctgaccgagcgccgcgccttccggccatacgggctccacgggggcgagcctggcgcccgcggcctaaacctgctgatccgcaaaaacggccggacggtgaatctgggcggcaagacgtcggtgaccgtgtaccccggggatgtgttctgtctccacacgcccggcggcggtggctatggggacccggaggaccccgccccaccgccggggtcgcccccgcaagcactggcctttcccgagcacggcagcgtctatgagtatcgccgggcccaggaggccgtgtgaggatcccgcaataaagatgccttaagtctcccggttctggggacgcagctacggcgcctagttcgtgctccnagtngtgtntgtngcgccacngcgcgcccctnatctgtncttgccttaggaggacactgagactcggagctgcaggcgcactgcccggtggtccgtgagcccctccagggcggtactgaacgtcacctgcnccacctcctgggggcgggagtnaggttgagggtcgtcccagtgccgcagccagccacccgggaactccgcggtacgtgatgtagtccaggcgccgacctctccagggcttagctcggcggcttctgccgggaaggccggccaggtagaggtggcgccctttctcctgctccagggccctggtaggggggcggtgtcatcaaggccagggcccctccgcgcgcttngggcgggcagtgcctacatccaggtcgcaactnaccgcctcggcatcttgggggaggaggccatggactggtggagcacggaggtctcagcgcggtccccagggcccagggctgcttttggcgcgtgcccagccggcagggatcctggaaacagcggaagagctcgtgctcc

SEQ ID NO: 669405 - DNA, 2880 bp, Homo sapiens
  misc_feature (65)..(65): n is a, c, g, or t
  misc_feature (90)..(90): n is a, c, g, or t
  misc_feature (105)..(105): n is a, c, g, or t
  misc_feature (233)..(233): n is a, c, g, or t
  misc_feature (241)..(241): n is a, c, g, or t
  misc_feature (2352)..(2352): n is a, c, g, or t
  misc_feature (2356)..(2356): n is a, c, g, or t
  misc_feature (2361)..(2361): n is a, c, g, or t
  misc_feature (2365)..(2365): n is a, c, g, or t
  misc_feature (2373)..(2373): n is a, c, g, or t
  misc_feature (2384)..(2384): n is a, c, g, or t
  misc_feature (2391)..(2391): n is a, c, g, or t
  misc_feature (2483)..(2483): n is a, c, g, or t
  misc_feature (2505)..(2505): n is a, c, g, or t
  misc_feature (2708)..(2708): n is a, c, g, or t
  misc_feature (2741)..(2741): n is a, c, g, or t
atgaggcacaggaaccctgctccctgctctacgcgcctgagaccttcgtgcagctggaccagagnctgagccgcctggaggagcagtgtntggatgctctgcagncccagggcttccaggtcccagatcagcactgagagcttcctgcacctgcgctaccagggcacggactgtgctctgatggtgtctgcccaccagcacccagccacagcccgctcgccccgtgcgggggncttcgggncagcctttgtggagcggtacatgagggagtttggctttgtcatacctgagcggccggtggtcgtggacgatgtgcgagtgcggggcaccggccgcagtggtcttcgcctcgaggatgcccccaaagcccagaccgggcctccccgggtggacaagatgacccagtgctactttgaggggggctaccaggagacccctgtgtacctgctggcagagctgggctatgggcacaagctccatgggccctgcctcatcatcgacagtaacagcaccatcctggtggagccaggttgccaggcagaggtgaccaagacaggggacatctgcatctccgtgggggccgaagtccccggcacagtgggcccccagctggaccctatccagctgtccatcttctcacaccgcttcatgagcattgctgagcagatgggccgcatcctgcagcgcacagccatctccaccaacatcaaggagcgtctggacttctcctgtgccctctttgggcccgatggggggctggtgtccaatgccccccacatccctgtgcacctgggtgccatgcaggagacggtgcagttccagattcagcacctgggggccgatctccaccctggcgacgtgctactgagcaaccatcccagtgccgggggcagccacctgccagacctgactgttatcacaccggtgttttggccgggtcagacgcggcctgtgttctatgtggccagccgagggcaccacgcagacatcgggggcatcacaccaggctccatgcccccccactccaccatgctgcaacaggagggtgccgtctttctgtccttcaaacttgtccaggggggcgtcttccaggaggaggcggtgacggaggccctgcgggcgccaggcaaggtccccaactgcagcggaaccagaaacctgcacgacaacctgtcggacctccgtgcccaggtggcagccaaccagaagggcatccagctggtgggggagctcattgggcagtacggcctggacgtggtgcaggcctacatgggccatattcaggcaaacgctgagctggccgtgcgagacatgttgcgtgcctttggaacctcccggcaggcccggggcctgcccctggaggtgtcctcggaagaccacatggacgacggttcccccatccgcctccgtgtgcagatcagcctgagtcagggcagcgctgtgtttgacttcagcggcactgggccggaggtgtttggtaatctcaacgcaccgcgggccgtaaccctgtccgccctcatctactgcctgcgctgtctggtgggccgcgacatcccactcaaccagggctgcctggcgccagtgcgcgtggtcattccccgaggctccatcctggacccgtcgcccgaggcggcggtggtgggcggcaacgtgctcacgtcgcagcgcgtggtggatgtcatcctgggggcctttggggcctgcgccgcctcccagggctgcatgaacaacgtgaccctgggcaacgcccacatgggctactacgagacggtggcgggcggcgcgggcgcgggtcccagctggcacgggcgcagcggtgtgcacagccacatgaccaacacacgcatcaccgaccctgagatcctggagagccggtacccggtcatcctgcgccgcttcgagctgcggcggggctcggggggcagaggccgcttccgaggcggcgacggcgtcacccgcgagctgctctttcgtgaggaggcgctgctgtcagtgctgaccgagcgccgcgccttccggccatacgggctccacgggggcgagcctggcgcccgcggcctaaacctgctgatccgcaaaaacggccggacggtgaatctgggcggcaagacgtcggtgaccgtgtaccccggggatgtgttctgtctccacacgcccggcggcggtggctatggggacccggaggaccccgccccaccgccggggtcgcccccgcaagcactggcctttcccgagcacggcagcgtctatgagtatcgccgggcccaggaggccgtgtgaggatcccgcaataaagatgccttaagtctcccggttctggggacgcagctacggcgcctagttcgtgctccnagtngtgtntgtngcgccacngcgcgcccctnatctgtncttgccttaggaggacactgagactcggagctgcaggcgcactgcccggtggtccgtgagcccctccagggcggtactgaacgtcacctgcnccacctcctgggggcgggagtnaggttgagggtcgtcccagtgccgcagccagccacccgggaactccgcggtacgtgatgtagtccaggcgccgacctctccagggcttagctcggcggcttctgccgggaaggccggccaggtagaggtggcgccctttctcctgctccagggccctggtaggggggcggtgtcatcaaggccagggcccctccgcgcgcttngggcgggcagtgcctacatccaggtcgcaactnaccgcctcggcatcttgggggaggaggccatggactggtggagcacggaggtctcagcgcggtccccagggcccagggctgcttttggcgcgtgcccagccggcagggatcctggaaacagcggaagagctcgtgctcc

SEQ ID NO: 669406 - DNA, 217 bp, Homo sapiens
gtgtgaggtactctagagatccctgtggctactgctgagactgggggtaaccagtcccgaaggcactactggccagtctacaaccagtattctcagagataccatcagagaacaaacactaatgttaattgcccaacttgagtgcttcatgccgtttagaatgtacatggctgacagcagaagattcccgcagaggggtaccgacgctcgacattcg

SEQ ID NO: 669407 - DNA, 3840 bp, Homo sapiens
  misc_feature (3312)..(3312): n is a, c, g, or t
  misc_feature (3316)..(3316): n is a, c, g, or t
  misc_feature (3321)..(3321): n is a, c, g, or t
  misc_feature (3325)..(3325): n is a, c, g, or t
  misc_feature (3333)..(3333): n is a, c, g, or t
  misc_feature (3344)..(3344): n is a, c, g, or t
  misc_feature (3351)..(3351): n is a, c, g, or t
  misc_feature (3443)..(3443): n is a, c, g, or t
  misc_feature (3465)..(3465): n is a, c, g, or t
  misc_feature (3668)..(3668): n is a, c, g, or t
  misc_feature (3701)..(3701): n is a, c, g, or t
ggacagccgctggactccagtcatatcgccagcatccgcatgggcaccacagtggccaccaacgcactgctggagcggaagggggagcgggtggcgctgctggtgacacgtggcttccgagacctgctgcacattggcacccaagcccgtggggacctctttgacctggccgtgcccatgcctgaggtgctgtatgaagaggtgctggaggtggacgaacgcgtggtgctgcaccgtggagaggcgggcacgggacgcctgtgaaaggccgcacgggggacctgctggaagtgcagcagcctgtggacctgggggccctgcgtgggaagctggaggggctgctatctcgaggcatccgcagcctggctgtggtgctcatgcactcgtacacgtgggcccagcatgagcagcaggtgggtgtgctggcccgggagctgggcttcacgcacgtgtcactgtcctcggaggccatgcccatggtgcgcatcgtccctcgggggcacacggcctgtgccgacgcctacctcacgcccgccatccagcgctacgtgcagggcttctgccgtggcttccagggccaactcaaggatgtgcaggtgttgttcatgcgctccgatggcggcctggcgcccatggacaccttcagcggctccagtgctgtgctctcgggcccggccggcggcgtggtgggctactcagccaccacctaccagcaggagggtggccagcctgtcatcggctttgacatgggaggcacgtccacggatgtgagccgctatgctggggaattcgagcacgtcttcgaggccagcacagctggcgtcaccctccaggccccgcagctggacatcaacaccgtggcagcgggagggggttcccgcctcttcttcaggtctggcctctttgtggttgggcccgagtcagcaggagcccacccaggacccgcctgctaccgcaaagggggccctgtgacagtgacggatgctaatctggtcctgggtcgcctgctgcctgcctccttcccctgcatttttgggccgggagagaaccaaccactttcccctgaggcctcccgcaaagccctggaggctgtggccactgaggtcaacagcttcctgaccaacgggccctgcccggcctccccgctgagcctggaggaggtggccatggggttcgtgcgcgtggccaacgaggccatgtgccggcccatccgtgcactcacgcaggtacgtccacctctgctctcccgcctgtcctgcccccagcctttgtggagcggtacatgagggagtttggctttgtcatacctgagcggccggtggtcgtggacgatgtgcgagtgcggggcaccggccgcagtggtcttcgcctcgaggatgcccccaaagcccagaccgggcctccccgggtggacaagatgacccagtgctactttgaggggggctaccaggagacccctgtgtacctgctggcagagctgggctatgggcacaagctccatgggccctgcctcatcatcgacagtaacagcaccatcctggtggagccaggttgccaggcagaggtgaccaagacaggggacatctgcatctccgtgggggccgaagtccccggcacagtgggcccccagctggaccctatccagctgtccatcttctcacaccgcttcatgagcattgctgagcagatgggccgcatcctgcagcgcacagccatctccaccaacatcaaggagcgtctggacttctcctgtgccctctttgggcccgatggggggctggtgtccaatgccccccacatccctgtgcacctgggtgccatgcaggagacggtgcagttccagattcagcacctgggggccgatctccaccctggcgacgtgctactgagcaaccatcccagtgccgggggcagccacctgccagacctgactgttatcacaccggtgttttggccgggtcagacgcggcctgtgttctatgtggccagccgagggcaccacgcagacatcgggggcatcacaccaggctccatgcccccccactccaccatgctgcaacaggagggtgccgtctttctgtccttcaaacttgtccaggggggcgtcttccaggaggaggcggtgacggaggccctgcgggcgccaggcaaggtccccaactgcagcggaaccagaaacctgcacgacaacctgtcggacctccgtgcccaggtggcagccaaccagaagggcatccagctggtgggggagctcattgggcagtacggcctggacgtggtgcaggcctacatgggccatattcaggcaaacgctgagctggccgtgcgagacatgttgcgtgcctttggaacctcccggcaggcccggggcctgcccctggaggtgtcctcggaagaccacatggacgacggttcccccatccgcctccgtgtgcagatcagcctgagtcagggcagcgctgtgtttgacttcagcggcactgggccggaggtgtttggtaatctcaacgcaccgcgggccgtaaccctgtccgccctcatctactgcctgcgctgtctggtgggccgcgacatcccactcaaccagggctgcctggcgccagtgcgcgtggtcattccccgaggctccatcctggacccgtcgcccgaggcggcggtggtgggcggcaacgtgctcacgtcgcagcgcgtggtggatgtcatcctgggggcctttggggcctgcgccgcctcccagggctgcatgaacaacgtgaccctgggcaacgcccacatgggctactacgagacggtggcgggcggcgcgggcgcgggtcccagctggcacgggcgcagcggtgtgcacagccacatgaccaacacacgcatcaccgaccctgagatcctggagagccggtacccggcgacggcgtcacccgcgagctgctctttcgtgaggaggcgctgctgtcagtgctgaccgagcgccgcgccttccggccatacgggctccacgggggcgagcctggcgcccgcggcctaaacctgctgatccgcaaaaacggccggacggtgaatctgggcggcaagacgtcggtgaccgtgtaccccggggatgtgttctgtctccacacgcccggcggcggtggctatggggacccggaggaccccgccccaccgccggggtcgcccccgcaagcactggcctttcccgagcacggcagcgtctatgagtatcgccgggcccaggaggccgtgtgaggatcccgcaataaagatgccttaagtctcccggttctggggacgcagctacggcgcctagttcgtgctccnagtngtgtntgtngcgccacngcgcgcccctnatctgtncttgccttaggaggacactgagactcggagctgcaggcgcactgcccggtggtccgtgagcccctccagggcggtactgaacgtcacctgcnccacctcctgggggcgggagtnaggttgagggtcgtcccagtgccgcagccagccacccgggaactccgcggtacgtgatgtagtccaggcgccgacctctccagggcttagctcggcggcttctgccgggaaggccggccaggtagaggtggcgccctttctcctgctccagggccctggtaggggggcggtgtcatcaaggccagggcccctccgcgcgcttngggcgggcagtgcctacatccaggtcgcaactnaccgcctcggcatcttgggggaggaggccatggactggtggagcacggaggtctcagcgcggtccccagggcccagggctgcttttggcgcgtgcccagccggcagggatcctggaaacagcggaagagctcgtgctcc

SEQ ID NO: 669408 - DNA, 2503 bp, Homo sapiens
ggacagccgctggactccagtcatatcgccagcatccgcatgggcaccacagtggccaccaacgcactgctggagcggaagggggagcgggtggcgctgctggtgacacgtggcttccgagacctgctgcacattggcacccaagcccgtggggacctctttgacctggccgtgcccatgcctgaggtgctgtatgaagaggtgctggaggtggacgaacgcgtggtgctgcaccgtggagaggcgggcacgggacgcctgtgaaaggccgcacgggggacctgctggaagtgcagcagcctgtggacctgggggccctgcgtgggaagctggaggggctgctatctcgaggcatccgcagcctggctgtggtgctcatgcactcgtacacgtgggcccagcatgagcagcaggtgggtgtgctggcccgggagctgggcttcacgcacgtgtcactgtcctcggaggccatgcccatggtgcgcatcgtccctcgggggcacacggcctgtgccgacgcctacctcacgcccgccatccagcgctacgtgcagggcttctgccgtggcttccagggccaactcaaggatgtgcaggtgttgttcatgcgctccgatggcggcctggcgcccatggacaccttcagcggctccagtgctgtgctctcgggcccggccggcggcgtggtgggctactcagccaccacctaccagcaggagggtggccagcctgtcatcggctttgacatgggaggcacgtccacggatgtgagccgctatgctggggaattcgagcacgtcttcgaggccagcacagctggcgtcaccctccaggccccgcagctggacatcaacaccgtggcagcgggagggggttcccgcctcttcttcaggtctggcctctttgtggttgggcccgagtcagcaggagcccacccaggacccgcctgctaccgcaaagggggccctgtgacagtgacggatgctaatctggtcctgggtcgcctgctgcctgcctccttcccctgcatttttgggccgggagagaaccaaccactttcccctgaggcctcccgcaaagccctggaggctgtggccactgaggtcaacagcttcctgaccaacgggccctgcccggcctccccgctgagcctggaggaggtggccatggggttcgtgcgcgtggccaacgaggccatgtgccggcccatccgtgcactcacgcaggtacgtccacctctgctctcccgcctgtcctgcccccagcctttgtggagcggtacatgagggagtttggctttgtcatacctgagcggccggtggtcgtggacgatgtgcgagtgcggggcaccggccgcagtggtcttcgcctcgaggatgcccccaaagcccagaccgggcctccccgggtggacaagatgacccagtgctactttgaggggggctaccaggagacccctgtgtacctgctggcagagctgggctatgggcacaagctccatgggccctgcctcatcatcgacagtaacagcaccatcctggtggagccaggttgccaggcagaggtgaccaagacaggggacatctgcatctccgtgggggccgaagtccccggcacagtgggcccccagctggaccctatccagctgtccatcttctcacaccgcttcatgagcattgctgagcagatgggccgcatcctgcagcgcacagccatctccaccaacatcaaggagcgtctggacttctcctgtgccctctttgggcccgatggggggctggtgtccaatgccccccacatccctgtgcacctgggtgccatgcaggagacggtgcagttccagattcagcacctgggggccgatctccaccctggcgacgtgctactgagcaaccatcccagtgccgggggcagccacctgccagacctgactgttatcacaccggtgttttggccgggtcagacgcggcctgtgttctatgtggccagccgagggcaccacgcagacatcgggggcatcacaccaggctccatgcccccccactccaccatgctgcaacaggagggtgccgtctttctgtccttcaaacttgtccaggggggcgtcttccaggaggaggcggtgacggaggccctgcgggcgccaggcaaggtccccaactgcagcggaaccagaaacctgcacgacaacctgtcggacctccgtgcccaggtggcagccaaccagaagggcatccagctggtgggggagctcattgggcagtacggcctggacgtggtgcaggcctacatgggccatattcaggcaaacgctgagctggccgtgcgagacatgttgcgtgcctttggaacctcccggcaggcccggggcctgcccctggaggtgtcctcggaagaccacatggacgacggttcccccatccgcctccgtgtgcagatcagcctgagtcaggtgggccgtggggagagtgcctctaggcggcaggggcacggtgcggccgct

SEQ ID NO: 669409 - DNA, 857 bp, Homo sapiens
cggaagccctcactgcgctgacggtggctctcggaactcgaatgatggacccagcattcggggggcatcatccacgttggacccacacttcgtgcattgtactgcaccagtcaaactctgtttcgctacaaggagcctaggtgtagtctacattgggtgtcctatagaactaccctcctggacgaatacactcagacgcctcactaggaaatctgccactttctgtcttacggacagcagctcccgagtcgaggcactatgagagacgtactgacgctaaccctaaagcaaggagccagtaggctctcatcaatagagcaggaagttgttcgccctgactcaggagcctgccagatgcaactacgggtctcacgctggaaacatgatcacactgcatcaaactctggtcacgtggccctccgtagcacttacttgggatacctctctgttccgcccaagatcccctgtgctattcaggaaagcatgtcccatcagaaacactctcggggggcaatggtagcactcaccctgaaactgatgtatgctaaagccacagagatagagctgatggagtcgtgtgctccccagcaaggagcacccagggatcatctttactacggtatcactgtgtcctcttggaacactaattcgtctgtagcatactggtctgcacggatctactgaggaggaattggacagtggtctcttattgagtgtcagagggaaccttgagacgccagcttaaattggctcttgcagcagaggattatcagaaatagtttcgatgagctaagtacacattctaaagatgcaaaggatcctcctggcggcagtagccttgacaagggcaatacccc

SEQ ID NO: 669410 - DNA, 857 bp, Homo sapiens
ggcgaaacaagactagaaataattgctgagggcttatagggaagtgatttaagagagaaaaagacaaacaacaacaaaaaaaactcttcggaataaagagggctgtaaattttgaattccagtgtcgagatccgtttcaagcactgagaaattctttctcaggtttcttgtttttgggggagacaggggtctgtgctctgtcaccgcagactggaacacagtggcacgatcttggctcactgcaacctctgcgggctcacgcaatcctcctgccacagcttcccaagtagctgggaccacaggcgtgagccagccacgtgctggccagattttcgtatttcagttattgtattcggtagcagacggggtctcggccatgttgcccaggctggtttaaaacgtcctgagcttcaagcagttctccgcaccggggcctcccaaaattgctaggattcacagacgttgagccatatatgcctgtggccaggttcctggtgggagacccagaatggtggacaagaccattggtttacttcgggaatcaccagaattgggcagctaactggtgccgaaagtggacgggctgccggggcccatcagaatgccctcgggcccagggcacactcagcagaagggcaccaaacccaggtgcgggtctcatcaagaaagaggggaaggcccttcccgagttacgtgcatgtctgagggggctccgcactgggctgactgattttatagtcatggctctctagagaagcccaggcttggctccttatagcgaaaactttctgacctctgctgggcaattttatcctttactcctacttctggccaagagacctgaatgctgcataagg

SEQ ID NO: 669411 - DNA, 137 bp, Homo sapiens
gtctagaggatccggggtcctgagatatcaacattaatatagttctcagtgaaacgaaaaaagtggatggaaataagccctaattaaaatttagcgtatactaagcttttaaaatccattatagagaagtattattt

SEQ ID NO: 669412 - DNA, 301 bp, Homo sapiens
  misc_feature (38)..(38): n is a, c, g, or t
  misc_feature (54)..(54): n is a, c, g, or t
  misc_feature (191)..(191): n is a, c, g, or t
  misc_feature (296)..(297): n is a, c, g, or t
aagtaggaccctagtatcaagtatttaaaaaatacctntcctgccgggcattgngtgtcacgcctgtattcccagcactttgggaggccgaggcgggcggatcacaaggtcaggagttcgagaccagcctggccaacacagcgcaacctcatctctattaaaattataataggccaggcgcggtggctcanacctgtaatcccagcactttgggaggccaaggtgggcggatcatgaggtcaggagatcgagaccatcctggctaacacggtgaaaccccatctctactaaaactnnccaa

SEQ ID NO: 669413 - DNA, 134 bp, Homo sapiens
gtatccccctcttgaagcgtgctgacaggtcccccctagcaccattccacaattctgtgtacacccacttggctgtcgcctcctagctgatgccactcccatcacatccccctagatctacagctctccccatg

SEQ ID NO: 669414 - DNA, 422 bp, Homo sapiens
tcaggctccccaacttgtcccccagcctccacaagagaccctgctcattcatgtatgggctgaggtcctttgaaaattggacctcaggccaggtcactccctgaaacctgaaactcttcagtggcatctcactggatatatgggaatgccacagaataaacctggctgcatctatcaagtttcctaacagcagagaagacatctatcttttcactgctgtgtccctggtacgtagaagagggcctggcaaacaggagaaactccatgcttgaggaaaggccatctgaggacatggagagaagacagccagccttttgcaacccaaagagagaagcctcaccagaaccgagtctgcctgtgccttgatcttagactttctagtctccaaaactgtgataaataaatgtctactgtccaaggca

SEQ ID NO: 669415 - DNA, 421 bp, Homo sapiens
tgatttttctttctcatgggaagcagatagaattaacagactgtggctgctgtttttaaacaaggtatgccagtatctgtatcccttctgagatgcgttgtgtttcttcagtgagggagaacatgtaattaatccctgttgaaagcccttttatttagaaatcatgcttgcttttactctttattatttggatatatatctatgtctggaaatagactgagaggaaacttgcctgttgatatcttaataaaagtaattaaaacattcccagggccaggactaggatgaggtgagtgaggcacttgcttcagctgtaaaatttaaggctacgccaaaaaactcagtaatccaaataaatattttcatgtgatattaaagaaagttaaatctaatgccaagcaatctataatcaaatatcaaa

SEQ ID NO: 669416 - DNA, 290 bp, Homo sapiens
cagctgactcctgaggataaaaactcggcgaggtgccacgttaaagtggttaaagtcctatctggaagtggaaaaaatcagggtgaccagaaaataatgaatacatgattgatatggggtggctgcgtctcctcacccaaaatctcatttttaattggaatccccataagcctcaagggcaggaccaagtagatgtaattggatcatgggggcagtttcccccatgctgtccttatgatagtgagtctcaagagatctgatggttttttaagcatgtggcatttcccctg

SEQ ID NO: 669417 - DNA, 342 bp, Homo sapiens
cgggttggcacccaggggttggctatcccatttggggccgatgagaaagatgccaagatccccaatgatgggcagggtcgctttgggggcaatattagtgggcggcccggtgggaaagacctcccctcctcccttggaccggcccgggggaagactcgccccttttgggatggggccggctggccctccggagggggcccccggggggggggggaagggggaaattttggcccccccccctggcggcccccccccccggggttcccttttttgggtcccccccccccctggacccccctttttggtttggcaggattttttttttcccaaactaaaaatgga

SEQ ID NO: 669418 - DNA, 123 bp, Homo sapiens
ggcaacaggtcaaaaagagcctttattacttttgatgattgccacttatgctttcctgccagatgcctttggagcagagtagctttgtgggctgaagctttttgccccttctgtcgtcttctc

SEQ ID NO: 669419 - DNA, 1121 bp, Homo sapiens
cgctgcctgggagactgctgcctacgtgcccggactgcgcccgcgcccccgcgtgctggagggtgatatctagaaagtacaatgaagacatacatccggaatatatatgccacggcacctacgacccagcgtacggtggacagcataggaccgtagcataccctaccgtggcctaggtgaacggcctaggccctagcagctacaggaacaccagccggtcggaggaggaccggaacagggacctaggccactagccctaggagcagctagctgcaggcctaccctagagacataggagaaggagaagaccatgctggtgctaggccctgctgctaggccaacgaaggtggccagtcacacgcctgtcctatgctccgtgatgtactttcacacaacagtgaatttacattaaccagaacctacgcacctacgtgaggagcttagccagaactggcgatggactgcacacggacagctccagcacactgtagactggctcaaagctcgatgtaggtacacatgctagtatagctagcttccagtgtagacggagccctggcatagtcaacaagcgtaacctaggacacgcaccgcgcctggcaacactacctgtgaccacacaattctaaacgaccactgtatcacacttactactcccactatcacccactatctacacttaattacaccttgacacttgcaccctcgtccactttatcaccgctacttccgcaattgcgccttccatatacatcccacccaccttgcaatactgaaccatcactgctaaacttcctacaccactgtgagcccctaaattaccacatgagccaggttcccaaactaaacacacataactgggacaacgcaggtacacagggtacagtatcaaccgaacagtatacacagtgtatatgggtcaacagataacgaccataacgtgagactatcacgagcataacagcacgaagggcaatggctaatcaagctcgcgccgaacctctgctatgaaggaaactatgcaagtaccacaagaaacatcaacccccttccacttcaacacttcagtcacactaggaccataatgaaaacaactagcagccccacttcctggtagaccg

SEQ ID NO: 669420 - DNA, 848 bp, Homo sapiens
gcgaagaaaactacggctaggtacgaggctgggttttaaattcggccgagccggctgctgcggacctcctcgtgacccggacccagccccatgcccggccccagccagccccgacggcgccactgcggggtccgatgcggggctctgtggctgctcctggctctgcgcaccgtgctcggtggcatggaaggtgctggctggtgcgccaccttcggacccagtagcagcacaaatgtgctggctaaacaatgagcgaggccttccgtggaacgtcgggtcaatccatgcccttccctcctctgcagtccgggtgctacctccgcccgtaccacttgctgtccatgcctcagtctgcgtgcacccaagcgacggctagacggccgatcaacttctttggatcgtgaagcgacgccaatcctaatatatgcgccgtggaaaggcgacgctacggtgcctttggaacgccagttgtgcgttggggctgaatgttgtcactgaatctaagacgcgctcggataccctctcctaaattaccgccggcttgggctcgttcgtgtcccatggcgaaagtgcatgcctccccaattgatcgacccaattttcgactaccccctcgtagaagggcgggtttaaaaaagctccccgttgccgcaagcatcagggggcccagtctcaatttgcttcccatcaaggattgcggggcttggtgaacccttgtttgccccctgtttggcgggccttacccccttgtggtagcgaaggaatgcctgtgccccgcgacttcgtccgggctgaatgtgcgcgcttcgtcggaacttgtacctccctagaaggcgttgttccacagc

SEQ ID NO: 669421 - DNA, 132 bp, Homo sapiens
ttgctgacaggtcactctagaggactccccaatgatagtatgactgggtagtattggttatggttccttgtccgcgcgagtatattgttggaagaggatagctatcagaaggattatggatgcggtggcttg

SEQ ID NO: 669422 - DNA, 507 bp, Homo sapiens
tgcttttcaccatttcttaaggaaatcatgttctcttaaaaggttggttctaagaattccaagacggaaacataatggaatggtagaagactgtaaataaatgacaaaaatttgaatctgtgatctataaaatattatcaaggagattatagatctctaagaggttacgtgagttgctggaagtaaaaaggaaacgtgttatttctcatttggactttgtctaaaatattatgtttaaatgaaacttctgctttagtgctatattcactgtttattctcttgaactttcctgagtaattatgataaataggcctaaagaaagtgcgtgttcttgtttgaattcacagtgatatatgttggtgtcttaatctctttactttcagtcagaattttaaaaaactgatattttgattgtttttataaaactgtatttcaaattgttttatacatttatgctactgtctcctctacgtaaataataaacaaaaagttgcccttaaaaaaaaa

SEQ ID NO: 669423 - DNA, 265 bp, Homo sapiens
  misc_feature (149)..(149): n is a, c, g, or t
ggatgctcgggtccagcaccgtcaacccatcgagaatcaggtgatgggcagcgatatcggcggcggtcaccggcgaagcatcggccttgtccatgacctgcacattcgcccgccagaacggcaggatcacctcgccgacgcggccaggntcagatcaccggggccaggtaggggtgcggcagattcgaaaaaaactcactcacgattgaaaaactccacgctgggtcaacaggtctcgcgccaggtacaacgccgccaggcccgc

SEQ ID NO: 669424 - DNA, 291 bp, Homo sapiens
tgagaggggagctatttggaaacctgtgggtacaaaggagaggttaattccagacccacgtatagaatgttttgaccagagactaccatctaaaccatccagacctacgaaggatcaggcaatattccacaaacagtggaaaatcggttgcctaagatggtaacaaccccatagcaagcagcattgagcactacgactcatcgtgagctacatgccagtcacgatggcacctctttcctcagaacacacgatgtaccccgatgaacgtataatcaacaagatcgtatgcga

SEQ ID NO: 669425 - DNA, 158 bp, Homo sapiens
  misc_feature (9)..(9): n is a, c, g, or t
  misc_feature (82)..(82): n is a, c, g, or t
  misc_feature (114)..(114): n is a, c, g, or t
  misc_feature (119)..(119): n is a, c, g, or t
  misc_feature (141)..(141): n is a, c, g, or t
  misc_feature (158)..(158): n is a, c, g, or t
aactctgtngcacttatttggtgcgccaagattcatagctgtgatgaggagtgcctggcatacaagcactatataagtgttngatgacatcatcatagtcactgtcatcatcancatanataaaccatcaagagcagaagntcagaatatgacggggn

SEQ ID NO: 669426 - DNA, 263 bp, Homo sapiens
agcgggttaacaatcactgatccaggaggtggaggttgcagtgagccgagatcacgccattgcactccagcctgggtgacagagcaagagtctgtctcaaaaacaaaacaaaacaaacaaacaaaggccgggcacagtggctcaagcctgtaatcccaccactttgggaggactacctgtgagcgaccgcgcctggactgttcttcccagtgttacatgacagctagatttgcactctcctctctccagtagtttgaaacttt

SEQ ID NO: 669427 - DNA, 686 bp, Homo sapiens
tgtcacactcaaaaggaatgcaacaaccgccccccgtctctccgggggttgcgcgcccccccccccttatgggccccccagggcgacgcacacccgaggctgtctgacgaagcgcacggagacatttacaataaaggagactcaactgggtggaccacctccagaacacgcgttgagtcctccaacttgtggagattttgagatatcccaccctctccttccgcagcaaacaatgtcaggtctggaccacagcagcccccctggtgggtggaggcccacaagcgatccccccactggggccccgccacacaagaatagggagccgccctcgcccctccccccaaaaaacatgtggggtgaaatacgggccccccgcctctccaaccagcccccgataggtaggccccctccccacacttatagcctgcaacaacagcgaggaggcactcacaggtctcgccgcccgtgatgcagtagcgatcccccgggtcatttaccccatatcccactattgtcacccaaaaactttacaacatccttctcctcgggcaagactcatccggtatttaacagtctctccccccttcctccgactccgtcattgtagagatcttcattggtcaaacgttctcgctatgaacacttctcccattcaagaaaacagtagttcgcccccacaatgacaa

SEQ ID NO: 669428 - DNA, 359 bp, Homo sapiens
ggggatcgcctcgttaatgctccgggtgattttcgtggaggttgataacttggctcgcagtagattttctttaagagaaggggccgttccatgcataccctcaaaagtattttcctgtaaaaaaaaaaaggtataatggtttggttgccatcctacattcgggtggtacccttggatgttaccacactttgtaataattgtaccgaatagctgtatcgaacccggtggtacccaatattgggtgggatttattggtgttaaccaatttaacccccttttggtcccttttttttccaaaaaatacttccccgaggcggaggtccggggtaatttcttgcccgtctcgttcacaaaatggt

SEQ ID NO: 669429 - DNA, 301 bp, Homo sapiens
  misc_feature (9)..(9): n is a, c, g, or t
  misc_feature (18)..(18): n is a, c, g, or t
  misc_feature (26)..(26): n is a, c, g, or t
  misc_feature (62)..(62): n is a, c, g, or t
  misc_feature (153)..(153): n is a, c, g, or t
  misc_feature (157)..(157): n is a, c, g, or t
  misc_feature (183)..(183): n is a, c, g, or t
caagtgaanacactcatntccacccntgttggttctgtgggatccggtcctcaccactgccngcgccagagggcgcactggcgtgcagacaggccgtggtgctgttcggagacgtcgctgggactcgccgaagctccaggcccagagaagagncgtnacgctgccccgaatcttcacctgcantcctgagcatccctggctggcgctaagtccaaccacatggagacttcagatctcggaaggcatcgaggggagccaggctgacctccgcctgtcctgtgcggtctaccactgtatgaag

SEQ ID NO: 669430 - DNA, 1185 bp, Homo sapiens
gcgacgggtctgtgctcaagagcggacaggtgctgcagcgagataagatgaaactggtggctgccggtggggatgtgtgtaggcttcagagcacatggtgatcacggaagactgaagcagaaacagtggattaagacttcgctgagcgatagctaggcactgccttccccacaatggcatgagtgtgtgttggctgagtgttggccgatgatgccaagcatcaggagtgtcaatccatgtgtggcatggtcgtgacggacttgtccaagcaccccctaaattgttctgaccatgaacgatttgaattggtgacggcactgctacagcagcacgcacacggtggaaccgctggacgaaaattggaagcaaccgcccgtattggcggcggcgcatgagggggccctccggttttgtgacccctattccacagttaccccagtgttccatatttcctttttcgccacatccagattccaccgccaagtgatcatccacgttagtttgcgccttcctttggagaataggactgaattggggtattggcagcgcgaccacgtggcccgccagtattccgcgtttacagtttaactcacacctcctacgttaccaaagtcacttttatggagaggcacgcgggtgagcaactcagacggcgattatccaacctcttacccatatccccacatcccgaaacccccccatagtagtgacatggcaccaaggctgaaccacgttgttacccgttttggcctcttgtgatccataccacgcaagggacatggtcaaggtggccgaccgtatgacgcccatcactgcacgccgacagtgctccacactcactctttggctgcactttccgtgcggaggaccgcccgccctcattttgtgccgcacaccggcgttaccctacaagatgacgtgaaaacagtagggctccactcactattttggtcagtcataataagtagccacctccctacagtagtgcaaagaggagacatcttgtggtcactaatatcgggtgacaatcatcaatgcggaccgaatccctaccgcaatttttaacgcacaaatcggatcgagtaattaggacaattgtgaaccacgtcgtggtcaatgtcaaccagatgtctattaccgatatcttcacgccacttcacatttccgccacacgaatgatttcat

SEQ ID NO: 669431 - DNA, 472 bp, Homo sapiens
tttgagaatgaaatgtttctcatcatagtgtattcttattcacgttctccacgtatgcgttgtgctatgctggatgtcttttggcataatttttacacgtttggttatggatagtatacaggttggtgtcttcaaaaaggccaaccagataggcctcacttgtctccttcaaatcaccgatagctgcgttctgtaagcgagactctgttttatagtcctgatgcaatttctcgcaccagacgttggatgggaattttgcgaatcagaagttcagtggacttctgattacgtctaatttcacggagcgctacattacttggcctgtaacgtttaggtttcttcactcctctagtatagggcgtactcttgtcatcggcttttgtagccagtttgctccggtgggtcttaccaccgttctatttgtcgtgagtctgttttgtacgaaccattgttccaagaccccttatctacc

SEQ ID NO: 669432 - DNA, 377 bp, Homo sapiens
ggactgcgtgctcacggtgctctactcgtgctgggtgcacatgtcggttatggttgcattggtgcccagacgttgtgcggtcatcattcatgactcctatgtaccttctgttcggctaaccatcatacggtaggcttgcgactgacccgagtacgggcgttggttccggctgtcacaccttgtagctgcttcttcgctcatgaccagtgttgccttttatctgtccagcacagaagagtcgttgacccacatgagtctccgtggaatgtgtgatctgacggtggatctcagttatcatactgaacgccgtagcctggcggggggaggttgtggtgagccgagatcgctccattgcactccatcctgtgcggcaagag

SEQ ID NO: 669433 - DNA, 860 bp, Homo sapiens
ctgcgggtccaagccatgaattgggagtacctcggtcaatggtggaaagttgtcccaagctggtacctgccgcattgtcttaatgggctcaaaatagctatggtttttcaaaggaacgcttctcccgcctgggggacacttttcggactgtcgacagagtcacctagtcgcatccatgcagcccctgcctaacatggccgctcagtcttcccaccctggtctcgcggtcctgctgtacctggcttattatcacttcacgtggagcatgtcctcccggaagcgcctggctcggatctctcagtaagcctgtgtctgtgtcaaagcggtgcccgccagactgttcgcaccagcatcgcttgggcctcgcggggtgcgagccttagaacttgctctttggagctctggccatcttgccacctggacctacctggggctccctgtttgatgtcgatgtggatgacaccacagaggatgcagggctactgcgcatggcatacatctgtcacacaagtgtttcagagatcagactgggccagtcacatgggtcacttttggatgctggatcttctaccgtgctgcataggctgaggcacatctgtggaccctcataaccctctttagacccctctcagggtgccactgatgggggatgagggaagaccctctctctattctgtgaccccctccatcctagacccccacacctctacacacactacacacacacacacacaaaatcacaccattttcatgcatgtccatttcaccaccccaccacaaggcaggtagggggtgtgcctgctggggcctagagggggatgcttggggtaacagagaaggggagatacatggcctcccgc

SEQ ID NO: 669434 - DNA, 376 bp, Homo sapiens
gcccgagggttcaaactttccccagggcaaagaatgagggaaaggaaaaaaagttttagaaaaaaactttccggcatttcgagactcaaaaaaaacccccctgatttacaaaaaaaaaccaggaaaggggttttgtgtggtcggctctttctccgggaacttgaaaaacttaggagtcatggggtggcaaccccgggggttttccaaattttccatctaggccctattatgagattgagttttatttttaccacttggctaaccagagcccaagggtaagtttttcaaaattttcaccagcgggcaaacccaaaggcaaagggtggacaaagttgggttaaaatccattgaaaaataaaaattggggggttttcca

SEQ ID NO: 669435 - DNA, 148 bp, Homo sapiens
ttcaggacgtacagaagtaagagtgaccctattatgcttctcaaggaccagtatggtgaacagcaatcttgcaagtatggaagaactaaaggaaattgattgtgcgaagtgaggaaggagattgacggatgcatgcccagatttgtcc

SEQ ID NO: 669436 - DNA, 952 bp, Homo sapiens
aaatgatgtcacaaatggggaaagtagctaattgaaatttacaaaatgataaaaatgaggtataacatatatgacctgttccttgtgaaaaccttgctatgacatatatctatgcttgaacttataatgacagtgtggaatgaaaaacagataatacatttgccttgaacatatggtcttttatttacttttacttattcactttacatccaagtcactcccgcacaatccttctcccattcccctttgaattttgttagtgattttttatctctcactctgcttgtattcctctctggataaaggagttagcctcttccagttccatatccccaatgtattgagtcatagctaagctcaccctcattgattcttgagtgccttccttttgtcagatttctgtctcctcctggagattcccccacctcctcacccacttcagttgcagatttccattcatctttgtgaccatttggccatctctcctgtccttcctcgcaccaaatcttaaacccacaattccccttcctaatctcatactccaagttcccttccttcatctgcctcatatgactattttattcccccttctatgtgacattcaagttcctagcttgggtcttccctcttgtttagcctcttggtctgcggagtgtagcatggtacttgaatttatggtaataatcactataagtgagtacataccagctgtcttttcagacaagggtaatcactccaggagaaatatccagttctccattgcaaaaaaaatcctgaatcttgattaaaagcgaaagttccatggggattttccacgtctaccctacacggagaaactaaaggtccagcggttaagagaggcaacagcgccactctcgggggcccggaccaagacggcgaacaccaaactatggtatatcccaaacgctttatgtatttaagctcctcttcc

SEQ ID NO: 669437 - DNA, 114 bp, Homo sapiens
gcctttagtgttgtaatatgtatcctcagtacagctttagttgcatcacacatttgatatgtcatgctttcaatagcactcgaatgctatgcacattgtttattgttatctaga

SEQ ID NO: 669438 - DNA, 235 bp, Homo sapiens
ctttaagaaacccatgctgttctatccctagtctacgtttttctccgtatgttgaaataagattcccacagcttctgatgcgtgtgtttatagccttcaatgaatgtcaacatgttaccaactgagtatccctagagacgccccacaatgctgtagtcttaatagatttgcctttatgtagttttaatcagataggcgtggtccgcacggaagtaacttaaaaagatagggcctg

SEQ ID NO: 669439 - DNA, 415 bp, Homo sapiens
  misc_feature (86)..(86): n is a, c, g, or t
tcagctttgacgtatgtctgtacccgtgaaaccattgccacaatcaagataataaacattttcatctctctcaaaagtttgcctangtctctgccatttcttcctccactcctgtccacgggcaccactgtacagtggtttgcatattctaggattttatataaatgaagtcacacagtatgttctcatttttttcatgatttctttcactcagaataatgattttgagatgacaaatagtttttattgctgggtagaattccattatggataccataatttgtttagccatctatcttgattgacatttgagttattttcagttttagggtgtcaaacaataaggctgctgtgaacgttcatgtacaagtcttgtgtggacaaatgctttcatttcttttgataaatatctaag

SEQ ID NO: 669440 - DNA, 272 bp, Homo sapiens
tggggccttaatgtgcttaaataacgctaattaataataagccacacaaataatgagagtttaatttttttttctcgggcccaccccaattcagcctgtaagggttattatcctcttcaacagccttccctgtatttggctatgtcctctatccccaaagtaatctaccttatttaacactcaagaggtaccatttgtggaaacttcacttgacaaaaacgggctgcaaaggtgaacagaggggaagcttgcccctcttgtctggataattc

SEQ ID NO: 669441 - DNA, 254 bp, Homo sapiens
tgatctaagatctggcgatgatggtgtatgtgccacagtgtgtgtgtgtcttgactgagcagaaggttgtatgaaatggacatcatgtgaaggctgaatagaggttgtatggagggagatggttaaggggctgtaaagtgattctgccggactctgggatgttgcaggagggtggagggtctgctgcgggtgcaagactgaagctgcactctgaccagacaggttacctgaaagctgggggcttttttggagta

SEQ ID NO: 669442 - DNA, 278 bp, Homo sapiens
cccttttaccggttgggcccccttgaaatgcctttggctcccaagggaaccttggagggtttatttggggttttaaaaaataaaattaaaaggctgggctagggtgcttttttttctgaaatttccccctttttaaattcccaaatttggttttggggattgggaagtcttaagccaaattgtccccggtctcccccccgaacataaaaattgtgtgttatcggattgtttaaatttgaaattccctcttttttaatttaaattgtttgggcccttta

SEQ ID NO: 669443 - DNA, 278 bp, Homo sapiens
tagtcctagcttgtctgtcctggtggctccttggtactgttccgtgtcatgtctttgtgaaggcgcatctttcttccttgtggtcattttctatgcttgatgattggagtagttattattgagggcaattgtcccaattctgctagtggatgcttagcagctcttggccaatggagcttgcggtttgatacttggtggatgacatcctcagcgctcttcgatcgcgttagaagtagcgctggtaccagcattgaggagcggcgcatccacctaggaga

SEQ ID NO: 669444 - DNA, 199 bp, Homo sapiens
  misc_feature (147)..(147): n is a, c, g, or t
acctgatagagcatactaacgattcgtaagagaaagtccaggcatgggcctcactttcacatctgcacaggggttctggacactgatggacctcatgaacaaagggctctcagcggaagaacacgatatgtcagagttgacagccanttgagaaagcacataccttgtgatttggtgactcaagaggcttaaaggggta

SEQ ID NO: 669445 - DNA, 104 bp, Homo sapiens
tcaagcttctaacgatgtacggggacatgacaggcattgaatagagtccacagtaatgggatcaaattaattctatcacaagaactggaaccagaggcaaaaaa

SEQ ID NO: 669446 - DNA, 1157 bp, Homo sapiens
  misc_feature (40)..(40): n is a, c, g, or t
  misc_feature (92)..(92): n is a, c, g, or t
  misc_feature (143)..(143): n is a, c, g, or t
  misc_feature (145)..(146): n is a, c, g, or t
  misc_feature (243)..(243): n is a, c, g, or t
  misc_feature (248)..(248): n is a, c, g, or t
  misc_feature (259)..(259): n is a, c, g, or t
  misc_feature (266)..(267): n is a, c, g, or t
  misc_feature (270)..(271): n is a, c, g, or t
  misc_feature (279)..(279): n is a, c, g, or t
  misc_feature (289)..(289): n is a, c, g, or t
  misc_feature (291)..(291): n is a, c, g, or t
  misc_feature (297)..(298): n is a, c, g, or t
  misc_feature (366)..(366): n is a, c, g, or t
  misc_feature (384)..(384): n is a, c, g, or t
  misc_feature (389)..(389): n is a, c, g, or t
  misc_feature (474)..(474): n is a, c, g, or t
  misc_feature (577)..(577): n is a, c, g, or t
tcaagattagatgtgaacaaaaccccggaaaatctgtggnttccctcatcaggagaaggacacatcactaaaggctaaggccccaagagctngggatcagaagtcagaagtttggaatgtggtgggtcaaaggacaatatggntnngcattctggagagttgtttttcagctgaattctcatggtgaaaacaggggaaaggacaaaggaaaccttaagttgtattgtctactttcttctccancctgntttaaaacacncctgtgnnggnnattatgcngcagagttgngngctacnnaagctattttaaatgggagggggcattcattcctaacacctcttgtaactaaaagaaccatagtaccncacatcacagtgctggtngaaanggaactaaaccacagtctgtaatcccaggagtccagctcagatccttatattgcgaggtaagtttgcagattatctgtcttgccntcaaacactgcagacagatttaaaataaagagaaaggttttagagcataagaaagctctcgttgaaggattttttaagctgacaacttttttttttttttttngagacagagtttgctcttgtcctccaggctggagtgtgatggcaagatctcagctcactacaaccttctgtgccttcccaggtttcaaggtgatttcctccgtgccttcggccttcccgaaatagcgtgggacatacagggtgttccacacaccacaccgtggcttaatttgtggagtattttcgggataaagacacagggtcttggctcagtgttgtgcgccaggcgtggctcacaacacctccgtgaccctcaggtgtgactctgcccgcgctcaaagcctcccgagagggtcactgaggaattcacgagggcgttgaagccaatgcgaggaccgcggaccttaagcgtgaacaatcttttatgacattaagagggggcaagaaaatattattccttatgaagtggcctcttaatattccacaaaacggtggcaatcttctagacacatctcggcgccagggcgcacagggcgtgggcctcaaccacgtgataaaccacacaagccacctttctggcaacgcgcataaagggtgggccgagaatccaaggaaagctccaaggaacgttccaaagacca

SEQ ID NO: 669447 - DNA, 746 bp, Homo sapiens
  misc_feature (40)..(40): n is a, c, g, or t
  misc_feature (92)..(92): n is a, c, g, or t
  misc_feature (143)..(143): n is a, c, g, or t
  misc_feature (145)..(146): n is a, c, g, or t
  misc_feature (243)..(243): n is a, c, g, or t
  misc_feature (248)..(248): n is a, c, g, or t
  misc_feature (259)..(259): n is a, c, g, or t
  misc_feature (266)..(267): n is a, c, g, or t
  misc_feature (270)..(271): n is a, c, g, or t
  misc_feature (279)..(279): n is a, c, g, or t
  misc_feature (289)..(289): n is a, c, g, or t
  misc_feature (291)..(291): n is a, c, g, or t
  misc_feature (297)..(298): n is a, c, g, or t
  misc_feature (366)..(366): n is a, c, g, or t
  misc_feature (384)..(384): n is a, c, g, or t
  misc_feature (389)..(389): n is a, c, g, or t
  misc_feature (474)..(474): n is a, c, g, or t
  misc_feature (577)..(577): n is a, c, g, or t
  misc_feature (746)..(746): n is a, c, g, or t
tcaagattagatgtgaacaaaaccccggaaaatctgtggnttccctcatcaggagaaggacacatcactaaaggctaaggccccaagagctngggatcagaagtcagaagtttggaatgtggtgggtcaaaggacaatatggntnngcattctggagagttgtttttcagctgaattctcatggtgaaaacaggggaaaggacaaaggaaaccttaagttgtattgtctactttcttctccancctgntttaaaacacncctgtgnnggnnattatgcngcagagttgngngctacnnaagctattttaaatgggagggggcattcattcctaacacctcttgtaactaaaagaaccatagtaccncacatcacagtgctggtngaaanggaactaaaccacagtctgtaatcccaggagtccagctcagatccttatattgcgaggtaagtttgcagattatctgtcttgccntcaaacactgcagacagatttaaaataaagagaaaggttttagagcataagaaagctctcgttgaaggattttttaagctgacaacttttttttttttttttngagacagagtttgctcttgtcctccaggctggagtgtgatggcaagatctcagctcactacaacctctgcctcccaggagaattgcttgaacacagagcgagctgagatcacgccactgtgctccagcctgggcaacaaagtgagactctgtctcaaaaaaaaaaacan

SEQ ID NO: 669448 - DNA, 219 bp, Homo sapiens
aaaaacccaaaataggggggaaattaaaaattttttccggggtttttttttgtccccggcccttggaaaaccccgggttttggggggccccccttttttttaaaaaccctttcttgttttccgtccccccccccgccccctgggccattgttttgaaaccctggggggccttttttttttcccccgggggggaaaaaaaacccctttttttttttccca

SEQ ID NO: 669449 - DNA, 664 bp, Homo sapiens
  misc_feature (40)..(40): n is a, c, g, or t
  misc_feature (92)..(92): n is a, c, g, or t
  misc_feature (143)..(143): n is a, c, g, or t
  misc_feature (145)..(146): n is a, c, g, or t
  misc_feature (243)..(243): n is a, c, g, or t
  misc_feature (248)..(248): n is a, c, g, or t
  misc_feature (259)..(259): n is a, c, g, or t
  misc_feature (266)..(267): n is a, c, g, or t
  misc_feature (270)..(271): n is a, c, g, or t
  misc_feature (279)..(279): n is a, c, g, or t
  misc_feature (289)..(289): n is a, c, g, or t
  misc_feature (291)..(291): n is a, c, g, or t
  misc_feature (297)..(298): n is a, c, g, or t
  misc_feature (366)..(366): n is a, c, g, or t
  misc_feature (384)..(384): n is a, c, g, or t
  misc_feature (389)..(389): n is a, c, g, or t
  misc_feature (474)..(474): n is a, c, g, or t
  misc_feature (577)..(577): n is a, c, g, or t
  misc_feature (664)..(664): n is a, c, g, or t
tcaagattagatgtgaacaaaaccccggaaaatctgtggnttccctcatcaggagaaggacacatcactaaaggctaaggccccaagagctngggatcagaagtcagaagtttggaatgtggtgggtcaaaggacaatatggntnngcattctggagagttgtttttcagctgaattctcatggtgaaaacaggggaaaggacaaaggaaaccttaagttgtattgtctactttcttctccancctgntttaaaacacncctgtgnnggnnattatgcngcagagttgngngctacnnaagctattttaaatgggagggggcattcattcctaacacctcttgtaactaaaagaaccatagtaccncacatcacagtgctggtngaaanggaactaaaccacagtctgtaatcccaggagtccagctcagatccttatattgcgaggtaagtttgcagattatctgtcttgccntcaaacactgcagacagatttaaaataaagagaaaggttttagagcataagaaagctctcgttgaaggattttttaagctgacaacttttttttttttttttngagacagagtttgcagcgagctgagatcacgccactgtgctccagcctgggcaacaaagtgagactctgtctcaaaaaaaaaaacan

SEQ ID NO: 669450 - DNA, 965 bp, Homo sapiens
  misc_feature (691)..(691): n is a, c, g, or t
ggtctacaagctcccagcgtgagcgacgcagaagacgggtgatttctgcatttccatctgaggtaccgggttcatctcactagggagtgccagacagtgggcgcaggccagtgtgtgtgcacaccgtgcgcgagccgaagcagggcgaggcattgcctcacctgggaagcgcaaggggtcagggagttccctttctgagtcaaagaaaggggtgacggacgcacctggaaaatcgggtcactcccacccgaatattgcgcttttcagaccggcttaagaaacggcgcaccacgagactatatcccacacctggctcggagggtcctacgcccacggaatctcgctgattgctagcacagcagtctgagaccaaactgcaaggcagcaacgaggctgggggaggggcgcccgccattgcccaggcttgcttaggtaaacaaagcagccaggaagctcgaactgggtggagcccaccacagctcaaggaggcctgcctgcctctgtaggctccacctctgggggcagggcacagacaaacaaaaagacagcagtaacctctgcagacttaagtgtccctgtctgacagctttgaagagagcagtggttctcccagcacgcagctggagatctgagaacgggcagactgctcctcaagtgggtccctgacccctgacccccgagcagctaatgngagggaccccccagcagggggacactgacactcacacagcgggtattccacagacctgtctggggtctgtctgtgagggaactacaccgatgctttaacggaaccttgtgctccctctccagacagtgtaacccagtggggaccgacgcaaggggcttaagggggctcctctccaggggggtcccagcgaacgtgggggttggggagggggctctggggggccgggggtggatttcaccgggggggcggagccgcggtagcggggtttggttgg

SEQ ID NO: 669451 - DNA, 292 bp, Homo sapiens
tctttaggaggactaggaggacattgtgcccagtactaccacagcttggatctaggctcaggaatacttgggggtgaagagagagaaaggggtggggcgggctggtgccagtccaggtagcagccacggtaagactatagggagcagtgaggaccggaaggcccgtaactcctgtccaaggggcagccaccactcaaggctctggccactgtttgtccatagagctgatttgtgcctgtcattttccaggcaatcacgtttgggagcttgaaaatcaggtcctcctcaagct

SEQ ID NO: 669452 - DNA, 223 bp, Homo sapiens
gacacaccacctaatctgctccgttcgactgggcggttcacccctccttaggcaacctggtggtcccccgctccgggaggtcaccatatagatgccgaacttagtgcggacaccctgatcggcatagtcgcactacagccctagaactcctggactcaagcgatcctccagcctcagcctcccgagtagctgggactacaggcacgcggccaccgcgcccggc

SEQ ID NO: 669453 - DNA, 500 bp, Homo sapiens
  misc_feature (252)..(252): n is a, c, g, or t
  misc_feature (278)..(278): n is a, c, g, or t
  misc_feature (345)..(345): n is a, c, g, or t
  misc_feature (349)..(349): n is a, c, g, or t
  misc_feature (371)..(371): n is a, c, g, or t
  misc_feature (432)..(433): n is a, c, g, or t
  misc_feature (438)..(439): n is a, c, g, or t
  misc_feature (441)..(441): n is a, c, g, or t
  misc_feature (448)..(448): n is a, c, g, or t
  misc_feature (454)..(454): n is a, c, g, or t
  misc_feature (456)..(456): n is a, c, g, or t
  misc_feature (469)..(469): n is a, c, g, or t
  misc_feature (488)..(488): n is a, c, g, or t
ccagcggattctggcgcggagcggagcggcggcgggcgcagctagcgggtcggccgcggagcggaggtgcagctcggcttcccccggcacccctccccctcgggcgccagccactccggggcggcgaccgcgatatcccctgggggaccggggggccggccccagacctatgggcagacagagctccaaggctccccggggcgacgtgaccgccgaggaggcagcaggcgcttcccccgcgaaggcaacggncaggagaatggccacgtgaaaagcantggagacttatcccccaagggtgaaggggagtcgcccctgtgaacggaacagatgaggagccggggncacntggcgatgccatcgagccagancccctagccaggctgctgaggccaagggggaggtccccccccaaaggaagacccccaaagnnagacnnanagaacantcctcntntccagaagccttncaacatgagcggcctgtcnttcacgagcaac

SEQ ID NO: 669454 - DNA, 87 bp, Homo sapiens
aacctgtcaaaaaggattcagatgctgtgcgagtggatgctgcctgtaaaaggaaaccatttgggatttttcaaacgactccttaag

SEQ ID NO: 669455 - DNA, 595 bp, Homo sapiens
accacattcgagctcggcaccccagcgccctagcctcatcctgcacagcagaaagagtgaatggtgatgaatggatctatattatttcaactctcctacattttgtaatcatattacaatattaattcagcagtacctctcttgtttttactcccctcccccattacactggattcctgtctgtctgggattctgtctgtgtgcactctttcctctatgtccactactgtccctgccaccgatggcatttgtcacctctgcctgggcagcccctccagactctttgcaagttcatggactttggggttaatgatggctgtgcctcagctcctgtgaatggaaactgctgaggaaaggaagggccgtgccatgttcccgatactccacggctccttgcatatgcggtcgccaggcgcctacatgccttccatgaatgaatgaatgagtaacgtggattctaggaagctgcactaacccagacgttgtgtcctcagcctgctcatagagtgtgttaaacatgagaggtggggagtgtggcaagcaggctgaggacagaacagaggatctgaatagagtacggaggatcacccaagtc

SEQ ID NO: 669456 - DNA, 544 bp, Homo sapiens
  misc_feature (296)..(296): n is a, c, g, or t
  misc_feature (322)..(322): n is a, c, g, or t
  misc_feature (389)..(389): n is a, c, g, or t
  misc_feature (393)..(393): n is a, c, g, or t
  misc_feature (415)..(415): n is a, c, g, or t
  misc_feature (476)..(477): n is a, c, g, or t
  misc_feature (482)..(483): n is a, c, g, or t
  misc_feature (485)..(485): n is a, c, g, or t
  misc_feature (492)..(492): n is a, c, g, or t
  misc_feature (498)..(498): n is a, c, g, or t
  misc_feature (500)..(500): n is a, c, g, or t
  misc_feature (513)..(513): n is a, c, g, or t
  misc_feature (532)..(532): n is a, c, g, or t
ccagcggattctggcgcggagcggagcggcggcgggcgcagctagcgggtcggccgcggagcggaggtgcagctcggcttcccccggcacccctccccctcgggcgccagacccacgcaccatcacgacggacaggccgaccccgacagtactatcccactgcggacgcagagcccggggcggctccaagcgcccacccaagagacccccatcatgggcagacagagctccaaggctccccggggcgacgtgaccgccgaggaggcagcaggcgcttcccccgcgaaggcaacggncaggagaatggccacgtgaaaagcantggagacttatcccccaagggtgaaggggagtcgcccctgtgaacggaacagatgaggagccggggncacntggcgatgccatcgagccagancccctagccaggctgctgaggccaagggggaggtccccccccaaaggaagacccccaaagnnagacnnanagaacantcctcntntccagaagccttncaacatgagcggcctgtcnttcacgagcaac

SEQ ID NO: 669457 - DNA, 103 bp, Homo sapiens
gtctgcgacacctcatcccggtcgagctgctcaagatgccgccgatcaccaccgtgccgccgttctcgacatgtacctggtcttcacgtgctttgtgttgatc

SEQ ID NO: 669458 - DNA, 774 bp, Homo sapiens
  misc_feature (556)..(556): n is a, c, g, or t
  misc_feature (757)..(757): n is a, c, g, or t
tgtctatgtatttaactatattttttcaatagataactacatccaagtaatgaaacacaggattatacaattcccctccgaaggcagaggaaaagcaaattcacacacagttcacagaggaagtcaccagtgagacgcccggccagacggcagccaaggacgcctcgtgggggcaggggcggggcccagcagcaaaagctcaccacagctcccacgtgggtgctaatcggtggggacgcggcgcaggctgtgggtggagggcagggctagcccgtgcatcgtgtccagagaaacctacaatctatccagagaagggtgcccgaaattgagggagtccacaaggaggagaaaacaccagcgcgaaagtgccaaacgtggacccccagtggaagatcgaatgaagcgatcactgtgttacgactgaatagagaagaagagacgacgccactattaccctcgttatacagggacacctccgtggttcaacagtctacggatagctacacaacgagggatgactactcactattggcgccgtgaagagcgggagagcccncacaaagcactgcccgcaatatatatcccacgacacgaagctccacgtatatagagagctcctctgcacaacaacagggggcgatgagcactaccaagattgcttacccccggatacacatccccaaagcacctcttagagattggagtaccccttttccaaaagaaggctatcctccagagaatgatcccttggaacatnccatggagaggaatcca

SEQ ID NO: 669459 - DNA, 253 bp, Homo sapiens
ccccccagcaggagcgccgctccagagccacgtaccaggccctccaccataaccacagttcacgccgcctccggtagccgcccagtctgatcccccagacacaaaccgagttgaacaggtagagacaccagggcctcctcccaggtggcaaggagccagcccctaaagcagctccatagctggcagaggagctctggaggcgggcgggccctgtgctcggggggccccccgggggcggggggtggctggtccg

SEQ ID NO: 669460 - DNA, 1264 bp, Homo sapiens
  misc_feature (846)..(846): n is a, c, g, or t
  misc_feature (869)..(869): n is a, c, g, or t
tagagtgcacacctactatgtgattttcggcatagagtttcgtaatcttatactcttgattgcatagcctgctcgatagacatacatctctccttttagttatacagggcccttttcgtgatgctaaagctttaaacaacagggggcccccaaaccctccttgttggatcacctgagggctcggaacaaaaggttctccgtgaaagggttatcagagtgttgcacagacctaatagccctttgttaagtaagtctccagtgatccctacaagacatggggacccccgcattttttgactttaataggcccggggaccccatgcggccgcacaaccccccggactgggtgcaaagaaattggtgcaccaatccaagcaacggcaagcgagcataccccaagccaatttggtcccaagctccgggcaccaccgtgggatgaccacccccgcgagaatgaattgctaaattccgctgaaggacaattccccccctcttggacccaggggccagacaaaccatagcgtgtaaaacctggcccacaattgaggggaactttgcccagcattgatgaacgcgatgtaagaagactgggaaagatgagccacactcttgggagcttggaggaacacacggggtttagtaccctagacccctcgtgagaacttctgttaaaacggcttacaatagggttttcccctcttagctatagacttctagcgacttccccacttcccactcttgaacacctcggggggcaaagggttctttctttgcacatagttggggtttatataaccccctccccctgagatgaaataacacgagagtggtatagctatagggcgnttggttaatcacatcaagaaagngtggtcttcccctcacaggcctgtggggaataaaggaacgtgggcccacaccacacacatgccaaacctcaatgtccacaatatactgctttgtcctggtgttggggaaaggagattgggtctttgttcccccacaacaccacgcttcttgttggctgaacctgtaaatactggacacactgtttcctgagccacttaaaatgctgttgtaactcctgtgtggcctctgctgtgtttcctcggggagggaaagcacgcacctaaggagataatagaaaattcacattcgtcactaaacacggcacaatttaagccactcttatactacaagagatggatttaaattgtaacctgtttttacccaagaactaaatcacaaatgagtacagagccca

SEQ ID NO: 669461 - DNA, 799 bp, Homo sapiens
  misc_feature (383)..(383): n is a, c, g, or t
atatcgctcctcgtaagaaatggtatcgttgttctctgaagcctcctccaaagagttccccgggtccaggatccacaacatcaacatcactgcctaaggaaaagagaacaattattagcattgtatttgcaagtgattccaacagtcaggctctgaagcaagtgaacctttaacatagaggaaatggctaattaactacctaccagaatcttactgactacatacgaattatacagtggacaatttcctctctctcgcgccatttgcgtagtatactgaacactgatgtatcttattcataagtgtgatagaaatggtaattataaatacgtggatagtgttaagaattatgatacattaaaaatcacctatctgctccgtgnaggtgaattgctactaccgttggagctcttaatatatgaaccttatgtggagctatttatttctttctttctctggttgagactccagttaaaatgaataaactatctgtgaaactagttaaaagcaactctttttgtcaaaatgccaaaattatgcgcctgggtggggctcacccggtgggatctttgtgggcgggtgccgtttaggggggggttaattcataatcctcggctcactaactcacttgggtccggcagtacgcttgcagctatcaggaaggggttatctatatgcccgaataccgggcttccacggattcaggggtattccgcggggagaagttgtaacccacctgacagcctaagtgcgggatccgtcaaaaggcgggtgttatgggcgtctccccatagggacg

SEQ ID NO: 669462 - DNA, 82 bp, Homo sapiens
gcggccgcctactactactactgctcgaattcaagcttctaacgatgtacggggacatgtgtataaaaataaaaaagatccc

SEQ ID NO: 669463 - DNA, 1185 bp, Homo sapiens
  misc_feature (701)..(701): n is a, c, g, or t
  misc_feature (775)..(775): n is a, c, g, or t
  misc_feature (785)..(785): n is a, c, g, or t
  misc_feature (1185)..(1185): n is a, c, g, or t
ggaggggccgaggtgtgcgcaggactttagagcggtagataaggatcgagcaggcatccggacgctaccaggtgtactcagacacatcttgccaaggggcctgcgttctactgcacagggtacacagttccgcttactgtgcgtggtgcaagattgatctgtgcgaagtagtgctggtagggccctaagggctggcccagatcgtaagccgaacgattccccaaaagcgcgaaagagtctcacgcatgggcaggtcacgcgaatgaacccgagacactgcaatcgtactaaaggggacaaggtgtgcggcccggtgtcgcatggcgatgcgatggcagcttgcgttgttatccacgtggagctgcatgctgtaccaatcctcatcaccttaacctaggctggctcactgctcgctccccttttctatgcggttcgtcaccatatcgtttccaatcctagtggggcgttgggttgtaccacgatggtcatccacgcatgcctggcgcgctttgtagcaccgggtcctcgttggttcgcgctagaggaagcaagtacggctcccactctgtgaacccaatgcctatccgcgtgttctgtcggagcgccactgattcagtgaggagccaccccagagaccacatcctcaccgcttaattaacaccgacagagagcagacagtgcccgtctctccagagctgtcntcaatcacccagtttgactgggcggtccacaccgttctctccgagggacttggcgtatacggatagttaaacanacaagttganttccttctccaccatgaaatctcttacctagggcgcaaataagacacgtttttcattaccccccaagcggcgttagcgggttagggcgaggaggcgaataccccaatagggaagggggggcgtggcccaggaggggacaattccctttcgtcaagaggcgggggctttgagtccggaccaacgcaaccacgtataatttcctaaggaattccaaaagttggagccccttaggggttaagggaccctttggggagttcactttccaaacggcaacaccattgccggccatgcgctgcaaggcgaggtaggcggccaccaaatggtaacgcttgtttgcccctggggtgtgcctcccgcgccaaaccattgacatcctgttctgccgaaacattgggggtcn

SEQ ID NO: 669464 - DNA, 212 bp, Homo sapiens
cctgattaggttcatctttaataaagatggggaccccttaattaaagggcactaaaacactctttggacagagatatggtataaaaaatgttacagaagaaacacatattcaaaatattgtgaggccaggcacagtggctcacacttgcaatcccagcccgggccggacccccaagaccggaccggacccagggtacccgagctcgaaattc

SEQ ID NO: 669465 - DNA, 149 bp, Homo sapiens
ccgcggtcgatcttacaagatcgagcgaggagtgctgatacaggagctcagatgattctatcctaggtgaactggaaccaccggatactgtggagggtctcgtcgtcgatctctgtcgtcacatgcaactatcatacaacatgtccgca

SEQ ID NO: 669466 - DNA, 207 bp, Homo sapiens
atgtatccactaatatgaggtaactggagtagtcaaattcatagagacagaaaatagaagttaccaagggttacggggaagaggcaatgatcagttactgtttaatggatacagagtttcaggtttgggatgatagaatagtacagatctggaaatggaccgttgcacattgtctattaatgccacttaattgtacacgtaaaaatg

SEQ ID NO: 669467 - DNA, 390 bp, Homo sapiens
  misc_feature (1)..(1): n is a, c, g, or t
ntagtgcaagctgactccaagcacatccaggaatgcacttactgataagatattgaggcaagctgtcccaacagctcctgggcacgtgctcaggggtttttgggggggccaattagggtcacccaagcccctgaatttatctctttgtgatagtttaagcccctgcccctggaacggtgtatttttctgtaactatctctgtaaccattaattttttttaactttttgcgtgttccgcttctgtaaaaattggttcaggtaggctcccccggccctatttagcccccggtataaaaagaaatctatccccttcttcggggctgaaagaattttgagctctacccatctctcggtccctggcaataaaagaactcctgaattagtctcaga

SEQ ID NO: 669468 - DNA, 103 bp, Homo sapiens
tcttctcaacacatgtgcaagtcattttgatttgatattgtgctctagttaggtaagatataagcactgaggagactgggggagggtacatgcatctctctct

SEQ ID NO: 669469 - DNA, 107 bp, Homo sapiens
gtgaaaacagaggctattaaacaaaccaataatagaacagattggggtaacaaaggaatgccactaaatttttcaatgggaataaaattttcagaaaatggggatta

SEQ ID NO: 669470 - DNA, 1178 bp, Homo sapiens
agcggtgtgattgccagccgcgacagcttattctccttggcacaacaaatgaagactctggaagtgttcatgcatgtatcaaccagcatatgcctacgtgtaatcgccacgcatactagatgaacgtagtctactccatccaccctgtggatacccaacgaacgctgacttgatcctttagaccgtggatggactgatggcctacgcaaagtgatatcacgcgccacaaactcgactcaggacgacacgaccctaactacataccactagtagctacaaacatgctacttgtgccagaactactgatccgataacacacctacacgaacacgcgagcccaccatacgcaccctacacactgtgtgcacacctctgctaaagcgccccactcggaacttcgcatccgcgctgctccacgctctcgcgcaccaccacgatatctcctcctcgaccccacgccgcacctggcgcactttcgggcacttacacgcatagtcctcaacagttggaggcaacgccagaagggatgatgctccgtcccctacttgcaacttcatgccgcgcgcctacgcgggatccaaacacacggggcacacactacccatgtcgcccgccaccagccgacaactgtacgcccgccttcggccgcacatccggcctcatacagccatcagacattggaccacacacacgcttcatggtccccatcgagacacgttcaccattacttggagtgtcgtaacgcaccagttaggcggctttacaacaaccatctggcgttaaccgcgcatacgtaggactaccacagccaaccccaccatatgccaacgggacgcttccagattgattgcgcctctgcagcgagaccagaggcaccccccacttgcgagcgccattatacatcgtcctccaccaccggagcgtaggacagcgtgcttacatcacagcacagtcttcaacggcatccatccaccccaaacacgccgcacaaacaaacccagcacactttcgccaacatagcaggctattggagtctgacttttaaatcagcctcgactgagcgtcacacacctcaacacacgctacagcagcgacaccatccacgcgcgcaaccacagctatacaaccagtcttacccaccattcactgtcctcaccccctgcaccaccaacacggtc

SEQ ID NO: 669471 - DNA, 155 bp, Homo sapiens
atgacatgcatccactagagtcccagtcagtggcagacgaaaggtcacccataattgtcagagactcaggcatccaaggtgtagaggaactccagctcgaggtagcagccttaatgctcagggctggctgtaggaaccctgtgtggttttatttt

SEQ ID NO: 669472 - DNA, 598 bp, Homo sapiens
gatcgtgaataggtaggtgtgactgacatggctgtggtctatagatagtaatcttcatgtgccactgttcagcagaataagacatgtcttacaatcagcaggacaaaagcgtttacataaataagggaagggaggcgcaacctaggactggccgtcgataaaaaaatcccagctgcagccaatgggaggtaagcagggagaagtaacagaaaagacacactgaaaaaaatcacatccaggtgaaagtcttcttgaggtagaacatggctaataaatttcttggatcactcacatgcaccatttaaatagtaattctgaagatgttaactacagttaaggaaatcagagcttaaggaagttaagtacaagcttatatacccaagtctcatttgaatacaaatccatctcaccccaaagcctgtgcttatacatcccctaagtaattaaggccaaaactaggcttctaaaaaccatttccaaaataaagacagatttattcccaaagctgtttatcacatcaataaggcatcaaggaaagagaaactactttagaaataaatacaggaagcatacctacctatatcacaatcggggtacc

SEQ ID NO: 669473 - DNA, 167 bp, Homo sapiens
accgagagagatgattagtggaaggagagagagataggaggatgtgagacctaagatggattttggaggatgggaaagatgagtctttagtgctaaaaaaatttccaagtgactcttaatttcttctttgagcaccgtactatatgccaggcatggtaccagataga

SEQ ID NO: 669474 - DNA, 354 bp, Homo sapiens
cttgaattcggctatagcaggggaacaatcacttacctacccagtggtcctgaatccaggacaggagtatgtaaggagaggtaccctgtactctaggctactaacctggagctgacgcctacgctagacctcggcctaccattccctcgggtctaaaatgcgagtactcagtaatatactctgtggagggagctggagagggtacgcttgtgacgtgggtcctgtctatatcagttgctcggagcagcctacactctaggtgccgtctttgacagaaggactctctaggtcctgctgtagtataaaggggatcattccagcgaaagtctggccctaacaaaagctgggagaggg

SEQ ID NO: 669475 - DNA, 533 bp, Homo sapiens
  misc_feature (34)..(34): n is a, c, g, or t
atttattcgtttatgaattggttattaacaagtntatataaggttaggattccaatttaaagttttcacttgaaagctttcagggtttagttgtatgttatgtaacgaggagtagtactgaatttggtataagacttaatgactttatttatagcttttaagaaatctttctcggtagtaatttttcgtcgtgttctgatggtaaatatattagcttctgtgtagatgcttctaatcttagtatcagtgctatttggatacagttgtgctaacagtttaaatctgatatctcttttaacactcattgaatgagtgtgaattttaaatatgtgggtctgaccttctagattgggcaagctaaatttaatttttctatccaatctccctggcctcatcagtgctggatccaaagtatcaggtttgttagtggccatcagcactttaatattgcctcgaggatcaaaaccatcaagctgattgatcagttccaacattgttctctgcacttcattgtcacctccagcaccatcatc

SEQ ID NO: 669476 - DNA, 304 bp, Homo sapiens
  misc_feature (177)..(177): n is a, c, g, or t
ctggggaatgtgggaagggggctcagagtctagaaatcctcatcctcataggttggctgggatagggatcaggctcagtccaggatggcaaaacaagagaagctttgttggggtgatccatgcctgctctgaggctctgacccccggtggtcttgctgtggttggaaaaccaaaccncagtacctgagggactgtagggtggatgattcatgtgcaagtttgcacacagcaggatgtgggaggctgaggcaggcagattagcaacctagtgagcaaggagcccaccaagcctcctgggctcctt

SEQ ID NO: 669477 - DNA, 510 bp, Homo sapiens
gagaacactgacttcagacctaccaccatctaggcgtgagttgagaggatccctctctgcaaaatacaggccagaccgggagcacagttctacaggatgctgacatagaccactaaagatatatagtataaaggtcagaatagacaagccccactcatagtagtttacagctaccactcaactattaagtcagtcactactaaaatataagtggccaagcaaggattaacagacatctgagaaacagtcatcacaaaaaagtagacactgaaactatatggactaaacacgcctcacatgaaacagagactgagcagagagaagaagaaaaatatcctccaaatgatgaggatattatgaccaatgaaagccgtaccgggtattgtctgtaaacaaggaacagtaaaggaagcagacaaaagttcctgaaattaaaaatcagaaagtagaagtgaacatgaaatataccagacagtacttgagacaatctcccttaccactagaaagacg

SEQ ID NO: 669478 - DNA, 436 bp, Homo sapiens
atacaggagttggtatacagtaatgcgcatccttatccagtaagagagacgactgtagtacaagaaagcagcaggtctcacgacagcaggggcaagttcctctctctctgaagcatggctcaggtgtggagaagggttcagcaacacttctgggaatccgtcattcacagctgacgcgacgacgatgacagaccagcaccttgaattatgccctaaacccaagcaagaaaccaccacatctaaaagcaccagtgggcttacagacataacatggagctccagtggacagtgatttgtcggatgaagatcagacacctttctcacgttacccgacgacgactaataacagtttactcgacctgagacgacttgacagtgaccgggcagaggctagtgactgtgatgaatttgaagatcaccgggagtgatgctttga

SEQ ID NO: 669479 - DNA, 446 bp, Homo sapiens
gagcattgatattaggttagaatcgtaagataaattttaagtagaaaaagcgggattctgtacagacaaaggaaaccgccagcacagtaaaaagaccacttatggaataggaggaaatatttgcgaaccatacatctgctaagaggttaatatccaaaatatataaagaactcaaaacaactcaatagcaagaaagcaaataacctgattggaaacattgggcaaaagatctgaaaagacatttctcaaaagaagacatacaaatggccaataggtatataaaaaaatgctcaacatcactagtcattagagaaatgcaaattaaaaccaaaatgatatatcacctcacacctattagaatggctattaccgaaaagacaaaaggtaagtgttagcaaggatgtagagaaaagagcaccttgcacactgttggtaaaaaccaaaat

SEQ ID NO: 669480 - DNA, 188 bp, Homo sapiens
cccccggggggggccccgggggggggaaatttaaaaaaaaaaagggttttcccccggggggaacccccgggggggggggggttttttttttggggactttgggggccccttttggggggttcccccctttttttttttttttttttagggcccccccccctttttttaggggggcccctggtttttta

SEQ ID NO: 669481 - DNA, 203 bp, Homo sapiens
tgttcagttcgggacgtggctcgggacggagcagcgcagcccggtgcctcctccccttgcatgctggtatctatgggaagctcggggcttggccagcaggcctgagcaccggactcaggctggggaaggctctaccacacggggagccctctccgtgccggtgggctcttcccctcactggtcacatcagctctcgtggatcc

SEQ ID NO: 669482 - DNA, 101 bp, Homo sapiens
tccaggcatggtgtgactaatatggcgatggtgggggcagggctgcatctattacggggagaggtatgagagttactcatcattctgcggttgtcttctgc

SEQ ID NO: 669483 - DNA, 195 bp, Homo sapiens
  misc_feature (76)..(76): n is a, c, g, or t
  misc_feature (119)..(119): n is a, c, g, or t
  misc_feature (127)..(127): n is a, c, g, or t
  misc_feature (178)..(178): n is a, c, g, or t
ggggacataacgaaggaaaactgccataacataccacctagtggagactaagaatgaggaatagttttctcctccntggttcatgtgttgttgcttttgataatccaaagcgatcatgnagtcggcnctttaatatttccaatgcgaaagattatttaaatgtttctaaatctgcagnacattgataagatggtt

SEQ ID NO: 669484 - DNA, 323 bp, Homo sapiens
  misc_feature (11)..(11): n is a, c, g, or t
  misc_feature (24)..(24): n is a, c, g, or t
  misc_feature (61)..(61): n is a, c, g, or t
  misc_feature (70)..(70): n is a, c, g, or t
  misc_feature (73)..(73): n is a, c, g, or t
  misc_feature (260)..(260): n is a, c, g, or t
  misc_feature (279)..(279): n is a, c, g, or t
  misc_feature (291)..(291): n is a, c, g, or t
attgaaattcntctttttttgggngcctttttgactgaaggcaagctcacagatgaagcanaggactgangancgggggctgaacccatttgccgatgtaaactcatgtctaaaatgcttgttagaattgagacagggtcagtgtttacacacagcccttcattatatttagagataaaacctatttcttgttcttgcattcacattaagtcatgatgtaagaatatgggggtgggtccttcagagaattcttgaaaagntcaatttacagaagactgntatcatggatgntctgaaaaataaaaaataaaaaaatcaggatc

SEQ ID NO: 669485 - DNA, 148 bp, Homo sapiens
tttggggggtggttttttttttaaccccctccccccttcctttggggaagatttgaggggggcccctttttttgtaaattccccaatttggggttgatgtttttgggcttgaatgttttcaaccctgattaaaatttggtttttttta

SEQ ID NO: 669486 - DNA, 202 bp, Homo sapiens
gtatgtgactcagtttccacgtcatggcttttagtccacccaggagtaaagagccaggaaaagtgagtaagacctttcatctcagccaggtgcagtggctcatgcctataatcccagcactttgggaggctgaggtgagaagatcacttgagcccaggaatttgagaccaccctaggcaacatagcgagaccctgtctctac

SEQ ID NO: 669487 - DNA, 230 bp, Homo sapiens
ggcacgaggcggagaagctgcagcagtacattgctcctggaatgaaggtttatattgacccttttacctacgaggaccctaatgaggctgtttgggagtttgccaaggagatcgacgtgtactgcgttaagatcgaggaggtgatcggagctggggaatttggggaagtgtgccttggtcaactgaaacagcctggccgacaataggtgttagtggcctttaagacgctg

SEQ ID NO: 669488 - DNA, 146 bp, Homo sapiens
cgcactgccggctgccactgtctgggaagtaggagtcctctgttcggccaccccgtctgggaagtgaggtgcctctccgcctggccgccgccccatctgggaagtgaggtgcccctctgcccggctgctgccccgtctgggaagtg

SEQ ID NO: 669489 - DNA, 100 bp, Homo sapiens
gtagtccttgactgtctccacccactcccagtgtagaccataagtccttcatacatctcaagttgggggacacaaaagggtggaagggggggcacgaagg

SEQ ID NO: 669490 - DNA, 803 bp, Homo sapiens
ctactgatctgaaatatccacgtgtgggccaggagcactggctcatgcctgtaatcccagcatcttgggagagcgaggaaggaggatcatttgagcccaggagtttgagaccagccttaaatttttttttttttttaaatctacagaggggctggccttgacaacagagtcaacgttgcttacgggggcactcaagacaggtggcgggtaaataatacgtggtccacgattgattaaccattattgggtgcgaacgggaccggtacagaccttgcacaaggtaacacgcgggcgggagtaccacttcagtggctactcaggaacagtggccatagacggtggactaacaggcgggcacttgtggggaatgccgactttaatcacggtctatcaggtcccatttacaaagaacttttactcaaatcgagctatgcacagattttaataccttaaaatcctaaaagcctttaaatatacttaaaagctaacaatgggtccacacacattaaagcacggtttgcacagatgtcccaaggtacgcctgtgcactattggtcaggcgagtacagcagtgttgggaaggcctggaggaggaaaagggcatcccagctggcccttctaggaccgcgtaaccattcgggcatacacggcagcgtggcacaaaatggctcccacggggctcgcacaaccccaacgctgcgcccacatggccagaaccacatgggcgcggagccacgcactgttccgaacttgccttggaccacaagcaaactaatcccaagcaggcgacatactagccggaa

SEQ ID NO: 669491 - DNA, 149 bp, Homo sapiens
gagcgagttctccatgccgtcagacttccagagatagctgggactacacccaggctacataatgtattatcagtagagacgggatttcaccatgttggccaggctggtcttgaactcctgacctcaggtgaaccgccccctcccccctg

SEQ ID NO: 669492 - DNA, 376 bp, Homo sapiens
aaaaagccagtcacaaaagatcactatggagtggtctcctatagaaatagaagataggttagttggttgcttagggctaggaaggaagggactgggggacagggtttcttttgggaagatgaatatggtctaaaattgactatggtgaaggttacatgtatctttgaaatataccaaaaaatcattgaattggtacaattttttggatgggtatatgacttatctcactgtaacttattaaaaagaaaacacggttgggctggttggctcacatctgtaatcccagcactttgggatgctgaggctggaggatcgtttgaggccaagagtttgagaacagcctgggcagcaaaggccctgtctctacaaaaaaaaa

SEQ ID NO: 669493 - DNA, 145 bp, Homo sapiens
aggtcgctctagagatcccccttacttttttttgtggctacgaaacctagacccctttgttcttctaaacaatatatgtgtattccatcggaattaacctcaattcaataactggagtaaaagattttaagtaaggatcccctag

SEQ ID NO: 669494 - DNA, 187 bp, Homo sapiens
  misc_feature (18)..(18): n is a, c, g, or t
  misc_feature (125)..(125): n is a, c, g, or t
  misc_feature (157)..(157): n is a, c, g, or t
  misc_feature (169)..(169): n is a, c, g, or t
ggtccagtgattataccnatatcacgagggttttctgtcttttattagttttcgggggtgtgtagtagatctcattttggttttaatttataatttccctgatgttaaaggggtgtctgtaaatntttcttttgtgaaataccatagacacatttangggtaaagaggncgtccagagcaatgttgc

SEQ ID NO: 669495 - DNA, 1703 bp, Homo sapiens
gcaccttactaccagacaaccgttagtgcaaatccatttacgacgagaatatcagtatacggcgatagtacatagttgagagaccgtggtggacaaatagatagtagtgagccgacacaggggaaaggagtgagagacagtgtatataccaacgcgataattatagccagggtacctacacctcctaataccttcctgcatagatgacacttaacctatgaaataacgtttgccaaggcacgacgccaagaggctaaaggaccgcgcacggagaaacctatgactgacgctacccctagaagtagatcagcatatagaatgaagcacgacctctggtctgatgtagcaaaaacagttacgtgggcgcacatgactttcataccggtgagagtgcccgcacgaagaacgcttcacgctgcacgacctgggggtccgatgtacgtctgcgtgttggtgtccaaaagaggcatgcacattctataacgttctcagagctctctcaagattctgggcacactaacaaggaaacccgctcctgacaatacgccacgttggttgagaacgtatccaacatcgtggctaatcaggtccccacgaaaggcgaaggcagaccagagaccgtgcgtatggagaggtacacaaactgaaggggccaagaaaagaaagcccctatggttgaggcacggacgaaggattcagagcacaccacaagtttctcacatcgagcgcccaacttaaggttacggcctcgttataaaaagaccgaggatacaagctgcgacacctttcacaggtagagcaaggcgtgttatccaaaaaggcgctactacataggtaccaccccaaatattaacgccttgaaacacagtatagttcaccgccaatacaggcggagttgaattacaaccagttgtcagaacctgttccctattcaagcgaaccccctaagagtgtgggtgtatgccaaagtgtcccttatgtggacgcccccgtaagttagggcacaagggaaaaccttaacacgtgctctcgacggatcaattacaaatggttcacaacgcatttggtaacacaacaacataattttgtccctttccacctttccgccgggcgcaatttaacacaggacctctcgggcggtctcatcacgcaactctttcacacagaaccaactgtctggacaaaactgtgtgatcccaaactttgcacagtcgaagggtcgcccccaaaattaaaattgcttaaacacgaatagctcaaacgcccccaaaagaccaaagggtctcccaaactcaaagatgtcaagccgccccttccaaagccgggggttccaagaacaccccaaagaagcaccagagcgtgcacatgtgagccacgccacattcaaaacgggacaacagcgggcgtctacgacccgacacacagagaacacacacaacaaacccacaaacacgccgcaggacgagcgacaccccaccgatcagaaaccaagcgaggaagcgcggggacacaacaacacaagggtggtcaaccagcgaacacgaggcgcaccactcgtcgcacccactcatcgagcggcaattcccgaccgaaccgacacaccaccgcgtccgtgcggcaccaccaacgcgccagccacgaactacgagcggacagatacctcccaccacaaggcgacagcccgccacatacatacggcaaga

SEQ ID NO: 669496 - DNA, 229 bp, Homo sapiens
tatttaatttatttatgtaatacagggtagaaagcgatcatgtcataagcaagtgattctgtacaatcatcctgcagaaaatggtttgggagaattctgggtaatggaagaccagcagagcacccgtccccacccgcccgcgtaaaagtgcttacaaggaacagggattcataccttaaatcagagagcccaaagatacggtggacaaaaaaaaacacacaaaaaaaag

SEQ ID NO: 669497 - DNA, 316 bp, Homo sapiens
tggtcatgcacaactagggtcagttcgcaggtggtaagccatttaccaagatagttgtaggtaaagaagggcagatttattagagaaatgtgaaaatatgttgcagtgggcagctcagcagagaaggggctacctgcaaagaggcaagggctggaggaaagttttatagggtcctgctgaagggtgctacgtgtgggatgaggtcattgtgcccgcaggttgtttgtgattagctgtttctaacaattgttcatacaataattgttcattattgttctcaacttggggctctccccaacctggggacccttcctta

SEQ ID NO: 669498 - DNA, 171 bp, Homo sapiens
atatatataatcagagctcgagctcaactacatgagcaacacaaaggaataggcgatggaatctcatgtcatccatatagataataacatacgaactattacgaccatcatgcctgccatctatctacccttcacctcatatcataagctaatatatccactaagtcgttc

SEQ ID NO: 669499 - DNA, 133 bp, Homo sapiens
tttcgacactacggatgtgtattagttggccttacctgtttccggtggtataatgttcgaattcataagaacagggaggttagaagcagggtcttggtgacaaaatatgttgtgtagagttcagggtcttggt

SEQ ID NO: 669500 - DNA, 432 bp, Homo sapiens
cgtccagacatgacagatgtcactggaaggaggacaggaaacagacaggtactgtccagctgtaggtaagagagtgcagctaagtgcaggttgaggggcagggagagaggctgggtggagcagtattgcagcacatgcagtgactgtagccccagtggtcctgtcctgcagcggctggtcatggttagcacagctgtaagattcccatgctggagctcctgaccctgaacccatggtagacgggctcaccacgttgtgcggtcctacttggatgagcatggtggctcctcataccaccatgcttgagacttgacggttgctcctatgtaacgcccaggatgtctccagtgccactatggagattgtcttgcttctcacacgacccaaatttccttgtgcaaccttgctgaatgagtctgaaggcagtctgga

SEQ ID NO: 669501 - DNA, 440 bp, Homo sapiens
aattcatcagccagcagtgccaaggctgaatgagcctacttttagaaggatagtaagaaggctggagcacagggagtagagaggggagtggtatgagttaaacagggaggggtaggcaagggccacatccttcagcaccttggaggctagaaaaaggagtgagattttattgtgtgatgggaaaccattggaatcttttaaacagggaaataagcaagttttttaaaacttgcttaatttttacttccttaaaatccttcagtgcttacacattgccttcagtgtaaaatccaaactacttagccagtcctttgaaatttaaccttatcttccctcttcagctgcatctctaaaggctttagccacatagagcctcttacagtttccagtgcttggactaccctccctcttacccttatttcactgctggctgatgaatt

SEQ ID NO: 669502 - DNA, 1293 bp, Homo sapiens
  misc_feature (1293)..(1293): n is a, c, g, or t
ggaattcaggcttttcaaagtaaggttaaaaggcagtggcaagaaggggtcttcaggttagggggatgattgagggaacaccaaacttggctagtttgggccactgccaaaagccaaatgtgggaaccctgtgggctggaaggggtgtgtgagaggggtggacaaggggccaccctataaaggagcaaacggggtctcagcggattggtgtgttattcggacattatgggaacctctcgaaaattctctctcggccgttcttcgttcgtttacagcacagctctcaagcaccagcgccccgcacgttgtgggggccacagcttttcgctttcgaaacacgcgggcttcaaaactcttcttggtcactcggctgtgattccaagccggttcctttgagcctttggacagctgtggcattgtaaaaaagggaatataaaccatgtggacacgcgcccgtgggaacagccatgtgggtagactttcataatttgtgggctcgtgtgttttaaaattatgctccgaggagaacttgtttgtgagggggcaaatcttccttcgacccattataggggcgtgtcaagccccctttgtgttaccctcttcaaagaggcggattcccccacaaaagtgtgtcccaacttcttgtggggttatatagaataccgtgtgtttgaaccgtgtgtggtgccgggacaaaaggggggggtttccaggaagaaaaaacccaaaaagaaaagggcaagggcccccaaagtttttgagggaaaaacccaatttcctttgtttaggggagctcaaagactctcgggtgcccggaaatttccccaggacccacaaggggggcgaaatgaatattcgcagatatcttgccggggatcctccccccatatttaaggctgaagggtcggatatttcaaagtttgcgcgaataaaagccgcgggttttaaccccgtgcgtatttatgaaggatcacgcagggaaacaaacacggaacgaaagacgagaagacagagaaagaaagacgacgacgaagacacagaaagaagatgaacagcagaaaaagcaaaaagcaaaaggagaaaaacataagcaaaaaaaaaaccaaaaaaagaaagaacgacacagagaaaaaaagagcgagcaaaagcaaagacaaaaagaaaaaacacagagaaacacaaagggggagagaaaggaagcagcgggaagaaaaaaaaaagacgccaacaacaaatgcagccagaaagaaaaacagagagaagcaaacaaagaccaacacaacaaacaacaan

SEQ ID NO: 669503 - DNA, 195 bp, Homo sapiens
tacgggtgaggtacagctacgggtgaggtacagctacgggtgttgagcttgaacgctttcttaattggtggctgcttttaggcctactatgggtgttagttttccttctaacaggcccctcagctgcaggtctgttggagtagccggccgtgtgaggtgtcagtctgcccctgctgggggctgcctcccagttag

SEQ ID NO: 669504 - DNA, 219 bp, Homo sapiens
tagacgtgtattcacagctgtacgtgcagttcgtctctactggtgatgcatgctgataatgtttatgtgaacataagaagtctgcatgtgtgggtgaactctccacatcatgtcatttcattggggtacccaacttcagttacgtatctgtggtgtctagcacattcctctaccttattttctgtcattgtacctacttctacctgaagcacgtcggac

SEQ ID NO: 669505 - DNA, 1383 bp, Homo sapiens
actagttctagatcgcgagcggccgccactgtcctgaatttgaggaatgtgaagtttcattatacagttgatatcatataactatagaatactcagtgataattataaaacataagtgagagactaatgtgaagtgagaattggagcaatatgtttttaagtgtagagtaggtgtttatgagatttacggttctcagactaaacttaggtatactgacaagacagataaataaaggggcttagatgtactgttagggctcaatagtcttgagggtaggataacggttatcctctttcacatatagagcatcgcttgtgtacatatttcataacgtcatcataaattctactttatatagtcataaacttttacataaatactatgagtcatagtaagtgctagttcgacgtgtgaaacgaattatcgtcacaagtatgaaggattgttgggggtacaacaattgctatactatcatgctaggatcaataatgtacataactcttcttatacatttgcgttaatccgtgagcaagggtgaatgaatggctgttgagggtagaagcgagtattgtcactgaacgcagtgaatctaatttcgatccaatcgtccaacgttagctagcatatccttcttaactgtgcataccaatacactggtaaatgcgtggaggatcaggagtccttattgcaaagcaaagccatgccgaaacaggaaagagattggcgaccgttactcctcgttacagcaaaaagatctaaaggggacttgggacctacaatgaaggaaacctgggaatacgtttccctaattagtcacgaggggaactggtggccaaaaacagcggaaggaagcaaaaggtggacacacagggggaaatccacgggaccagggtcccctaagggggagaaaccggcataacagaatttcggaaaagtggaccgttaggagaataagttcacaagagagagccctgggaaaaccagaaatagggaggaaagataaatagagaggggcgcaaatcttggtaaaggatcaatgagagagaaaacaggtagtagtaagaaaaaagcgactagggaaagctcgatgaaagagacgacaaagcgaggagcatacggacggacacataagctgggtacgaactagtatgtgacacacagtgggagaacagaaggaacataagagtaggaagcatggacacaaaggagaataactcacgaccgagcagcaccattgagctgacccgaggaacgttcgagaggaacacaccggaagacagtgaacacaagtagtgagcgaacagcaagtgagagagggacacgctaagtacaaagaagaacaggtcgtcggccgtgctctcctgctcgtggcctgccattgt

SEQ ID NO: 669506 - DNA, 256 bp, Homo sapiens
ttgctctatgcggctagaatatgatgagctgggactggtagctggctattgagggccttcaggtcctgggagcccgactgatgtggcagaggccttaatatgtagacagagcgggttacgcgaagtgctggctggcgtgcgtgctctccagtgccctgtgaagggcttctggatctgggagtgcccagtgcccatgatccccctgcttgctgtggaaacagtgtagtcggggatcatgggaggccattcaacgcgg

SEQ ID NO: 669507 - DNA, 291 bp, Homo sapiens
gacccaggctgttaagtctgggaaattcaagcttatgactggggaaagcccagttcagaataggatgcactatgatcagtcccaaaactccctactacaatgtgacaggccatgtaatgttacccacattgcagctgtggaaccggtggcaaggacctgttggcgtgacccaccaaagatgttggcctatttgcttccaacaactccccaatacttattataccacacaggagattcctattttacaatcacttggactttatactgggcaagtggatgccccgtcaagaa

SEQ ID NO: 669508 - DNA, 1078 bp, Homo sapiens
  misc_feature (269)..(269): n is a, c, g, or t
  misc_feature (391)..(391): n is a, c, g, or t
gagttgagaagccagatactaatagagaagaaacccgaatccaatgcaaggttgatgcttggtgtgcaaggtgaaaaagggtaacctcaaagctaagaagcccaagaaggggaagcctcgcattgctagcacgcaagcggctctgatcctttgtcagcaagtgaattgggactaggtattctcgcgatctgctcatgtacttccaggaaaggtccgatgatagcaaggagagtaacgtacgtcgagaccagctaaagagtccgaagggntgtgcagagacatgaagaacacgaacggacgaagagtatctacgcaaacgtgtgtacaagaagccacgattggctggctgacaatgaaacggcggtacccgggctggcttaacacctttcgncaacatagtgctctagattgattcatcctagctgaatgaatgttgcccatcaggagacaggatctgctaagaagagcgcaaactgggcgaaaataagactccttatcagaatcaaggcgaccgttgcaggacaacagcgtggactagaagacccaagacaaatgtgaccgcgcacgggaagaccctagtgtcctggaatccagtcgcttcgacatggaggaagcgacccatcatgaggagacacaatgacaggggatgcgtatctatagcccttgaaaagcgcagccctggcggcctcaagttcgggacttatatttgcactttggatggaactcgggaacccttctcgggattccttccaaagtcagagctttcgcctctaacggaaaggaaaccgactaacccaaggaaaagaatctctgggtgccagtatagaccgacgttttccgaaaccccaaagacattcggaaattaagtcgagtgccaaaacggttaaaaagagagaattctcaccaaaaaaacgaatttctttatagccgtggaatttggctttataaccttctgccaaacgaaaaacgaacacggaaaaggtcgttgacgggcacaatggcccccgaggaaatcaacccaggggaacagggtgcaggaattcgtttatcgaacacatcaaggaaaacaaaaggacga

SEQ ID NO: 669509 - DNA, 122 bp, Homo sapiens
accaaaagttgtttgtttatactctattaaatgtgacctcatttaatggttcggtcatagtggacatgtgcttgaatttgtgatgatacgggttttttatttcctttgttaatgataccgcg

SEQ ID NO: 669510 - DNA, 96 bp, Homo sapiens
actcacttctttctcagcctccaggacactattggccttttttaagagacaatcttatttttctaaaggtgaatttctagatgatagggtgaccct

SEQ ID NO: 669511 - DNA, 381 bp, Homo sapiens
tctcggcttttttcccgcggaacgttgatgcacctttgctccgaggtactcgcctcatgtcttgctctatcgacgtgctcactgatgccctgttcgtgtcgactacccccgtcggctgccttgtgcagcaacctctttataagcacacagctcatctctaatcttttccattcatattagaggaagtaggacagagttgtgtatttctttataaacaaatgatacactagctttttacaaaagtgactgttagaacttatatgagttctgagtagtggtcccttattaaaactcctggaaacattttagtaaccacataaatcatgttttatggtactcagacatccaaaagtgattgttccccgatggggatcctctaaa

SEQ ID NO: 669512 - DNA, 115 bp, Homo sapiens
agactcaaaatgctgcataacagactcactggggcaggaggatcccaggctcccaccctccacttggcgggccccgtgggccagatgcttgaggggagctctctaccccacccat

SEQ ID NO: 669513 - DNA, 393 bp, Homo sapiens
  misc_feature (234)..(234): n is a, c, g, or t
  misc_feature (375)..(375): n is a, c, g, or t
tccgtctcacgctcaacagagaagtgctaggattaaacatggagtccgttaagcagacctgctgcctgagaatcacttcactgaatatgcgtctagcgaagcttatctatgttagcgcctcctaaagctcatgacataccgacacttgcggacgcttgatgaatgaattcaatatgttacggcccaagatgtttgacatgcctgctatagtcgttgaaccacgtcttccatgtnattggtggttaattttaaaactactgtgccttaacgtgtttcttaaacttttgtagtaaatgaacatttgaaatccattttgataaacctgctgttaatgttttttccccccttgtgaatgttttctaactttgtcttggnaattgcaatttaactagg

SEQ ID NO: 669514 - DNA, 535 bp, Homo sapiens
cttcctgaagagctgggaacacaagggcttcaagaagagctgcgacaatgtagtggcaggttgggcctataagcccaccttgctgggacagggtgtgcgggcaacgaccatcattgtactcaaaggatggagcacgaagcagcaggaggcagagagaggctcacctcagcgggggcaggggcaagcggtgcgtcccagtggtagccttggggagttggcagcacattgggaacacgggggcttcccagagcgcctttcctcccaccacacctatccttctagccctcttctctccgacacccttttcccagcctgaatgtagaccactgtcccttgtcttggaggtgggaaaaacaaattactgtagtaacaggaaacatgtcctcttctaatgtaaccttagagggggaatcaagcccagtgttttccaacgcatttttagcagcagaatcatgttccaaaaaataataataataatcacatgaaattgtaagctgcaaaaaaattaaaactaggactattgtggcttcaaaaa

SEQ ID NO: 669515 - DNA, 140 bp, Homo sapiens
ggtaatattttcagtctcttatatagggttctcctatagctagattcttgaaaaagttaaatagttctgtcaaattctacataaaaaatacaatgtgttatatttgcatgaacatagtggtgtttattaggtattgtata

SEQ ID NO: 669516 - DNA, 393 bp, Homo sapiens
gagatctcgccactgcagtccagcctggcgacagaccgagagtcttgtctcaaaaaaaaaaaagtgttgacaatgccaaaccttgcgggccatacggtgggatctctctctattttggtcatgcaccgagataaggagatcccatatataaattctatggttgtcccataagattataatggagctaaaaaattttctgtggcctagtgacttcttgatgatcctgaccctgtgtagacctaggctaatgtgtgtgtgtctcacgggttcaagtgttccatcttcacaattctaattctagtgactatcctagaaatcgctgtcgcctaaatccaagcctacgtttccacacttctagtaaagcctctacttgcacgacaacacataaaaaaa

SEQ ID NO: 669517 - DNA, 330 bp, Homo sapiens
  misc_feature (22)..(22): n is a, c, g, or t
  misc_feature (265)..(265): n is a, c, g, or t
  misc_feature (288)..(288): n is a, c, g, or t
ggaaataacacaaaaacgccangcactgtcacaaccatagtggggaagatactttgggaaaaggtgtctttgggggttgcttcaagccacacagtgtatacccacccaggatggtcctggccttggttctgaatgacagacctgctggccccatttcccacctccttaacctttttatccaagaagcagaaacacattcacaaatggtcaaggggagttgtttctaagctctgtgtcaaaaaggcccagaccaattccacttggnagtagtcagaagtcccggtcttnaaagcccagactgatggtttctggcctaacctggggtgcttg

SEQ ID NO: 669518 - DNA, 168 bp, Homo sapiens
cccttatactgattgagctggcctcgatatcattgtccttatctgcttcctagtcctgtatgcccttttcctaacactcacaacaaaactagcctaatactaatcatctcagacgctcaggaaatagacatgcgtctgtactatccggcctgtgcaatcaggtgtaga

SEQ ID NO: 669519 - DNA, 739 bp, Homo sapiens
  misc_feature (107)..(107): n is a, c, g, or t
ccccccggcggccaaatttttttgggggcctccccccctcccgcgggccccaatttttataagatcttctgcccgtgcgttttggcgcccgtggaggctaatcgttngtgttttccacgcgaggggccgcctgctggcgcctggtgttttgcgcgacgctgctcctcgttgacactctggtgtaccccgccaagcgttatacctttgttgaggcccaccgtcccccaaatggcgccttctcccatatagaccgttttttttcccccaccattaatgggggcgtcttctactctccctgggtggtctcccccacatttctccgggggatcaaccccttgtgcgcccagcccttattccccgcaaatcgcccgttctcctactcaatatttctcctcggcgggaaatttaacactttctgtcccaccacaaaatgtctcgcgccatctccggatagccccccacacttgtcatccggcttacccccacgatagcgcagtacacacccacctatgctacacatcctccatcaccccattaagggtccaatctcaatttttttcacaccccctgtataaataataaaaatttctcatatgatatttgagagaccgctccccgttccgagaaccgcgaaaatcactaattatttatagaagcacccccccctataacccgggggggaaaatgggggccccccccccccccccccccttggaagaaacccctttaccaaaaaaaa

SEQ ID NO: 669520 - DNA, 823 bp, Homo sapiens
gcatgatgaaatggaaatgaacagtattgcaatgtccggtatacaaaataacattaattcaatgtagataaaattacactagtttaaaatatgtgcattcactgtatttgttagtgttttagtcttttttgaaagatgtgctctgttaatgtgctttttttttttttaactacatgctagtctaacatttccggctctatgccgtgcatctttaacaagggccaaaggtgaagaaaattgctacctttttggttaccaagacactgacttgaaacatgtacatttaaagccttttatttttccccttttggtcttgggctagtggggcattctaaactaaggacaaggaaaaatattttggggggcaaatcaagagcctatgagttctaagtataaagctgaagtgatttcgaatgccagcgtatatattggcattttccacatttacgagggacgtatatgtgtactgtgtgtgcccgcatgcatgtgtatgtgtcgcttcgttccatcaactaatcaaaaggatccttcacgaacatggcgctgatgggaaacagagtttgactttaacgaaaccagatgaggtgtctcataagtagactccactgcggttgaggtttttcaccttaaagataggggagcagaagcttcaggccctggggtatcgaccgcgtggtttcctttgttctagccgttccgacaggtaacaggacagctgctctaaggctcggacgctttcctacatagacggaagggggggcggcagcagggcgactcgaggtcatacaccagggagaagacctaattttgcagtaaccctgtt

SEQ ID NO: 669521 - DNA, 106 bp, Homo sapiens
ctgcttgtggagggagaagaggtggctcttcgggacaaggcgcggtcctgggagccggcagagatcgtgtcagaccacgcacggtgtgacaagaaaaagagaaacc

SEQ ID NO: 669522 - DNA, 163 bp, Homo sapiens
catttttttgggccttttttcgggggggggggttttttgggccccccaggggttttcccttggaaatttttttggggggggccccccgggggggggcccccaaacccctttttttaggggggtttttttttgggtttttttaaaaggggttttccccccccca

SEQ ID NO: 669523 - DNA, 276 bp, Homo sapiens
tttttttgggggggcttttttttcccccccctacggggccggtcctgtttttcaacgggcctttttttggaaatcccgccctttggggggtttttttttcccccctacccaggggccccctttcccggcttttttagccccgttttttgttttgggggaattttaagtttttttggggcccttaattggccggttttccccccaacctttttgtaaggcctggggcatagtgggccgtctttttttgttttgggaataaattgcccctgggggcta

SEQ ID NO: 669524 - DNA, 449 bp, Homo sapiens
aactgccacacattcttaaggaactgccggagaatgggaaagtgtgtcctggggtacacactgaggccttgaggataacgttggaaatgatgtgtcgggtcagtcatggagtttgcatgatgatgctaggaagtatggattgactggctagatctgttcagtggcgagtggtactgagtgtggactgtcatgggttgctgacagatagtgatttgattgagtgagtgacagactgtgcagccgtgctaaatttgagaaagcgtgtttaaaaaaacttctacagaactctagtatgggcgtctgactttgttccagggtgtagaatttgactcaaaagtaaaaatgagtttgttgtaggatattctactttcattaatgttggtttgttctgaaagtgatattatattgtacatgtaaaattagtttaaatattttttcaaataaaaatg

SEQ ID NO: 669525 - DNA, 291 bp, Homo sapiens
ctaggtgtggtggctcacacctgtaattccagagctttgggaggctgaggcaggaagattgcttgagcccaggagctagagactagtcagggcaacatagcatgaccccatctctatgaaaattttttaacaaattggctagtggagtggtacacagctgtagtcctacctacttgagaagcagaggcaggtggattgcttgaacccaggagtctgaagttacagtgagctatggtcacaccactacactccggcctgggtgacagagcaagaccccatctctaatttaaa

SEQ ID NO: 669526 - DNA, 145 bp, Homo sapiens
tagccttcattctgtacatcaatttcatagtaaatataatcatttaattagaatcttaatatcctcatttaatatattattatttctctgttttttttttccttatgagagccgcttccgtagcatacttaatacataaccgtgg

SEQ ID NO: 669527 - DNA, 512 bp, Homo sapiens
  misc_feature (336)..(336): n is a, c, g, or t
  misc_feature (338)..(338): n is a, c, g, or t
  misc_feature (344)..(344): n is a, c, g, or t
  misc_feature (354)..(355): n is a, c, g, or t
  misc_feature (358)..(358): n is a, c, g, or t
  misc_feature (372)..(372): n is a, c, g, or t
  misc_feature (386)..(386): n is a, c, g, or t
  misc_feature (393)..(393): n is a, c, g, or t
  misc_feature (396)..(399): n is a, c, g, or t
  misc_feature (404)..(406): n is a, c, g, or t
  misc_feature (411)..(411): n is a, c, g, or t
  misc_feature (422)..(422): n is a, c, g, or t
  misc_feature (450)..(450): n is a, c, g, or t
  misc_feature (499)..(499): n is a, c, g, or t
aggggcccaccgttcaaccaccgtgcgctcctgtgggggaaagagacatggttgacaagcacacagaagccagttggtgggagtaccttatggagttgatgacgccagccgcctggccggagccaccgcttgaagcacccaccgaagacgaccatgacgagttttaggtggatgggggcaaagaaccttaaaaagggattaagccagcccctgcagtgccgtccacccgcccctttgggcctgcctgtggttttgttgccctcctttgtgggggcaggacctttgtggggctttgtgccctgctttgggggccagggggggggtggtccacatttncnggcccnaacagccttnnaanatgggtaaaggagnttgccctccctggnccccccnccnnnntgatnnnccccnccacccccacnctgtccctgccacccctctagtggggantagtgaatgacttgacctgtgacctcaatacaataaatgtgatcccccncccaaaaaaaaaa

SEQ ID NO: 669528 - DNA, 1675 bp, Homo sapiens
  misc_feature (68)..(68): n is a, c, g, or t
  misc_feature (76)..(76): n is a, c, g, or t
  misc_feature (148)..(148): n is a, c, g, or t
  misc_feature (154)..(154): n is a, c, g, or t
  misc_feature (164)..(164): n is a, c, g, or t
  misc_feature (179)..(179): n is a, c, g, or t
  misc_feature (232)..(232): n is a, c, g, or t
  misc_feature (275)..(275): n is a, c, g, or t
  misc_feature (532)..(532): n is a, c, g, or t
  misc_feature (712)..(712): n is a, c, g, or t
  misc_feature (784)..(784): n is a, c, g, or t
  misc_feature (824)..(824): n is a, c, g, or t
  misc_feature (932)..(932): n is a, c, g, or t
  misc_feature (1027)..(1027): n is a, c, g, or t
  misc_feature (1096)..(1096): n is a, c, g, or t
  misc_feature (1261)..(1261): n is a, c, g, or t
  misc_feature (1267)..(1267): n is a, c, g, or t
  misc_feature (1282)..(1282): n is a, c, g, or t
  misc_feature (1300)..(1300): n is a, c, g, or t
  misc_feature (1324)..(1324): n is a, c, g, or t
  misc_feature (1333)..(1333): n is a, c, g, or t
  misc_feature (1362)..(1362): n is a, c, g, or t
  misc_feature (1369)..(1369): n is a, c, g, or t
  misc_feature (1374)..(1374): n is a, c, g, or t
  misc_feature (1376)..(1376): n is a, c, g, or t
  misc_feature (1469)..(1469): n is a, c, g, or t
  misc_feature (1476)..(1476): n is a, c, g, or t
  misc_feature (1504)..(1504): n is a, c, g, or t
  misc_feature (1520)..(1520): n is a, c, g, or t
  misc_feature (1552)..(1552): n is a, c, g, or t
  misc_feature (1603)..(1603): n is a, c, g, or t
  misc_feature (1675)..(1675): n is a, c, g, or t
cggcgtgactgcgcgcgctgccgcgctcacgcgacgagctaagcaaccggtgtgtatatagccttctngtagtttngtatagttaattggttatgttgtagtgatagtgagagtgacgtgaatgacgcatgcgtcttcgctatgtcgnaccgcngacgtgtatngacgacgattactgngactatgatgggtctgacacggagatcgtgctctcgcggcgagacgcagcatnatgcgactacgcgcgatgctgtgacgtggccgccgcgccgcgngagatctcttctgtacaaccgcaccaagtaacagtaagtctacgtataatatacgcaatctgttcacatgtcgtgtctcgcaatccaccagtcagctggactgtctcggctatatctctggctgatgtatgttattataattatcgtctcatacataattatctcccacaccactgcctattatctctcgcatcagttatgcattacgtaatagcgaatacaggcgtcgcctcgtgacgtcgtcacctactcagcantcaagtacatcgacgacctttcgttaactacgtatcattactctttacgaatgtcatgtgtatactacaacatttctatatactactactgcgccgttcctcgtagcggtgcgttatgatatacacctatagattacagtgtgtcgacgtgccatgcgccgatgtcgatgtacgcatcgncgttcgcgcgcgagtatagctcagtagtttcctactctccttcttgtccgcgccgctctggtcgatatgttnatggagtacacctcatcgtcctccgtctcgctaggagtantctacagttgcgtgcggggtgtgtgtatgcgtcggccgactcgcgcgctgacgcttgcgtagtaatctggcatgtactgatgacatgtcggggcaagatgctccgtgngtgtagtagtagaggcggtgagtgagtacgagaagacaccgactacgtgcatattactatttactagtcgtgcggtgcgtcgcttcgtggactcncagcgtatatcgtgactcgactagcgtgctgatcatctatgtcttgtttcatacgctgcagcggagtcncgcggtcttgcgagctagtacagcttgtcagattcggtgtgtcagtcgcgcgagagcgctgtccgcgcgttgtgagccgcgctgtgtacagtcagtggagtcgcgagtggcgatatcagtgcgcgttgctcatgcatcgctgtcagtacactcgagtcgcaacgnactctngcgtgagctgatgtntgagagatgcgtgtcgcncctcgtacggacttcactcaagtnactctctgntgtcgacacatcacgtgcgagagtgcagnctcgccncgtcngntgtgacgctcgactagtatagtgctgcgtatgcgcgcagagagtactgacgacgtggctaccgtgtgtagtgtagatatatgcttacgtaganagacaangtcatctagcgacgtcacagactgagtngacgatttggcgcacntgactacgacaactagcgaggacacgctatancgcgcgacgcacctactgcgcgttacgacagatgtctactccgcgtgatcnacgcgtactgctacactcgtcctgatagtaatcgcgttactcatgacgtctggggtcgagtgcgtcgcgcgn

SEQ ID NO: 669529 - DNA, 1191 bp, Homo sapiens
gggctgccgttttgccgcggatgacctgggaccctctggcagacgactgttccgcgcggcgttgtctctagagactggcacggtcactgagtctcataggacatgtatggtgcagtgtccaagatgtcagacctgtctagcgagtggctgacagggtgctgggacgcgtcgccagtgaggacgtccatggtctggagcccatgaatccgtgtggactgtgtgcgatggttgcgtgacggattgcgagacggacacgagacgagggcacgacgtgtcgggtagggcctgatgtggaagacatcagtgagggcatcaaggagagaagctacttggcaacggtcagaaggcgttgcagctccttgtgcacccggcccattcggggagatcgcttggttctatagtaagctaggccgtagtgataacctctgcaggaaggcggataacatacatcgtggggccacgctggacgactaccttaagttggtggggtgactgggctatgccggcgtaagggttggaggatatcgcagagttgaagcagagagatatggccactagaggatatgatccgagcagatacgcaagagggaacacaggaagggagccgggcagcccggactcagtggcaatggcaagcacgtaaaacgcaaaagcagcaacgataccagcgcgagcgtaactgggctcccacaggcggcaaaacgccaggcaaactcgggtcaacactgtagccgcggcgcgttggaccccgacacggacacgagggagagcgggtccggcacgcagccagaagtagactgagcgacgcggccacggggtcgccgaggagccgactgccgaccaataccccgagggggacaccctatgaggcaccgtaggacgacctgtatgggtaggccgcacagcgcaagcgaccgctgcgactttgaggtgagcgcctcagaagcagcgggacggcagcgggcgagcaagcagagggacccaacgctgggggatgcgcaacaagacagctggcataccgacacgtgagacaggagccgtcagaacgggaaccaaggcggaggggacaagatggaagtcctgacagtgcagcaggagaggccaacatggcgcacggcaaggaaaggagacacggcggtgagccccaggagcgggctccatgaggagagggcgagcgccccgtacggcaga

SEQ ID NO: 669530 - DNA, 235 bp, Homo sapiens
  misc_feature (39)..(41): n is a, c, g, or t
gggcatatagctgttcggaggttctacagggagcacagnnnctcgtatcccttaccgaataccggtcctcctctatcggggatggtcgtcctcttcgaccgtgcgcgcagcttcgggagggacgcacatggagcggtgagggaggaaggggacacccgcctagccagccagatcagccgaatcaaccctggcgatcaatggggtgacagagctcttattgcccaggctggagggc

SEQ ID NO: 669531 - DNA, 677 bp, Homo sapiens
cagcacaggctaatgtcatatgtgagtagacagtggggtttcaccatgtggccaggctggtctcaaactcctgacctcaggtgattcacccccctatgacctcccaaagtgctgggattacaggcgtgagccactgtgcccagcctgtgtggctctcttttggttaccctgtggtatcctgttttctcaagctcatcctccctggtgggtccatgatccctggaaattgttggtcttctccggccttttgaaattgctgccttatgaatgtccagagttgagtatctgcctttctctcccaaggaggaagaatcctgagggggcatcttggcttttaggtcccagggctttcactgacttcctccttgctggcttcttggtttgttccaaagatgtcctcggtacatcttctgagactaatgacatgataagtttctggaaggactatgatctggatgatgagggtttcatcacagtcctctttcagttctgtcctacggattacacttgttttcttccttcatcctttgtcttcactggttcactgtttccatctgcattcttctgttctcatttcttttagtcgtcgtcttattttttatcttctactctattttttagatggagtctcactctgtcacccaggccggagtgcagtggcgcgatctcagctcacg

SEQ ID NO: 669532 - DNA, 343 bp, Homo sapiens
gcagactggataacgaaaatgtggtatatacacaccatggaataatatgcaaccatagaaaggaatgagataatgtcttttgcagggacatggatgaagctagaaaccatcatcctcagcaaactaacacaagaacagaaaaccaaacaacacaagttctcattcatcagctggagttgtacaatgagaacacatggacacagtgtggggattacacacaccagggccagtcagggggtggggggcaggggagggagacattaggacaatagctatgcatgtggatttagacctagtgattgttgatagtgcagcacccatggcacacgttaccttttacaat

SEQ ID NO: 669533 - DNA, 201 bp, Homo sapiens
gcgagcaggatggacatgtattgagacgagtgttagggatggctgtctggccattcacactatgccatgatgaggaggatgcagttgccagaactgcccaggacatgcagctacaggcgatatattgcagacacattgagtaagtgcatcagcaagggaaccttctcaccaggatgcggataaataatgttttcaaggttt

SEQ ID NO: 669534 - DNA, 163 bp, Homo sapiens
acaaaccttaattatttgcccaaacttattccttcagtgataggcagtagggggtgttgaatacatctcacggcagcctccacctcccaggctcaggtgatctcccacctcagccttccgagtagctaggacctcaggtgtgagctaccacatctggctaatt

SEQ ID NO: 669535 - DNA, 507 bp, Homo sapiens
acaagcttgttagatcttataaatatgaaagtttcccaatactttagaaaaattactaatcattaataagtcgattttatactctaaagtaatggtctaacatgtcgaaagatgaaacaacgctcctcttatgagagcatctcagatgtattaagtaagctccgtgtcccaggcttttgcgggggacagagaagtcctcatattgcaacctgaccagatgactctgggagtgaattaaatgcttaaaagaggtcagtcttgcaaattcgatgaagcacagaatacaggggaactgatactgattctgataaaagataacattactctcagaaaggggtgaagctaaaaatcttgcagttctggggcaggaggagtgcaacaagcaggcaacaaacagcatgaaaggaaaagctgacgtgaactttcaaagttctattgggagatggagttagtggtctttctgcccacccaggtcaaggtcatgtccagaagaggatttcttcccag

SEQ ID NO: 669536 - DNA, 267 bp, Homo sapiens
cagaagctgctggtcccgagggcgagtgttggaggccagaattcaagctgagcacatcaatcagacgcctgttaccttcaagtgccgggcttgatgagctcccaggtgcagattgtgcgggcacccgactgaggtcctgcgcctcattaacattgtggtgtctaaggagctgctggacgacgaggagtattaggagatcggggaggatgttgcggtacgagtgcaagcaagtacggggttgtcgaatccatcgagatccccccgggc

SEQ ID NO: 669537 - DNA, 104 bp, Homo sapiens
ccttccccccaaaaggttttctttgcaagtgcttttggaaataagagctagtatcttggattaactgaggcccggtagggctttctgattactcgcattctgtt

SEQ ID NO: 669538 - DNA, 229 bp, Homo sapiens
ttttttaaaaaaaccccttcccaagggaaattgttaaatcgtctgtcttgcgggtgccaaaactgggtttttgtggaggttcaaaccaggcacccccataagttgctctcaaacccttgttttaaagaacatttttggttatctggacttctgaagcgggggggaagctgttaattgtatgtcccccccctcccccgccgttaaaaaaggccccaaaaaggtttttgta

SEQ ID NO: 669539 - DNA, 749 bp, Homo sapiens
ggatcatcttcttggacatcaggaagagatgctcataaagaggatcgagagcgttctttccggtgaatccagtatttgtgtgctcatatatcaggccttggtggtatatggcttcatttaaggctgtcatataagaacattctgtgagaggtatcgcatcgaagaactgggttataagtaaaaccatcaagccgaacaacagggtcttgagataaccgtttgaagcttattgtactggtgctgcgcagacagatgtctgcattactcattgctaaaaatgtgtagcacagaatgcactaggattactttgtttacaagaagaaatttaaactctacgtttggttttcacatacagcagctctattgaataacatgcatctgaattttaagttgcaaaggtatctgaataatttttcatgtgcatctttgtgtcgaatgtttggttcaagacagactgtttaaagctttttaaaagacttcagttcttaatgtactgtacccttctgcatggaaaatcataaacaacatggtgcagtagacttcttagtgtgtaatccagcgccacttgcagaggggtgtttatcatattgtacttggggtgtaggactctagtgttctgtggggtgtattgcatgggtggatttatctaacagcattgtcccaataacacttaaaaaagggcggatacttccactgatgcttgtcttgggaataatccactttcgggttctcaaggaaggtctgggaaa

SEQ ID NO: 669540 - DNA, 355 bp, Homo sapiens
  misc_feature (27)..(27): n is a, c, g, or t
  misc_feature (33)..(34): n is a, c, g, or t
  misc_feature (38)..(38): n is a, c, g, or t
  misc_feature (42)..(42): n is a, c, g, or t
  misc_feature (54)..(54): n is a, c, g, or t
  misc_feature (68)..(68): n is a, c, g, or t
  misc_feature (77)..(77): n is a, c, g, or t
  misc_feature (88)..(88): n is a, c, g, or t
  misc_feature (93)..(94): n is a, c, g, or t
  misc_feature (108)..(108): n is a, c, g, or t
  misc_feature (120)..(120): n is a, c, g, or t
  misc_feature (205)..(206): n is a, c, g, or t
  misc_feature (217)..(217): n is a, c, g, or t
tgtagagcacccccgactcatacttcngaaagnncctngatncaaaaaatttanttggacctgctatnagcaggtgncaggagccggnttcanntgaatcttcaaatnggaaaatactgnttcaccacctggggacaaagaggaaaaaatagaggccactctgggcaggctacaacacttaacaaaaatttacataaaactgagnnatccctatgtnccactatatgtaaatactgtataacattaaaggtgtgatatgttttgtaaattaacgctgaacagtagagtccatgagctgtaaatccacatgtgcaccactggtttaagaggtgatatccttttacaggtattcttt

SEQ ID NO: 669541 - DNA, 236 bp, Homo sapiens
  misc_feature (103)..(103): n is a, c, g, or t
  misc_feature (125)..(125): n is a, c, g, or t
  misc_feature (133)..(133): n is a, c, g, or t
  misc_feature (191)..(192): n is a, c, g, or t
ggggggacgcgggtcggacgcgtccgggctgtggaagagagcggcggccgcttcacaacatgcacagcctggcgacggctgcgcctgtgcctactacactggncacaagtggatagagagatctntcagtggnttcaatgagctgtccagtcctgagactagggtgctttgctggagctaataaggcgagnnctgttcctgaccttgcacccatgctgtggcattcatttggtact

SEQ ID NO: 669542 - DNA, 376 bp, Homo sapiens
  misc_feature (232)..(232): n is a, c, g, or t
tccaaagatacctgcctgcaaaagtcaaggtcataagaaatatgaagcgcgagggattgatccgaggacgaatgatcggagcagcccacgctacaggagaagtcctggtgttcctggacagccactgtgaagtgaatgtgatgtggttacagcccctgctggccattatccttgaggacccacacacagtggtgtgccccgtgattgacatcatcagtgcagacacacgtcnttacagctcatccccagtagttcggggaggtttcaactgggggctgcacttcaagtgggatctagttcccgtatctgagctgggagcctgacggcccacggccccaataaggtcacctacaatggctggaggcttgtttgccat

SEQ ID NO: 669543 - DNA, 524 bp, Homo sapiens
  misc_feature (472)..(472): n is a, c, g, or t
  misc_feature (517)..(517): n is a, c, g, or t
gtagaattagatctttccaagcctgctttctgtatcaaatgcactgttcattggcacagggtggtctcatggaccagaagacctgagacccctgaggcctgattttggcttgatggtggtctgatgcaggccatctttgggatcttcacttttccatctgtgaaatgggaagaaggccaatctcagtgccatattcaccctcaaagtttttaggcttgtgagagcacatttgatggagagctctgagcctctgtgccttgccttagagaaaactgatagaatccaaacgtgcatttaaaatattttctggagaaaaattttcctcacccagagacacccttattgtataataaatattaacagaaataatatagtgaaattaatgatgacataaaagcagtcattgtggtgatgtgactgggcacacaggccatctctccagttatgggtcccgggagccagcaggccaggncttcaggggtgtcttcaagggcctctggcacacgtgcaacccacnttgtgcc

SEQ ID NO: 669544 - DNA, 121 bp, Homo sapiens
tgatctagaggatcccataatttctgaataattcagaaaataacttaactatctttccagtttagtttataaagtaacaattctgctatatcaaatttctgaattaacttttctgaattca

SEQ ID NO: 669545 - DNA, 434 bp, Homo sapiens
  misc_feature (290)..(290): n is a, c, g, or t
  misc_feature (292)..(292): n is a, c, g, or t
  misc_feature (434)..(434): n is a, c, g, or t
actgaggtcttgagaactggaaaacttcccttggttttcacacaggaatctgtcatttgtgcttatttcacattgcatgcctgtatcaaaacatctcatgtacacccataactatatacacctactatgtgcacacaaaaattaaaaatagggctgcacatgggtgtcacgcctgtaatcccagcactttgggaggccaaggcagggagaatggcttgagcccaggagttcaagaccagcctgggcaacgtggcgaaaccctgtctctacaaaaaatacaaaaaaattangnccagttgctggtgcacacctgtggtcccagtttttcaggaggctaggtgggaagatcacctgagcccaggaggcagaggttgtagggagccaagatcaagccactatactcaagccggggcaatagagtgagactctgtcan

SEQ ID NO: 669546 - DNA, 910 bp, Homo sapiens
  misc_feature (58)..(58): n is a, c, g, or t
  misc_feature (69)..(69): n is a, c, g, or t
  misc_feature (92)..(94): n is a, c, g, or t
  misc_feature (103)..(103): n is a, c, g, or t
  misc_feature (142)..(142): n is a, c, g, or t
  misc_feature (181)..(181): n is a, c, g, or t
  misc_feature (183)..(183): n is a, c, g, or t
  misc_feature (185)..(185): n is a, c, g, or t
  misc_feature (201)..(201): n is a, c, g, or t
  misc_feature (212)..(212): n is a, c, g, or t
  misc_feature (218)..(218): n is a, c, g, or t
  misc_feature (225)..(225): n is a, c, g, or t
  misc_feature (240)..(240): n is a, c, g, or t
  misc_feature (248)..(250): n is a, c, g, or t
  misc_feature (254)..(255): n is a, c, g, or t
  misc_feature (257)..(257): n is a, c, g, or t
  misc_feature (264)..(264): n is a, c, g, or t
  misc_feature (278)..(278): n is a, c, g, or t
  misc_feature (291)..(291): n is a, c, g, or t
  misc_feature (334)..(334): n is a, c, g, or t
  misc_feature (337)..(337): n is a, c, g, or t
  misc_feature (425)..(425): n is a, c, g, or t
  misc_feature (437)..(437): n is a, c, g, or t
  misc_feature (470)..(470): n is a, c, g, or t
  misc_feature (473)..(473): n is a, c, g, or t
  misc_feature (482)..(482): n is a, c, g, or t
  misc_feature (495)..(495): n is a, c, g, or t
  misc_feature (504)..(504): n is a, c, g, or t
  misc_feature (521)..(521): n is a, c, g, or t
  misc_feature (557)..(557): n is a, c, g, or t
  misc_feature (564)..(564): n is a, c, g, or t
  misc_feature (573)..(573): n is a, c, g, or t
  misc_feature (584)..(584): n is a, c, g, or t
  misc_feature (593)..(593): n is a, c, g, or t
  misc_feature (803)..(803): n is a, c, g, or t
  misc_feature (811)..(811): n is a, c, g, or t
  misc_feature (832)..(832): n is a, c, g, or t
  misc_feature (840)..(841): n is a, c, g, or t
  misc_feature (908)..(908): n is a, c, g, or t
cgcgcgggagtgcgccacgcggggccggagcgcctattagccgccaggacctcggagntccccgacctnccctgatcccctctggcttcggnnntccccagcnccccttcccgggtcccctcgcccaccctaatccactctncctccctttcccggattccctcgctcttcccatcctctntncngccccttcctggattncctcacccgtntcgttnccctctncgccctttcccaganacccagannncctnntnccccgcnccctccccggagcnccccgcgcgtgcngcggccatggcggccgtgcgcggggcgcccctgctcagctgcntcntggcgttgctggccctgtgccctggagggcgcccgcagacggtgctgaccgacgacgagatcgaggagttcctcgagggcttcctgtnagagctagaacntgagccccgggaggacgacgtggaggccccgcngcntcccgagcncaccccgcgggtncgaaaagcncaggcggggggcaagcnagggaagcggccagggacggccgcagaagtgcctcnggaaaanaccaaaganaaagggaaganaggtaaganagataaaggccccaaggtgcccaaggagtccttggaggggtccccaggccgcccaagaaggggaaggagaagccacccaaggccaccaagaagcccaaggagaagccacctaaggccaccaagaagcccaaggagaagccacccaaggccaccaagaagcccaaagagaagccacccaaggccaccaagaagcccccgtcaggaagaggnccccattntggctcctcagaaacctggantggcaatnnccccacccccagccctggcccgaggagctacccaggagggaggggggccctctcaaataactggcanat

SEQ ID NO: 669547 - DNA, 334 bp, Homo sapiens
acccagtctcttccatacagagcgcacgcacagtatagacgagtccatgtcttgcactggaacacgagcgggtcaagctcgggcaagactgctacgatgtgtctagcccagcatctccccagccttcctgattatctagcgagaaagggagtctccctgctgagcaccttgaatagggaggacggaagaaggaacctgatgagaaaggaggcagctgccattcctgggctatcctctctctgtagcaaggcagccatcacaggagcaccctgaactaggagtctactgccggatggatgcccgcctcgtgacaggtgaagacacaagtctccac

SEQ ID NO: 669548 - DNA, 1866 bp, Homo sapiens
acaggacaaggtaagtggggaggggcacagagcttccatgccctctgttgggcacactaccctcccaggacctccttgtgtttagcaacacagaagctctccaaaccctgctgtttgggtgtttatggaggcatgattgataaaatcactggccattggtagttaagtcaatctccagttccttttgcctcctggagttcagcaggtgaggctgaaagttccaagcctcaaaaaatgtggttggggccaggtgcggtggctcactcctgtaatcctagcagtttggaaggctgaggcacatggaccacttgaggtcaagagtttgagactagcctgaccaacatggtgaaaccccgtttctactaaaaataacaacagttagctgggcgttgtggcacatccctgtagttccagctactcgggaggccgaggcgggagaattgcttgaacccgggaggtggaggttgtagtgagctgagattgtgccattgcactccagcctgggctacaagagccaaactccgtttaaaaaaaaaaaatgtggttgctttctctggcagctagccctcctcctgaagcagtctcggagcttgcagccaccctgttagctcaacagcatcccacatgcattcttaccatgctgcagatctgaaagaccttagaggcccttgtgtcaggaacctgggactaagactaaatatcaaaacagaaaatgctcctattacctctgtcacgaagggctttataagagctttggaagctttatgccaggaaccaggggcagagaccaaatgtatatttcttttcttatatcggagacagagtctcactctgccactgaggctggagtgcagtgatgtgatcatagctcactgcagccttgacctcctaggctaaagcaatcctcccaccttagcctctccagtagctggaactacgggcatgcatcaccatgtccagctgattttaattttgtaaaggcaggatcttccttttttccccaggctgatctctaactcttggcctcaagcaatccttcctctttggcctcccaaaatgttgggattacagatgggagcccccatacccaccaatcacaaggatctttataagagaatgaggtaggagagtcagaattagagaaagtgatgtggtaatggaagaagaggtcagagagggagatttgaagatgctgcacttctggccttgaatatggagtcacgaggtaagtcaaggaatgggggtggcttctagaagctggaaaaggcaaaggagcacattctgtctagagcctcccccagaaggaatgcagcctctctgacaccttgactttagccttaatagacctagttgggcttctggcccccagaactgtaagatggtagatttgtggtgtttgatgccactaaatgtagggtactttgttgtagcaacaacaaaaaatgaacatgaagctgggacctcatgttacggttgctcacgcctgtaatcccagaactttgggaggctgaggtgggaggatcgcttgagcccaggagcttaagaccagcctggacaacataatgagacctcatgtctaaaaaaaaatttttttaaaggccaggcgcagtggctcacgcctgtgatcccagcactttgggaggccgaggagggtggatcacgaggtcagaggttcaagaccagcctggccaagatggtgaaaccccatctctactaaaaatacaaacattggccgggtgtggtggtgggtgcctgtggtcccagctacttgggaggcagagaatcacttgaacccagaaggcagacattgcagtgagccgagatcgcacccttgcacttcagcctgggcgaccgagactccatctc

SEQ ID NO: 669549 - DNA, 1663 bp, Homo sapiens
gtgtccatcccccttcgtgtgtccatcccccttcgtgtgtccatcccccttcgtgtgtccatcccccttcgtgtgtccatcccccttcgtgtgtccatcccccttcgtgtgtccatcccccttcgtgtgtccatcccccttcgtgtgtccatcccccttcgtgtgtccatcccccttcgtgtgtccatcccccttcgtgtgtccatcccccttcgtcgggaggccgaggcgggagaattgcttgaacccgggaggtggaggttgtagtgagctgagattgtgccattgcactccagcctgggctacaagagccaaactccgtttaaaaaaaaaaaatgtggttgctttctctggcagctagccctcctcctgaagcagtctcggagcttgcagccaccctgttagctcaacagcatcccacatgcattcttaccatgctgcagatctgaaagaccttagaggcccttgtgtcaggaacctgggactaagactaaatatcaaaacagaaaatgctcctattacctctgtcacgaagggctttataagagctttggaagctttatgccaggaaccaggggcagagaccaaatgtatatttcttttcttatatcggagacagagtctcactctgccactgaggctggagtgcagtgatgtgatcatagctcactgcagccttgacctcctaggctaaagcaatcctcccaccttagcctctccagtagctggaactacgggcatgcatcaccatgtccagctgattttaattttgtaaaggcaggatcttccttttttccccaggctgatctctaactcttggcctcaagcaatccttcctctttggcctcccaaaatgttgggattacagatgggagcccccatacccaccaatcacaaggatctttataagagaatgaggtaggagagtcagaattagagaaagtgatgtggtaatggaagaagaggtcagagagggagatttgaagatgctgcacttctggccttgaatatggagtcacgaggtaagtcaaggaatgggggtggcttctagaagctggaaaaggcaaaggagcacattctgtctagagcctcccccagaaggaatgcagcctctctgacaccttgactttagccttaatagacctagttgggcttctggcccccagaactgtaagatggtagatttgtggtgtttgatgccactaaatgtagggtactttgttgtagcaacaacaaaaaatgaacatgaagctgggacctcatgttacggttgctcacgcctgtaatcccagaactttgggaggctgaggtgggaggatcgcttgagcccaggagcttaagaccagcctggacaacataatgagacctcatgtctaaaaaaaaatttttttaaaggccaggcgcagtggctcacgcctgtgatcccagcactttgggaggccgaggagggtggatcacgaggtcagaggttcaagaccagcctggccaagatggtgaaaccccatctctactaaaaatacaaacattggccgggtgtggtggtgggtgcctgtggtcccagctacttgggaggcagagaatcacttgaacccagaaggcagacattgcagtgagccgagatcgcacccttgcacttcagcctgggcgaccgagactccatctc

SEQ ID NO: 669550 - DNA, 520 bp, Homo sapiens
  misc_feature (219)..(219): n is a, c, g, or t
  misc_feature (222)..(222): n is a, c, g, or t
gtgtccatcccccttcgtgtgtccatcccccttcgtgtgtccatcccccttcgtgtgtccatcccccttcgtgtgtccatcccccttcgtgtgtccatcccccttcgtgtgtccatcccccttcgtgtgtccatcccccttcgtgtgtccatcccccttcgtgtgtccatcccccttcgtgtgtccatcccccttcgtgtgtccatcccccttcgtgtncanacccaggagccgggggagtggctggaactcttgcaggagccgggctccctctacatccttaggggctcagcccgttatgacttctcccatgagatccttcgcgatgaagagtcctatctttgggggaacggccggataccccgggaccgacgccatctaccgtgatctgccgctccctccctgatgtgcaatggggccaggggagtctggacagccgcccccagacctgctgaccacccaggttactacagacaccagatttgtgaataactgacgggggctggacactggttaccga

SEQ ID NO: 669551 - DNA, 113 bp, Homo sapiens
tgctgggattacaggcatacgccacccgtgcccggccagacgaacgggttttcacacggacagcaaggtgcagacgattgacgacttctttgaagctattgcttgttccgctg

SEQ ID NO: 669552 - DNA, 538 bp, Homo sapiens
gtgtccatcccccttcgtgtgtccatcccccttcgtgtgtccatcccccttcgtgtgtccatcccccttcgtgtgtccatcccccttcgtgtgtccatcccccttcgtgtgtccatcccccttcgtgtgtccatcccccttcgtgtgtccatcccccttcgtgtgtccatcccccttcgtgtgtccatcccccttcgtgtgtccatcccccttcgtcttggccaacacgatggggaaaggtcactgagggcatttcatggcttcacttctcagcgctaattttctgtgtgatcatgacaaaaaggggtttaattggctcatggttctgcaggctgtaaagaaagcatagtggcttggggaaatggcgcgggaagcatcactgtattttgcaaagtgagaaggacatgagatttggggagcagggagagaataataagatatggttgtgtatccctacagaaactcatgtggaattgtgatcaaaatgttaaaagtggggccacgtggaaggtgatttaatcacgaaaggggatggaca

SEQ ID NO: 669553 - DNA, 365 bp, Homo sapiens
agcgcggtggctcacgcctgtaatcacagcactttgggaggctgaggtgggcagatcacctgaggtcgggggttcaagaccagcctgaccaacatgaagaaattccctctctactaaaaatacaaaattagccgggtgcggtggcgcacgcctgtaatcccagccactcgggaggctgaggcaggagaatcacccgaacctgggaggcggaggttgcggtgagctgagattgcgccactgcactccagcctgggcaacaagagcaaaactccatctcaaacaaaacaaaaaaacaaaaacaaaaaccaggtcttaactaagctccacagttaaggctatcaaccaggactatgatctgggtgggc

SEQ ID NO: 669554 - DNA, 277 bp, Homo sapiens
gtgtccatcccccttcgtgtgtccatcccccttcgtgtgtccatcccccttcgtgtgtccatcccccttcgtgtgtccatcccccttcgtgtgtccatcccccttcgtgtgtccatcccccttcgtgtgtccatcccccttcgtgtgtccatcccccttcgtgtgtccatcccccttcgtgtgtccatcccccttcgtgtgtccatcccccttcgtcaataaaacaagaattaggtctcagatccaagagtcgctttctgtcttccagtttatgact

SEQ ID NO: 669555 - DNA, 317 bp, Homo sapiens
  misc_feature (46)..(46): n is a, c, g, or t
gttatggttttacggatttccttgaagcctctttccttttttgccncaaaagacccctaaattttcagtttccccccacccccccccaggagctgtgggaggctttgtgttatttgtgaaactcccaaacaggggtgttgcggaaaagggaaagttcaaggcaaacgcaaggactggatttagctccctaggggccccagtcaaaagccggacccggatttatatataaatatataaatataaatatattaaaccccctcatcccggccatttttgttggaaccatttttgggtttataaaagcattatttttgaga

SEQ ID NO: 669556 - DNA, 246 bp, Homo sapiens
  misc_feature (220)..(220): n is a, c, g, or t
  misc_feature (229)..(229): n is a, c, g, or t
  misc_feature (233)..(233): n is a, c, g, or t
gtgtccatcccccttcgtgtgtccatcccccttcgtgtgtccatcccccttcgtgtgtccatcccccttcgtgtgtccatcccccttcgtgtgtccatcccccttcgtgtgtccatcccccttcgtgtgtccatcccccttcgtgtgtccatcccccttcgtgtgtccatcccccttcgtgtgtccatcccccttcgtgtgtccatcccccttcgtgtgnccatccccnttcntgtgtccatcccc

SEQ ID NO: 669557 - DNA, 310 bp, Homo sapiens
gtgtccatcccccttcgtgtgtccatcccccttcgtgtgtccatcccccttcgtgtgtccatcccccttcgtgtgtccatcccccttcgtgtgtccatcccccttcgtgtgtccatcccccttcgtgtgtccatcccccttcgtgtgtccatcccccttcgtgtgtccatcccccttcgtgtgtccatcccccttcgtgtgtccatcccccttcggtcgcactagggaggctgggaccaagcaccgtcgtttgtgtccagagggtcccatggcctcaggtgaggtgcatggttttggccgggggaccatc

SEQ ID NO: 669558 - DNA, 1423 bp, Homo sapiens
gcgcctatcatgggccgagttcgcacctgtagcgtgaagaatggcggtgccgtgttcatcactagtaaatagtgactacatgcgcctgggcaaagaattccactcgaacaagtcgcgctgtgcgaggagactcgccattattcccctagtcaatgaagctccgaggatcacacgatagcaaggcttactagtaaggcatctagaatgaaagcgacacttcacgagacggcccagataccgcaggtatcgtccagtcaggcttgcaggcaggaggacgacgagaaccggaagacgcacacatatatgtatccggaaggggtctcggggcctctgtgatccacggaagactctatagaatgctacgaatcatgaccacctaaacggacatactgtctcgaaacgtcgtttgtaggacccttcggagcgcgtcctttgtgccgaagcactttcacgcgtcaacgtcacggctactagatgaggagattgaccttttgcaaaacctgacacgtcggagggtagcgcttgtttcagtagaatgtgtattgacctcctcatgttcgtttcgttaattgaattgtatatccaaaatcacacattccctggggagaaacagagcgagggcatagatatggagatcaggaaaagacatagtagacataggtttccagtgcgaccatgtgtcaattgcattcggagtgcgccgtccgagcacaaagatagggacgaggatggattgccaaacggagagctagggcgctagattcttcgcgggggctataaatggccgcggtggaaaacttccgaagtatccgccaaaggggttgtaacggttcgccgagttcccaagaaagagaagcggagggggaagacccttgtaagcgagaaggcgtttgtccctcgtggttggactaaccccgccggaaaaggcgaaccctatatgaacactcttcccttggacacaaaagcttccagggctggttaggaccctagggcgcctttcctagcaatatttcgcgccgccgttacaacaagaaagagaaaggccctctgggggccaggaaagaaaggggcacaaggatcaaccaggaattagaattggaaaaggcttggggaaagccccaggggcgttgtgccccgggggtccccggaatggtttcttcccttaaacccatgtcaccccctacgaaaatgccctcgggtaccccaggccccccgttgtgaaaagaggctttaacccgttggggacagagcccttttaggggggggggcgttggttcccccgtgtcaaaagggttaatacgttcaccctttcttggcattataacaggaacaccataaaacggttaacaaggccactctgggttgggtgcatttttggcccaacaaaaacacaaacacaacatagacacatacaaaacagtca

SEQ ID NO: 669559 - DNA, 319 bp, Homo sapiens
acatgtttataaattaaaatatgtaacacacacacaaacatcatgcatgtatatatacgtatgtagcacaaagagatatggaaatatagatgtatgtggggtatatatgtgttcatgtacatatgtatgtacacatacacacaattactagctgtttgctgagacagcctagaggcaaggacacactgagtagcaatatgcatacccaccacccagatgtaggtttctaattactatcctccatttaaaagaaccagagcttctcggaaatggctgattccaaggcttagaaaggaaaagtacaaaataaacttgaaaa

SEQ ID NO: 669560 - DNA, 331 bp, Homo sapiens
gtgtccatcccccttcgtgtgtccatcccccttcgtgtgtccatcccccttcgtgtgtccatcccccttcgtgtgtccatcccccttcgtgtgtccatcccccttcgtgtgtccatcccccttcgtgtgtccatcccccttcgtgtgtccatcccccttcgtgtgtccatcccccttcgtgtgtccatcccccttcgtgtgtccatcccccttcgaactacttatatatgaacgtgtgagtgttgtatgcaggggcgtcgagcgattaaaatgccactggagggccaggcacagcgcaatatgcctggaaccccagaactttgagagactg

SEQ ID NO: 669561 - DNA, 760 bp, Homo sapiens
  misc_feature (262)..(262): n is a, c, g, or t
ctaaaaatacaaaacttagctgggcgtgctggcagactgctgtaatcccaggtacttgggaagctgaggcaggagaatcacttgaacccaggaggcggaggttgcagtgagccaagatcgcaccattgcacaccagcctgggccacagaatgagactccgtctcaaaaaagtaataaataaataaatctggtcttgaactcctggcctcaagtgatctgcctgcctctgcctcccaaagtggtgggattacaggcgtgagcnaccgcgcccagcctttgttgtttctttaacgtcagaagaaaaacgtgcctgggttcaggacctgaagtggagaggtggcgtttaagcgtctcagccttgaagcagggttgtcacccgtcggcctgagagcacactgcctgtagatggcgctgtgtcctaacatactcgggatgcatccagctcagcccctggggcacacactcagcgaggctgtcaggtccatgtgccgaaacaggtgctttgtggcccggtggggcaggcagcatttctgggaacagcgtaacatcaccaactggccgcagaggaagggcagctccgccactgggatggtcatcgggcccctgtgtcttttggtttgcatcttggattggaacattcccaagtgcagctgaagatgggacttagccaagtcggctccctggcctggggcttcccttgacccttctgagcgcctgtgggttcaggggtgggtgttcttggttgaatcttgaccctggg

SEQ ID NO: 669562 - DNA, 266 bp, Homo sapiens
gtgtccatcccccttcgtgtgtccatcccccttcgtgtgtccatcccccttcgtgtgtccatcccccttcgtgtgtccatcccccttcgtgtgtccatcccccttcgtgtgtccatcccccttcgtgtgtccatcccccttcgtgtgtccatcccccttcgtgtgtccatcccccttcgtgtgtccatcccccttcgtgtgtccatcccccttcgtgtgtcatccgagcagttgccgacgaagggggatgacatagatccggtatt

SEQ ID NO: 669563 - DNA, 119 bp, Homo sapiens
cttatggacgattttaggaagacacgtggattattttagggtcttagggaggaaagaggaggggtggcgtaaactacttggaaagaaagggagaaggactgagaacgatggcaatggga

SEQ ID NO: 669564 - DNA, 149 bp, Homo sapiens
tttggttactgggattctactaatgtatgtcattctcgtaagtatatcacataaagtaagttatcctgactccttttgacactatgtaagctacacaccccacttggtttctacagggaaactctaaccataactaaaagaattgtgaa

SEQ ID NO: 669565 - DNA, 310 bp, Homo sapiens
  misc_feature (8)..(8): n is a, c, g, or t
  misc_feature (140)..(140): n is a, c, g, or t
  misc_feature (149)..(149): n is a, c, g, or t
  misc_feature (219)..(219): n is a, c, g, or t
tgtacgangtaaggaatagcccagaaacaaccaagtaggccatcatgctcgcgggccctgagctccaatgcactcgttaacttaaagatatacaaaactatgtctaaaaatggcttacataagatttgaatacagatcgnactacactngttacataaatttttctacatctgtgtgttaagcagctgggtctggagattagctattctggtggtccangattcccctattttatatatatggtgaaagcttgagagatactctctctatagaggtatttaggtggagccttactctgtacacagcgggt

SEQ ID NO: 669566 - DNA, 359 bp, Homo sapiens
gtgtccatcccccttcgtgtgtccatcccccttcgtgtgtccatcccccttcgtgtgtccatcccccttcgtgtgtccatcccccttcgtgtgtccatcccccttcgtgtgtccatcccccttcgtgtgtccatcccccttcgtgtgtccatcccccttgtctagcatatccacactgtattcactgccctatcgttggtcacttactggccttctctggtaaaaacatagaatagtaggccagacgtggtggttcacacctgtaatcccaaccctttgggaggccaaggtgggtggatcacctaacagcatgagtttatgacagacttgttcaacatggctaaaccctgttttacaaa

SEQ ID NO: 669567 - DNA, 159 bp, Homo sapiens
gacatttggataatatcaacaccatcgacgccccggggtgggtgggggggtctgtcacatagaacgtaccggggtgatgatgggtgagaacgttgcggcctatcatcatggctttcgtctcgctcatggtgcgaccgtgaaacacggagacgcccagag

SEQ ID NO: 669568 - DNA, 226 bp, Homo sapiens
tgaggttttgccattttggccagggtggtcttgaattcctgacctctggtgatccacctgctttggcctcccaaagtgctgggattataggtgtgagctaccacacccagccttgtgacagtggattctgatctcatagttcaaaagatggcatttggatgggagataataggttcagaaaggttccatttacaacaactcacaaatttgagggaccataggttct

SEQ ID NO: 669569 - DNA, 675 bp, Homo sapiens
tttttttttggtctgtgcccatgggtatttcttggtagctggctccttcggcttcaagtcaggggaatatgtggtagaaagaaaaacagtgaacttagcacatactgttccaaggtccctggccattctgccaccctctctccacctttcagagtctcctgtgctcattttatatgcaatgtccagggttttcattctacttagttgggaagcattagaaaaatctcctctgaagatttaatcttaaatagacatgtttatctatcttgcccatcccttctcgtgaaaaattaacaaaatgtaggaagtgaaaagataccactcatccccagtcatgtgagaagattctgcatggtctagtgaacttccttctggacttttctctgccaatttatttgtgtgcctcacaaataaatcgatcacaaataaaaggatcccgctgtagatcaatgtcctgtttttatgctcctccccagcatgtaagcattggtccatatggttctaaaagctccctggggatcctgctaagtggccgtgtcagattctggaggtgactggagcactgtctgtccacccacctggcccttggacttgggtttgcttctgtgatgccttgactgtctagtcagttttctgtcacttgtaacagaatacctgaaactgtaatttataaaa

SEQ ID NO: 669570 - DNA, 152 bp, Homo sapiens
  misc_feature (8)..(8): n is a, c, g, or t
ctggtggntcctggtgactgtcaacacgacacctggtggctactcacggactactcacgacacggacgacgacactggacacacgactagccggacgacactaccacgactacggggtacccgagcctcgacattcgtacatcactggtcat

SEQ ID NO: 669571 - DNA, 140 bp, Homo sapiens
gtgcgagcatggctggggtgaccatgttgggcttcagtaaggtgccttccaggttgatgtggtggtcctcagaggcttgtctacagctgccaggaccttctcggtcactatactggtagcgcttcaagtcatggtcccca

SEQ ID NO: 669572 - DNA, 123 bp, Homo sapiens
aagcggtccgaacttctcccatcagcaattaacaaaattacaaagcaaggcaaatcactgaatccccaaatactttgattctgccatcatccctgtaaacctgtctgatgggacgaagactgg

SEQ ID NO: 669573 - DNA, 678 bp, Homo sapiens
  misc_feature (228)..(228): n is a, c, g, or t
gagcgagctgcactgctttggctcttgctgcttgggtcgcgtctcggaaaccggtagcgcttgtcagcatggctgaccaactgactgaagagcacgacttgcagaacttcaaacgacagctttattcacctaatttgaccaacagatggctgactgcgaacctataaccaaccaaacggacatcggcgaacctgttaactgagactctcttctgggccagaaatcccnacagaaggcagaggattacaggagcagtgagtgtaagctgagaggtagaagttgcgtggacttggggttaacttgggggggtaccaatcaaattgtgaaaaccttttcccaccttggaaagaaagagtttgtttccctgggagacaaaagggtgtaacttggggggacctcaataagggcaagaaaagaaaaacaaattttgggggaactatgaacactaaaggaacctaatgtgtggcaaactggaagaagtggaaaaacagaggcttttgtttaaagggaaaaaggtaaacaagtggccactcaagattaattacccccgcggggtgatattgtggagctatgtggtgatttcctatcgttgtgtgacaaatgtttctatcacacttgggctggggaaaaatttggggggcgctcaaagaacatgattggcgtgcccgatttagagct

SEQ ID NO: 669574 - DNA, 585 bp, Homo sapiens
ggaccgaatgatccactggatcgggaggaaacttccaggatctaactaaaaagctggtgttaacccggtatgactgctaacccagatatgaagcaaagcaggaggtgactgcatggactgaggtaacggaggactgaaataattgttaatggcttctttttgaaacactgctgtttctttttgtttcattttttggagtctggaaagcttttctcttttaagctgtttatatccattaaaaattgagtagagtatatactcttgcaaacagaatttgaagcttttttctctgtctccctgacttctccagaatttggaaactatgcaaatatttttaattcatggcaatgtatttgtttgcatacatttattaggaatctgttttttataatgggacaaagttggaagaactggttattctcccagggctttgactggaatggcacattttcagaataagcagattgctttgagaaattgagattgactttatagagtcaatgagaacctcttagaataactggcctcataccttgtctatgcaattcctttgcacacttccgggcatgtggtaagtggaccgtg

SEQ ID NO: 669575 - DNA, 133 bp, Homo sapiens
gactctctacctgatggtggagctgtctgatgctctgtctgttcctgtcggatctctctcctctctgacctggatacgctttggtttctcaacttctctaccccaaagaaaagattattcaataaagtttcct

SEQ ID NO: 669576 - DNA, 127 bp, Homo sapiens
  misc_feature (64)..(64): n is a, c, g, or t
tccaacctgggacgcctttgtagagcttcttacttcctaacagcgtcactaaagatctgcaggnggccgggcatggtggctcacgcctgtaatccaatcccagcactttgggagggagttttggaac

SEQ ID NO: 669577 - DNA, 158 bp, Homo sapiens
attacattttgacataccaggtagatctactgtctctgttatattatgacagaccagctagatctactgtctctgttatattatgacagaccagcttgatctagtgtctcgattgtattatgacagaccagctagatgtcgacgcggccgcgaattta

SEQ ID NO: 669578 - DNA, 500 bp, Homo sapiens
aaacttttgtctagaattatcaaaccatcttttgctggaattaaattatccagttttagatcttttaccttccttttgctttaagttgtcatataatagctttgatttttctcaaatcatattagagtctacaggtctgcctttcttatagccatcctgtgcccacataaaagctgcattttcaatacaagacaaaaaaggtattttgcaggctaggcttggtggctcacacttgtaatcgcaatgactcagaaggccaactcaggaggaccacttgagcccaggagttggagaccagcctggacaacagagcaagaccccatctctacaaatcttttttttaaaattagccagcgtggtggcatgcacctgtagtcccagttacctgggaggttgaggcaggaggatcccttaagcccaggagtttaaggttaccatgagctatgatcacgccactgcactccagcctggacgacaaagcgagatcagatctcttaaaa

SEQ ID NO: 669579 - DNA, 1001 bp, Homo sapiens
gtctctgtgtttgtgttcttcctttctgccgcacttttcgcttctctttttctactgctttcttctcgtcttcgttctgctgctcctcgttgtttacctcctctctttctctttctcgcctttctctttttggctcccgtcgtcgttcttctggtttgtgtccctgggcgctctctggcctgccagtccctcttccctttacctctcgttctgtccttgtttggtcgccttgtccgcggctctccgtgtggtacccctttgctttctatccgctcctcctgcgtttgatctctcgcctatctgtatccacttttagctcgccctagtgtcgagcgcttttacatgctctattttgcttcctatgtcgtcttgttacctactctgcatgtcattggccttgtgttacctctggtgtccccctaagtttcacccggtggattccccatgttgtcgcctccatttgtattaccgtcctgcgtttgttgcttgtctgtgcttgctgcccccttgccccatctttgtttgccttgtcccagtctgtgtccccctttcctctgttatcatgtggtgctgcttggacgtattggcctcccgttcggcctttgtctggaatatgcctttatttgccaattacctcatagtcacctcagtaaccatgtcatgtgagggctgtggttattgtcctgcctctgccttgtctgtctcagtcggtgcagtgccctagagctccatacctcctcttaagtatgcccttcgatggacagcctcacccatctcccacctgggcccagcccaggagccccgcctggccatcagtatttattgcctccgtccgtgccgtcactgggccatctggcctggcgtcctgttcccaccaggctctcagtgccacaatccctctggcaggccttacctgacccaagccaggaacaaaaagggaccaagtgcacacattgctgagagccgtctcctgtgcctccccgccctatccccggtcttcg

SEQ ID NO: 669580 - DNA, 375 bp, Homo sapiens
acgctcttccttcggactactcacgaccaccgacctgtgactgactgggaccgagcgggctgactgcagtggcgtgtgcttccatttggcaaccactgtgacctcacgtcactactggccctgcacaaactggcccctgtcaaaactgagccccctttgtgtaccttcattgagacacattacctgaatgagcaggataaaagccatcaaagaattgggtgaccacgtaacctaacttgcgcaagatgggagcgcccgaaatctggacataggcggaatatctcttatgacaacgcacaccctgggagacagtgataataaaagctaagcctcgggcttaatttccccatagccgtgaggtgacttccctagaca

SEQ ID NO: 669581 - DNA, 212 bp, Homo sapiens
ccgaggtagccccccatgggtggtggccctcaccaacctgtcccagccaggactgtcctgccgtcaaatggatctctctgccggcccgcagtcctttgggcaagcttttatctttgtgttgcaagcttagcactcgttggtcgcggggtctccctcctgtgctttccaaccgcccccgggcgttaataaagtttagcagcgtcccccagtga

SEQ ID NO: 669582 - DNA, 165 bp, Homo sapiens
tggaggcaggaactggtgggaggcaggacactggtgggaggcaggacactgtgggaggcccaggtggatctgggctcacaggcaagggcctcagtgtcctgtgagctccaaggggctggggaggactgccttctggattcagggtacaggtcggtgtgtttctcg

SEQ ID NO: 669583 - DNA, 732 bp, Homo sapiens
tttctaataaactgttgagttgaaaaaaaaaaaccaaaaaaaaaaaaaaaaaaaaaaaaaaaaaaaaaaaaaaaaaaaaaaaaaaaaaaaaatttttgcgggcggccctggactccggcctcccttggcgcgttccgccttgtgggggggttggcttccatttcccgggccggtgttttcccacggcccttggcggtcccccctttggcgcctcccaattaatcccccttgcccccccccccctttcccccggggggccccccaccggggggcctccccccgttggccctcccaactgggtggcctggcctgtggggggaaggtttttggggggcatttttttgttggtttatggtggagttagttttttgttaacccacttgtttttccaccggacgggccgtgtttggcccttcctttttcctttaattgatttgcccggggttgcggtgggggccccggcccctctgaccaggccccttttttaaaggcggggtccccaacgcgggttgccgagctctggtcttcttggggggccctcccccagggacccttttttttaatcaggttttggggggctgtgggcccgtccctcttggggcccccccttgggggccccctgggttggcctgtcccggaccgcccccgacggcgcgaaagggggggaggccgtgtggggtgcccgtgggcgttcctgtggttatcaccatacggccccccacggcgcgtttt

SEQ ID NO: 669584 - DNA, 119 bp, Homo sapiens
  misc_feature (12)..(12): n is a, c, g, or t
aaagactacganctgtgtattgataatgtaccttatttgatctcaagttgtataaaaacaataaatttgtgttatgcagtagtaatcttatgcacaggtgatttcatgtgatatatgca

SEQ ID NO: 669585 - DNA, 260 bp, Homo sapiens
gcgcagttgtcgtgagacaaaggaaggacctcaggaaaggaatctgcagtctaggccacatagccttctctcctcacatcacctccatggagaatcactgactttgtttcacataccacaatccacagggaaatcctgtctgggaaaaaaatgactctttaaagcttctgaatggaccaagcctttctttttatatttggaggaaactgggcttcagagaggcccaaggtaaagttccacttcctcacgacaactgcagc

SEQ ID NO: 669586 - DNA, 308 bp, Homo sapiens
caacgatggtcctcagcgggggcgcaggagcgagaaggggacgcggcgcccggctaaaatggtctttctttggctcggacaaaagaagggtatctagctagggcaggtttagaattctgtggatctcagtccttctggtctcaatggattggtcagagttttcttactaacatgggcttctggttggtggcaatataaatctagtggccattggtgatccctttttcctgtgtaaatgacggtgtagggttctggccgtggaaggtgttgggaaagtgtcgagtatctggaggtcatcggattcagtc

SEQ ID NO: 669587 - DNA, 172 bp, Homo sapiens
aacaacaaatattcaaccaattcccacggattgaagatggatgggcctctttggcacacccacagaggatgttttccagtatgaagcggctgtgcctgttggagcatgaattggggtctcccccctttgcttctaatcttgaaatacatctggtacaatatccagtgggcag

SEQ ID NO: 669588 - DNA, 755 bp, Homo sapiens
  misc_feature (28)..(28): n is a, c, g, or t
  misc_feature (99)..(101): n is a, c, g, or t
  misc_feature (103)..(103): n is a, c, g, or t
  misc_feature (105)..(105): n is a, c, g, or t
  misc_feature (110)..(110): n is a, c, g, or t
  misc_feature (114)..(114): n is a, c, g, or t
  misc_feature (122)..(122): n is a, c, g, or t
  misc_feature (150)..(151): n is a, c, g, or t
  misc_feature (157)..(157): n is a, c, g, or t
  misc_feature (170)..(170): n is a, c, g, or t
  misc_feature (174)..(174): n is a, c, g, or t
  misc_feature (197)..(197): n is a, c, g, or t
  misc_feature (205)..(205): n is a, c, g, or t
  misc_feature (215)..(215): n is a, c, g, or t
  misc_feature (229)..(229): n is a, c, g, or t
  misc_feature (231)..(231): n is a, c, g, or t
  misc_feature (238)..(238): n is a, c, g, or t
  misc_feature (249)..(249): n is a, c, g, or t
  misc_feature (252)..(252): n is a, c, g, or t
  misc_feature (254)..(255): n is a, c, g, or t
  misc_feature (271)..(272): n is a, c, g, or t
  misc_feature (279)..(281): n is a, c, g, or t
  misc_feature (284)..(284): n is a, c, g, or t
  misc_feature (290)..(290): n is a, c, g, or t
  misc_feature (296)..(296): n is a, c, g, or t
  misc_feature (333)..(333): n is a, c, g, or t
  misc_feature (343)..(343): n is a, c, g, or t
  misc_feature (351)..(351): n is a, c, g, or t
  misc_feature (356)..(356): n is a, c, g, or t
  misc_feature (374)..(376): n is a, c, g, or t
  misc_feature (389)..(389): n is a, c, g, or t
  misc_feature (393)..(393): n is a, c, g, or t
  misc_feature (396)..(398): n is a, c, g, or t
  misc_feature (404)..(404): n is a, c, g, or t
  misc_feature (410)..(410): n is a, c, g, or t
  misc_feature (422)..(422): n is a, c, g, or t
  misc_feature (430)..(430): n is a, c, g, or t
  misc_feature (442)..(442): n is a, c, g, or t
  misc_feature (444)..(445): n is a, c, g, or t
  misc_feature (462)..(463): n is a, c, g, or t
  misc_feature (465)..(465): n is a, c, g, or t
  misc_feature (471)..(471): n is a, c, g, or t
  misc_feature (473)..(474): n is a, c, g, or t
  misc_feature (523)..(523): n is a, c, g, or t
  misc_feature (525)..(525): n is a, c, g, or t
  misc_feature (531)..(531): n is a, c, g, or t
  misc_feature (535)..(535): n is a, c, g, or t
  misc_feature (546)..(546): n is a, c, g, or t
  misc_feature (549)..(549): n is a, c, g, or t
  misc_feature (551)..(551): n is a, c, g, or t
  misc_feature (605)..(605): n is a, c, g, or t
  misc_feature (612)..(612): n is a, c, g, or t
  misc_feature (618)..(618): n is a, c, g, or t
  misc_feature (660)..(660): n is a, c, g, or t
  misc_feature (671)..(671): n is a, c, g, or t
  misc_feature (740)..(740): n is a, c, g, or t
gagggctaggggaggggcaggctgcgtncagtcctgggacgcagcagcccgcacaggttgagaggggcacttcctcttgcttaggattgagtgaggatnnngncntggtngggncggtgganaaccacaaagctctctggaggaaagaannggcctntgttctctactanctgncccatcagcagaaaactagactncttacatnatgggggggnactgcttgaaaggnangaaaaanttaagggaggnaananngggaggagaaggaagnnaaagtannnaantattanaagaanaaataagaatgaaagtaacggaaaggaaatattttanatcccgaacnatggaatnaaatntagaaataaaaaaaaggnnnaaggaaaaaaagnaaanaannnaaggtncctgtncggcggacacgnaagggggnagagggaggtgnannaggggcagaaggagaannancgggantnncaggaggtaggactgggggggaagcgtgaatagaggcaaaggaccccgntnggggcngggnacgggcactgnaangnaaatgacaccggaaaggtattgaaggaaaaaaaaaacggaaaaaaagaaaaacnaaaaaanaagganggaaaaaagaaaaaaaagacgacccaaacgacccacagacanacgcgccgacncgccggcacaccgcaccacgagaccccacggcgcgccccgcaccgcaacgcgcaacgagcccagcacgnagccccccccagagg

SEQ ID NO: 669589 - DNA, 1305 bp, Homo sapiens
gcggactccgcggacaaggccaggcctagccttgagctccgtcgggcagggccgccgggattggtgtccggcagagcgtgagcccagcgggctggagtcggcgagcgggagtgaaagaagaaaagctagagagcgaaggcaaagcccgaggagagagggccacggtcggcggaggaatctgactgcacggttgcgtgcgctcactgccggagggctccctcagccgggcggctccgctagtggctaaaggcaaagcattccggggcgcggcgcatgaagttgagcttcgtccctgctagccgccgctttctccccaaaaatacatcctagccttaatgtttatgcctccattgccccagttcttatctgttttgctcaatgtctcatagctacaagaaggcaatttctgacgaagccctccgtcccttccaaatggattattttggcgggcttccacccggacagtatgccacccgaatgactggacaagtgcacgggagcggctgtcatttgcggagtgcgccttgcgatctaggcgcctcacagcgcaaattatccagtaatttctctgaaatcgatgctggtttgttttcccaaggcaaatcagcagcttatacagacattggggccacaaagccggtggaacaacgggagacggcttcctgagtgtcaggtcctccaagatgagcttaaacttcgggtggtgggcaggctcggtaggcgggaaaggcccgtgtccagatgaatgcagtccatgtttatattgatgaaagacacgtataccatttggtccagctcaaccattcttaacaagtgctggctgtgagcactggtgtgtgtgtgcctgcgtgcaaccagcaatgtaagtgatgaccagctgcatgatgccttaatttgagtggacaaagtcggtcaagaaccactttcaggcttctgggtctccaagtctttgtctccctgtatccaaacgaggcattccaagtttgacagcatggaacattgcatgtccgaaataccaaccgtgaaactgggtaaaaagcttcaggaggtgatattgatgtgtatagtttaggaaataaaacccaatacttacttcaaagaacgtaatttgtggctttttagagagaaggatactttgacagttttcatttgtcgtctacatgtatatggtacgtttcattctgccttttaattaatttggtattttactatgaaaactactttgtattaataaaataatgtatttccaatgttataagttgtgttataacagtttcaaaagccaaataaacaagatgcattttg

SEQ ID NO: 669590 - DNA, 248 bp, Homo sapiens
taaatatattgtctcattattttgcccggggttgtcttgaactccctggctcaggagatcttcctgccttggcctcccgaagtgtcaggattacaggctctagccgccatgcccagccaatttattgtttttaattatgtaaaacttttaaattctttgacagtccaaactagactaataaggtacattaatagaagtctcactttcattcttatacttttcaacctattcccttctgtcgtcttctc

SEQ ID NO: 669591 - DNA, 450 bp, Homo sapiens
tgcactccaacctgcgagacagactgagattccgtcaaaaaaaaaaaaaaaaaaaagtttgtttgattaggcacgggggttcacacttgtattcccagcattctgaaaggccgaggtgcgtggatgggggagcccaggatttcaagagcagccgtgggcaacatagtgtgaccccgtctgttttttttacgatagatttaaaaaaaaattttttaaagggaccatacgtagacaatgctgttttctgaaacaagccccagtggttaggcgattcagaagggagagacccacttgatttctgaatacacagttattctcaaggggtttttttaaagaccccacctttttttttctcctttggttgggtttacaaccgagtttttttatagatcgtggtgtcccctttattaaattttctggagagtccctctaaaaatagatgtacctttc

SEQ ID NO: 669592 - DNA, 124 bp, Homo sapiens
gatgactggtggttgcataactgaaaaccaaaaccactgacttgtatactttcttttttattttattttttgagacagagtctcgctctgtcgcccaggctggagtgcactggcacaatctcgg

SEQ ID NO: 669593 - DNA, 548 bp, Homo sapiens
aacttgacactacaggtagctccactataatcagtaccaagggcgccactcgtaatcatcactctgaaacaaacgcacccttaaatatggcactgtgggctgaacgaactccaccttgtgatacaggaaaggattttacgtttcttctatacaatcgtccaccattgtgtattactatggaagaatggattctagatcattcatgttatattgtgtcaagctaccttgaaaacagaaaatacgtactctaagcctagacgtgcataaataacattacctggagattgacagacggggtgaaagcttttattgtggtttctcagaaatatataaagcagtagttttcctttaactcttctgtctttaatgccatctgcaaagatatatcatccatacctttaacctctttcctagggatttggacccatttggcaaatagcttcaagtactcatagttaattttctggctggttttcctaagttaacctgattttacaaatattccatttgtaggaccagtttacatctactttcccaagctagccaac

SEQ ID NO: 669594 - DNA, 2848 bp, Homo sapiens
ggcgaagaggcggggcgcccaagctgccgcgctggcattttctcctggacaaggagagagtgcggctgctgagagccgagcccagcaatcccgatcctctgagtcgtgaagaagggaggcagcgagggggttggggttggggcctgaggcaagcccccaggctccgctcttgccagagggacaggagccatggctcagaaaatggactgtggtgcgggcctcctcggcttccaggctgaggcctccgtagaagacagcgccttgcttatgcagaccttgatggaggccatccagatctcagaggctccacctactaaccaggccaccgcagctgctagtccccagagttcacagcccccaactgccaatgagatggctgacattcaggtttcagcagctgccgctaggcctaagtcagcctttaaagtccagaatgccaccacaaaaggcccaaatggtgtctatgatttctctcaggctcataatgccaaggatgtgcccaacacgcagcccaaggcagcctttaagtcccaaaatgctaccccaaagggtccaaatgctgcctatgatttttcccaggcagcaaccactggtgagttagctgctaacaagtctgagatggccttcaaggcccagaatgccactactaaagtgggcccaaatgccacctacaatttctctcagtctctcaatgccaatgacctggccaacagcaggcctaagacccctttcaaggcttggaatgataccactaaggccccaacagctgatacccagacccagaatgtaaatcaggccaaaatggccacttcccaggctgacatagagaccgacccaggtatctctgaacctgacggtgcaactgcacagacatcagcagatggttcccaggctcagaatctggagtcccggacaataattcggggcaagaggacccgcaagattaataacttgaatgttgaagagaacagcagtggggatcagaggcgggccccactggctgcagggacctggaggtctgcaccagttccagtgaccactcagaacccacctggcgcaccccccaatgtgctctggcagacgccattggcttggcagaacccctcaggctggcaaaaccagacagccaggcagaccccaccagcacgtcagagccctccagctaggcagaccccaccagcctggcagaacccagtcgcttggcagaacccagtgatttggccaaacccagtaatctggcagaacccagtgatctggccaaaccccattgtctggcccggccctgttgtctggccgaatccactggcctggcagaatccacctggatggcagactccacctggatggcagaccccaccgggctggcagggtcctccagactggcaaggtcctcctgactggccgctaccacccgactggccactgccacctgattggccacttcccactgactggccactaccacctgactggatccccgctgattggccaattccacctgactggcagaacctgcgcccctcgcctaacctgcgcccttctcccaactcgcgtgcctcacagaacccaggtgctgcacagccccgagatgtggcccttcttcaggaaagagcaaataagttggtcaagtacttgatgcttaaggactacacaaaggtgcccatcaagcgctcagaaatgctgagagatatcatccgtgaatacactgatgtttatccagaaatcattgaacgtgcatgctttgtcctagagaagaaatttgggattcaactgaaagaaattgacaaagaagaacacctgtatattctcatcagtacccccgagtccctggctggcatactgggaacgaccaaagacacacccaagctcggtctcctcttggtgattctgggtgtcatcttcatgaatggcaaccgtgccagtgaggctgtcctctgggaggcactacgcaagatgggactgcgtcctggggtgagacatcccctccttggagatctaaggaaacttctcacctatgagtttgtaaagcagaaatacctggactacagacgagtgcccaacagcaaccccccggagtatgagttcctctggggcctccgttcctaccatgagactagcaagatgaaagtgctgagattcattgcagaggttcagaaaagagaccctcgtgactggactgcacagttcatggaggctgcagatgaggccttggatgctctggatgctgctgcagctgaggccgaagcccgggctgaagcaagaacccgcatgggaattggagatgaggctgtgtctgggccctggagctgggatgacattgagtttgagctgctgacctgggatgaggaaggagattttggagatccctggtccagaattccatttaccttctgggccagataccaccagaatgcccgctccagattccctcagacctttgccggtcccattattggtcctggtggtacagccagtgccaacttcgctgccaactttggtgccattggtttcttctgggttgagtgagatgttggatattgctatcaatcgcagtagtctttcccctgtgtgaggctgaagcctcagattccttctaaacacagctatctagagagccacatcctgttgactgaaagtggcatgcaagataaatttatttgctgttccttgtctactgctttttccctgtgtgctgccagtttggttcgcaataactggattgccctggcacaaaaaagggggctaaatcccaggccttcgtaccgttggaaggcctaggggataaaggggggaagaggaaaggttaggccctgggggcccaccgaattgtgcgcgcgttttaaacaga

SEQ ID NO: 669595 - DNA, 3005 bp, Homo sapiens
ggcgaagaggcggggcgcccaagctgccgcgctggcattttctcctggacaaggagagagtgcggctgctgagagccgagcccagcaatcccgatcctctgagtcgtgaagaagggaggcagcgagggggttggggttggggcctgaggcaagcccccaggctccgctcttgccagagggacaggagccatggctcagaaaatggactgtggtgcgggcctcctcggcttccaggctgaggcctccgtagaagacagcgccttgcttatgcagaccttgatggaggccatccagatctcagaggctccacctactaaccaggccaccgcagctgctagtccccagagttcacagcccccaactgccaatgagatggctgacattcaggtttcagcagctgccgctaggcctaagtcagcctttaaagtccagaatgccaccacaaaaggcccaaatggtgtctatgatttctctcaggctcataatgccaaggatgtgcccaacacgcagcccaaggcagcctttaagtcccaaaatgctaccccaaagggtccaaatgctgcctatgatttttcccaggcagcaaccactggtgagttagctgctaacaagtctgagatggccttcaaggcccagaatgccactactaaagtgggcccaaatgccacctacaatttctctcagtctctcaatgccaatgacctggccaacagcaggcctaagacccctttcaaggcttggaatgataccactaaggccccaacagctgatacccagacccagaatgtaaatcaggccaaaatggccacttcccaggctgacatagagaccgacccaggtatctctgaacctgacggtgcaactgcacagacatcagcagatggttcccaggctcagaatctggagtcccggacaataattcggggcaagaggacccgcaagattaataacttgaatgttgaagagaacagcagtggggatcagaggcgggccccactggctgcagggacctggaggtctgcaccagttccagtgaccactcagaacccacctggcgcaccccccaatgtgctctggcagacgccattggcttggcagaacccctcaggctggcaaaaccagacagccaggcagaccccaccagcacgtcagagccctccagctaggcagaccccaccagcctggcagaacccagtcgcttggcagaacccagtgatttggccaaacccagtaatctggcagaacccagtgatctggccaaaccccattgtctggcccggccctgttgtctggccgaatccactggcctggcagaatccacctggatggcagactccacctggatggcagaccccaccgggctggcagggtcctccagactggcaaggtcctcctgactggccgctaccacccgactggccactgccacctgattggccacttcccactgactggccactaccacctgactggatccccgctgattggccaattccacctgactggcagaacctgcgcccctcgcctaacctgcgcccttctcccaactcgcgtgcctcacagaacccaggtgctgcacagccccgagatgtggcccttcttcaggaaagagcaaataagttggtcaagtacttgatgcttaaggactacacaaaggtgcccatcaagcgctcagaaatgctgagagatatcatccgtgaatacactgatgtttatccagaaatcattgaacgtgcatgctttgtcctagagaagaaatttgggattcaactgaaagaaattgacaaagaagaacacctgtatattctcatcagtacccccgagtccctggctggcatactgggaacgaccaaagacacacccaagctcggtctcctcttggtgattctgggtgtcatcttcatgaatggcaaccgtgccagtgaggctgtcctctgggaggcactacgcaagatgggactgcgtcctggggtgagacatcccctccttggagatctaaggaaacttctcacctatgagtttgtaaagcagaaatacctggactacagacgagtgcccaacagcaaccccccggagtatgagttcctctggggcctccgttcctaccatgagactagcaagatgaaagtgctgagattcattgcagaggttcagaaaagagaccctcgtgactggactgcacagttcatggaggctgcagatgaggccttggatgctctggatgctgctgcagctgaggccgaagcccgggctgaagcaagaacccgcatgggaattggagatgaggctgtgtctgggccctggagctgggatgacattgagtttgagctgctgacctgggatgaggaaggagattttggagatccctggtccagaattccatttaccttctgggccagataccaccagaatgcccgctccagattccctcagacctttgccggtcccattattggtcctggtggtacagccagtgccaacttcgctgccaactttggtgccattggtttcttctgggttgagtgagatgttgggtaggtacatcactttggattgggcagttagggtctctgggggatatagggtccatggggttgtatttatgtgcatgagctagaagtattaggaaactcattgtagggagatgaggaaagtatggggcagcactctttggtatgtatattccttattatttgatatatatcattgatttttttacttcttctttcttatgttcacagatattgctatcaatcgcagtagtctttcccctgtgtgaggctgaagcctcagattccttctaaacacagctatctagagagccacatcctgttgactgaaagtggcatgcaagataaatttatttgctgttccttgtctactgctttttttccccttgtgtgctgtcaagttttggtatcagaaataaacattgaaattgcaaagtgaaaaaaaaaacaaaaatgcgagggcatcattacgggggggaaaaaggggtacgaaag

SEQ ID NO: 669596 - DNA, 213 bp, Homo sapiens
gccttgaggatccttccgggggaaaaaacaaacctaagatacttttttaaaagttctacaagccacgttaaaaaaaattgaacaggactgctttatgtgtaatttatgacacaactgttacatgaattgcaaatgaaggcttaaaatatatagcagctacaaaaaaaatcagataactcatgcttcatgtcactcctccccgggatacaggga

SEQ ID NO: 669597 - DNA, 2184 bp, Homo sapiens
ggggagcaccacgacatatgtaatagctgcgatcaccggttgttatttcagtcacgaggactggtctcagtctctcaatgccaatgacctggccaacagcaggcctaagacccctttcaaggcttggaatgataccactaaggccccaacagctgatacccagacccagaatgtaaatcaggccaaaatggccacttcccaggctgacatagagaccgacccaggtatctctgaacctgacggtgcaactgcacagacatcagcagatggttcccaggctcagaatctggagtcccggacaataattcggggcaagaggacccgcaagattaataacttgaatgttgaagagaacagcagtggggatcagaggcgggccccactggctgcagggacctggaggtctgcaccagttccagtgaccactcagaacccacctggcgcaccccccaatgtgctctggcagacgccattggcttggcagaacccctcaggctggcaaaaccagacagccaggcagaccccaccagcacgtcagagccctccagctaggcagaccccaccagcctggcagaacccagtcgcttggcagaacccagtgatttggccaaacccagtaatctggcagaacccagtgatctggccaaaccccattgtctggcccggccctgttgtctggccgaatccactggcctggcagaatccacctggatggcagactccacctggatggcagaccccaccgggctggcagggtcctccagactggcaaggtcctcctgactggccgctaccacccgactggccactgccacctgattggccacttcccactgactggccactaccacctgactggatccccgctgattggccaattccacctgactggcagaacctgcgcccctcgcctaacctgcgcccttctcccaactcgcgtgcctcacagaacccaggtgctgcacagccccgagatgtggcccttcttcaggaaagagcaaataagttggtcaagtacttgatgcttaaggactacacaaaggtgcccatcaagcgctcagaaatgctgagagatatcatccgtgaatacactgatgtttatccagaaatcattgaacgtgcatgctttgtcctagagaagaaatttgggattcaactgaaagaaattgacaaagaagaacacctgtatattctcatcagtacccccgagtccctggctggcatactgggaacgaccaaagacacacccaagctcggtctcctcttggtgattctgggtgtcatcttcatgaatggcaaccgtgccagtgaggctgtcctctgggaggcactacgcaagatgggactgcgtcctggggtgagacatcccctccttggagatctaaggaaacttctcacctatgagtttgtaaagcagaaatacctggactacagacgagtgcccaacagcaaccccccggagtatgagttcctctggggcctccgttcctaccatgagactagcaagatgaaagtgctgagattcattgcagaggttcagaaaagagaccctcgtgactggactgcacagttcatggaggctgcagatgaggccttggatgctctggatgctgctgcagctgaggccgaagcccgggctgaagcaagaacccgcatgggaattggagatgaggctgtgtctgggccctggagctgggatgacattgagtttgagctgctgacctgggatgaggaaggagattttggagatccctggtccagaattccatttaccttctgggccagataccaccagaatgcccgctccagattccctcagacctttgccggtcccattattggtcctggtggtacagccagtgccaacttcgctgccaactttggtgccattggtttcttctgggttgagtgagatgttggatattgctatcaatcgcagtagtctttcccctgtgtgaggctgaagcctcagattccttctaaacacagctatctagagagccacatcctgttgactgaaagtggcatgcaagataaatttatttgctgttccttgtctactgctttttttccccttgtgtgctgtcaagttttggtatcagaaataaacattgaaattgcaaagtgaaaaaaaaaacaaaaatgcgagggcatcattacgggggggaaaaaggggtacgaaag

SEQ ID NO: 669598 - DNA, 1317 bp, Homo sapiens
  misc_feature (1317)..(1317): n is a, c, g, or t
gctcaccgtctagcatcaccatgtattggaggcatccgtcgtacccagtgatacatgcaaagagctcctcgtccattcaatagcgagctaatattatcaatcgatccaataactttatccaactggaatcacggttaccctaggagactaaccacgcgcaacatcctattctagcattgtccacgtatttcaatcaatatgcgagtgggattcaccacgtgcaactgtgtggagtcaaggagaatgcgcctgatggttgcaagactgatcttcaagagtgttcgcattgtgcacacgatgtacaaggctcctacggcctgcatctgcatgtttatcaagattgccgagagtagtagactgcctagagctcgagtattcgtaatctagcgttgcaaaaattttgccttccccttgttatcgtacacacggagcacaggacgataaattagatggccctaccgtttctgcaatagacggcccttcccccctcggttccactgatattcatcgtcaaacctataggttagtctagtaacccgcagcagcacacaatgcctaacgtaacccatgtgtgtttgtcgcgtcaaggaaactggccattgacgtcccccggtctataatccgtcattatacacccatgtaagacatcctcttagcagtccacgaggtgcattgcgaatttgtgcccttcctatctttataaggccgaagcgaatatctgccaggtgggatgccaaatgcattccctaacttccattcgatttcgctagctccagtgtcggttagaattcgtacaacactgtggctaatttctctctgagattgccttctaacgctgctaatggaaagcagccattatcgtgcgtggcccttaattacctaccaaatggttatccgccagaaaggggtctcccctgaaaccgggtttggttcagtggccccccagtaaccgtgggggcatttccattaacaaaaccctcattcgtgcttgtaacagccccaattaaaacgacctcctttgtcagccatacagggtaggcccccactataaaagccccgggcagaggaatcttaaagcaatgcaacccccttctttacaatttcaaccagtaccccacagggaactactttcaagcattcttcaacaccaattcggaggtgtcatttccttaactttaatttacagaacactctgcgtgtttcagccaagtaacacacacatacgccacctctggtgtttgacaaaagctgtcagaatgcattaaggaacatccgtaaattataaatttcattatagaccacacaccatcatagatn

SEQ ID NO: 669599 - DNA, 1595 bp, Homo sapiens
  misc_feature (1514)..(1514): n is a, c, g, or t
  misc_feature (1521)..(1521): n is a, c, g, or t
  misc_feature (1523)..(1523): n is a, c, g, or t
  misc_feature (1531)..(1531): n is a, c, g, or t
  misc_feature (1535)..(1535): n is a, c, g, or t
ggcgaagaggcggggcgcccaagctgccgcgctggcattttctcctggacaaggagagagtgcggctgctgagagccgagcccagcaatcccgatcctctgagtcgtgaagaagggaggcagcgagggggttggggttggggcctgaggcaagcccccaggctccgctcttgccagagggacaggagccatggctcagaaaatggactgtggtgcgggcctcctcggcttccaggctgaggcctccgtagaagacagcgccttgcttatgcagaccttgatggaggccatccagatctcagaggctccacctactaaccaggccaccgcagctgctagtccccagagttcacagcccccaactgccaatgagatggctgacattcaggtttcagcagctgccgctaggcctaagtcagcctttaaagtccagaatgccaccacaaaaggcccaaatggtgtctatgatttctctcaggctcataatgccaaggatgtgcccaacacgcagcccaaggcagcctttaagtcccaaaatgctaccccaaagggtccaaatgctgcctatgatttttcccaggcagcaaccactggtgagttagctgctaacaagtctgagatggccttcaaggcccagaatgccactactaaagtgggcccaaatgccacctacaatttctctcagtctctcaatgccaatgacctggccaacagcaggcctaagacccctttcaaggcttggaatgataccactaaggccccaacagctgatacccagacccagaatgtaaatcaggccaaaatggccacttcccaggctgacatagagaccgacccaggtatctctgaacctgacggtgcaactgcacagacatcagcagatggttcccaggctcagaatctggagtcccggacaataattcggggcaagaggacccgcaagattaataacttgaatgttgaagagaacagcagtggggatcagaggcgggccccactggctgcagggacctggaggtctgcaccagttccagtgaccactcagaacccacctggcgcaccccccaatgtgctctggcagacgccattggcttggcagaacccctcaggctggcaaaaccagacagccaggcagaccccaccagcacgtcagagccctccagctaggcagaccccaccagcctggcagaacccagtcgcttggcagaacccagtgatttggccaaacccagtaatctggcagaacccagtgatctggccaaaccccattgtctggcccggccctgttgtctggccgaatccactggcctggcagaatccacctggatggcagactccacctggatggcagaccccaccgggctggcagggtcctccagactggcaaggtcctcctgactggccgctaccacccgactggccactgccacctgattggccacttcccactgactggccactaccacctgactggatccccgctgattggccaattccacctgactggcagaactngcctcgntnactggccntttnccatcgttggccagaccgggtggcccccatggcccttgggggcaatgggcttgtggccag

SEQ ID NO: 669600 - DNA, 337 bp, Homo sapiens
ttggagccttaccctggctgggtgaagttctcacgcctgtaatccgagcactttgggaggcagaggcagatggatcacttgaggtcgggagttcgagaccagcctgaccaacatggtgaaaccctgtctctactaaaaataaaaaaattatccggacgtggtggtgcatgcctgtaatcccggctattccagaggctgaggcaggcaaattgtttgagcccaggagttcaagaccagatctggagacagagcaagagtcaaaactgatgctaaaaacagggttggtaactgggaatcacttatagtaatgggatgaggagaaagaagtggtttggag

SEQ ID NO: 669601 - DNA, 162 bp, Homo sapiens
agccatagtaaaattgccccgaaataagtttctcaagatggtttacgcttgagcacagtgcataaaacctggccatgtagaattgtcactttgggtatgatggggtctagtcaacgagcaggcctggtgagcagagtaacctccccacttgccctgggcatt

SEQ ID NO: 669602 - DNA, 1321 bp, Homo sapiens
  misc_feature (34)..(35): n is a, c, g, or t
aactatacgggctaggtacgaggctgggtggtgnnctgcgcccctcgcctaacctgcgcccttctcccaactcgcgtgcctcacagaacccaggtgctgcacagccccgagatgtggcccttcttcaggaaagagcaaataagttggtcaagtacttgatgcttaaggactacacaaaggtgcccatcaagcgctcagaaatgctgagagatatcatccgtgaatacactgatgtttatccagaaatcattgaacgtgcatgctttgtcctagagaagaaatttgggattcaactgaaagaaattgacaaagaagaacacctgtatattctcatcagtacccccgagtccctggctggcatactgggaacgaccaaagacacacccaagctcggtctcctcttggtgattctgggtgtcatcttcatgaatggcaaccgtgccagtgaggctgtcctctgggaggcactacgcaagatgggactgcgtcctggggtgagacatcccctccttggagatctaaggaaacttctcacctatgagtttgtaaagcagaaatacctggactacagacgagtgcccaacagcaaccccccggagtatgagttcctctggggcctccgttcctaccatgagactagcaagatgaaagtgctgagattcattgcagaggttcagaaaagagaccctcgtgactggactgcacagttcatggaggctgcagatgaggccttggatgctctggatgctgctgcagctgaggccgaagcccgggctgaagcaagaacccgcatgggaattggagatgaggctgtgtctgggccctggagctgggatgacattgagtttgagctgctgacctgggatgaggaaggagattttggagatccctggtccagaattccatttaccttctgggccagataccaccagaatgcccgctccagattccctcagacctttgccggtcccattattggtcctggtggtacagccagtgccaacttcgctgccaactttggtgccattggtttcttctgggttgagtgagatgttggatattgctatcaatcgcagtagtctttcccctgtgtgaggctgaagcctcagattccttctaaacacagctatctagagagccacatcctgttgactgaaagtggcatgcaagataaatttatttgctgttccttgtctactgctttttttccccttgtgtgctgtcaagttttggtatcagaaataaacattgaaattgcaaagtgaaaaaaaaaacaaaaatgcgagggcatcattacgggggggaaaaaggggtacgaaag

SEQ ID NO: 669603 - DNA, 176 bp, Homo sapiens
taacgagtcagggtcttgctccggtcacccaggcgggagtacaggggtgcgatggtagctcactctaaacttcaaagttctgggtgctcaagcagtcttctgtccttggcttcgcaaatcacggggataacaggtgtgagccaccacaccgggctaattttaaaatttttttggta

SEQ ID NO: 669604 - DNA, 495 bp, Homo sapiens
gtagttcctgagctctaatgcgtgttccatggtcgtacgtgttcaggttttgagagtgaaaaacattagtccgtacctccagctgtgcacatgctattccttctacctagagaagttcttcacctccaccgtcgcgatctaaattgctcttccctgagaagacattttccagcctctaaacaagcccactcccctgtattttgtgacacgtaatataattttagattgcttgatttgtttagtttactttatttctctattgccagactttccctttaagctccataaaatcaatgacctgggaatgaatggatggatgaatggatggatggatggatggatggatggatggatggatggatggttggagttgagatctctttgtgaagctgaattcttcacaaagtccaccctctcattctttattcatgctggagctacactcagccagactcctgggaattgttgctcctccatgaaccaacaaagcttatc

SEQ ID NO: 669605 - DNA, 1445 bp, Homo sapiens
ggcgaagaggcggggcgcccaagctgccgcgctggcattttctcctggacaaggagagagtgcggctgctgagagccgagcccagcaatcccgatcctctgagtcgtgaagaagggaggcagcgagggggttggggttggggcctgaggcaagcccccaggctccgctcttgccagagggacaggagccatggctcagaaaatggactgtggtgcgggcctcctcggcttccaggctgaggcctccgtagaagacagcgccttgcttatgcagaccttgatggaggccatccagatctcagaggctccacctactaaccaggccaccgcagctgctagtccccagagttcacagcccccaactgccaatgagatggctgacattcaggtttcagcagctgccgctaggcctaagtcagcctttaaagtccagaatgccaccacaaaaggcccaaatggtgtctatgatttctctcaggctcataatgccaaggatgtgcccaacacgcagcccaaggcagcctttaagtcccaaaatgctaccccaaagggtccaaatgctgcctatgatttttcccaggcagcaaccactggtgagttagctgctaacaagtctgagatggccttcaaggcccagaatgccactactaaagtgggcccaaatgccacctacaatttctctcagtctctcaatgccaatgacctggccaacagcaggcctaagacccctttcaaggcttggaatgataccactaaggccccaacagctgatacccagacccagaatgtaaatcaggccaaaatggccacttcccaggctgacatagagaccgacccaggtatctctgaacctgacggtgcaactgcacagacatcagcagatggttcccaggctcagaatctggagtcccggacaataattcggggcaagaggacccgcaagattaataacttgaatgttgaagagaacagcagtggggatcagaggcgggccccactggctgcagggacctggaggtctgcaccagttccagtgaccactcagaacccacctggcgcaccccccaatgtgctctggcagacgccattggcttggcagaacccctcaggctggcaaaaccagacagccagacagccagtgccaacttcgctgccaactttggtgccattggtttcttctgggttgagtgagatgttggatattgctatcaatcgcagtagtctttcccctgtgtgaggctgaagcctcagattccttctaaacacagctatctagagagccacatcctgttgactgaaagtggcatgcaagataaatttatttgctgttccttgtctactgctttttcaagttttggtatcagaaataaacattgaaattgcaaagtgaaaaaaaaaacaaaaatgcgagggcatcattacgggggggaaaaaggggtacgaaag

SEQ ID NO: 669606 - DNA, 1413 bp, Homo sapiens
ggcgaagaggcggggcgcccaagctgccgcgctggcattttctcctggacaaggagagagtgcggctgctgagagccgagcccagcaatcccgatcctctgagtcgtgaagaagggaggcagcgagggggttggggttggggcctgaggcaagcccccaggctccgctcttgccagagggacaggagccatggctcagaaaatggactgtggtgcgggcctcctcggcttccaggctgaggcctccgtagaagacagcgccttgcttatgcagaccttgatggaggccatccagatctcagaggctccacctactaaccaggccaccgcagctgctagtccccagagttcacagcccccaactgccaatgagatggctgacattcaggtttcagcagctgccgctaggcctaagtcagcctttaaagtccagaatgccaccacaaaaggcccaaatggtgtctatgatttctctcaggctcataatgccaaggatgtgcccaacacgcagcccaaggcagcctttaagtcccaaaatgctaccccacctctgggaggcactacgcaagatgggactgcgtcctggggtgagacatcccctccttggagatctaaggaaacttctcacctatgagtttgtaaagcagaaatacctggactacagacgagtgcccaacagcaaccccccggagtatgagttcctctggggcctccgttcctaccatgagactagcaagatgaaagtgctgagattcattgcagaggttcagaaaagagaccctcgtgactggactgcacagttcatggaggctgcagatgaggccttggatgctctggatgctgctgcagctgaggccgaagcccgggctgaagcaagaacccgcatgggaattggagatgaggctgtgtctgggccctggagctgggatgacattgagtttgagctgctgacctgggatgaggaaggagattttggagatccctggtccagaattccatttaccttctgggccagataccaccagaatgcccgctccagattccctcagacctttgccggtcccattattggtcctggtggtacagccagtgccaacttcgctgccaactttggtgccattggtttcttctgggttgagtgagatgttggatattgctatcaatcgcagtagtctttcccctgtgtgaggctgaagcctcagattccttctaaacacagctatctagagagccacatcctgttgactgaaagtggcatgcaagataaatttatttgctgttccttgtctactgctttttttccccttgtgtgctgtcaagttttggtatcagaaataaacattgaaattgcaaagtgaaaaaaaaaacaaaaatgcgagggcatcattacgggggggaaaaaggggtacgaaag

SEQ ID NO: 669607 - DNA, 831 bp, Homo sapiens
gggaacttcagtttctgggcgttgtcagcgtggtatgcagtatacgacgttcgacagcgtggaggggatggagtcacgttgtgtagcacttacctgagatattctagatttggaggatgcgtagagcacagaaaatatggtgagctagcactggtgatcccaaagctgctcgagtggattagagcctgagcctgggtggtcacagcgatatgccctttctagtaccatgcatgctgtggctgttagtagtcattggccttgtcagcagaccttctaccctggtggcaatacaccgtgagagctgtggcccgtgggagtggccatcctaaaacaagccagttaggtcatctgccatcatacccttaacctctgtctctcgcctgaggggaatctgcaagctgtgcattgggcttacctcctgcttattgtagaaataagcatcctttggtatacatggaggatagttccagaacgcctgagtatacaaaaacccaatgcatactcaagtcccacagtgggccctacagaacccacgtatgtgataaatcagccctccatgtacgcaggtttcgacccctgccaatactgtattttcaacctgtatggttgaaaaaacatccatatataagtgcagacatgcagttcaaacccatattggtccagggtcaactgtatagtttattgaacagcgcacacgcattcctttacagcatgatctatggcagaagttgaataagttggcaacagacaactatgttggactgcgaaaatcgggaaatattcactgtctggccttctaccagaaaagttggcagcccctgatctaggcga

SEQ ID NO: 669608 - DNA, 428 bp, Homo sapiens
agaatgccgtccagattgcccgccgttagcccaaagagggaaaaacccccctttttttttttagggccccggggtcccattattggtcctggtggtacagccagtgccaacttcgctgccaactttggtgccattggtttcttctgggttgagtgagatgttggatattgctatcaatcgcagtagtctttcccctgtgtgaggctgaagcctcagattccttctaaacacagctatctagagagccacatcctgttgactgaaagtggcatgcaagataaatttatttgctgttccttgtctactgctttttttccccttgtgtgctgtcaagttttggtatcagaaataaacattgaaattgcaaagtgaaaaaaaaaacaaaaatgcgagggcatcattacgggggggaaaaaggggtacgaaag

SEQ ID NO: 669609 - DNA, 339 bp, Homo sapiens
  misc_feature (16)..(16): n is a, c, g, or t
ctggccagcatcagcnttttattaaaagtaaatgcacagtaatatgtacagatggcacatggtgccaattttatttgtaaatatagactccactcaagtttcaagttacaccttggcacaagcctcttctaaaattttagacccgccggaaatcaccggggggggaggggggcctttaaagcctgaagggcgaacctttttttaaggaaaggcctttaaatccttatttaccacaaacccatttttattaaaggcccggaaaggggggaaaaaaaaaaattttctctcataataaacaccaacaagggggttttaaaaaatgtaggcccttctccaaac

SEQ ID NO: 669610 - DNA, 661 bp, Homo sapiens
  misc_feature (42)..(45): n is a, c, g, or t
  misc_feature (47)..(49): n is a, c, g, or t
  misc_feature (51)..(51): n is a, c, g, or t
  misc_feature (53)..(53): n is a, c, g, or t
  misc_feature (56)..(57): n is a, c, g, or t
  misc_feature (60)..(60): n is a, c, g, or t
  misc_feature (65)..(66): n is a, c, g, or t
  misc_feature (340)..(340): n is a, c, g, or t
  misc_feature (407)..(407): n is a, c, g, or t
  misc_feature (418)..(419): n is a, c, g, or t
  misc_feature (423)..(423): n is a, c, g, or t
  misc_feature (443)..(443): n is a, c, g, or t
  misc_feature (445)..(446): n is a, c, g, or t
  misc_feature (455)..(455): n is a, c, g, or t
  misc_feature (479)..(479): n is a, c, g, or t
  misc_feature (481)..(481): n is a, c, g, or t
  misc_feature (483)..(483): n is a, c, g, or t
  misc_feature (495)..(495): n is a, c, g, or t
  misc_feature (497)..(497): n is a, c, g, or t
  misc_feature (507)..(507): n is a, c, g, or t
  misc_feature (511)..(511): n is a, c, g, or t
  misc_feature (516)..(516): n is a, c, g, or t
  misc_feature (525)..(525): n is a, c, g, or t
  misc_feature (528)..(528): n is a, c, g, or t
  misc_feature (532)..(532): n is a, c, g, or t
  misc_feature (534)..(534): n is a, c, g, or t
  misc_feature (541)..(541): n is a, c, g, or t
  misc_feature (543)..(543): n is a, c, g, or t
  misc_feature (545)..(545): n is a, c, g, or t
  misc_feature (549)..(550): n is a, c, g, or t
cttcttaaaaaatttattaaatgccattgatttgactggaannnncnnnantnctnntgntattnntgaatccataagtagctgtatctagaattcatacttaagaaaaacacacaggcatgaataaaataggacacagtaatgagaatgggcagttctgcagtgtacactttctcaagcacctcagaggacacacacttttaaagtacaattcttcacagacacatgaagcagaacatttgaaaatcaaaacttaaatacaagattctaaaagtgaatggcaatttaatggttaaaatttgaccagtggtgaaacaagcagcaagctacaaaatccatnaccaccaacagtttcaatgttagcactaagtattaaaccaaagtaatgcatattctggttttgcttnttcaagaacannccgnttattctgtttcaatctctntnnacaatactngtaggtaatagttacactgcaatntntnacaaaaaacagngntggttcttgncatnactgnatttatagnatnaatntnccaaggntntnaatnnagtcaattagggcaggttagaataaaaaggcctaaaaacaaaggggattcctggtagtttatggaaaatacaactgcccgggccacataaaattaccttttttaaacaata

SEQ ID NO: 669611 - DNA, 473 bp, Homo sapiens
gcagaatcttgaaaagcccagaaatccaaagagccctccgagcaccacgcaagaagattcatcgcagagtcttgaagaagaatccactgaagaacctgagaatcatgttgaagctgaacccttacgccaagactatgcgcaggaataccattcttcgccaggccagaaatcacaaacttcgtgtgaaaaagctggaacagcagctactgcactggcaaccaaatccgagaaggttgttccagagaaggggactgcagacaagaagccagcggtaggcaagaaaggaaagaaggtggatgccaagaagcagaagcctgcagggaaaaaggtggttgccaagaaaccagcagagaagaagcctactacagaagaaaagaagccagctgcataaactattaaaaattgttaaattccagagagcaagtagagaccgcatatttcaataaatcaaacatgttggttgaccaaaaaaa

SEQ ID NO: 669612 - DNA, 651 bp, Homo sapiens
  misc_feature (387)..(387): n is a, c, g, or t
  misc_feature (401)..(401): n is a, c, g, or t
gattgggcagtgtcgaacatcatgttgacgcgctcaggcgtaatgtcatcccaggcggcgaacaccagtaaatgagagcagtcggtcacctgggactgataccagctgaccgccttgatcttttcgcgaatgtgcggattagtcaccaccggcaattcaaatggctggaggccgctcgaggtcgccgtcagtcgtaccgcttccagaattcgctccagcttttcagccggcacggtcttggaacgggtcataacttttcgtcgcataacgccaattcagtaactcggttattttgctcattcttcatattccacgtaggtcaacggtctttatccagcccaatccgaataccttcaggattgcgctccggcttatactgcggattanagtcaacttgaagntcaagcaaaaaatgaagatcggcgagatttcgcgacgcacaggccttgctgcttcagcaatacgctactacgaggagcaaggcctgctggacgctcccacgcgtgacgtgaacaatctatcgctattaccagcgaaaccaccattaaacgcttggaagtcgtgatccatgcgcaaaggttgggttttccctcgacaccattcgtgcttcttcattcatgacggtaggcgtggccataaagaggtgcgagg

SEQ ID NO: 669613 - DNA, 413 bp, Homo sapiens
ggaatctagcgagaaatggtagaattcagattttttttctactagagaggtgctgtgtgtgtaaaattcttgctctttgccaagacacatgagtgtacttacttatccttctaaaatagaagggagcccagctgctttgtgtaccttgaaaagcttaacagggatctctgaagaacttcaactcttggttaggggctagcttggggacattggtctgggtccagaacagcctaagaggccccacagcagtgggaatttgttctttaattgtctgggaggtagggcttagctttggcaggcaggcagatttaaagagcccttgaacttagaaagactttgaggacccagaagattgtaacccgtcaaacttacccccgtacggagggcgcaagggttaccgaggctcgaattcg

SEQ ID NO: 669614 - DNA, 201 bp, Homo sapiens
ctggaggagcagcttcttctgggactggacagctttgctccgctcccagcggcccggcccttccccaggcgcaacatcaccacgactctgtgcgcaccccatttccactgtgcctcaccacaactacacagcaaccagccgctgagggctcccatggctgagtggggagagtccctaggataagttcccagatcacgctga

SEQ ID NO: 669615 - DNA, 457 bp, Homo sapiens
aatgattatagtgtgttcataagataaaagtagaaggcacagagagaggtagcaaaggccagctatatctaaggtatagctacaaagataggtgaaaaaaacactgccatacacaagtcaaggaacccagggcacagctggaaatgaggagcacacatgctagtagagaacacacatactgtagaagataagcagagtgtctagaggtaagtgtagtagtgaaagatataaggtaatgtagagcaagtagaaaatggatagagactgcataggtaggcataaaataagaaataagcctagtagcatctagtctaacttaaaaggaagtggagacataaggagagaccaacacaggtttagtgccataaagtatataacacaacgacaccaagatagtggtaaatgaaaataattagttcacttcacctagctgacatgaaactatgacttaagaagg

SEQ ID NO: 669616 - DNA, 173 bp, Homo sapiens
ggcaggaggtgtagccactcctcatcctccctgagtgctgatgtctctctccctcttactcttcctcttctttctactctcttctcctctcttactctcctctgtctatcttcctctcctctcttcctctctatctctcttcctctcctctctctcttcctcttctctcttta

SEQ ID NO: 669617 - DNA, 177 bp, Homo sapiens
cgggtgctctgcaactgctggatctcaggcataccatctcatcctcagcctctcaaagtgctggaactacaggtgtgagccatcgtgcccagcctatccttcctttcatcttgaaagcatatagtacatccacactaatctaggcacacttttgtaccccctgattacacaaaatgg

SEQ ID NO: 669618 - DNA, 711 bp, Homo sapiens
  misc_feature (160)..(160): n is a, c, g, or t
  misc_feature (559)..(559): n is a, c, g, or t
  misc_feature (588)..(588): n is a, c, g, or t
  misc_feature (620)..(621): n is a, c, g, or t
  misc_feature (626)..(626): n is a, c, g, or t
  misc_feature (635)..(635): n is a, c, g, or t
  misc_feature (650)..(650): n is a, c, g, or t
  misc_feature (664)..(666): n is a, c, g, or t
  misc_feature (675)..(675): n is a, c, g, or t
ttgggtgaatgtgtaatgatattttctgtacttttggtatcaactcagaactttccagaagaggctcgtccctggcctgatacgatggtccaaaggattcaatcctccggggaaatgggaagacggtgaagcgccctggttagcttatgggctgcccaantccatccaacccttggcattgggatcaatgttgatgaggacaagaccttcaacagtgtccgggtggttaagagcatatctcgccaggatgtaggctccagctccaacaccaactccaattattgtagagaaatttaggtactgcaggacgcaagggatcatgtctgcaagctggtccagagatgggtactgatatcccaaagggaacacaggggcttccctcttccattccaggggcatccacatgaacccgcacaaagttctgaatgatttcctgcatgtcctcgaactgaaacagtggctggaagcaagatttatagttgagtcccacatcgtggtaggtaaggatcgctgggcgtttgggtttgggggtgccatagacagtgaaagtgacagagcngtatggtgtctccacagagtgagtcttgnccgcctcaggcgtctgtcctggcaacagtggnntctcntctgtgatntgcacctcctgcagntccgccatggtggnnntgctgccgncagcggccgcttccaccttcacttgcctgttccgct

SEQ ID NO: 669619 - DNA, 791 bp, Homo sapiens
  misc_feature (160)..(160): n is a, c, g, or t
  misc_feature (639)..(639): n is a, c, g, or t
  misc_feature (668)..(668): n is a, c, g, or t
  misc_feature (700)..(701): n is a, c, g, or t
  misc_feature (706)..(706): n is a, c, g, or t
  misc_feature (715)..(715): n is a, c, g, or t
  misc_feature (730)..(730): n is a, c, g, or t
  misc_feature (744)..(746): n is a, c, g, or t
  misc_feature (755)..(755): n is a, c, g, or t
ttgggtgaatgtgtaatgatattttctgtacttttggtatcaactcagaactttccagaagaggctcgtccctggcctgatacgatggtccaaaggattcaatcctccggggaaatgggaagacggtgaagcgccctggttagcttatgggctgcccaantccatccaacccttggcattgggatcaatgttgatgaggacaagaccttcaacagtgtccgggtggttaagagcatatctcgccaggatgtaggctccagctccaacaccaactccaattattgtagagaaatttaggtactgcaggacgcaagggatcatgtctgcaagctggtccagagatgggtactgatatcccaaagggaacacaggggctccctttgggatatcagtacccatcatgtctgcaagctggtccagagatgggtactgatatcccaaagggaacacaggggctccctcttccattccaggggcatccacatgaacccgcacaaagttctgaatgatttcctgcatgtcctcgaactgaaacagtggctggaagcaagatttatagttgagtcccacatcgtggtaggtaaggatcgctgggcgtttgggtttgggggtgccatagacagtgaaagtgacagagcngtatggtgtctccacagagtgagtcttgnccgcctcaggcgtctgtcctggcaacagtggnntctcntctgtgatntgcacctcctgcagntccgccatggtggnnntgctgccgncagcggccgcttccaccttcacttgcctgttccgct

SEQ ID NO: 669620 - DNA, 122 bp, Homo sapiens
gcccaaacccactccaccttaccaccagacaaccttaggccaaaccatttacccaaataaaggtataggcggatagaaattgaaaccttgcgggaataaatattgggacccgcaaggggaaa

SEQ ID NO: 669621 - DNA, 522 bp, Homo sapiens
  misc_feature (492)..(492): n is a, c, g, or t
  misc_feature (500)..(500): n is a, c, g, or t
  misc_feature (505)..(505): n is a, c, g, or t
ctcagtaattgtagacttttattattctctgttaattttagagagtcttatgagtttctgcaaaaaacaaatctggaatttgtattagaattgcgcattgagttttcaaggttgggagaagtgagagggattttggcatgaagattctagaagacagaagagaaagaagcccatgggtttgcttcagatttctttctccaacgtcatcccacccaatgaagttcattcactcaacaaatatgttcattcattcaacaaatacagagcatcagctgtatactaggtagttattcctaggtgggaagagacagatcataaacaaatacaaaaagttagaaaaagtcaggctggtattgaacccctgacctcaagtgatctgccctcctcggcctcccaaagtgcttggattataggtgtgagccaccgggcccgccctagcccaggaatttgaggcagcagggagctatgatcatgccactgcactccatcctnggagacanagtgngccctaactctaataaa

SEQ ID NO: 669622 - DNA, 123 bp, Homo sapiens
tgggcgtaacactctttatagatgaagttgaagcccagagaagaatttgcctttgccgaagatcacagagcgtagtaaagcagagctggggctaacaagcatgtatctccctgcactctctac

SEQ ID NO: 669623 - DNA, 537 bp, Homo sapiens
  misc_feature (507)..(507): n is a, c, g, or t
  misc_feature (515)..(515): n is a, c, g, or t
  misc_feature (520)..(520): n is a, c, g, or t
ctcagtaattgtagacttttattattctctgttaattttagagagtcttatgagtttctgcaaaaaacaaatctggaatttgtattagaattgcgcattgagttttcaaggttgggagaagtgagagggattttggcatgaagattctagaagacagaagagaaagaagcccatgggtttgcttcagatttctttctccaacgtcatcccacccaatgaagttcattcactcaacaaatatgttcattcattcaacaaatacagagcatcagctgtatactaggtagttattcctaggtgggaagagacagatcataaacaaatacaaaaagttagaaaaagtcagacactaactgctgtgtagaaaatgaactgataggcctggtgcagtggctcacgcctgtaatcccaaagtgcttggattataggtgtgagccaccgggcccgccctagcccaggaatttgaggcagcagggagctatgatcatgccactgcactccatcctnggagacanagtgngccctaactctaataaa

SEQ ID NO: 669624 - DNA, 547 bp, Homo sapiens
  misc_feature (465)..(465): n is a, c, g, or t
  misc_feature (547)..(547): n is a, c, g, or t
ttcggtgcccacccacagatatgaccttatttattcatatttaataagcacctgttatttgttaagctaatacttgcactgaaaggtataacgaataaaaaaatgaggtttgcttcgaaaggtataaaactagcctaccatgtgaccatggacacggtaattctgtctttgctaatttttcaattgaaaaataaagggaggaccgggcacggtggcccacaactataatcacagcactttgggaagccaaggcgggtggatcatttgaggtcaggagttcgagaccagcctggccaacatggtgaaaccctgtcactattaaaaatacaaaaatcagccaggcatggtggtgcatgtctgtaatcccagctactcaggaggctaaggcaggaaaattgcttgaacccggaaggcagaggtggaggctgcagtgagcccagattgcaccactgcactccagcctgngtgacagagactctgttctatgaaaaaaaaaagaggattccacttgtttgctaaatctgaccaaatctcacagtaaaattan

SEQ ID NO: 669625 - DNA, 260 bp, Homo sapiens
tttttttggggggggggtgcggggggggggggggtattgtgttagttttgtgtctcggtcttgtaaaacctttgtgattgtaccgaaatggtatctgcagtcgcctttggaaagaaaggggcagtaatttgtgtacttagcattctgaattttagtcccaggtgtttctttttttgaagatccttgaatgaaagggaacccccaccatggggcttcctgttataatgttcctccatttactgttattaaaagatttatga

SEQ ID NO: 669626 - DNA, 938 bp, Homo sapiens
ggaggccggagcaggaacaggttgaacagtctaccctcccttagcagggaactactcccagcctggagcctccgtagacctaaccatcttctccttacactagcaggtgtctccctctatcttaggggccgatccgaattttcatcgacgagacagattgatcgaatatagaaaccccgctgcctagtagccaataccgaaaggcccctcttccgtcttgatccggcctaatcacagcagtcgctacgttcgtccgtatctctccccaagtccatagctggcttggcatcagttatactactaacaggaccggaaactcaagaccgacctttctttgcgacccctgccgtgagggggagcacccattctatacgcaacacctatctgattaattcggtcaccctgaagattaatattctgatgctaccaggcttcggaataatctcccatatgtaacttactagtccgggaaaaaggaaccatttggatacagtaggtatggtctgagcgaatgatatcaagtgcgatcctagggtaatcgtggtgagcacaccattatattagcagtaggaatagacgtgagacacggagcatatttcagcttcgtagcataatcgatcgtatcccccacggcgtcaagtataggctgatcgccacgctccacggaacgcattttgaaatgttctgtggagtgtctgagcctagattcatgtttcttttccccggacaggtgggccgatcggcttgttaaggcaactccttgctggaattggcacacagcacggactagagggtagccttccctatggcccacaaaagaactgtgttggcccacaagggggcacaccgggtccattcgtgggacctacaaactccacaaatacaaagaaatacggagaaacttcccaaattgtacagaggcgtataaccgaaaaata

SEQ ID NO: 669627 - DNA, 736 bp, Homo sapiens
agtaccttcctgttatgacacagggattgagcgaatcccagacagctcggtactgttactgagtgaaggtgcagtgctgcgtatctgtgtacctggataatgatgagcaggcagccagtgccatctctgagctggtcagcacagctgcggtttccggctgcaccgcggatgaatgtgcccttcaagcgcctgtctgtggtctttggagaacacacagctgctggtgacagtgtcaggacagagtggtgtcacagtggtgaagatggcagaaacagaggtctgggagcccatatgatgtctgagcctgctcgtgatggggcgagggtcgggagtaacgcggattgggtccatgggccatcatgtgaatgagtgcaggcaacaagcatgatcgagacatatggcatatgcatgatagaaacatagtgggccttcctgtcatctgacccaatgccatcaccccacccccatacccctggcaccgggtgccccaagggcattggagcggaacttcatggaggcctggatggataaaagggaagacaagaagggtcgcaacaggaaggaaccgtgcccgtataggtggctacccactaaatatcgcacgtcaattaaagccatgaagatcctggagttggatacgtaacagggatagggacaaaaaaaagataaacgaaatgaagaatataataggaaagaaataattgaaaatggtatagagaaataggagaaaaatagg

SEQ ID NO: 669628 - DNA, 516 bp, Homo sapiens
cagacaagagatgtcagaggctctgaagtcacgggggggggtggtgaagggtcacagtccctgagggtgggtgcggcgggtttttagtgcttaggagtgggccatgttaaatttcccacaccacaagtaactcttttccagaagccagtggcattcctgtctctgtgggaagtccgggtctgaatgtggaccctctctccccgacctctatactcgggctgtcttcttccggtcgggggagatctggcagccaccacctggtggccggggtctgtgagagcaaagctgagttcgggtccggctggtagcagaagaaggaattggacaccatctataaggcccaggtgggctgtggcagggccggtgggttgagctgcgcctgcgggctgtgggcagctaatcctttcctggcggtgctctctcccctgttttgtggtgagaaccaggagaaggaaagtccgagatcctcaagggcccggcccagcagtgcatggcccagcagcacattgtgactgg

SEQ ID NO: 669629 - DNA, 223 bp, Homo sapiens
gggagggcagaggcttaagtggaacaggagagggaaggtttttggattttttttggttttttttgaggaaaagtttggccttggtggctataggtttgcattgcagtggttgactctcggtgctcacttggcacttggtcgactataggcgcaaaagagagcggacaagagatctcctcttacaaaaaaaaacaaaaaacaaatatcaaaaacaaatacaaca

SEQ ID NO: 669630 - DNA, 1042 bp, Homo sapiens
  misc_feature (968)..(968): n is a, c, g, or t
ggtcactgtcgccttcagagcaggtgaactcggaacacaaaggcgcttcggctaagactggtggaagctatcaggaccaatgtacaatgacggataggatgagatccggcgtgactggggtggcaatgtccgtgggtcctaggtctgtggatcgtatcgccgagctcgacatggctgaggctgagaggcaacttgtgcgagctagacacctggggttatcagtagtagcgacttgtgagcagcttctatgctgtacattaaacattccatcgaacatgaagtgacacaatagttctcttcagagaagcatgatgtactcacggaccgcaaggcagcattggaatgtcagggtcccgaaggacaatccgcgatgggcttaattggggcggctccgggtcggagtaggaaacgatgagccgcacagtgggtactcatgaggctgccagagggggccacaagcaacggttactggtgtgcccgccggattgaggggacggccactactactcagcagcagaatgcctgggaaaaacgcgagaagtaaagcaaagttacgagagaaatagacgagaggacaaggggcaggacaaagcatccacagcagacgagcatactgacacaattcagaaggaaggaacgaagtcacgaaagccacaacaatccaaaaaaaacaagaacttaacccccgtcgcggcatcagggacgggagccagggatacccggagggcaaaggaaaagggaaaagacacggagaaaacacacgccacagcctcgagggactattgaacaaaccaaagagcagcagcacgtaagagaaacaaagaacacaaccagacagcagaaacacgaacacaaggcgcataaggcaacaggaaccaaaactgaaccgaacccacagtcaggaacagaaaagaggccagacgacgagcggcagggcacagccgaaacacaggaaaaagaaaggccanctcgacaccaccacaaactaaacagaaacgaaccaccaataaaaagagagaaccataacaaccgcgagcagcag

SEQ ID NO: 669631 - DNA, 905 bp, Homo sapiens
  misc_feature (9)..(9): n is a, c, g, or t
  misc_feature (766)..(766): n is a, c, g, or t
  misc_feature (776)..(776): n is a, c, g, or t
agcgggcgngcgcccccgccgcccgcgccgcagtccgcatccacccggcgcggtcagccccggctgcggctccagctccgcgctccgctcttctctcccgagccggatcgcgggagcgagcaggggaggggaccgcagccggcgcccgagggcaggaggagtccgcaggcgggcccctggctgcggtagcagctgccggtggcagggaggtgccagcccgcgcggggtggcccagccgcgggagcggtggggcgggggccgcggccgccggccccagggagagatcgcgggcagcatggcggggctgcgggccaggggggcccggggccggggctgctggcgctctccgcgctcggcttctgcctcatgctgcaagtcagcgctaagaggccccccaagacgcccccctgcccgcccagctgctcttgcaccagggacaccgccttctgcgtggactcaaaggcggtgcccaggaacctgccctcggaggtcatctccctgaccctggtgaatgccgccttctcagagatccaggatggagcgttctcccacctcccgctgctgcagttcttgttactcaactccaacaagtttacactgattggagacaacgccttcacaggactgtcgcacctgcagtatctcttcattgagaacaatgacatctgggcactatccaagttcaccttccgaggactcaagtccttgactcacctctcgctggccaacaataacctgcagacactgcccagagacatcttccggnccctggacantcctgaatgacttggaccttgcggggcaactcactcaactgtgactgccaggtgaagtggtagggaggagtggatggacaaaacaccaacaaccacggtgggacccatttaactggcccagcccggccg

SEQ ID NO: 669632 - DNA, 951 bp, Homo sapiens
  misc_feature (9)..(9): n is a, c, g, or t
  misc_feature (812)..(812): n is a, c, g, or t
  misc_feature (822)..(822): n is a, c, g, or t
agcgggcgngcgcccccgccgcccgcgccgcagtccgcatccacccggcgcggtcagccccggctgcggctccagctccgcgctccgctcttctctcccgagccggatcgcgggagcgagcaggggaggggaccgcagccggcgcccgagggcaggaggagtccgcaggcgggcccctggctgcggtagcagctgccggtggcagggaggtgccagcccgcgcggggtggcccagccgcgggagcggtggggcgggggccgcggccgccggccccagggagagatcgcgggcagcatggcggggctgcgggccaggggggcccggggccggggctgctggcgctctccgcgctcggcttctgcctcatgctgcaagtcagcgctaagaggccccccaagacgcccccctgcccgcccagctgctcttgcaccagggacaccgccttctgcgtggactcaaaggcggtgcccaggaacctgccctcggaggtcatctccctcacagcccttgcagaccccacagtactgactcgggtgtccccgcaggaccctggtgaatgccgccttctcagagatccaggatggagcgttctcccacctcccgctgctgcagttcttgttactcaactccaacaagtttacactgattggagacaacgccttcacaggactgtcgcacctgcagtatctcttcattgagaacaatgacatctgggcactatccaagttcaccttccgaggactcaagtccttgactcacctctcgctggccaacaataacctgcagacactgcccagagacatcttccggnccctggacantcctgaatgacttggaccttgcggggcaactcactcaactgtgactgccaggtgaagtggtagggaggagtggatggacaaaacaccaacaaccacggtgggacccatttaactggcccagcccggccg

SEQ ID NO: 669633 - DNA, 441 bp, Homo sapiens
  misc_feature (58)..(58): n is a, c, g, or t
  misc_feature (408)..(408): n is a, c, g, or t
  misc_feature (413)..(413): n is a, c, g, or t
ccccaaataagttaccatatccatatgtaaattaccctacattcaaataattaattgnacataaacaagggtaatggtgcccgtccttgtttggggaagtttgaacattgaagcgaaagatgccttccctggatgggtgcggtggcctcacgtctgtaatccctatcatttcgggaagctgaggtaggtggatcacttgaggtcaggagtgcgagaccagccctggccaatatgacgaaacctcgtctctactaaaaatacaaaaccccatctccactaaaaatacaaaaatgagacgggaatggtggcacattcctatagttccagctatttgggtggctgaggcatgaaaattgcttgaacctgggaggcggagattacagtgagccaagatcacactgctgcacntccanctgtgctacaggctgagaccctgtctca

SEQ ID NO: 669634 - DNA, 111 bp, Homo sapiens
  misc_feature (50)..(50): n is a, c, g, or t
  misc_feature (104)..(104): n is a, c, g, or t
caatatattttgcattggaatctccagtaatgaatattaaaatatatgtncaatcatttgtagatgatatcaattatattaagacatttcagatgggctattgnagtattt

SEQ ID NO: 669635 - DNA, 414 bp, Homo sapiens
agtacataagatctctgggcatatctatacatatctgcaacttaataccctattgacctataatctccctataaatccccccaaacctgtaatcaccatttaattatgtatctatgtatttggcttaaaaaaaaaaaccccacatataagataatgccaggtgtctatctatgtccacctaatttccttggcataaatgtcttccagatacatccatgccaaaagtggtaggatctccctataaaaggcaggataacatccacttgtgtgaataaccctccatttcttaattaatacctctgtagatgggacaccttgggtagtcttctgaatctaagctatagtgaataaaagcagcaagagtaaaagcaacgtgccacataacaagggagtcatcattagacgaatcagctt

SEQ ID NO: 669636 - DNA, 966 bp, Homo sapiens
gggtgggtagtgcggcgctctgtcgatggtggtgtggttccttcactagttgggggggcggtagtgttttttattcgttgatggatcgatgttgttgtggttgtggtgtgtgcgcgtcgtgaggcgcgttggtgttgtgtgcggttcgtatgggcggccatggttttgtgtgtcggttggcgctcgtcaggtgtgatcgtcgagcttgtgtggtggcgcgaccggccccgtgttttgtttttctgctcaaacgacgccgcactcgtgtgagtgtatgttgcctcttgggggcgcctcttgttgtgttttgtggggttgtgtgcgtcacccgcgacgggggcggtggttttaagagctcgctcctgctggtgagtttatgtttgttggcgttggtgcagcgcatcgtcgctctccctttggtgtagtagggcaggcccgcagctcgcgctcgcggttggtcgctgcagctagagatacttgctctgtttacacagcgagagtgtactcagcctcggttgtctgtgtccgccctctgcttataggatgtctttctttgtgttggatgttgttttggtcgcgagcctcgcgctcggtagatactagtgactcttattacccacccacttgtttagaccactcctcggtgaggaagactatcttcttttgtgttatgatgagaccaccactttgttgctcgttgtactacagaaataccatccttgccgttgctctctgctacgcaggcggcttcactaattctgtttttctgcccactactctataattactcactcttactaatattagttctgcacccacaccatccgtggggcccccaccacccacccacgacccttccaaaacaccctcttttccccgggaacaaccccctttttttaacacccttttccccctttttttttttttccccccccccccccctttttcccgggttttcttttttta

SEQ ID NO: 669637 - DNA, 90 bp, Homo sapiens
tctagacggatccccggtcacatggtggcgggccctcggcgtcttccttattaacctgaatcctcattaaaggtttctttacccacccgg

SEQ ID NO: 669638 - DNA, 170 bp, Homo sapiens
ccagtgggtacactcacttaatcaggaggctgaggtagagtgagcatcgcaccactgcactccagcctgggtgacagagcaagactctgtctcaaaaaaaacaaacaccaacacaaaaaaatttgggcctcgggcattaacggccttccggaaacattaatttttctctt

SEQ ID NO: 669639 - DNA, 108 bp, Homo sapiens
tcttcgcttctgccctcaagatcatagacctttttaacttgttcagttgcactgttgcaactgggcctccaggttcttggtgaggcaggtcttggatgaaggggtacc

SEQ ID NO: 669640 - DNA, 157 bp, Homo sapiens
gctaccccgctgccccctccacagttccctgaatcctgctaaggatctgcagcacgttggcaacgcagctgcgggctgcggggcggcctccatgtccactgagatcataggacactccaatggggatgggacctttcccctcctctatcagaggtgc

SEQ ID NO: 669641 - DNA, 241 bp, Homo sapiens
ctgtgtgcgttaaattcataatagtataccgcccgccaaaatatatatattctcaatacctcctttggcggatacatataaccctgaagttttctgcagaggaacctctgtcataacccacaatttttccacaccaccccctccttcaattcggactcccccttaacccaatttgtccatgcctccaccccacatatagaagtcacataaatgccactctactcactctccgtccacatga

SEQ ID NO: 669642 - DNA, 198 bp, Homo sapiens
  misc_feature (35)..(35): n is a, c, g, or t
gatgtgagcacaatcaaatgtccctaccctggtgnaaccacattctagcagggaaacgtgaggataataaacactaactacagtaaggtagatggtacagtatatgggtaagtgataactcgatggaaaaagcagaggggacaggcagggaggatgggaggcgcaggtgagggtaactattgagaaggaaggtcaggg

SEQ ID NO: 669643 - DNA, 267 bp, Homo sapiens
ctcccgggttcacgccattctcccgcctcagcctcctgagtagctgggactacaggtgtccgccaccacgcccggctaattttttttttgtatttttagtagagacggggcttcaccgcgttagccaggatggtctcgatctcctaacctcgcgatccgcccgcctcggcctcccaaagtgctgggattacaggcgtgagccactgtgcctggcctatttctgtctttgttttttcttttcaaatgcttgggtactacgctttggca

SEQ ID NO: 669644 - DNA, 1179 bp, Homo sapiens
ggcgcgagcggacgcggagtgcctcatgtctcgcttgtttcttatattaatcgcccaccgctttcacctttcttatgttctatctattgcgttctcattgtctctctcaccataccctccaatgacaccgatgggacatgcgtgagaggagtctgcacgggggccaagggagagcgaggcagggtgctagagcggaggaaagagcagaccaaagcctccccgcagagctcccaagacgctcagcagctacttcaggccccggaagccagcagtcaaaagagaagtgaaggacgaggagccaggggctccaggaaaggagggagactgctgagggaccctggatccaatctggattacaatcctgcgcaagaacaacatatcatccccgatggaagatgcctgctggagaagcgggagccagcaaacggttcccattacacatggaccatgtgggcacggaaggataacgcacaaagcatagcaggaagcgtgacaagacaacgggactcccggacaagagcagggaagcaccgacctgaccgcacacccaagccaagacggccacacgggacgacgggacacacatgcacagacaacagcaagaaaaccattcaagaaaacacaaggagcagagcgtaaaccactgaaagcacaatcaaacaacacagaaccatatggaggaccaagaccacccaaaagaccagtggggacacacgcgaacgacatctagacaaagtgagagaggaaacggaagaagcacaacacccaaaggcggacaggaagggaccgcacacaggggaacaaaagaagaacacagaggaaaagcacaggggagagactacacgagaacccgagagaccaaaagacagagcgcaaacacacacggcaggaacacaacgggcacagccaccagacaagacgcaggcgacatcggaacaggagcaaccgaagaaaaacaacaacgagaacagaaacaaaacaaagacacaacacaaaaggacatcaaaagacactcgaccaagagaccagcatgaacggaaaacaccacatgaaacatacgcgagagaacaaaaaacaagcaaaagaatccagagcgcacaaagacagcacatcaggccaaccagaagacgaaagaggcaaaaagccacaaaagccacaacacaaacagacagaacaact

SEQ ID NO: 669645 - DNA, 376 bp, Homo sapiens
attcatttctactccataggcttcttaatgtttagtttgtgaagtacagaaaaaatttaatatgcctggaaaatcacaactaaatgacagatgtatgcccaaattatgattataatcttcaacattaagtacagttttggaagtcctgtaggaaaatgctattgcctattgagaattggtcaaattgtcaatttaactccactgtcctagtaatacacaagtaatttaccaaataaagaattttaaatcctttccagactcattatacaacattaaacactaccaataaaagttgttttcatatacatcttttctattctaaaatgtgaagtctaaatggtatctgtatttccaattattaaataattttaaagaa

SEQ ID NO: 669646 - DNA, 247 bp, Homo sapiens
taaaaaaaacggggtcagctgggtgcggtggctcacgcctatactcccaacttttggggaacccaaggtaggcagatcatttgaggtcaggatttctaaaccagcttggggatcaaacatttccttggggtagttggtgccaagctcgtcaatggcacaaaactggatcagcttctcgtagatgctagggtttccgaaattctttcttccttgggataatgtatttcatatccattcagcctcgtgt

SEQ ID NO: 669647 - DNA, 927 bp, Homo sapiens
  misc_feature (449)..(449): n is a, c, g, or t
gtagaaccctccaagcagacgcaatggtaagttgatggtgtctgtgtgctgctgtctctgcatgctgattcatgggtcctgttgtcccccaggtgaaccacgatgtgtgcgtaacttctctggaccttatattctagatctgtgagttgttcctatacgccatgttgtgaagacgtctcaccgaggtttatactagagcctctgtggatcgaactcaattgcacctcactacgattcttttagaattacaatgtgtactcacttgtgaatgtcctcatgccaccatgtgcaagtcctgggcgcacagagtaggaggcgagattgggaagagtagtgggatggcatgggaatacgtaccaacatttcaggaatgcctcggggggaagtgacatcgtgtcaatggaggaagggcgtggaatgatcatagtggacgttatctcacactgtantatgataaccggtgttcttcatcgttactttgcaagggtaattgggtttgagatcgagtagttgcactcggtagcaaataaagagattgctaggagaagcattctatggagaatttctcaactttttgaatgtaacggcccttaaatttgattccagtgtatatagacacaattactagacctggggttcgcctttacggtcactatggcatgcctacgattaattccaccgtttcactttgcggcgtcgtgctgacacaggggttattgtggccgggggtgccgaaggtattaccgtgggggagggggtgctcaaggaggaattcttggggtgattgcctcgtaatggaggaaagaattatcctggaccggatgggtacaccgctgggtaaatggttcccctggttttggactcgggtttggaaagcccagcttcgggtccaggtaaaggagctgttagtgaacggtcgagaggcgg

SEQ ID NO: 669648 - DNA, 287 bp, Homo sapiens
taacccaataagcatttaacaaagaagatatgttagagagtcatagtgcactgaagaaaagacatcaggtttgtgaaaaagagagacatggattcacctactttagattcatatgttaggagagctccacactgacgaaagtgacattcacgctgagacaacaacaataagtagacagtcgtgacagatctacagggcatgcaaagttcctagggcagcactgcacatcgggggcaaagcccatgcatcgtgttcaacattcatcgtggcagcggcagcagcaaagc

SEQ ID NO: 669649 - DNA, 128 bp, Homo sapiens
gagagcatacaactacttgagggcttgttaaaccagtgcgttaaagtcggatgcggtggctcacacctgtaatcccagcactttgggaggcccaggcaggcggatgcacttgaggttaggagttcaag

SEQ ID NO: 669650 - DNA, 1018 bp, Homo sapiens
tgtcatacgacaagtctctgatctaggctcgagccgggcaaagtatgtgctcatgcaatgatgggctcactcaggtggttctctctcatcgagcacttgatgcgtcgaatggatgtagtgggttgctgttctccactcaatcactagtacatcgcgcatgggtggcgaacgcggaagcggtatgttgcgagacgaaagtcatatccatagagcctctcgtggagcgtacgctttggcttgggccatctactgctagagctatggaggtacctactaggcgaggccgtgctggtttactcgagtagtctaaccgccactacggttggcgtgccgttcacgagggctgacacacactagctcatacaggagaaacaaagcaagccgtggatctttgcgcttggggtcgggcatcaagcccctggtatatcatctctgaagcgaacagcaaggcgcagggttattttccagggtttccagcccgaccaacgcctttccccagtaacactcagcttcgtaccgcactacgtgagacacttcactgaaagtaaaatcgaattatccctacaagagaccaagggatgactggatcttccaaagacacacggaaccatcacttgcctggcatcccggacctattgatacaagaggcccttagccccgaacagccttcaaccgggcacttgcctggctgacaaggggctcattgggaccccatggcacacaaagccccaagcaagcacgcaagataccatgcggggaaacccacaccttggcaatacccgccccttcagggccatggcaggcaaggtaatttgaaaaggtcctataaagcgaacggtatacttgaaagcacccaaaaagcacacctattccaagatggtagtgcgaaccctatcacaagtggataatatacccacactgcaccgtcgctgtttgcggcaaggatttaaccccttccacacaagcgctgaccacgggcaacaaagtgcttggagctagctatggcccgtagcaaaag

SEQ ID NO: 669651 - DNA, 871 bp, Homo sapiens
atcgcagtggcattcctaagtgcttaccgaacgaaaaattctaggctatatacaactacgcaaaggccccaacgtcgtaggcccctacggggctactagcaacccttcgctgacgccagtagaaactcttcaccaaggagccccgtaaaacccggcacgaagtctaccatcaccgctctatcatctactcgctccccgaccgttagctctcactcatcgctcgttcgtacgtatgaagccgcccctcgtccgcgcatacgggcaacaccactctgagtcgaagtcgtcaagacgtagggccgtcctgattgtagtgtctatgccgaggccatgctacgcctcaggccgctgactggcaatgccttctggatgcagggtggtacgtcatgcaaatctcaaatctatcgcctcctgtatacgcgacgacaacgtgaccgagccaggtcacggcccaatagcaaattctacatgatcgaacgctcaacgcctaaggccgaggcagtttgctgactaattcacatctactataacgtaaacttacacgttgggctccacctttagacccatctgccacctcgcttgagtcacaaacgacacagaaacatcgcgtctgacttaacgtgcgtagcgcagttccacttggatccccgtatgggccccattacatagtgacttgaatcctgccgaccgcgtaaggcaggaggcacccgagtcgcggacagaccccgctttccgtagcccttggccgaagaggcggggttcccgtagacgtaagtcctcagggcgtggtcacacagtgcgacagtaccggccgcaaggtccccttgcgcccttattgctttcaataggcgaagtataccagaccttattg

SEQ ID NO: 669652 - DNA, 957 bp, Homo sapiens
  misc_feature (106)..(106): n is a, c, g, or t
  misc_feature (129)..(129): n is a, c, g, or t
  misc_feature (243)..(243): n is a, c, g, or t
  misc_feature (505)..(505): n is a, c, g, or t
  misc_feature (661)..(661): n is a, c, g, or t
ggtccggccggcagagctccaccgctgaggccgacgaggccaggcgtttatttcaacttcattaaaagcaaatcaaatgtagactggggggtataaattaatctancaagatattacaatgactactanattaaaagtgtttgtcaaacagcctgggtatgaaataggacttctatattgaattaacatatttaggcgatgtagtagcttttttaggccatttagtgggggggggtacattanagccatatctgaataaatgtgtccaacagtgggctgaaagtactgatctaccactcagttatacattttaaactagggacttcctcccccttgtgaggggggctaaatttttattaggtgaattctaaggtattaaacatattttaattatattcatccccaagctgggttgattcagaaacacattttatggaataatacattttacacaataaaatttaatttattaaagaaactcattttatgagtataattaactcanaaagggtcttaaagcttttatctccaaaattaaaaaaaaatattgggtaaacagaggtcttctgggctggggctcatgggatagggggtccctctcatccattgagagacgttttgttttaattggagggggtctatgaagggggccactggctcngggagatgggtgtttgggtctttgggggaggtgcttattgcctgaggtgtgggcgaggataatgatggataaagggggggagagaacagattcccactttagctttctgtgttagaaaggagctgggtgaggcctggggaagtggaaggccgtggggcaggggtagaaggcggggggaagttggatggtgttagagacgattggggtggaccgtgctgctttggtgagaggaaggtgcggtgaggtggagggaggcttgggtgggttgggggggagttgaaatttcgaagggggcg

SEQ ID NO: 669653 - DNA, 1140 bp, Homo sapiens
  misc_feature (263)..(263): n is a, c, g, or t
ctcgcatcatggagtatcaatcagccgtgagtctgcaccaagtagtctaattagaaaactaccgaataccaaagtaattcaagcactgcttagtacaatgttcactgggtctctattgttaccctcctacaaggcctcagagtacttgcgagtctccctatcagcattttccgacgggctatgctacggctcaatcatttgcttgtaagccacaggctgtccacgggacttcacgtcaattatcagggcatcagacttatccntacacgtattctggcgtgtcagtgccgccgaagcgtaagtattgtcacatgttagcagtccaagacgatcgacgtttgggctgtgcgaagccggccgccttggatacgtgggcacttgttgtagactgtggtgttgacctactttctgtagtgtctccagtctacttgagtgatgggctcttaagagtaaatatcataataaataagagaataacaaaagtgagaaagataacaaaacgaagtggtggggcgggggacgcaatatgaaatattgccctcacggtaggagggccgccacgaagtgggccgccacgcaggaaccccacatacctatgctttgcgggcaggaacgagggagacgcgcgcactaataagcgtgagaggactcgatagataacaaggcagaaaggagaagggcggggccgggggcctcacaaacagcacgatggcgaagacgaatgtggtgaagaagaacgcttggagacctcggcgagaccacccctggggggagaacgaggacccttggaatagcccaaggacggggagaacgccagactgctttcgaggcgccatagtgactcccacagaaaggaaatacttataaacgtcccgataagggggtcgaagaaaaacaacacaagaaggcagcgaatcaaaaggtggggctaaccagacatacgctgatcgaaataaactccaggggcacatatgaacaaggtacaacgcgcacaagcgagaatagagagcaaaagaccaagggatattaccagaggagagccacgctatatagaaaacagcgaatcacaaacaagacaacccgacaaaaagatcaaacacacacacacggaaaaacgtggaagcaacaacaggagcacag

SEQ ID NO: 669654 - DNA, 591 bp, Homo sapiens
gatctgttttaagttctttgagaaatcttcaaactgctttccacagtggctcaactaatttacattaccagtgtctaagcattctttttctctgcagcttcaccagcatgttgtttttagactttaattacagccattctgactggtgtgaaatggcatcttattgtgagatggttttgatttaaattttcctgatgattagtaacgtggaactttatatatatttgttggccgcttatatatcaagacagggttttggaactgaaatgcatatttgaggattataagcatacagagaataattgacaccagggaagggaattaattctcccaaggaaaacgcattgagttacatgaaaaggggtctaggattgaacactgcactgagaaacaacaacatctagatgatggataggggaggaagaaagaattcagtaaggagaatgaagtttctcctgaaatgaaggaagaaaaccaggatagtgccatgcaaaggaggtgtttcaaagaggaggaagagattaacagtgccaaatgcgactgagatgtcaaagaagttgaaagaaataaggatatcctgggtagccttgg

SEQ ID NO: 669655 - DNA, 1172 bp, Homo sapiens
ggacgactgcagcctgagccgcgtccaagtcgtgagttccttccggatttctccggtcaaccggatgtctgccagtctgccgcaggtatcgcagggcggttgttagatcctagtgccccacgatggtgtccagtgacaacgccctttcagcgcgtgtccctgcttgctaccgtcacgaattgcggttcctcgcgtggtctgctggcagcatggagtggcggtcctaaaggccggtgcttgctgggctctgtgtagcgtcgtgccattgcgccacagaagtgtctcgtcaagagcctcgttccagaggccccagaaacgtcgaccttcgtcccaggcgcagtctcgcaggacgtgactcggaagtagccgtggaaccgaagggtaggacagtcacctcgccagcgcgtgctgcgctcctagccattctcgagtgactctcgcgacaatatcggcctcgaaccgcccggttctgggaagcgggcaaaggacggcttctaaggcgggggcttccgttccctttcgaggcttcgcagcaatggcttccaggatcgacgagtttacccgcagaggcccccaaggagccccgagggtttccaacgcgacctgccgttgagtcccaaaacgctccctagattgagtcgcgccggtcctgggcgcatctgcgaaacacgagaggaatcgggaacgcgcctgaaagggctcaatcgtggagagtgcgaagttggttctcttggatcccaagattggaaccggccgagacaagttgagacccgtatgggcacaacacaggaaattagattgcggggcttacaccccgagacgtttaagactttgcgccgacgggaagggaccagacagggcattggggccctctgcaaacatccacagatgtgagccccaaaaactggtggctgcgaggaccacctttcacccacaggtaaagcccccccggatgacggtcattattcacattgaccggatccccggccgatggccgaaagtgtccaaggacccatcgtccgttaatatagttcccatttatggagggcggcaacaggaaaaggcccccaaggtggtttcaacagggcggattgattagcggggatccaagaaagaccccgcgcgtgtgaccagacaagagtgaaggcaaggccttggggattggcacacaa

SEQ ID NO: 669656 - DNA, 646 bp, Homo sapiens
  misc_feature (607)..(607): n is a, c, g, or t
aaacattgcaccccgtgtaaatatgtacaagtgcatcactggtacaattttatgtgactcagatggacactctgttggcacagacctatggtaggtgtccttaacaaattaaggtgacaaagcacatggcactgtgtatagcctggttatcggacggactcctggcttggcaggcagtgctgtgcgctgttaatggagaagacctgggcttagcaagatccttagatcttgctacacaggatgggggctggcacttaagcttcacactgggttgcacttagacactgagggttgggtttagcaagcagggggaaggcgaactgctctccagctcttactgtcaggcgggtacatgggaacagggatacatatgtgcttgagaagcaccttacacgtttcatagggaagaggtacacattggccatttaggggaattgggcaagagaactaagggcaacaactcttggaggaagctgtctatctgaactttcaaatgatttcgatttgcttaagggcgaagagcattttcgttttcctcagcagggaagatggggagttacctatcccggggcgccattgtgtttccaccgcaattgggcctcttgtntaacgatggcttgcttagaaccggttttttattatccat

SEQ ID NO: 669657 - DNA, 919 bp, Homo sapiens
ggcggagtgtggaattcttctcgggaggcagtgtctgggtcctttccaccatggcacctaagaaagctagaaagaagagagccggtgggactgctcaactccaaacgtgttctccatgttcgaactaggagccctacacatccgagggaattctcaacggtagggcctttcacgttatcatggagccaagaaacagggatggcttgcagtatgtagcaagaaacgagtctgagagacatgcgttctgctgcccttggggcgagatgaacgtggaacatatatgacggaaattgatggagaaatgtatctagggcaggctccgggtccaattgaactttcactgtggttccgtcacagactgtgtggtgggatgcaaccccgttaacgcgaagcgggaagccttgaggaaagcattccctcaagcggcatttcacaaggtgtttggaccctgatagaggcgatacacggggttgttatgagaggggctgattgtaccgtgcgggaaaatgctgagcgcactgcaggcgggacaaaggttctcccagctggatggatggtttgaccatgagtgtgcgacgcccttccgctcccttggatcgtgactggcaatgcttggacttagcgaagaacctggtgcacatcattcatcccatggaggacggacgaaggactaggaggggggttcgctgcatggcccctgggtcgtctttgccgagtggtcccttgcccttcatcctctcatcccccgagtaccggtctgtccctaccctggtctgttaagcaatgtggctggccagtttttccacctgcattgtctgggagcgggggtatgggtactcggggcggcatctacaggtgggatgcgcccgaggcctgtcaggaagcagggggcggtaaaacaggggacaaccatcggtcg

SEQ ID NO: 669658 - DNA, 1359 bp, Homo sapiens
gatgaggccttcgatacgggataattctatttattagctcagaagttgtttttcttcgcaggattttactgagtcctttgtaccactccagcgctagtcccctacccgcccgattatcaaggaggggactggacccgccggagaggcgatcagcaccggtttaaatgccctagaaagtgcacgattcctaggggcacgatccgctcatgttactcggcgatgtaggcaggtgatcgaatcgagcatgagcgtctagcgattagctcgttaatgaggaatacacagaccgtacaatcaagcactcacattcaacatgccaactgcctcgattttacaattgtttctagcttgaggtcatcctaatgttttaccgactcacgtcaccgaaagccgatcaagaagtacgttgcggcagtctctcgcgttcaagccgaatgtttcccagcaccggaagtcgtaagcgagcgggtcgaaacaatttgatcataggtatgccgcatgcatgggcttgtcccacgcgggatccctatccaccagttcattctttaactgtggggcatgcaaagacctttgtgcccgtgcccaccgttatcttctggccggtttgcaagtcccgggccacaacaaccgtagaggtaattttgcaccttgtgtaggcattttcaccaaagagccaatcgaacctttgtgggggccattttcctgaatattggctctgggcaccagggcccttggggaattacccgtcgggacacgagtattctctatcggtgacagaactgggtaaggggtagtaagggaaacttcaactgatctggcctcggtgcatcgttgcccttctcagttgacttagatagtcggaattggaaccggagggttccttttaacccacaaaggacatacaggaccaaaagatagaaccttggggagatacaaaagaccacttcggaacacacaacaggggaacttggcggctccggaaaggcaaaagcgactttggcacaagggggaattcgcccccataaacattaaggcggattgcggtgacaccaacggaggacagcactggggcattgggaacccaaagcgggtggcacatacggagcgcgcaaaacgacacaagttgtagttgggactttggcacttcccgaaaatggacagagacaagaagtatgtagtgccgcagtggcacccaacgagacagttgggggaccccaaaattgtgtgtacaccgggacctgtggtgcaacagcgagtaccaggatatggaaggggggcaccccattgagttggacagaggaaggaggcagccataagacactgaaaagcagaaacctagggatgagcaatatccacgcg

SEQ ID NO: 669659 - DNA, 108 bp, Homo sapiens
tagctactgtctacattccctaatatctggttactatgcactgtctagactttaaatatctgtctcctgaaagtgggaaaagagaataatgacgaagaaaataacagc

SEQ ID NO: 669660 - DNA, 131 bp, Homo sapiens
ttctctgatatctcgtcagcctgctacaaggaaatccatgtgtacacaatgcatgcatcgacagattagctccataccaaatggtagatataaaccaaatatctgagcagcaactagagctgatccttctg

SEQ ID NO: 669661 - DNA, 853 bp, Homo sapiens
  misc_feature (174)..(175): n is a, c, g, or t
  misc_feature (181)..(181): n is a, c, g, or t
  misc_feature (204)..(204): n is a, c, g, or t
  misc_feature (246)..(246): n is a, c, g, or t
  misc_feature (250)..(250): n is a, c, g, or t
  misc_feature (481)..(481): n is a, c, g, or t
  misc_feature (504)..(504): n is a, c, g, or t
  misc_feature (509)..(509): n is a, c, g, or t
  misc_feature (534)..(534): n is a, c, g, or t
  misc_feature (615)..(615): n is a, c, g, or t
  misc_feature (723)..(723): n is a, c, g, or t
  misc_feature (750)..(750): n is a, c, g, or t
ggagggctctatgacccaggtgtacgagaggctaggagaagctgcaggcagtggtggcgggggtgcccgggcatttggaggccgcagtgcatccccccttccccgcaggagaactcctacgtgtccagcactggcagagcccacagtgtgggctgctccatggtcagccctggnngcgccntcaggagccagtgcccaggcagnagagcagtgcatagaggccccaaccagcccgtgagagtgacntgangcctaggcggcctctctgctgccctgcgctcctggcacttgactccaagctgccctctggacccagcacccctcagggaggccggctgtcctcagggggacacggcaggagaatcgagctgggggagtggcccaggatcccggcccacagtccgtggaaggactggcccttggcagctctgcatcatcgtcgtcagagcccaccgcaggattatcatcaaccctgcccgantagaagatggtccagaagctggncctgntacgacggatggggccctggacagnctgcagctgctgtcgtccagctccctcccaggcttgggcctggaacaggacaggcatggggcccgaagaaagtgatgaatntcagagctgatgtgttcacctgggcagatcccccaaatccggaagtcacagttctcatggtcagaagttctcatggtgcacgagtcctcagcactctgccggcagtgngggtgggggcccatgcccgcggggganagactggagtttggccctgctgttctaggctctgtgggcataggcaggccgagtggaaccttgctccatgccagcatctgggggcaacgaaggtggcatcatc

SEQ ID NO: 669662 - DNA, 1061 bp, Homo sapiens
gtggcttccggcgctcgtttgcttgtgtgacccctgtcctgcttgccggtgtgtcccgtcctatttctgccgtctgccgtgtggccgccgtggtgcgcctctgtccagctgtctgtgtggcgggccctcgaggaaagttctctcctgccggtctcggggagtgtcccggttgggcgtgatactccggatctgtcggccgtctgcgtcgcactaggttcggtctccgtctactgatttcattgggctgcctaggctctaccgtctggcccctccatgtagtttgcagtaggatggtgcgtaggctcggggggcataggtcgacctcccgtaccatgatgcggtcccttcccccaccggcctgcgggtattgtggctgactcgccaccactgcccgggaagccagatgtggtgattctcctgcagtgctctgagccgtgggagttcatgctgttctttgtcgccgtaggtggcctgggtggcattgtatgggcggagctcgtcacttgacactcgtactacgacgagcatcgtacgttacgtgtgtagctcacttccacgtatgtcctatcgtataggagctgtattcgccatcataggaggcttcattcacctgatttcccctattctcaggcttacaccgctagaccaaacgtacgccgcaaatccatttcacttatgcatattcagtcggcgtaaatgcgaactttcgttcccacaacactttgctcggcctatccggaatgccccgacgttactcggagtaccccgatgcatacaccacatgaaacatcctatcatctgtaggctcattcatttctctaacagcagtaatattaataattttcatgatttgagaagccttcgcttcgaagcgataagtcctaatagtagaagaaccctccataaacctggagtgactaatatggatgccccccaccctactacacattcgaagaacccgtatacatgtatgtagacatcaacggaagaatcgaccccccaattaacctcagccacccctgctccgctgcgctggggggggagtggggggagagtggggg

SEQ ID NO: 669663 - DNA, 580 bp, Homo sapiens
ccaatgactcagggactagtgtccaacttaccttatttctcatgctttgattggaccaaaagctagcttagagtagttgaattttcggggcagtcatctgtatgtctagagtaatttgggagcttgctaccttgcttaccttgggaggtttcagttgatcattgttttaacccatgaagctgttcccaggaatcattacagtgttccatgtatgttaaattcatggctgatcaatacctttatatttaccccatatttaatgaatgctttaacatggtgacatgtggaaatgcagaaatttcatgccaaggaaactagatgccctaaaataagatatttattcgaactgttaaaatactagaagaaataatagctaatgtcttttgagcgcttactaggtgctaggcactgttccaagcactttctagatactgctatattattacttcatcctcacaacaatcctatgaagtaggtgtgtagtatccattttacagaggaattgactgatagagcagagaggttaagtaacttgcccatgtgggtaggaattgttgcttgacttgctttaaattttggg

SEQ ID NO: 669664 - DNA, 142 bp, Homo sapiens
gttacgcccacaaggactgtgtttggagtggtgatgaaggactgatgtttggagtggtgagaaggactgtgtttggatgctggtgagaacggtactgtgtttagtgagtggtgatgaacggatctgctgcgaggtggatgtg

SEQ ID NO: 669665 - DNA, 344 bp, Homo sapiens
cacaaaaaataggcagatctcgccactgtgaattgttcattgtttctcacagactgtcgtcgccgctgttcttctaccataacattgcagtgcggcttcacaggccgtccacgtgacgcattaggtctggcctccgctgaacggatgctaggtcttagagaaggttccaggaaagaagaagtggattttacagttttggcggcgcggagccccaagtagtctgagcaactcgacagttttggcgtttcagcctggggaacgcttcgtctcagagtggccacagaaagaaaactatgggcaggcttctgttgataatggttccccagcatttttcggcagctgtg

SEQ ID NO: 669666 - DNA, 417 bp, Homo sapiens
cttttggggtctttgctactggagaatcacggacaccactgttaaatatgaccacttgagttcttcagagaataaaaatgtaggttctgtaaacattatttgcatctcatagttcacaagagatccacgtccaagtgaaggtttgtatttctagtaggttgccgcgagactaaagattccgcatctgtctgagggggcacctacctgcttagtaaatagatccctctcaacatgctgagacatactttctcttcccacttgtaattcactgtcccttaaaatgtttccccattaaaatgatgctggcagcctttgatgtgaactacagggtttataaaagtacagcctttcctcctctcaggaggtctgaaaacagccctgccatccatgcctcagcaaagaccccaaaaggggtac

SEQ ID NO: 669667 - DNA, 201 bp, Homo sapiens
cgcggactagttgtggagcgggcagaaatgtgggttgttggaattgagctcgggctgccgtgggaggttgtagatggctcaacaaaggctgatgtggtagataggaggtgcaggcctagtgtcctttgagcttggccagctatggaaatgtgcgtagattctccctgtacgggattgtagcagccggcaggggaacagatg

SEQ ID NO: 669668 - DNA, 688 bp, Homo sapiens
  misc_feature (38)..(38): n is a, c, g, or t
  misc_feature (59)..(59): n is a, c, g, or t
  misc_feature (82)..(82): n is a, c, g, or t
  misc_feature (91)..(91): n is a, c, g, or t
  misc_feature (124)..(124): n is a, c, g, or t
ttaccaaaatatatggcaaccccttcaccttctctccntatggggaataattataactngctcaattcctgtacgccaaacngatttaaantcactaatcgcctactcctcagttagccacatngcactggttattgcatcaatcataatccaaactccatgaggcttcatgggagcaacaatactaataatcgcacatggcctcacatcatcactcctattctgcctagcaaactccaactacgaacggatccacagccgtactataatcatggcccgaggacttcaaatggtcttcccacttatagccacatgatgactgatagcaagtctagctaatctagctctacccccttcaatcaatctaataggagaattattcattaccatatcattattttcttgatcaaactttaccattattcttataggaattaacattattattacaggtatatactcaatatacataattattaccacccaacgcggcaaactaaccaaccatataattaacctccaaccctcacacacacgagaactaacactaatagcccttcacataattccacttattcttctaactaccagtccaaaactaattacaggcctgacaatataaaaaacagcacagaagactggacaacattaaaaacatggtacttgtatggtaggacaactcagttcg

SEQ ID NO: 669669 - DNA, 222 bp, Homo sapiens
tagtcggtacctcaatatcagcgacgaagagatggcggctcgtcgccaggcctgggtccacccaagcgcgttatacacgcggtgtgcttgccaagttcggcaagctcgccagcaccgcgagccgtggggcggtaaccgatgcatttgatacgtagtctgttggcggtcgccgccggcctgttggtcgccggcgcggcccaggggcaaaccaccggcctggat

SEQ ID NO: 669670 - DNA, 315 bp, Homo sapiens
gacctgttcgcatggctgtaagcagcagctttaacgaaaggcgggaatgtctagcaggcgtacgaagccgcttaaagagaaaggcaatttgctcatttcttcagaactacgacggcagttgcaccaataatagccttgttagatctatagtcttttggggggacgtacgtctaggtgcgggacgacctgtgtaaacaggcataaaaacaagaaaactataggacgactaccatacttccatgaggtggcactgcctgccacataaccacttacgactcgatcctgtacatccttgtcttacgccgctgttgctct

SEQ ID NO: 669671 - DNA, 867 bp, Homo sapiens
  misc_feature (867)..(867): n is a, c, g, or t
ctggagcctgcccgctgagtgtcatgaatggatgtgctgttgcgctgatctgggtctgccgctgcgccagagccatgagtctgcagcctgaggtggatgcctgtgtggcctggatgccctgatgccctgatgcctgatgcctgtgatgccctgatgctgatgctggctgtgatgacctgttgccccctgccttctgtgcccctgctgcctgcctgctgtgccatgtgcctctggcatttgtgatgtgatgtgatgttgcctgtgtgattgcatacatcgcgagttacattgaatgcctacgtgtcaattcccatgactgtgacgattacatggtttgtgtggcaaagcccttgcgttgactggtggacacgagcctggttttccccgcttggccattgcgagggtggatattaatgttgctggtgagctcttttgcaggagttattggaacctcggccgtggttggattggagcagcacgtgttccgttattgaggtccgctaaatgtgagttattattatacgtagataaggtccaccaagatcgaagtgcctgatgtgcgtggccagatcaacagttttgcgcgcccgccgtaacccatgttttgtgtgcgcacatattcggtggtgagcccacccatgagaactatgagttttggcccgattattggcagacagattctttcgaaagccagggaaggttttctggtaaggtgaggccgattcctccctaattctgatgggataagaggagattctgtgggattaaagacctgtgggaatgagaggactgcgattgggaccccatatttatgtgaaagatgcgcgggcaccgttttaggaatcaagcgcgtacagaagccacgan

SEQ ID NO: 669672 - DNA, 264 bp, Homo sapiens
gacgaaccgcctcggttctccgtaaggttgagatagcacctggggatcctgaactcactaaaagtcagaggttcctcgagatatccggatgttgtacaacaagaaaaggtgcgttgggtatggcggcgacaccagtgtgctatcacctagtcataactctttcctgtgataaacacttgaacccgggacgcggaggttgtggtgagctgacattgcaccagtgcgctctagcctgggcaacaagagtgaaattccatctcaaaa

SEQ ID NO: 669673 - DNA, 292 bp, Homo sapiens
atgttcttgatcagtttaggcgatcattgctatcggaagtaccaatctaagcgtgggcaccgcaccaatcgagatcttaatccccacccaacgcggcaaactaaccaaccatataattaacctccaaccctcacacacacgagaactaacactaatagcccttcacataattccacttattcttctaactaccagtccaaaactaattacaggcctgacaatataaaaaacagcacagaagactggacaacattaaaaacatggtacttgtatggtaggacaactcagttcg

SEQ ID NO: 669674 - DNA, 330 bp, Homo sapiens
agggaaaaatgttagtaaagttcttgggttaaatatgtaggtgaggccaggcatggtggctcatgcgtgtggtccctgcactttgggaggccgaggcgggtggatcacctgaggtcaggagttcgagatcagcctggccaacatggtgaaacccggtctctactaaaaatacaaaaactagccgggtgaggtggtggttgcctgtaatcccggctactcgagaggctgaggcaggaaaatcatttgaacctgggaggtggacgttgcattgagctgagattgctccactgcactccagcctgggcgacagagtgagactctatctcaaaa

SEQ ID NO: 669675 - DNA, 681 bp, Homo sapiens
ggtgatgcctgagtgtggcagcgagacgcagcgctccagcagcaagcgctcgtagttctgtcctgcatgctcgacatcaggctggaatgttgatgacgtcgatctttgcctcgtagaccaagctgaccacgtggcaaccgtctcgtcgtagtgacgcacggccggcatggccgatagcagcaccgagtcgccccagccgaagccagtgcctacggcaagctcagaatctggatgcggcacgccgacgaagatgacaagacgcgacgggtgaatctctaccgttgaaccaggcaaccgataagccttgggcttgccgaagcgcgggctttgcgggtcctgctcgatctccgtcgcgctgagttggcggcgagtcattaccgtcaggtacttgatgccacccttcccgactcgatccggcttcagctctgaggctgtgtcacgctcaccggtgccaatgaacaccgcagccccaccgaacagccgggccttcaatagggcctccagaatcttgcccttgatgttcaggcgatcctcttcggcttcgatcagctcgatctgagccttgtcggcctgccagttgcgccagttgcggcacgcatcaacggccgggatgctcacgcccttctgcgccgtccacgatccacggaaggcgtcagcagttgctggtcgtccatcacggaa

SEQ ID NO: 669676 - DNA, 497 bp, Homo sapiens
  misc_feature (65)..(65): n is a, c, g, or t
  misc_feature (73)..(73): n is a, c, g, or t
  misc_feature (81)..(81): n is a, c, g, or t
gctgtaatataactaaaccattttttagccagagtaatatttatttgcatagtctatttattgtnttcgtatnacactgtnattaaatactgggatgaaatcagtgacctgaagcaagaaatcttgccttttaatgtatcattaattagggctgctgtgatattgtcagcttgcattaacaattagaagatagagaacccgccatcagggtgtctacctaacttctcagggactacacttggtagttttccaccatttaaagaactggtaaatatgaaacatttggtgagttaccaaaattgccattaacagtgttttctttcccatattccatgctttctgcctttggggatatatataatataattggatttgactgcgctggggtatttatcgaaacttaggaagccaattaattaatttggttaaaaatgggccaagccaattatagggtttaaaaaccttatattaagtaaaccctttaccttaatctttgg

SEQ ID NO: 669677 - DNA, 283 bp, Homo sapiens
  misc_feature (12)..(12): n is a, c, g, or t
  misc_feature (282)..(282): n is a, c, g, or t
agattcggcacnaggccatagaaacactgtactcagggccagaagcgcaggctgcagcgtctgttacagacgaattctgaaagaagatgccaggtagggcacctcagggcctggaggctcacaggaagggctcaggcctgtctgcctttaccaagtacatgttcactctcttaggtgtttgtaggggagtggccaagacagccacgtggctcaggtgtggaatgaagctagaccaggtggaagccgaaggtccggcctctccaggcaggagagaaaggatgnt

SEQ ID NO: 669678 - DNA, 363 bp, Homo sapiens
gcatactcagtaggagtgcgcattatctaggcagagatatgtacttggacagatatggtgtgagatgttgagagtagcagatacccttatatttcagaaggttagccaatagcctatcttgatggattggatgtagatgtagaggaaaaagcagttaaggatgaatccaaggtttttgttctgatcaactgaaccagaatgatggttttgtcatttacagagatggcaaagcacataaggaggagtggttattggaggaagaagaccaagagtgcagtgtagaatataataaaaatgagatgcctattggacgtgcaagtgggaaatttgagtaggaggttattggcatgggtaccgagctcg

SEQ ID NO: 669679 - DNA, 908 bp, Homo sapiens
cactataaacgtattacctctcacggcgggagctttatcatttccgtggacggtgctccgaggatatgtcaaaaagaatttcgtttggaacccccccttctctgaaaaactctccgtgcaatgggttaatataggcaacgcgctgtgtgtccaaaaaaaggttgttttccccacacctgtcctcttaggggcaccaagccgccgcttacccatatattgggatcttaattgagaattctttggtcttctgtaacttggccaagtattacactccgcccttcatcctgccattaaaacgaactctccccgtgtaacaatacccccgtggtcaaccaacatacaccgcccggttattccacccccgggtcgcgcccaatggcacagttcctgaaacggtcccgaagtttccaaaggccaccacccgcaggagaagtgaaacccacgggagaatagggggaaacatacagggacaagatacatctagaaggggtttcccctgtcaaaagcgtccatgcgaccccatagggccagcatgtgggcaaaacccacgtcgcaaaagtctttctttgtaaatccgccccccccttcaatatctttcgacacataacattacaaggggccctggtgcttctttttggaaataaccccactccgtgtcccaccacaccaataattttttgtctctttgtattcgctcagaaaaaatgtcatctatttatatcccccctatttaaaaagcttttggttaccccaacgctcaacacccccagacgtgatgatgtcgcacaatcaaatagaaaagttgctgttaatctttttgcggttatccatcctcgaggaactgatccctctatcaatatcatgggttcccactctacatatctactgtaatcacaagagtcttggga

SEQ ID NO: 669680 - DNA, 905 bp, Homo sapiens
  misc_feature (700)..(700): n is a, c, g, or t
ggatagcccagcagcagtagcggtggtggggctgcggagcgggtgtgaggcggtggaccgcgctgcaggcatccgaaggacggcgggaagatggaggtgacgggggtgtcggcacccatcggtgaccggtttacatcgaggcagctccctcaaacaccttaccacgtccgagaagcgatacagccagatcctcaccatcggtgagttcaaggtgtaacactgaagtaggctggttgggcagacctgtttcctgcggttggaaactcggagctgtatgcagcctggacgacaagttctacagcaagctggctcaagaggatgcgctcctgggctcgtaccctgtagaatgacgggtgcggcatcgagtcattgaccaaatgtggcgcccgccttggtgagtatgaggacgtgtccggggtggagaatgtacacgatctcacaagatgctacgatgcagaggcaagacacggtccgtctttcctgaagccgcagaagctcggcggtgacaacggaggaggagcgggctcagcagagaggacgagtgctaccagcgtcatggcgaggaaaatggcccaggccagtccatcccggtgggcagcgctgtgaggtgcgggcggcgggacaattcccctcgcggggcccgcttgtttgtagttcccacaaattcacgctgggactggatggttgtcgtatgatgagncatgcgaaaatggtggcgtgtcatggaacgctattgaattcggccagtttggccttgtacaagtctgagggggaccccgggaggaacgttgcggaattaccaggatccgttactttcagaggcctgttgcagcatccgcccatattttcggacgtggcgttaacacaaaaaaaaggccgctatggggaggtgttatacgacacta

SEQ ID NO: 669681 - DNA, 127 bp, Homo sapiens
ttcgagagcagctaggtcaacacgggaaaaccctgcgtctactacaaatatgataattcgctggatgtggtggcgcatgcttgtaatccaagctacttaggaggctgaggcacaagaatcgctgtaa

SEQ ID NO: 669682 - DNA, 340 bp, Homo sapiens
  misc_feature (144)..(145): n is a, c, g, or t
gaattcggcacgagctgaccaccatcaccaagcagatcacggcctacgtgcgctccattgccaaggtgaaggagcggctggagcccaggtgaggccaaggggggtgttccaggggcactgagactcttcagaatgtgcatgggnnctgggtgcggtggctcacggctgtaatcctagcacctcggcctccaaaatgctgggattacaggggtaagccactgtcccggcccggttatttctttaacggtaatcatttgtcaggagtaaacccagagctctgacaggcatatttcagatcctttggcttgggcagttttgatttccccgtgtttccatggat

SEQ ID NO: 669683 - DNA, 638 bp, Homo sapiens
cgcagtggctcatgcctgtaatcccagcacactgggaggccgcggcaggtggatcacaaggtcaggagtttgagaccagcctggcaacatggtaaaaccccgtttctactaaaaaaatacaaaaattagctgggcatggtggcatgtgcctgtaatcccagccacttaggaagctgaggcaggagaattgcttgaacccgggaggcggaggctgcagtgagccaagatcgctccactgtactccagcctgggcgacagagcaagactccgtctcaaacaacaacaaaaaaacaaagtaccacagactgaagggcttaaccaatagaaatttctttcctaacagttttggaggctagaaatccaagataccaggttgttggcaatggttgtatcttctgagggctcaattcgtggcttgtagatggccatcttctccctgtatcctcacatgatctttcctttgtgtgtgtctgtgtacaaatttcctcttcttacaaggacactaatcatattggattagaaacttccccaatgacctccttttaccttaattaccactttaaagaccctagctctaaatataagtcatattctgagatgctgactatactccaaatatagtccatattcaacatatg

SEQ ID NO: 669684 - DNA, 258 bp, Homo sapiens
  misc_feature (234)..(235): n is a, c, g, or t
atctacaggacttatcattcagttccaggctataattgcacctatgcactcaagtctgggcaatcaaagagagatcctgtctctaatggaaaagaaggcagcatgtagctcatgctgtaatcccagcacgtttgggagggcaagacacgcggatcacgtgaggccagaagtttgagaccagcctggccaacatggtgaaacactggtctctactgagaaatacaagacttagcnncagatgtggttggtgcgttgtct

SEQ ID NO: 669685 - DNA, 810 bp, Homo sapiens
ggctaaccgcctgtgatcctaagtactttgtgtagggcaaggctgggcggatcacgaggtcaggagatcgagaccatcctggctaacatggtgaaatcctgtctctactaaaaaaaaaaaaaaaatttagcctggcgtggtggcaggcgcctgtagtcccagctactggggaagctgaggcaggagaattgatgtgaacccgggaggcggaactttgcagtgagccgagatcatgccactgcactctagcctgggcgacagagcgagactccgtctcaaaaaaatgaaatgtgaatattttctcacatgtctgtctctcaggtgtactggtgaacggtttgaagagcagagatatcttggtacagctagtaacctaaggtgtcaccaaggggcttaactatatgtggatggtacgcaatgtgtatgaataaaaagtattagctctgaacaacacatgacttattaaactaactgcaaatgggcctgatgcggtggcttacaccctgtaatcccagcacttggggaggccaaggtgggtggatcacgaggtcagatcgagaccatcctggctaaacatgatgaaacctcgtctctactaaaaaatacaaaaaattagccaagcatggtgggcgtgttgcctgtagtcccacctactttgggaggctgaggccgggaacatttgctttgaaccctgtgaggtgggggttgcagtgacccgagaaccgcaccactggcactcaagctgtggtgacagaggcgaagactccggttcggacacacacaaaaaacgaaaacacttttggccaggtg

SEQ ID NO: 669686 - DNA, 507 bp, Homo sapiens
  misc_feature (67)..(67): n is a, c, g, or t
  misc_feature (165)..(165): n is a, c, g, or t
  misc_feature (229)..(229): n is a, c, g, or t
ctggtcgtctgagttcctcacacgcacttggaggacactgacatgatagtagagacagtatctgtgngcatgacataaactcagaatctggcctaagttccttatcaaatttcactaactagggaggttggagagcagacatggagttgtctccaaaccagtatntggtcttcagtaaacagtgataaacataaaacactgctccacaagcagacttcagaactactgngcacagcaggtgaaagatccccaagtcccactgaccacctcccacaggaggaggaggaggaggaagaggagggctggtagggggaggtgtcatgagtgcgagagggtagacggacatgttccctactgaggtcactgctgccaactgtcctgctctgctgatctgtacaattccccccaccttctggacctaccctctcatgggccagagctcacttatctgagcctaaacctcccggtctcaagcatagagagcagaaatgccagatgcagaggttc

SEQ ID NO: 669687 - DNA, 413 bp, Homo sapiens
  misc_feature (378)..(379): n is a, c, g, or t
agcgtgatgtgacttcacaaagaaacgcagcttcttttgaattttctaaatacgataggggtgtataatcttgcgtatctagttaattttagaagttctctcttcaacttaaatacacacgtgtatcacagttcatttttctacaagccacaagaatgaaaatagagtttctcgcatattcttataaaagtatatcacacgtttccccgtgtataatacaagataatgtgtttcctcacctacccacactaaatagtgtagagacacatgtgtttttctccctctagccctgtagatagtgcaatacacccatatcctagtgtttcattctgaacatccccttgtgtttgttcttatataatctcactcgtggtagtnntactctataaaataaaaaacaaaatatgcggtta

SEQ ID NO: 669688 - DNA, 109 bp, Homo sapiens
aggatccgatactcttctcccagtagcaaaatcaagaggtgtgtaagctctaaggctctatctagcccaaaaacgaatgctataatgttttactgggtggtgtttctaa

SEQ ID NO: 669689 - DNA, 228 bp, Homo sapiens
  misc_feature (73)..(73): n is a, c, g, or t
  misc_feature (190)..(190): n is a, c, g, or t
caaagtcacccggctctaacgcggggacgtgaggtcggaccactgcctcgctctgagaaagagtttttttttnttaataagtaaatttttattgaagaccgacctgtaccacagagcgcggacattaggatcgtgaaaccctccggttctgtccacctagtgggctcgggtcctcaaactctggtcgganccttgttccgttttgagatagatatttttaatggtttt

SEQ ID NO: 669690 - DNA, 516 bp, Homo sapiens
ctgcggagggaagtccactctcggggagagatgctgatgccggtccacttcctgctgctcctgctgctgctcctggggggccccaggacaggcctcccccacaagttctacaaagccaagcccatcttcagctgcctcaacaccgccctgtctgaggctgagaagggccagtgggaggatgcatccctgctgagcaagaggagcttccactacctgcgcagcagagacgcctcttcgggagaggaggaggagggcaaagagaaaaagactttccccatctctggggccaggggtggagccggaggcacccgttacagatacgtgtcccaagcacagcccaggggaaagccacgccaggacacagccaagagtccccaccgcaccaagttcaccctgtccctcgacgtccccaccaacatcatgaacctcctcttcaacatcgccaaggccaagaacctgcgtgcccaggcggccgccaatgcccacctgatggcgcaaattgggaggaagaagtag

SEQ ID NO: 669691 - DNA, 89 bp, Homo sapiens
gttccggggaaccaggggggggccgggaaaaaggacttgcgcgcggcccgcccataaaaggatttgtgggttctaaccaccgacaacaa

SEQ ID NO: 669692 - DNA, 340 bp, Homo sapiens
tctagagatcccgcgtgttgccacgacatacccatacttaatggatagagagttatgaagaactgaaagatgatgtcttgaataattgcatgggtaatgattccatttactaagatgggattgatataggagggagtgctggggggaagggggacatgtaggtctgagagttcagtgaacttggagatatgtggtggtcaaacatgctgtttcacgaccacatacagcccctcatgcaggcaagttcccccgtgtacagcctgatcactccccagacgtggtcagcaacgcacaagctatcttgacccaacccttgagtattgtccgtgggtgaaacatg

SEQ ID NO: 669693 - DNA, 444 bp, Homo sapiens
  misc_feature (82)..(82): n is a, c, g, or t
  misc_feature (85)..(85): n is a, c, g, or t
  misc_feature (94)..(94): n is a, c, g, or t
  misc_feature (100)..(100): n is a, c, g, or t
  misc_feature (102)..(102): n is a, c, g, or t
  misc_feature (109)..(109): n is a, c, g, or t
  misc_feature (113)..(114): n is a, c, g, or t
  misc_feature (117)..(118): n is a, c, g, or t
  misc_feature (121)..(121): n is a, c, g, or t
  misc_feature (126)..(126): n is a, c, g, or t
  misc_feature (128)..(129): n is a, c, g, or t
  misc_feature (137)..(137): n is a, c, g, or t
  misc_feature (149)..(149): n is a, c, g, or t
  misc_feature (198)..(198): n is a, c, g, or t
  misc_feature (206)..(206): n is a, c, g, or t
  misc_feature (233)..(233): n is a, c, g, or t
  misc_feature (308)..(308): n is a, c, g, or t
  misc_feature (314)..(314): n is a, c, g, or t
  misc_feature (317)..(317): n is a, c, g, or t
  misc_feature (334)..(334): n is a, c, g, or t
  misc_feature (422)..(422): n is a, c, g, or t
ctgcaaattgcaaagcccaggcagaaagatcggatctcttaagccccggaggtaccgaaccgcccgggcaaaaaggtgaaanccngtctctacnaaaaananaaaaatnagcnnggnntgntggcncnngcctgtantcccagctactngggaggctaaggcacaagaatctcgctgctgcactccagagtgcagacnacagagcnagactctgtctcaagacaacaacaacnaaaaactgaccagttagtattgtattagttacttgtagaggaaaatagtatcaaatagtaaggattttcttatanaaaacnaanaaagggtgtggattgtntatacttgctgagtcaagtatacttgtctttctgagtcaagtaagtatacacagtccacacccatttttttttttgaagaaaacaccngtttgtttttatgtgccctcag

SEQ ID NO: 669694 - DNA, 658 bp, Homo sapiens
gatcgagtggcctcgcctcatcgcctagcgcccccctcagtcgccgccgcctccgcccgctggccatgtcccccggccgccgccgccgcgcccgagcgcggcgctcccgcggccccgcgcgcagtgagcgcgggcccgtcttgccgttcgcccgccccagggcccccttgtatctccgacgccgccgcgacgccatgtgggtttggagctccagcggagccgccgccgccgccagcgggtgagggaggccgagagcggagcccagacaccgccccggggcccagggatgcggggcacagccatacggagaccacggcactcatccaccagaacagaccagcacttaccacggaaccagaacgtagcaagacacaagcgatgcgcagacgagacgaagcagagcaaagcaaggcacccgaacccgcggccagcgccttacagcatacggcccgagcgagcccgccgccgacgggcccggacacagcctgcagcggagcccacgagaggcagcgccatggcggagcagacctactcgtgggcctattccctggtggattccagtcaagtgtctacatttctgatttccattcttcttatagtctatggtagtaacaggtcccttaatatggactttgaaaatcaagataaggagaaagag

SEQ ID NO: 669695 - DNA, 341 bp, Homo sapiens
  misc_feature (248)..(248): n is a, c, g, or t
  misc_feature (305)..(305): n is a, c, g, or t
  misc_feature (311)..(311): n is a, c, g, or t
caagcaattctcctgcctcagcctcctgagtagctgggattacaggcatgcaccaccacacccagcaagttttgtatttttagtagagacagggtttctccatgttggtcaggatggtctcgatctcttgacctcatgatccaccctccttggcctcccaaagtgctgggattacaggcgtgagccaccatgcccagccgctgatgaaggtttttgaaaagtgaagtgtgacgtgagcagagtcttgngtggaatgcggtgggggaggagtctcctgttggatcttttatgtcctcttgagcttntcaggnacacccagtcaaagaagggatgagaggatg

SEQ ID NO: 669696 - DNA, 751 bp, Homo sapiens
catgtgcccggtctccaggatcttaaccggggtgcaccttcgaagtagagaggcccgcccggccccccggtgggccagtggcccacccgccagatgacacagcgcgtcttccagcccacccctaccccaacccgatggggaatttgccaaccagggggagggaataaagaacccccaaccttcccaggcgccctggctctttttttcgttaagagaggtaggcttttaagagagggggaaatgttgtttgtgaatttttcttaatcttaccactgtgttaataaatgttttggtaacaataattgttatgggtcacgcccacactgtgttaaatgagtctcggagtgagccccaaccacgcctttcggaggtcgtttcttctggtgcctaactttctgagctttaactctgtggtggtgagccactggttgcacttataatctcccaaaggaggagaaaaaaacctctgttaaaaaagccgaaaatgagccaccacggaaaaccattcttatttccgaggcacttccacgtgaaacttttttgtggtatgtaacttaagctgtaactataaagtaagttggtgtttgtaatgaagattggttataaaaggcccaagattaaaggtgttctttttttttccttttttgtctatgaagttgctgtttattttttttggcctgtttgatgtatgtgtgaaaccatgttgtcccaccattaaccgggattttattttgctgagttgttctaacca

SEQ ID NO: 669697 - DNA, 430 bp, Homo sapiens
  misc_feature (325)..(325): n is a, c, g, or t
ccagaacattacaacatatacctcctatctagctgcttttctgtgcccttgagcaactctcctagtccgcgagtgtctcctaatttttccagctcctagtttcctttgtttgactttttaattctatgtgatcaattttgttttcagcctccacatatgagtgagaacatgcagtgtacaactttctgtttctggcttatttcacttaacataatgtccttcagttccatctatatcgccacaaacaacagaattccattttcatgactgaataatattctattttgtatatataccacattttctatatccattcatctgtttntgaatccatatcaacacccaggttgattccatatcttggctattgtgaatagtactgcaatagacactgggagacagatgtctcttcaatatactgatttccttt

SEQ ID NO: 669698 - DNA, 375 bp, Homo sapiens
ccccctccccgggtaaccaagctaaccacctcccatttcatcggggttctcactgccaggaagaagaggaatgtaactggactccaagttggctctggcaacccgaaacataaaattccccaacacctggggccacatggaaacaactaatcaatggatccaataaagccttgctcctaagggttttttctttccctttttttttttttttttttgggaaaggaaatttggttttgcccccagggtgggggggcggggcccaaatttggtttatttgagcccccccttccagggtaagggaatttttggcccttaacctcccaaaagggtgggattaaagccgggctaatttttttggatttttaagaaaaaaag

SEQ ID NO: 669699 - DNA, 488 bp, Homo sapiens
ttgagcggggtgcagtgtgaaggagcgctggtggcgcgggagcggccccggggaccccgcgctgctgacggctggcgaccgcggccggaggcgtggcgcgggtctctggacggcggtcgcctcagacacgcgacacacgacgggcaggtccacacaaggcgccgtcaggcaaggcgccacgggtttttttcgcccgccatgaacggccgagaacaaaccacacggagaaacaggacgaaacaagaaaacgacgaagccaaaatctaaagaacgaaccaagagagaaaaaaagggcgagtcaccgcgaccaagagcaagcgggtgacgaggtcacaagcaacgtgtagacacagtgagagagcagcagccaagaggacaaatacaccgaagcattgcggcaggcggaaagccaacccacagcgccggccggccgagccccaacacggcaccaccgcgaagacgcccccacgccgcgacagcagtccgtc

SEQ ID NO: 669700 - DNA, 227 bp, Homo sapiens
atgagaaggtcagacgaaccgaaactcatggttctagtcggatcgttaaccactgtgccacgacgggaactccttagtatttattttttaaacgttgattttacttttatagaagtatggttgctttacaatgtttcatgtgtactgcaaaggtgattcagttacacatatatctatatttattcaggttcttttctaagttaccataaaatattcaatatagttcc

SEQ ID NO: 669701 - DNA, 232 bp, Homo sapiens
aggctcatcttaacgatatttggaggtcagcacggtactcacgtatcgacggaacttgtacagggaggcatgcaccgcagtgataaatacacgtcgaccaggctccaggtaaacgatattgggaggtcagcacggttctcacagtatcgaaggaacttgtacagggaggcatgcaccgcagtggtaaatacacgtcgagcaggaagcatgcatgcatgaacaagatattgaa

SEQ ID NO: 669702 - DNA, 136 bp, Homo sapiens
gtcaggtactgttacggagggggctgttacggagggcgtcgttagggagggtcgttaggacggcgctgttacggacgtgttaggagggtgttacggagggcgctcgttacggacgttacggagggcttgttacgga

SEQ ID NO: 669703 - DNA, 304 bp, Homo sapiens
agaggttatgggcaaagtcaaagaggtgctgggcattggcgtaaaccttgaagcgatccaagccacagcgaatggacagatcaaagaactgtccgggaccaaatgggttgtgggtgatattttttttcttggattcccacgagccatttataatggtgttttggaacacggtaccgttgcccatgcggggattaatgtgcagagctatgtcccctgaggagcccaccttgaagttgatagcaaagctcttgcctgtgggaggcacatagcccttgatgatgcagagctatgtcccctgaggagc

SEQ ID NO: 669704 - DNA, 991 bp, Homo sapiens
gaccgacgcgtcgacagagctctcggcgcgggtgagtccctattcccagaggcaggtggtgctgaccctgtaacccaaaggaggaaacaggctggctaagctcatcattgttagctggtgggcaccatgtcccttttaaagcttcaggcaagcaatgtaaccaacaagaatgaccccaagtctcatcaactctcgagtcttcataggaaagcgctcaacgacagcgtctggtgataggaatactcagatgtggagaccatcttctctaagtatggcgcgtgtggccggctgtatctgtgcacaaggggctatgcctttgttcatgtactccaagtgagcgccatgcccgggcagctgtgctgggatggagaatgggcgggtgctggccgggcagaccgctggatcagtcaacgatggactggatggagcctaagtcgctgatcggaccaaggggctaaagagagcagcatctgccatatacagtggatacggtctttgactatgattacctaccgggactgagttctacggagaggtctcgttcggaaggtagcggggccgtctgtcgcccgtgccatatgcccaggcggtcccgtgtgaagcgacccgggtcagagtcccttggtccggcgtgtaggactagcgtatctgtcaagcttcttgccgctcccacagcgtgtcaccaccagctcagcaagatcaggttaaagagcgggagctgaggccatcagacgggcctggccaggacaagtcccatatcgatgcccttgtagcccgttgggcgaatcgggggaagaaaaggccattcagatggcaaaacagcgttggaggtgccgaaaagtagaggggtatgacggggggaaaagggggggggtgataggagaagcccagaacattgagcaccccgtgacagccacagatgaggcaacgggagcacgaccgggtagtaggagaaaggagccgcgcgagagcacacggtctcggccccaac

SEQ ID NO: 669705 - DNA, 1027 bp, Homo sapiens
  misc_feature (1027)..(1027): n is a, c, g, or t
tcctggccctctgcagagtggggatttagaggaatctggtcatactaatatctaccataggcacatcttccagccagagttaccaagcggatagcactgtacagcattcttactcctaaacagcagtcagccacaaactgacccagagtttaattagcagtgactaatgtcatgttcgcaatgtacctgatttttcatgagccttacagacacacagagacacagtacacgatgatcttaaaatttgtctcagttcactgatatgcaaaaggaccacactgtctctgcttccaggagtatgttaggaaatgtgccacaatttgacctgaagacatagagatgatgctgctgcatttaggtgcctttagcagagctatgcaaagcaatcctgataagacaagatacatagagagtcgaatctggctttctgagaattgcacccacgtgaacgagagtacctagtctcatcagccgtcagtaaagcaagccaggaaactgaccatgggtctctttgcctaccagtattaaggattaacacattgcatgttctgtatactgtactaatactgcaccagcaagatttccacaagtcatagatccaaagatacatgcacagtcctgagcaccagctaatggtgcgcattaacttctttaacgatttgaaccctttcaatctgcgtgatgcaatcacatgcgccatgggctgactaagaatagacactggatgtgccgtgcacaatgaaacgagtgtgtggtgtgcacttccaattgtgaatagtcttcacacacagacctatagggacgagcgagggatcaaacgcagtaagccacgacctttgcaagccgagcgcgaggaacaggggaaagggacaggagagcaaccaactagaaacgggtgaaaccaaaacaacagcgaaggagctcaacaatgaggaccgaaacacacaaatacagacacaagaaacagagaaggcacagaagcaactagaacaaagagaaaaacagactcgcccccctattccacttn

SEQ ID NO: 669706 - DNA, 310 bp, Homo sapiens
  misc_feature (6)..(6): n is a, c, g, or t
  misc_feature (33)..(33): n is a, c, g, or t
  misc_feature (187)..(189): n is a, c, g, or t
  misc_feature (307)..(307): n is a, c, g, or t
taattntggatgttattcccaaatttttttatngatgttatttccccacttcttttttttttgagacagagtctcactctgtcacccaggaaattttcttacatgtttgtttgtttgtttgtttgttttaaaaagacagggtctctcactgtcgtccaggctggaatgcagtggtacaatcatagcnnnctgtagcctcaacctcctgggctcaggcaattactcccacttcaatctcccgagtagctaggactacaagcacatgccaccacacctggctactcgggagattgaagtgggagcgcgncgc

SEQ ID NO: 669707 - DNA, 521 bp, Homo sapiens
tggacacaaagttcttgctctgttgcccaggctggagtgcaatggcttgatctcggttcaccgaacctctgcctcccgggttacaagcgatcctccgtgcctcagtctcccaagtagctgggattacgggtgtgcaccaccacgccgtgactaatttggtattttatagtagagacggggttttcaccagtgttagtcaggcgtggtctcgaactccgtgacctcaggtgatccacccgcgtgggcctcccaacgtgcgttgggatatataggcgtgagccaccacgccccgcctaaaatccatattcaaagaagcaattacagtctcctttctaagcttggtcagtcagggggcctccactgacttcctaggcccgtgtaattaaaccagtcttaaaggtttgtgcaggaaagctcccttcttccaaggtgggttttcccaaatcgcacaagggcaaagccaaacagaggaagaacacatttaaaccaaaaaaagacacctttaaaacaaaaaaaaaaag

SEQ ID NO: 669708 - DNA, 491 bp, Homo sapiens
  misc_feature (334)..(334): n is a, c, g, or t
ccagggagaggtgctggtgtacgtgtagggggcctcccatctgctaagcgttttaccgttgagccgctccaaaaacactaagctggggacgccaggtgttcccccaccccggctccctggccctatccacacctcctcccccaccccaggatcgccatctttagtcgtcggacacggttggagcgtatacgtgttttagaaccaccgagatcaaacacaaggtcccctccccggcccacccagcccagccccaactgacctccatgcctagggaaaaattttccccaccacttttccctcccccgacccaggccaaagcaggtgcaggtgccgngacatgcctgctcctagcctcatccccctgcccccgaaaaccagactctcctcccaaactagcctcaggagcttggcatacccgctcgctcctaaagagaaagacccaggaccctcccccatcacccccaagagaggttcgccatcctctggcctcg

SEQ ID NO: 669709 - DNA, 101 bp, Homo sapiens
atttttcacaggggaaacctgtataacctcgtgagtgggaaacccctggggatttttcccagagaaaacctttataacctcgagagggggaaccccttggg

SEQ ID NO: 669710 - DNA, 657 bp, Homo sapiens
  misc_feature (44)..(44): n is a, c, g, or t
  misc_feature (294)..(294): n is a, c, g, or t
  misc_feature (314)..(314): n is a, c, g, or t
aaaccttgtgcggggcgaaaaaagaaagcgaccagttttgagancgagtgaagagcacctgagaattttgttcttgcagtgccgaaaccaccctgcaaacagatagccacatcgcccaacagcttgggctcgagaaggatgtggtccgagtgtggtcttgtaacggcgcaaaaagggcaagcgataaacagcgactatgcacaacaaaaggatttttaggctggtgggtctcctttttcagggggaccagtgtcctttcctttggccccagggccccattttggtaccccaggntatgggagccctcatttcantgcattgtactcctcggtccctttccctaagggggaaacctttccccctgtttttgtcaccaatttggggtttcccaagcattcaaaataaggggcctgcccttttaggaatgggggacagggggaggggaggaattaggaaaaaaaaaacctggagtttgtgccagggtttttgggattaagtttttttttccctaagaaaggaattgggaacacaaagggtgggggcaggggagtttggggcaactggttggagggaaggtaaagttcaataatgtttttttttttaatcccccatcatgtatccctttttttttaaataaaaaagcttggggcccagtta

SEQ ID NO: 669711 - DNA, 559 bp, Homo sapiens
tgaatgctggctcaggttaaggaggagacaatgctgacggttaagcaagaatggccaagctggcaagaaaaagcacacgtgatacattaggatacagcaagggcagaagcttcgtgccgtgcggatctgcaacatttacatttgtttggcctgcaaactatcaagaaggattctgtgggccagggagtctccactgaacaaacaaaatggcagtcaaaagtcttgagtgtcctattccagcagcccagagtcctcatccgtcatccacgggagagtctttgagggaaacatgaagtccagctcatgcctctgcctatgggtcaatttcttcgggaatcactgtgatcatgatatcttcattacccctgcggaccaccatgttcagggtgctttcccttttaatgacgtcgctgacatcattggcggagaccacggactgtccattgatgctgattatgacgtcgttttccttgagaccaccagcttctgctggggtatcaggaattacttcaattatatatgctcctgagatcacgtctgggaagtcccggtgccggtc

SEQ ID NO: 669712 - DNA, 626 bp, Homo sapiens
tctagaggatccctgcatgatgtactgcatgtgctccgttctgacttcttgtggtttcaaagtcttaacaaacctttaaatggcacacatttatcttcagttcataacgtaaaaaagacttcattgacctgattaaattctcagaaccctcagttccttagggatgaaccaaatggctggtatcattgcttacaaagtatcttgaactcgatggagcttatgttaagaagtttatattttttacttttaccttttagttcaatttttccataaatttttgaagtcccctcatacatcatcagggaattgcaaattaaaacaacaataagatgccactatgcacctgaaagaatagccaaaatctataacactgaccacaccaaatactgtagagggtgtttagcataaggaactcccagtcactgttagtggaaatgcaaaatgatacagccactttggaagacagtttgcagtttcctacaaaactaaacagaattgctatactatctagcaattatattcctaggtatttaacccaatgagtgggaattcatgataacacaaaaaactgcgaatgaatgtttataacagctttattaatattgggccaaaactggaagcaacca

SEQ ID NO: 669713 - DNA, 346 bp, Homo sapiens
cagatggctcacctgaggtcaggagttcaagaccagcctgggcagcatggtgaggccccgtctctactgaatatacaaaaattagctgggtgtggtggtgtacgcctgtagtcccagctacttgggaggctgaggcaggaaaatcacttgaacctgggagggggaggttgcagtgagccgaaattgtgccactgcactcccgcctgggcgacagagcaaaactctgtctcaaaataaaataaataaaataaaataaattggggagtatgggagccagtgcaccacaggccaacttaatattatgaggattcctcctcgtagggagaaaacctgggcaggatgcagg

SEQ ID NO: 669714 - DNA, 213 bp, Homo sapiens
atcaagcttgcagggcaggggatgcaggccaggcagcagcaagtgggggcagcatgggacccacctcagtccccagcttcattttcttctaatgttcccccagctgtggcattctctgcagtcttggaggccttcttttttttctttttctgggttttacgacttgcagaactctggaggagggcctttagttctgcaattcctggacctcca

SEQ ID NO: 669715 - DNA, 896 bp, Homo sapiens
gttcctgaagggccgggcttcccgaaagccccttgtgctgtgtggagacctcaaggtgtgcagcatgaagaaatgaccttcgcaaccccaaggggaacaaaaagaatgctggcttcaccgccacaagagcgccaaggtcttcggggaattactgcaggctgtgccactggctgacatgctttagggcacctctacccaacgaccctatgcgctacacctttggacttatatgatgaatgctcgatccagagaatgtccggtgggcgccttgattacttcttgtatgtcccactctctggttacctgcattgtgtgacaggcaagatccgttccaaggcccgtcggcagtgatcacttgtcctatcaccctatacctagcactgtgacagcatccctaaatcactttgagcctgggaaataagccccctcaagctaccattccttctttaaacactcttcagagaaatctgcagttctatttctcatgtatgaagaactaggaatcctccaaccaggctcctgtgatagagttcttttaagcccaagatttttcattgagggtatgggttttaaaagaaaattgagagaaagactaactaatgactttgtttgagttatccacatgataattaagagcatagtttcaaataatatttcactttaaatccaaaggggggggcggctaaaaagtttgcggggggccgagattagagaacccggtttgttttaaagggtggccctataggggtgattgttagaacgcatggcgggtttcaaggtgggtggaaacggtctgggtttgggaggacctctctggggggcacaatggcccctcagattaggctggaaataatagggttgggacacgattgtcggaatgttgttataacgaagcg

SEQ ID NO: 669716 - DNA, 127 bp, Homo sapiens
gacgctctctctgtgggtgctgtggtcggtttcatcgaacagcccacgccgtttgtgtccctgttcttccagcggctcctgcggctccactaccccacagagagagcgtcccccacagagagagcgt

SEQ ID NO: 669717 - DNA, 178 bp, Homo sapiens
gtgagcgatctagaggatccctcacgccatgtcacaaacccttgagtcatccttctactccctttctcttataaccgacacccaatccataaagaatccagctggttctttttttttttttttttttggaaacggcttctccctctgttggcccaggttgggagtccatggggcacaa

SEQ ID NO: 669718 - DNA, 157 bp, Homo sapiens
gcacctacggatgtgctgcaggtcacagcaggcagacatggggacgaccatgcgcaacaccaacgcaggagattgctcgagatcaaccgcgatgatccagacggctgagcatctgagtatcgaccacgatcaagacagcagctgcgccaaccatgca

SEQ ID NO: 669719 - DNA, 323 bp, Homo sapiens
ggcacgagctcttacagtgagaaagccatgtgaagacgaatgacagggatctacatgccgatggaatgccaaagattcccagcaagtcatcagaagccatggagaaaagcatgtgggttttttttttttttttttccttttaaaagtcttctcaataggagggtgtggggcgggattcccagaaaaagagggggtccatgattccataacgggccctgtgataaggggcactgctagcagcgagttagtaccagagattctcgttatctcagggtggaggcagccccaggatagattagagattaaagggattgcttatggga

SEQ ID NO: 669720 - DNA, 181 bp, Homo sapiens
tgtagaggacggattcaaaaaaccaatgagacctggtaggtcactgatggttttcagaaagcatcagttcgtgctcgtcgctgcaatttggctcaaaacgtcatcaaccatagcatcgtgttttaccatccaggcgaggtgctgctgaggtgacattgatgcgttagggtgatcttgatgg

SEQ ID NO: 669721 - DNA, 297 bp, Homo sapiens
ttagaatgtaacagatgtagtaatcttgaatgagatgtcaatcgtactatgttcagtacacggatagctgtaaagtgtattggctatggatacaacaacagtgccagtttagttgaagcgatagtacagccataatgtgcagaggacattgaaaaatggtctagtgacacgctggtgtcagagtgcagaactggtacattatgggttacagacatctatggtgctataaaagcagcttaggtacaataaattatcaaaaagagaaagtgaattttggtaaaattcacagcataattg

SEQ ID NO: 669722 - DNA, 310 bp, Homo sapiens
cccttttccctttcctttcccccttattcattttttggacttaccccagatttttgcccttgataaaaaatccttcactttttttttttcatcccctccccccctaaataggtcaggtgagggaggctgggaaaaggtgggaggaggggccaaagttaaggaaaaataggaaggattttccctcttttgttttttttttaaaaacccttgtttgggggcaccaatctccctgtccctttccctgttaaaggcctatttttttttctttaaattttttaaaaacccagcccaacttggatgtttcaaggta

SEQ ID NO: 669723 - DNA, 838 bp, Homo sapiens
gagcctgcagttgccctgtaggcatgccattgcgcccagcctggaatggcattgtcttgaatgccccacttccacaatggactggcatgctggctgctgtggccacgtgtgttcaaccatgcctggccctgtaatgatcctgcagactgtaatgtgccctgtgcaatgccaatggctgcgcctgcatctgcccctgcgcccctgctgtctgtggtccctatcctgtgcccatctgtgctgctgccccactggttctggtaccacactgaatgtgtgctgctgcctgtgcctgctgtgcgttctatgcctggatgtgatgctcatgtggtgtgcctggctattcacgaagaaagtgtgtgccgcgggacacagtctgtgcattatcgttgttgtgattcctgaggatgtgcgtgacagcaatgtccactgggaggtccctgcatgtgccaactgttgcatgctgtgccttgaacggatgtacctgttccaaactcatcctcattccccatggaagccctctggcccccaaatgaagtggagacatgttcttgctgaagaactgaaacttggccacccagctgaccggaccggtcattgccctgtcctggaacgtctataagaaaggagaactgctcgagtcatcactgatggacgcagacagactttcgcagccttcgctagtctccgtattgcccgttccacgcccggctcttcgggcttacgggcaaaaagagccactggatgccgggaacaggttgtttgcacggaaactaaatccctcctgggacttgaatcggccggcagctctgggtctcccgtggtgttttcctgggaccag

SEQ ID NO: 669724 - DNA, 1884 bp, Homo sapiens
atacatctgcgtactggcgatctagaatctatgtcccaaacccatctccagcttatctactcagtacaaacttaggccaaagccgtttacccaatatagtgtgtgataaggctgatacgaaatttgagagagcttggctgcacactatgagtactagtaccgcacatgggaacagcatggaccacagagttcactaactctaatgggtagacataagcgagatggacataaaccaccgtattaccaaacatgcaataattgcaaattagcgtgaacaccgcgtagacttaggcgcaccggaagatgtcgcgaaaagcttaatgacccctctctgacaagcctaggagcgacgctagcggtaaagtaatctacagcatagaaaagagcaccacccgcagatctattgtactgtcagagagacctacggtgaggaaggacatctctacataaggcgttcatgcaaggcccgcaccacaactacttaacgcgagaaacgcgcctagggctcgcactcaaggccatgcgctctcggtctcaagagacactcacggagatccctctaaggtatctgtagagcgcttttaacacactgtggggcgctcccaccacgcagacggtgggtcccttacataaatcccccccctgtggtgtggaccactttttgtagagtctctcgctctcatgggttcctcaaataacgcaatgggcaacacccaggccatcccatattatgggggaacccacccaatagggggtataatagaaaaaacgcccgttttggctttacgcaatggacatgcatgggtgataaccacgaggaattatcagaaaacttattctcccaatgtcaccggctaaagggggcccataaagagagagtggccccggccccaaccccagcaattgaaccgcaaacacgggcgggtatcaaagaggccgtctaaaaggagtggcgccacactaaccccttaagcggtggaaaatctcccgtgagacccacatagtttagagctaggaagaggttcccttttcaaccaaacacctctaccgttggggaacgccaagaggttctttagttcaactcgcgtaaataagggccatcggaggcggttacagtggggttaggatacattaaaagctaaagcggggtgtggtacaccacataagtatcatctcaatgcggggtcacttacacggaccgtgtgcggactacagtagttgttaaccaacagtcctgtcgatcaattgaaaccagagattataaacacaaggctcgccaccccctgatgtgtgtgggtcggaggccccagggcgcaaaacacccctgcacagtggaagagatatatcaacccacgcatggttgttatcccccccacacaacccttgggccagtgggtccaatcaaccggcgagaggggtcgttgtggcaagcgagtgatgatatagacacgcaccatggtgtggacacctaagacacccgccccctgggggtacccaagaagacggttccccgcagtggagggagacaaacatttagaaggcgacggggcagcgagcgagcaggacaaatgttggagaggagagcggcaggacaccgaatacacggtggacagggagagcaacagagagaggacgactgcaactcagagcgagagagaggagagcgcgactgaggcgaccggcaacatatgtacgacacacacaagcctacgaacaggagcagaaaggacagcagcacaatagagaaagaggggcagcacacccagcagacagcaaacaatacacgatcggtgatacgcaagaagctaagcacgaacaaggcaacacagatgacaccaagatacgaagcgagaccactactcacacagcaacgacgagaagaga

SEQ ID NO: 669725 - DNA, 178 bp, Homo sapiens
  misc_feature (8)..(8): n is a, c, g, or t
  misc_feature (10)..(10): n is a, c, g, or t
ccactagngnaggccactccttatttgtgatttccacaattgaagaacacggcgctgtatgtgataatcagtaaaggttcattgactcaaactgtttactgctttatgacaaatactaggttcttcttcttctttttttagttttctttgaggggagggccaaattttgtgtcccagg

SEQ ID NO: 669726 - DNA, 150 bp, Homo sapiens
ggacatcaagtacttaacagggtaatagaatatcacagggcaagtggaggcagggcgagaatctcagggaccgggtcattatttttattgctaatgtagtttttgggccccatgttcattgaataccatcttatcggaagccgggatttt

SEQ ID NO: 669727 - DNA, 123 bp, Homo sapiens
ttggggctccattcaggaacacgggtcgcagagctcgccctcatctgagccgtcgccacagtcgtcgtggccatcacacagctggtcagggggcaggcagacggaggtgtggtggggcacaag

SEQ ID NO: 669728 - DNA, 352 bp, Homo sapiens
ttgctgtacttctatattctagtttaatagaaaacaaaaaaaatacagggatttaaggacccaggcagaactaggaaagttccatctacttgggtataccgctggaagataaagttgttcttggcattgaacttcaggttatcctcttaagtttatttggtaagcatcatattctcttgccctaatgagctcatggttatttcaacacatggccctgtattgggaaatgggggaaggaaacagaaaaggactccatccagcagttgggtaggggttggccaagattgttttttcctgcttgtaggtgggaagggattgggttattgggaggggtaggggaggtgttgataga

SEQ ID NO: 669729 - DNA, 190 bp, Homo sapiens
tccttgttatacgaagtgggctaaagcatttttaatacatagagcgaaagcctataatcactgtgcccgctcataaggggatgtgcattgctaggtttatagatagttgggtggttggtgtaaatgagtaagtgtaggagtccgcaagaggttagtattgttggcacatcaaaattgattaaatgatccc

SEQ ID NO: 669730 - DNA, 371 bp, Homo sapiens
cactgcatgtgacgaagatctaatgtccaacactgatcagagaacttaaacaacttacaacgaaacaaaaactctcataagaaacgggggcacaggacataaacagacactacaaaagaagacacacatgcggccaacaagcatatgagaaaaagctcaatatcactgatcataagagaaatgcaaatcaaaaccacaagggcataccatctcacaccagtcagtatggttattattaagaagtcaacgccgggcatggtggctcacgcctataatcccagcacttcaggaggccaagatttgggtctgagctacaggaggacggagttgccactgacagaaatgggcagagtctgtgggtaaagcaggca

SEQ ID NO: 669731 - DNA, 337 bp, Homo sapiens
  misc_feature (71)..(71): n is a, c, g, or t
  misc_feature (206)..(206): n is a, c, g, or t
  misc_feature (324)..(324): n is a, c, g, or t
  misc_feature (327)..(327): n is a, c, g, or t
aaagaattgggttatttgtaaaagggtccacacaaaattcctttaaaaaaacagttcctggctgggcgcanttgtcacgcctgtaatcccagaactttgggaggccgaggcaggcggatcacgaagtcaggagttccagatcagcctgaccaacatggtgaaaccccgtctctactaaaaatacaaaaatcagccaggtgtagtgncgtgtgcctgtaatcccagctactcaggaggctgaggcgggagaattgcttgaacccgataggcaggggttgcagtgagccaagatcatgccactgcactccagcctgggcgacaganatngctccgtctc

SEQ ID NO: 669732 - DNA, 350 bp, Homo sapiens
  misc_feature (12)..(12): n is a, c, g, or t
ctcattgcctgnttggtcccgaagacaaagggtccaacagtggcttcccagttccagtgtcttggggagctgggggggcccagccaaaccctccttttttttaaagcccagccagcaggcgggggtttttggaccctcaggccagtgaatttccagccctcagggcgggtttttgggcccctccaggagattagacccgccttttgtgttcccccaacgatttatactgggtttttgtttttgatggaattttgtacctttttttttttttttttgcaaaagccgctttttaccagatggccttttttttgcctttgggcctcccaaaagagcccgggttttgggcccca

SEQ ID NO: 669733 - DNA, 100 bp, Homo sapiens
ggttaaaaattaaataatttcggtaagacaagaatcccattggtaaccctctttgcctaaagggttaagaattgaaataactattactctgtattttcca

SEQ ID NO: 669734 - DNA, 226 bp, Homo sapiens
cacgaggcctggggcaacttccactcactggctgaaggcataaattgggctggagtgtgcatcaatgacacagatcaagtgaaagccggtacgtgccaaggtcgttaacaaccagctctggggggactaatataactcaatcactgtccccacctcgggggatactctcataaatatattggggatatcatgatgacttacatgcactgccctgatatatttatcc

SEQ ID NO: 669735 - DNA, 117 bp, Homo sapiens
ggaccggcgtttgcgttgtccttacgacgagctcaagaaggtgatctaaggccgcggcctcctccacacacacacacacaccaggtgaaccaagagaaccactgtagaatcctcaac

SEQ ID NO: 669736 - DNA, 588 bp, Homo sapiens
  misc_feature (270)..(270): n is a, c, g, or t
  misc_feature (388)..(388): n is a, c, g, or t
  misc_feature (391)..(391): n is a, c, g, or t
  misc_feature (398)..(398): n is a, c, g, or t
  misc_feature (417)..(417): n is a, c, g, or t
  misc_feature (449)..(450): n is a, c, g, or t
  misc_feature (476)..(476): n is a, c, g, or t
  misc_feature (586)..(586): n is a, c, g, or t
aagccagcaaaacacaactgaatagttataaacatgacacttctaaatcctcaaatggaattccaagaccagagtgtgcttctccactttaatagcatttgttaaaactgaaatccacaacttctggcaagtacttcaatattctcaagcagaatcaatacttaaagaggttaaaagaaaaaactattatcaaacgtattgtctgtgggatgatctaatttaaaagcctttcatgcttgatcctggcagtgctattactgcacattttangtgaccatcatgggcacttttaagaacctaacttcacaaaaagagctgtcacaagaaaattgttctaaaatcccaatgcacagtaactcatgcctcatttcaactgctttcctcctgntgnaaaaacngctgcgtgcgaccttgganctgtgtgtcggtaaaataagtcggggaaaggnnttgccaaattggcccctttgtacaanacagagaagcccaaaattgtttgatcaggcaagaaaaaggtgacactttttagatacttcatattattctggaaagcactttcctttcagtgggtgcaaaataaactaangg

SEQ ID NO: 669737 - DNA, 673 bp, Homo sapiens
  misc_feature (19)..(19): n is a, c, g, or t
  misc_feature (157)..(157): n is a, c, g, or t
  misc_feature (252)..(252): n is a, c, g, or t
  misc_feature (362)..(362): n is a, c, g, or t
  misc_feature (512)..(512): n is a, c, g, or t
ggttggtaatcatgtattngttctggtctgtgttattgagtctgaagaggagtgggtaggagatggtgaaggataggatatagatgatggagattatgatggtgattggtgcttggagctgtagtgtgtattgtatagtatgggtatggttaatagntgtgtatttgtcgatgctgatggtatataagtttaggatgcttgtggtgtatattatgatgtttagagtgatgaagatgttatagtgaatcttgntgaatttttacttacttactacttctaggtagacaactcagggtatgatcagtgtggtgatgaggaggttggtcactgtgaggctgatgattaggtagttggtggtggtntgtagtgccttcttgtgggatacagccatgcacaccagcatgttgctgaagatgatgatagtgatgagcagggtgagcagtgtggtatagtagttgtagtggggtttgtctgccttcctgtctgacccgttgaagggccggctccagttntgcctctccagatcatcatcataccaggacagattcagtggatccatcagggcggtggagccactgggtggccaggctcttcaagccatagggcgccccggggcagagacggcgccggctgcttgaggcttccagctcccgccgcatccacgcgcggccgc

SEQ ID NO: 669738 - DNA, 283 bp, Homo sapiens
  misc_feature (77)..(77): n is a, c, g, or t
  misc_feature (128)..(128): n is a, c, g, or t
gggattctccccagacgccgagatgcgggtcatggcgccccgaaccctcatcctgctgctctcgggagccctggacnttaagagacctgtgcctgctcccactccatgaggtatttctacaccgccgngtcccggcccggccgcggagagccccgcttcatcgcagcgggctacgtggacgacacgcagttcgtgcagaacgacagcgacgccgcgagtccaagaggggagccgcgggcgccgtgggtggagcaggaggggccggagtattgggaccgggaga

SEQ ID NO: 669739 - DNA, 939 bp, Homo sapiens
ctgttttcggacgagaagacatggagagttgaagaagagcaacagaagaatatatcaatgtctctcgattatatgtctgttcattacgccttaccccgcgttgtttgacaccgttcgtccctcgtgtgttgcgccgtggtcgttaacgacccatttgtttgagaaacccgtttatcccttggtgctaccactcccaaatgggttctcccacacctatgacgcgtttctggggtcccaaaaaaacgtggtgccgttgcacttgcaaacacctctggggtagcatcaaatagttgccaccgatctttggggcatatgttgttccaacaatcgggaccggggttcctgtgaacaattgcttccgtgttccaacattcgctcttaaccacaacccctgttcgcctgttgtcctggcaattctggacggcgccatcttgatcgcggtgctccccatcattgggcaattcccacggatggccgccagacgcgccatcagaatctcgcgttgtggaccaccccggctaatgtccccccgaagaagggttgcgccacccactatcttattgtgtccccccgctgtctcgccgtttgcagaagcttttctgctaccccgcgggcctatacgctcaatgccttcgcagggcgaattagcacgccgtcctgccttttccccattttccaagaggcgtctcccgtacatatggagagttatctggccaaagaatcaccctctcatttagacgatcgagacaacctccacttcgtatggtgctactccatcgcggactctcaaagatggtgtaatcccctcccgccccccccttgttgttatgaagagatactggctgaagcaaaaatctgccggcgcccgccaccaccaaggagccactcttttcgccttgggaccaaccccaacgtggtccccaaacccccaacatgaca

SEQ ID NO: 669740 - DNA, 243 bp, Homo sapiens
gcgactacaggcatagcaccgtgctgggcagcttttgggtttatcaatataattgagggagacagggaacgaggagaaatgcttttatataatagtgtggaaatttttaattttatatcccacacatgcctggccccgtccattggttttcacatagcctattgcttacctgcgatggcctacaactagcttgtaccttagttccctaggttgtttgttcctttcttcatgcagcgtctcctg

SEQ ID NO: 669741 - DNA, 945 bp, Homo sapiens
  misc_feature (23)..(23): n is a, c, g, or t
  misc_feature (180)..(180): n is a, c, g, or t
  misc_feature (238)..(238): n is a, c, g, or t
  misc_feature (290)..(290): n is a, c, g, or t
  misc_feature (309)..(309): n is a, c, g, or t
  misc_feature (338)..(338): n is a, c, g, or t
  misc_feature (368)..(368): n is a, c, g, or t
  misc_feature (391)..(391): n is a, c, g, or t
  misc_feature (394)..(394): n is a, c, g, or t
  misc_feature (396)..(396): n is a, c, g, or t
  misc_feature (427)..(427): n is a, c, g, or t
  misc_feature (448)..(448): n is a, c, g, or t
  misc_feature (456)..(456): n is a, c, g, or t
  misc_feature (815)..(815): n is a, c, g, or t
  misc_feature (818)..(818): n is a, c, g, or t
  misc_feature (875)..(875): n is a, c, g, or t
  misc_feature (881)..(881): n is a, c, g, or t
  misc_feature (943)..(943): n is a, c, g, or t
gaaatcctttttaaaagggtcgnatattccttatgtctccaaaccaagtccatggatgcaaagacatgctgagttcttgttactctttcatgtcttaatacccaaaggagacagcacgggctcgagtcgtttcagctgccgcttaggtcaagtcacatcgcagctcatttgcggatagcnaggcacagaccacagcgcgtgagtgttttctggctttacctcctgccctggcaatgancctcagttccacatatttttgttttcttttttgtggtcctgttaaatttttncgccacacatcctgctgcncttcaatgatacaatttctcacaattccngaattctcttggcagtgcagtttacttggncaacgtggctaatcttataaatnttngnattacatcacaatagaacactattgcacatnttgccagtcagacaacatganccccaggnactgccatttccaaaacataactgggcacacatttacaatgcacctgctaggttttgaattcatttgtcatttctgatctacccttaagactatgcttgaatctctgaaaacaaatgctagattcatgatttctatacccacatactccataaatccatcacaaaccctacagtctgatttagcctacggcaaatgattcatccaataggccatggtatgttcacaattcttcaatcttattcaggttgtaaagacgtttttctacgactggagtcactaagaatttctctgtgagagaaagcatcattttcacctttggcacactgccaagatgatactttactacagaatttatganacnacaatttagtaacttgcaggctttattaaaagaaaaagaaaaacaaagaataatttnatatanccccatgtcccaaaactttctagtttttttttttttttttttttagtgcaagaaatgctgcntc

SEQ ID NO: 669742 - DNA, 364 bp, Homo sapiens
gtcgacccacgatcacatcaaagaagttgtgcgaatccagcgccgcacgccagccgaggtcgaggtcgccctggccttccttgagtttgttgtcatcattctttccgtacttcacttcaacaccagcctggtagatcaggccggattcggggatcatcttgttgccgaagttatagaacaggccaccagtgggcatatgacttttctcggactgactgccgccctccagcttgaagtggctgtagctgcccaggacgccgaattgggaaatagggtcggtggagggggccgccatcgcgatcatcggggtggcgatcactgccagggccgaggatttgatgaacaggtgagtcagacgattgaa

SEQ ID NO: 669743 - DNA, 373 bp, Homo sapiens
  misc_feature (65)..(65): n is a, c, g, or t
ggtcgctagattccgtagcaggcagcactcatctatgagagatggaacaacattgattgggagtntgtgagatcccagcatgtcactgtcatgagctgagttgaaatcatcatgttcacatctgatgcgatataaagtctctagatattgagaataggctgtgagagaagtaggagagatgcttccggaagcatatcgtaacgcgcggacatcttggagagaggatgatccttaattcttttgcagtatgcatcggttgggtcctataccccttggtaccttgggctggaagacagtaaaacaaccagtatatgtcgtagatgactccacaggaattgttactgcagttatggatcctgatgcgaatgcgaaa

SEQ ID NO: 669744 - DNA, 615 bp, Homo sapiens
gggctgaataaattctaggaacctgaggtccatatatagttgtattaaatatattgactgttttcttccttatgatgacaaaatgttttaagaaaagaaaaagaccctaaagaatagtcaccaaaattttgtagaaatgttcctttgtaggggatggtgggtatctgtctggttttttttttttttaaaaccttctttaaagaggcgtgtttgggtgttggccaacattttttacaaggaatataagggtgttttatcaccttgggtaacatgtgacttaaattgggtaatctggggaaaaaaagtgtttatcaattaaagcaaaggtgttcctataaattttagaaacagctaattcagtatgagaggcgtgatactaatcgggcccccaccttcagggcagccggtcctaaaggtgccaccatgtgaccattttcaaaacagggatttacttaaggcatttaattttcattagagctgaattgccatgggaaaaagaaagtatgggattctctcttaaatttgtaagtcattccggtaaacgtgtactcggaaaggttcagatgattctgataaatacatatacctgctacaggggatgtgtctccattgtgc

SEQ ID NO: 669745 - DNA, 375 bp, Homo sapiens
  misc_feature (1)..(1): n is a, c, g, or t
  misc_feature (217)..(217): n is a, c, g, or t
  misc_feature (280)..(280): n is a, c, g, or t
  misc_feature (304)..(304): n is a, c, g, or t
  misc_feature (332)..(332): n is a, c, g, or t
  misc_feature (351)..(351): n is a, c, g, or t
  misc_feature (361)..(361): n is a, c, g, or t
ncagtgagctctattgatgccactgcagccatcagccttctgggctcaagggatccttctgcctaagcttcctaagtagctgggactacagacgtaggccaccatgcctaattttttttttttttaattttctgtagacacagggtctcactatgttgcccaggctggtcttgaacttgtgggctcaaatgatcaattttcccacctcagcctcccnaagtgttggaattataggtttgagccactatacccagcctttaaaatattttttgtagagatnggggtcttgctatgttgcccaggntgttcttcaagctcctgggcctcaagtnattttctaccttgggcctnccaaaacttnctgggatttaaagg

SEQ ID NO: 669746 - DNA, 184 bp, Homo sapiens
aagatttgcactctcatggatgtggattaagaaagcagaacatgttatggcaagacaatggaattggtgaagaagatgagcgacactcaggggcattatcactcttgaaaaaccatattgacaatggctagatgtggcaagtgcacggaatgatcctgtttctaacagcacgttacatgatatc

SEQ ID NO: 669747 - DNA, 415 bp, Homo sapiens
tgccttgctggtcgtctctgcaggttccccgctcagccactggttgatgcccgtcattggttactacttgatgtcccaccgattcttcttactttacagactgcagcgagtgcctctcaggagttactgtttgtataatcgccggggggagcctcaccggttggcaccccgactctgctgctgctgttatggcgcatggtcttggtcgatcctcggagatctgaattacatccagtcaccctagatccatgccatagttttctgctatctctataaactctggtacaaactagcaaagatactggataactctatgcaataagcctggataaccagtcttctccatctcctccatttttgatcccaccactccgaatgtttgcatcattgctgttttatgctgctatactgccat

SEQ ID NO: 669748 - DNA, 596 bp, Homo sapiens
  misc_feature (36)..(36): n is a, c, g, or t
  misc_feature (77)..(79): n is a, c, g, or t
  misc_feature (82)..(83): n is a, c, g, or t
  misc_feature (86)..(87): n is a, c, g, or t
  misc_feature (89)..(89): n is a, c, g, or t
  misc_feature (91)..(91): n is a, c, g, or t
  misc_feature (149)..(149): n is a, c, g, or t
  misc_feature (167)..(167): n is a, c, g, or t
  misc_feature (196)..(196): n is a, c, g, or t
  misc_feature (213)..(213): n is a, c, g, or t
  misc_feature (224)..(224): n is a, c, g, or t
  misc_feature (252)..(255): n is a, c, g, or t
  misc_feature (281)..(281): n is a, c, g, or t
  misc_feature (294)..(294): n is a, c, g, or t
  misc_feature (310)..(310): n is a, c, g, or t
  misc_feature (316)..(316): n is a, c, g, or t
  misc_feature (360)..(360): n is a, c, g, or t
  misc_feature (367)..(367): n is a, c, g, or t
  misc_feature (370)..(370): n is a, c, g, or t
  misc_feature (380)..(384): n is a, c, g, or t
  misc_feature (403)..(403): n is a, c, g, or t
  misc_feature (456)..(456): n is a, c, g, or t
  misc_feature (475)..(476): n is a, c, g, or t
  misc_feature (500)..(500): n is a, c, g, or t
  misc_feature (516)..(516): n is a, c, g, or t
  misc_feature (518)..(518): n is a, c, g, or t
  misc_feature (528)..(528): n is a, c, g, or t
  misc_feature (570)..(570): n is a, c, g, or t
ctttctccaagggccacaaattgaactgaaggtcanaaggaagctgggtgcgggcttcctgcaagctcttgctccannnccnnccnntnangagagggcgctccggagctctggggaaggttggtgcacacaggggttccgttggaaanggagaagagccgccagcncacacacggtcactggattggtgtgagtnggttccaagcaactgcnatgtgctagtncactgacatgattaaaattaacattcannnngggcattaaattaaggaatgacacanggagccaagaaantggcttattcggttgnattctnaatcacaatcaggaaataatctttatctggtgcaaccataattncattttnatnggagcgaatnnnnnggaaggtgagatcgttctnggggtcgatgtcacgcacggtgctccgtgccttcaggatgaagctgtgcatcncgctggcatactgggtggnngtggggttgtccatggtgctcttnatgggaatcccttctntnttcacgacgntgattccctgcactcccttctggctctgcagtcgcttcactntctcctccacctctgccatttcccac

SEQ ID NO: 669749 - DNA, 142 bp, Homo sapiens
actgtctaggaatgcacgcatggctgcttcctgctggggtgacttaattccctcgagagtcgctactcttctgactttttgtatgcactccgttgcatctggtacactgcctagctatgttagctgcgaaattcttttcttg

SEQ ID NO: 669750 - DNA, 116 bp, Homo sapiens
tatcttctctcactatctcatcttatacatcgtagctggcttgggaattccacctcaatgcctgctatgatggataagatagagagagtgaggagaaggcttacgtttagtgaggg

SEQ ID NO: 669751 - DNA, 571 bp, Homo sapiens
gatgccccaagcttagcacctgcactcggagagctgtgtcaccatgtgggtcccggttgtcttcctcaccctgtccgtgacagtggattggtgctgcacccctacatcctgtcatcggattgtgggagggctgggagtgcgagaagccattcccaaccctggcaggtgcttgtggcctctcgtgggccgtgcagtctgcggcgggtgttctggtgcacccccgagtgggtccctcacatgttgcccactgcatcatggaaccaaagccgtgatcttgctgggttcggcccagccttgtgtcatcctgaagacacatggccaggtatttcaggtcagccacagcttcccacacctcgaatctacgatatgagcctcctgaagaatcgatacctcaggccaggtgatgactccaggcacgagctcatgctgctccgcctgtcagagcctgccgagctcacggatgctgtgaaggtcatggacctgcccaccccctggtgctgctcagtgtggtggatcatttcaaccgaatcggcaaggttggaaaccagaagcgtgttgcagtgtgcttccg

SEQ ID NO: 669752 - DNA, 576 bp, Homo sapiens
tattttttttgagacagagtctcattctgtcgcccagactggttggagtgcgatgatgcgatcgcggctaactgcaaccgctgcctcccgggtacaggtgattctcgtgccttgggctcccgagtagctgggatttttagtggagaacgggtttcaccgtgttggccaggctggtcttgaactcgcagcctcaggtgatccacccacctcagcctccccaaagtgttgggattgcagtgcattgagccaccatggcctgggccccctatttggtttggttttgagagggcgcggcgcgtgatagagagacgcgaggggtatctctctcaatagtgcttgtaagcacaaagagagggagaagtttgtgtaagtaacgaacagggccgggcatggtggcgtgagaggccgaggtgggcagatcacgaggtcaggagttcgagaccagcctgaccaacatggtgaaacccccgtctccactggaaatgcaaaaattggccgggcatggtggtgcacgcctgtagtccagctagtcgggaggctgaggcaggagagtcgcttgagcctgggaggtggagg

SEQ ID NO: 669753 - DNA, 319 bp, Homo sapiens
cgcttttcactttttgcatcagacttcagctgcagacccggataggagccaccgatcccagatcgaatggggcatgaactctaacctgccaattgcccattcttgaggtggcccaagggcacgtgctcaagatattcctttctatcaatggcacagagtgtctgcatcaacccgttgcaggcgcccatgagggcgtcggggccggagatgccattcctccccggccagcggctgatgcatgcggaatgcgcttcttccgggcatgctgtctccgcccaccccatgctcaaacctgcatcagcgctggcttgatgcggac

SEQ ID NO: 669754 - DNA, 444 bp, Homo sapiens
  misc_feature (34)..(34): n is a, c, g, or t
  misc_feature (179)..(179): n is a, c, g, or t
  misc_feature (242)..(242): n is a, c, g, or t
  misc_feature (274)..(274): n is a, c, g, or t
  misc_feature (307)..(307): n is a, c, g, or t
  misc_feature (340)..(340): n is a, c, g, or t
  misc_feature (352)..(352): n is a, c, g, or t
  misc_feature (361)..(361): n is a, c, g, or t
  misc_feature (367)..(367): n is a, c, g, or t
  misc_feature (372)..(372): n is a, c, g, or t
  misc_feature (394)..(394): n is a, c, g, or t
  misc_feature (423)..(423): n is a, c, g, or t
ggcgagacgggggtctcacacggtcacccaggcnggagtacaggggataacctcggctcacggcagcctccaccggccaggctcaagcaattctccggcctcagcctcccgagtagctgggattacaggctaccacatacggtggatggtgatgaaatgccagtggaagcaccggtccngcgagcttaggggtgctacaagtggaccacggcagcagtaaagatgactctgaagaagggcangggatggatcctttcgaatgcactggagcagnggtctccaaccacagggccacagagcgggagcnggatctaccatgaaagacctctgaatccaggangagagacggacngagcaacangttatncaggntctccatctgtggtccaaggcnggagtgtagtagtgctatcacagcggacngcagcctcaaccttccaggcg

SEQ ID NO: 669755 - DNA, 407 bp, Homo sapiens
  misc_feature (34)..(34): n is a, c, g, or t
  misc_feature (142)..(142): n is a, c, g, or t
  misc_feature (205)..(205): n is a, c, g, or t
  misc_feature (237)..(237): n is a, c, g, or t
  misc_feature (270)..(270): n is a, c, g, or t
  misc_feature (303)..(303): n is a, c, g, or t
  misc_feature (315)..(315): n is a, c, g, or t
  misc_feature (324)..(324): n is a, c, g, or t
  misc_feature (330)..(330): n is a, c, g, or t
  misc_feature (335)..(335): n is a, c, g, or t
  misc_feature (357)..(357): n is a, c, g, or t
  misc_feature (386)..(386): n is a, c, g, or t
ggcgagacgggggtctcacacggtcacccaggcnggagtacaggggataacctcggctcacggcagcctccaccggccaggctcaagcaattctccggcctcagcctcccgagtagctgggattacaggaagcaccggtccngcgagcttaggggtgctacaagtggaccacggcagcagtaaagatgactctgaagaagggcangggatggatcctttcgaatgcactggagcagnggtctccaaccacagggccacagagcgggagcnggatctaccatgaaagacctctgaatccaggangagagacggacngagcaacangttatncaggntctccatctgtggtccaaggcnggagtgtagtagtgctatcacagcggacngcagcctcaaccttccaggcg

SEQ ID NO: 669756 - DNA, 303 bp, Homo sapiens
  misc_feature (46)..(46): n is a, c, g, or t
  misc_feature (92)..(92): n is a, c, g, or t
  misc_feature (121)..(121): n is a, c, g, or t
  misc_feature (125)..(125): n is a, c, g, or t
  misc_feature (140)..(140): n is a, c, g, or t
  misc_feature (144)..(144): n is a, c, g, or t
  misc_feature (185)..(185): n is a, c, g, or t
  misc_feature (195)..(195): n is a, c, g, or t
  misc_feature (207)..(207): n is a, c, g, or t
  misc_feature (251)..(251): n is a, c, g, or t
  misc_feature (268)..(268): n is a, c, g, or t
ctggtaaaaaaattaatggcttcccttgaatttaaaccagctctanataggaaaaaaatcagtctcctcatttgctttttaaatggagtagnacatcccatattttagaacaagtaggggngccntgcttaaataaaaanagcntttaatgtataattgtgtgaagggtttatggataaaactgnacttctgtcncaatgtggcagnactttttgctttaaaattaaacagcttgttatttaaaaattggncaaaaaggctggcttcnaaaaaaagtcattaataaactaactttatgtgcca

SEQ ID NO: 669757 - DNA, 186 bp, Homo sapiens
gaaattatgcttttttgggttgtcgagggggcaaggggggacagaaaagtagcctcttcttaagtggactattctaataagctaccttttgtaggtgccaggtgtctcatctaatcataccaagtatggcatagatgtctgacggccaggggtttctttcaaggacagggtggcgggtagtaaaat

SEQ ID NO: 669758 - DNA, 197 bp, Homo sapiens
agataatgcgagcaaacaagacttgctgattacaaaggcacagcagacatgggaggcggtgcggcaagaaagggtgtgctagaaagccctttggttccctgggacagggaggcggaagagactcatgagcagtagcagcagaggaaacactttccacaaggaagagggacaacgtctgtcataatgagtcttcttca

SEQ ID NO: 669759 - DNA, 994 bp, Homo sapiens
gctctcgtccaggcgtactagtggaagtgacatcgtctttaaaccctgcgtggcaatccctgatgcaccgtggtgatgcccagggaatagagggcgaactggaatccaactacttccttaattatcatccaactattggatgattatccgaatgtgtcctcattggtgcgagagcagataatgtaggcgctctcgaaatgcatgtaatgtctatgccgagactaccgcaatgtcgcttcggaggtgaagtgcatgtggtgcttggatgccagtcaaagagagcaccgatgattgcgcagggccatccgagggcggccgtggaaaacgatccagctctgtataaattgctgtgtcatatacgcgggaatgtggccattgggtccgaccacacggagtgaccttcatatgtgaatcaggctgtactgtgtttgctggcactgattaagagtggcatctttgggtgcactcgggcttggctgcctgttgtcctgatgtggaggggatacgacttggtgcccatcggacaatgctaggtggatctggggcctgcagaatagcatcccgtttacacaggacttgaggtgtctccagtaagaagtctccagcggcactcctatggaattcctgaatgtatatgctcttggttcgagacgggtgatagaaaagtggcgtagacaattatagccatccactgaattcatttgcttactatgtaaccgcttatcctgtgtgtgtcatcacagatgtgaagcaatggctgatctaggacctgagtggtgatttcgggctggacatggctaactgctgaggcgcccagaatggaggcctgtgcagaactggtcacactctggggatcccatctgttagcgaaaaggaaagcggcgggaaaataactcagaaaggacttgtaaagtagacgacagagtaagggggggtacgatgaagaaaaaaagtgtgcaaaaaagggaccgtgactcacacggccttcgaaata

SEQ ID NO: 669760 - DNA, 124 bp, Homo sapiens
ggtgactggacttccaagggggtcacattacatcgtgggatattagatactggatagagggtgcttccagtaagatgacgtaggcgatgaacagcagggtctcacactccggcatctgaagttg

SEQ ID NO: 669761 - DNA, 106 bp, Homo sapiens
aaaacaaacaaaaacaacaacaaaaaaaaaacttatgtccgattcctttgggtttacaggcagaaatttacagggtagacacatttctttctggtactatcgcatg

SEQ ID NO: 669762 - DNA, 394 bp, Homo sapiens
  misc_feature (14)..(14): n is a, c, g, or t
  misc_feature (20)..(20): n is a, c, g, or t
  misc_feature (93)..(93): n is a, c, g, or t
  misc_feature (95)..(95): n is a, c, g, or t
  misc_feature (156)..(156): n is a, c, g, or t
  misc_feature (186)..(186): n is a, c, g, or t
  misc_feature (204)..(204): n is a, c, g, or t
  misc_feature (219)..(219): n is a, c, g, or t
  misc_feature (224)..(224): n is a, c, g, or t
  misc_feature (321)..(321): n is a, c, g, or t
  misc_feature (374)..(374): n is a, c, g, or t
  misc_feature (377)..(377): n is a, c, g, or t
tgggactcgcgatncggccngcggaagacgtgaagctctcgaggctcctccgctgcgggtcggcgctcgcctcgctctcctcgccctccgccncngccccggcccggcccgcgcccgccatggagaagactgagctgatcagaaggcaagctggcnagcagcgagcgctacgacgacatggccacntgcatgaaggcagtgacngagcagggcgccganctgtncaacgaggagcgcaacctgctctccgtggcctacaagaacgtggtcgggggccgcagtccgccctggaagggtcatctctagcatcgagcagaagancgacaccttcgacaagaagttgcaactgattaaaggactatcgggaagaagtnganttcgaactgagattcat

SEQ ID NO: 669763 - DNA, 1061 bp, Homo sapiens
gctgtcgaagggaggtggttgtgttatcgacatctgagggaacagatgtgctcgctaacggtggggcaactggagcgggggaaacgttttgaatacgccacatactgaagctggtgcacgatggtctcggggaacctgcgccagcagaatcctcccagggcccactggtgctgagcggcgaggtccctcgcaatctgggagtgcagtcgcagtgcggtgtcaggtaggtaacagatgatgcaaatgtggattcgcgtgaaatgatatgatgcactgatggtaggctgtcgggtgagaggtctcaagaatgtggtcatggaccaagaggagcgttgctgtgggtgtcgacgctgtggagtttgaagttgaagatagtcgtagtgcaccggtggagctacactagagagtgacacacgggcatatttgtaaactggaatttatcaagtaaaaacatttagagagaaggatgggaagtgcgagggagggagctagagggggaaatggttgctgcaggagcttggcactggtatggtgctaatactcttagatgcaaggggaaacgatcatggacatggttattgggggtgtaaaacgtagaatgatcattttgagcgtgtactatgtttataagggcaggatcatggccatatgcgaaggaagggaaaggaaattaatatataaatcacacagttgagtgcgtacaacaagttccaatcttcataattctcgggccatgggaccttcttggcccaagaatgacatcgaaaactctgcttgggagccattgcaacaatccgtagccatttggaattccattaatggcagattcttggggcgtaaagtggattctggaagatttgcaaaattgcacaagacgtcggtggatgtattgagagcgaatgggaacgtccaagagtgggaaatggcgggaataccagcaaaagatggttaaataaagcggaacagaataaggagacttaggaaacagcccattattataggcaaaggggaggacattggagattacaatgtttcatgagagaatgaaaagacacaggaaa

SEQ ID NO: 669764 - DNA, 180 bp, Homo sapiens
gaatgggttaattcctatattatacacattatatgtttagaacacaaatgggtcaggttacttagcaaaaaaaaagtataggaaaacaacactaattctatatattttattttttaaattatataaatacgagggggactcctcataaagtcaacctgaaggcttgcatgctgggcacgg

SEQ ID NO: 669765 - DNA, 120 bp, Homo sapiens
  misc_feature (7)..(7): n is a, c, g, or t
ggatccncccgcttccatcatccctatcatcagcaggtggcggccatgctcgacggcatgacgtcacccttcatcctttccgtacatagcttcacgccgcgcctggcgagcgatccggcg

SEQ ID NO: 669766 - DNA, 797 bp, Homo sapiens
ctggattggacagcatcagcttgcctcatcgagatgcacaagaagcggtactatgtcagcggaccaaagccacctatgaaagccattttcgaacagagtttattcgtccaccgactccactccacattcgtgaggatgaacttgcttggctaaaccccacggagcctgaccacgcgatccagtgggataaatcgatgtgtgttgaagaatagcactggtgtggagatcaaacgactacatggccaagagccttcaaaagccccttatcctctccccaagaagaaccacagctacttggcgcgttggcacaagaccccaaaatatgtctaccatattggcctcaccccagccaaacttcctgacttgtggaaaacaaccctttagtcgctatagcaaatgtgctgcacattaagtgcgccaagccagatcactgagtctgctctgtcctggtcactcatggagcatgtcttcacattcactggcagtcgtcctccgaccacatacagctcgttgatctacctccgtgaatttactacaccttctcatctcatccacatcgcatctgctgacagctgaacagaatccacggatcatgtatctgcagaaatcgacctgctgcgatcatgagtgttgtgtcacctcaacacgtggaacccggaagaacattgttcgccgccacggagcggttctcagaacaccagcctccggcattgagccgccgaaacaaaactgcggactccggcgccccactgcactggccgctccccccgatcggaacaacccatagagcataaaag

SEQ ID NO: 669767 - DNA, 156 bp, Homo sapiens
  misc_feature (85)..(85): n is a, c, g, or t
tcttctctaaaatcaaactcaaaaccatttcataaatcatagaaaaattttactatctaaaaaaaatacacaaatatatatcttnccacattttaacacacttttctctgaatatctcaactctcttcagccctcttcaagttaacatatccttta

SEQ ID NO: 669768 - DNA, 331 bp, Homo sapiens
  misc_feature (6)..(6): n is a, c, g, or t
  misc_feature (36)..(36): n is a, c, g, or t
  misc_feature (139)..(139): n is a, c, g, or t
attacnttgcagacagagttcagtgtgtcaaatcanagggcatgctgtccggtcctctggcagtctctatgggggtgccacagggttcaattctcgggccgactcttttctctgtatatatcaatgatgttgctcttgntgcgggcgattccctgatccacctctacgcagacgacaccattctatatactttcggcccgtcattggacactgtgctatcaaacctccaaacgagcttcaatgccatacagcactccttccgtggcctccaactgctcttaaacgcgagtaaaaccaaatgcatgcttttcaaccgatcgctggtcgacgc

SEQ ID NO: 669769 - DNA, 457 bp, Homo sapiens
  misc_feature (191)..(191): n is a, c, g, or t
  misc_feature (335)..(335): n is a, c, g, or t
  misc_feature (352)..(352): n is a, c, g, or t
  misc_feature (424)..(424): n is a, c, g, or t
cacggtcggtggactggggagccccctgggcgggcccagcgggcagtgagtgaacggctaccgagtgctccagcttaacggtatttggaggtcagcacggtgctcacagaagccaggaacttgtccagtggaggcgtgcaccgcaggtggtgaactcgtgcggtgagtgtgggcggccagggtcaccagcnaggcagtggcttagtgagcttgaagttgaccagggtccaccctgaagcttgtgctgcgtgcagtgtcgctcagaggcggacagcgctgttgggcatgttcgtccacagtgcgccacgtgcgttggtcatgcgcagtcggccacncttcttgcctgtggccncttaaccctgggcatgagcctgtggctcagtgtcgaacgttgcgggacagtaggtcttaggtggtagggtcnagaacagtaagggggatccctctagaagtcgaa

SEQ ID NO: 669770 - DNA, 188 bp, Homo sapiens
caatgattacaacctacaatttcaatgcccttccctcccacacaactcaaatggaatggaaactgattaacacatagaaaggaactggctggctcaccaggtttaagcatttgtttttacaaaaatggagtgggatatagggggtggtcaagttttactgggtaataacaatcatatctctctatgat

SEQ ID NO: 669771 - DNA, 358 bp, Homo sapiens
  misc_feature (358)..(358): n is a, c, g, or t
agccttaattagggacctgtgtgaatggctctacgagaggtcagatgtctcttacttttaaccagtgagattgagctgcccgcgaagagagcgggcatgacacacaaagacgagaagaccctatagggctttaatttattaatgcaaacagtacctaacaaacccacagggcctaaactatccaaacctggattactaagacattaccaggcgcgaactactatactcaattgagccaataacttgaccaacggaacacagttaccctatggataacagcgcaatcctattctagagaccatattaacaatagggtttacgaactctatgttggatcaagacattcctggtgcagcgn

SEQ ID NO: 669772 - DNA, 350 bp, Homo sapiens
agttacatgatacactcgagtcagtacctgtgggtagcagcaccctagggatcagttttgcaggtggtaaagccatttaccaagatagttgtaggtaagaagggcagatttattagagaaattgtgaaaatatgttgcagtgggcagctcagcagagaaggggctacctgcaaagaggcaagggctggaggaaagttttatagggtcctgctgaagggtgctacgtgtggaatgaggtcattgtgcccgcaggttgtttgtgattagctgtctctaacaattgttcatacaataattgttcattattgttctcaacttggggctctccccaacctggggacccttcctta

SEQ ID NO: 669773 - DNA, 1171 bp, Homo sapiens
ggctccctgtctgccgcggagtgggcgggggcaggacgcgcatactccgtgccggagctgtccggggtcgtgatgccggccccgccttggtggcggctgccccctcgcggtccagaggcagacgcatcgcggtgggctcgtggtctccagccctggcctggtgaggagtggacctgtggtcttgctgtgacgctggtggactccgtgtgtgcctctgtgctgtgtggctgcggcacactgcatgtggcgtgtggctgtgccctggtgggtgcgtggggcctctgctgctgggcttgaccaggtgctccccatgagctgtcagccgcctgccacatgtgccagagcctggctcacagccacgaccgccgtgtcggctggccagacgggactcgcaggacggccacaaggcctagtggcaggacgcccggggcttggaacgtgcccccaggatgggacggccgggccaccccaagccgcggaaacgttaatcgagaatcgcgaacagctaatgcgacgcacgcacaaagctgggctcacagccacgttcccgctgcgcacggtctaatgggacttggggacttcacgccgatccagtgacgcggcgtttaccgcaacagcttcaaacaagcttagcatttcaagggccacacacctacgaggaaccgcacgcatagcacacactcagacgactgcacacgcctccaggttgacaaagcttacggtgggagcccatggcttcaagggtcacttaccagctgaggctctacccatttaagccattttccccgtgtatacttcccctctgcaacagccaaattctgactcacacacccaaggaccttttagcaggtcacgattgtctttcaattcgaccgaataggaaggccggaaaagtgacttgtgctctcgtaccgggtaccttctgcggacttgggaatttccttcctttaagctttgcccccaaaccaatcgcaaaatttccacccaaacccgaaccctttttgcaccattcaacgctcaacgcccttctctaaacagcggcgcacaccgattgcccaacaccgctatctaccgacaataaacaaaaccgttttaaccataacacacttgccaacggtctaacccaccaccctccttgtccaacaattgtcccttcacctcacccaccctc

SEQ ID NO: 669774 - DNA, 250 bp, Homo sapiens
tcctcaaaaagtccgggaagctgaaagtccccgaattggttgataccgtcaagctggccaagcacaaagagcttgctcccttcgatgagaactggttctacacgcgagctgcttccacagcgccgcacctgtaccccggggtggcgctgtgttggctccatgaccaagatctatggtggacgtcagagaaacgtcttcatgcccagccacttcagccgatgctccaagagtgtggccgccgggtcctcca

SEQ ID NO: 669775 - DNA, 1005 bp, Homo sapiens
cggcacgaggattaaagccatagattaactacttacaactaaaaaacactgaggttttccaaccagcagtatcacagatcacaggtattcttgtacagattaagtgactctagtattcttttttattaggcaaaagagatttcactagcagacctccaggagaattatattgaggcattaaataaattagtgtctgaaaatcaacaactacagaaagatttgatgaataccaaatctcagctggagatttctactagatgtgcaaaaaacaaaatgacaggatctttaaaccaacacacagcagaacaactgagttcaagaatacagagttcaagccaacccatggccagcacagacatgatggaataaagactgagcactacaaaacagatcttcattctccaagaggacaagcgtcggatagtataaaccccatgtctagggtgctaagccccctgagtcctcaaatcagccctgtgttccttgcctgtatctccccttggttcaatagctaccagatttttggaagaggaggaactgaggtctcatcacattctagagcgcttggatgcccatattgaagaactaaaaagagagagtgaaaagacagtgagacaattcacagccttaaagtagcctcttaaaaaaatcacaatcttggaaataaaaataaacaccaaagagttactgtcatctgaagtagcagctctttaaaaacatgaagagataaaattataaaaatgatacatctaaagcagtggtgaagaaagctgaaaaactgatacttttgataggcattttctctgcactggtttgtttaaaggacttcttccagcaataagttgaaagaataaaccactttgctagaaaattttctcatacgaatatttattatcataaagtgatacttaccttgctgacttaaatgtgaatagctatgtactaattgaaataaggattttatgatacatgttgaaaataaagtaactgcaggaactttcttta

SEQ ID NO: 669776 - DNA, 258 bp, Homo sapiens
  misc_feature (147)..(147): n is a, c, g, or t
taccgactcactctgtgctccggagtacctgggaccacggcgttacaccacacccggctaatttgtatttttattagagacggggttttgccatgttggccaggcaggtctcgaactcctgacctcaggtgatccacccaccttggnctcccaaagtgctgggaatacaggcttgagccactgtgcccagaccaccctacctgccccccaccaccaattttttttttttttttaaacagatgaggcacagattgcagt

SEQ ID NO: 669777 - DNA, 992 bp, Homo sapiens
  misc_feature (389)..(389): n is a, c, g, or t
  misc_feature (400)..(400): n is a, c, g, or t
  misc_feature (443)..(444): n is a, c, g, or t
  misc_feature (499)..(499): n is a, c, g, or t
  misc_feature (519)..(519): n is a, c, g, or t
  misc_feature (541)..(541): n is a, c, g, or t
  misc_feature (546)..(546): n is a, c, g, or t
  misc_feature (564)..(564): n is a, c, g, or t
  misc_feature (588)..(588): n is a, c, g, or t
gctccactgccagacccaggcctgcccacctctctcctggcctcagcgacatggacatccttctgggtacagccgggcaattcagtttctacatcaggacagccccagcctcatccatggagacatcaagagttccaacgtccttctggatgagaggctgacacccaagctgggagactttggcctggcccggttcagccgctttgccgggtccagccccagccagagcagcatggtggcccggacacagacagtgcggggcaccctggcctacctgcccgaggagtacatcaagacgggaaggctggctgtggacacggaccaccttcagctttggggtggtagtgctagagaccttggctggtcagagggctgtgaagacgcacggngccaggaccangtatctgaaagacctggtggaagaggaggctgaggaggctggnngtggctttgagaagcacccagagcacactgcaagcaggtctggctgcagatgccntgggctgctcccatcgccantgcagatctacaagaagcaccntgganccccaggcccggggcccntgccaccatgagctgggcctgggncctgggcagctcgcctgctgcttgccttgcacctgccgggcgcaaaagggaggccctcctatgaccccagtgtgtaccgagacggctagaagaagctgcatggcagtgggtggcgtggggttgccctgggcatttggacggccgccatgctgcatcccccctttccccggcaggagaccctcctacaggtgtccagcactggtcagagccccacagtggggcttgctccatgtgcagccccttggcagcgccaatcaggagccaagtgcccaaggcagccagagcagcttgcagagaggccccaagcagcccgtggacgagttgacgagagcctaagcggcctctctgctgccctgtgctcctggcacttgaactccaagcttgcctctggaaccaggaaccca

SEQ ID NO: 669778 - DNA, 702 bp, Homo sapiens
ggcaggtgaacctgatgtcctcaccaatggcgggcacaggtttgggtggctggagatgttgtggtggatgcgactgccgtagttatgtgattcaacggttagtgaatgcccctggtgtgcgggatagcggcgtgcagtccgtctggctggacgggaggaaggcatcgcagagtaaccgagccatagctagagaactaccatgagtctaccgtgatgagtcccggagttattctgcgctttgaaagctgtcagtactgagacggtgaatttgacgagagctggctgactacgacaaaccagagtttgacattgcttcgagttattgacaatcggatgatgatggcttcctagaccctcactgccttctggttccaagtgagtgactttgactgaactggttcgagaatgtgctatataattcctatgtgtcccagtttagagcatcatatgcatgttgtaggaattggagtaatctggggaactatgtgtctacatgccattgtgattgctaaatgacgctgggaaattgatactaccagtcgtaagaaatctagcattccatagtggacttgtacaactcgggcacacgacaggaagactgtcacgcaacggtttacagcaacatgaccttgtgtttcctgcgaattctaaagccttgcaccacgatgaagcagaaagcaatgccaaggttcaacgagctgg

SEQ ID NO: 669779 - DNA, 922 bp, Homo sapiens
  misc_feature (373)..(374): n is a, c, g, or t
  misc_feature (429)..(429): n is a, c, g, or t
  misc_feature (449)..(449): n is a, c, g, or t
  misc_feature (471)..(471): n is a, c, g, or t
  misc_feature (476)..(476): n is a, c, g, or t
  misc_feature (494)..(494): n is a, c, g, or t
  misc_feature (518)..(518): n is a, c, g, or t
gctccactgccagacccaggcctgcccacctctctcctggcctcagcgacatggacatccttctgggtacagccgggcaattcagtttctacatcaggacagccccagcctcatccatggagacatcaagagttccaacgtccttctggatgagaggctgacacccaagctgggagactttggcctggcccggttcagccgctttgccgggtccagccccagccagagcagcatggtggcccggacacagacagtgcggggcaccctggcctacctgcccgaggagtacatcaagacgggaaggctggctgtggacacggaccaccttcagctttggggtgacctggtggaagaggaggctgaggaggctggnngtggctttgagaagcacccagagcacactgcaagcaggtctggctgcagatgccntgggctgctcccatcgccantgcagatctacaagaagcaccntgganccccaggcccggggcccntgccaccatgagctgggcctgggncctgggcagctcgcctgctgcttgccttgcacctgccgggcgcaaaagggaggccctcctatgaccccagtgtgtaccgagacggctagaagaagctgcatggcagtgggtggcgtggggttgccctgggcatttggacggccgccatgctgcatcccccctttccccggcaggagaccctcctacaggtgtccagcactggtcagagccccacagtggggcttgctccatgtgcagccccttggcagcgccaatcaggagccaagtgcccaaggcagccagagcagcttgcagagaggccccaagcagcccgtggacgagttgacgagagcctaagcggcctctctgctgccctgtgctcctggcacttgaactccaagcttgcctctggaaccaggaaccca

SEQ ID NO: 669780 - DNA, 634 bp, Homo sapiens
  misc_feature (588)..(588): n is a, c, g, or t
tacgctctatgacgggactagacggcacactataatcccagcactttgggaggcgaggagggtggatcaagaggtcaggagttcaagaccagcctggccaatgtggtgaaaccctgtctctactggaaatacaaaaattggcttggcatggtggtgtgcgcctgtggtcccagcttctcgggaggctgaggcaggagaatcgcctggacccgggaggtggaggttccattgagccaagatcatgccactgactccagcctgggcaacagactgaggctctgtctcaaaaaaaagaaaaaaaaaggcattcagtttgataagggaagcagagcataaaagttggggaaattggcagcctgacaatgtgatagtaaagaaaatcccattttctgagaggaaattcaagcgggctgcaaaaatgggcataagtaccaaggagccgaatgttaatatccaagacaagggggaaaatatctcccagacatgtcagaggtcttcatggcagcccctcccatcaacaggtccagagggctaggaggaaaaagtggttttgtgggcagcacccagggtccccatgctatgtgcagnctagggacttggtggcgtgcgtctcagctcctccagtggtgactga

SEQ ID NO: 669781 - DNA, 880 bp, Homo sapiens
  misc_feature (191)..(191): n is a, c, g, or t
  misc_feature (335)..(335): n is a, c, g, or t
  misc_feature (342)..(342): n is a, c, g, or t
  misc_feature (368)..(368): n is a, c, g, or t
  misc_feature (393)..(393): n is a, c, g, or t
  misc_feature (396)..(397): n is a, c, g, or t
  misc_feature (433)..(434): n is a, c, g, or t
  misc_feature (450)..(450): n is a, c, g, or t
  misc_feature (473)..(473): n is a, c, g, or t
  misc_feature (495)..(495): n is a, c, g, or t
  misc_feature (497)..(497): n is a, c, g, or t
  misc_feature (510)..(510): n is a, c, g, or t
  misc_feature (517)..(517): n is a, c, g, or t
  misc_feature (545)..(545): n is a, c, g, or t
  misc_feature (547)..(548): n is a, c, g, or t
  misc_feature (557)..(558): n is a, c, g, or t
  misc_feature (565)..(565): n is a, c, g, or t
  misc_feature (638)..(638): n is a, c, g, or t
  misc_feature (650)..(651): n is a, c, g, or t
  misc_feature (669)..(669): n is a, c, g, or t
  misc_feature (683)..(685): n is a, c, g, or t
  misc_feature (692)..(692): n is a, c, g, or t
agcgggctgcgccggggcctcagatcgaggctgcctccccctctcagccggcagcacattccgtcgccttgccgcgcccggcccacagtgtctttgccggagctgcagtcgcgctggggttagggcgggggggcgggcggggagaggagaaggccgcggcggaggcaggtgagaggaggaaggaagcggcnggcgcggcgggcacagcagctcaggcggctggcccggttcctgggagtgtcggtgcggcgcgttggttggggcggatcccgcggggcccgggcgggggaaggagtcaccggcccggcatggcggacaacgagaaactggacaancaacggntcaagaatttcaagaacaaaggccgngacttggagactatgagaagacaangcnntgaagttgtagttgaacttcaggacgaactaagagnngatgaacatctcttanagagaaggaatgtaccacatgangatatctgtgaagactctgatntngatggtgattatngagtgcnaaatacctctctagaagctattgttcananntgcttcacnntgataanccaaggaattcaattaccgtgcatgttcaagctgctaggaaggcttttgtccagtgatcgacaatccaccaanttgatgactttnntaacctctggaatattgnccattttagtccannngtcttgncaccggagcatgaccaaatcctgttcttttacacgtcttgacagcttgccattgggcctttcggacaaaacatttggccattcttgggacacttcctgagacaaaacttcaacgccaggtagttcacgctcccgatggctgtggcccatttttcctgaaggcttctaccatttgacccattccgaatg

SEQ ID NO: 669782 - DNA, 1079 bp, Homo sapiens
  misc_feature (24)..(24): n is a, c, g, or t
  misc_feature (69)..(69): n is a, c, g, or t
  misc_feature (83)..(83): n is a, c, g, or t
  misc_feature (375)..(375): n is a, c, g, or t
ggtctgggctcggggcgcggggcngtcagctctatgttcgcggtcttaacctctcctctggccgagtcnttgcaagaagtganttacccgaccctgcaaaacacttactattttggagtttaaagtatgtcatcatggcaaagtttcggagaaggacttgcatcattttggcactttttattctatttattttctctctgatgatgggtttaaaaatgctgagaccaaatacagctacttttggagctccttttggacttgaccttcttccagaacttcatcaacgaactattcatttggggaaaaattttgatttccaaaagagtgacagaatcaacagtgaaacaaataccaagaatttaaaaagtgttgaantcactatgaaaccttccaaagcctctgaacttaacttggatgaactaccacctctgaacaattatctacatgtattttattacagttggtatggaaatccacaatttgatggtaaatatatacattggaatcatccagtgttagagcattgggaccctagaatagccaagaattatccacaagggagacacaaccctccagatgacattggctccagcttttatcctgaattgggaagttacagttctcgggatccttctgtcatagaaactcacatgagacaaatgcgctcagcttcaattggtaattattgtatatatatatatatgtgtgtgtttgtgtctgtatatatgcatataaatgattttttgtgtaactttactagttaattttctcattattattaattatattgttaagctcatacctccaaattaaactgtatgtatgatcttaaacatccaggcaaccacattttaacactgcccttagtgtatattgtttaatttttacattttggagcatttctggatatattgttgatttctaatttaattcactttctcaattttattaaattatgatttacataaaatacaatgaatttcccactttaagtttacagctcattgatgttactcaaaagtatatacctgtttgaataccaccccaatcaagaagtaaaatatttctatagcccaaaa

SEQ ID NO: 669783 - DNA, 382 bp, Homo sapiens
  misc_feature (19)..(19): n is a, c, g, or t
cctagttttagaagtttcnatagcaagtaaataagagcaaagaatttatttcttaattcaaaactatacgtttgaattcaatatggtataacttaaagtggtataatacatacaatgcatgaatcataatggattcttttataagttattaatttttatggtttaatcagtctaattgttttgactgttatagaaaccaaatattttactgtttcttttaaggactaatattgtcaaaaactgctgttattaacttcacttgagttgtttaacttccttctgttttaagattgtaattaaaaattactattttgttatatggaatggttaatttttacctaataaaaacatagatgaaatacattgtattttaaaaaaaaaa

SEQ ID NO: 669784 - DNA, 4584 bp, Homo sapiens
  misc_feature (24)..(24): n is a, c, g, or t
  misc_feature (69)..(69): n is a, c, g, or t
  misc_feature (83)..(83): n is a, c, g, or t
  misc_feature (375)..(375): n is a, c, g, or t
  misc_feature (3397)..(3397): n is a, c, g, or t
ggtctgggctcggggcgcggggcngtcagctctatgttcgcggtcttaacctctcctctggccgagtcnttgcaagaagtganttacccgaccctgcaaaacacttactattttggagtttaaagtatgtcatcatggcaaagtttcggagaaggacttgcatcattttggcactttttattctatttattttctctctgatgatgggtttaaaaatgctgagaccaaatacagctacttttggagctccttttggacttgaccttcttccagaacttcatcaacgaactattcatttggggaaaaattttgatttccaaaagagtgacagaatcaacagtgaaacaaataccaagaatttaaaaagtgttgaantcactatgaaaccttccaaagcctctgaacttaacttggatgaactaccacctctgaacaattatctacatgtattttattacagttggtatggaaatccacaatttgatggtaaatatatacattggaatcatccagtgttagagcattgggaccctagaatagccaagaattatccacaagggagacacaaccctccagatgacattggctccagcttttatcctgaattgggaagttacagttctcgggatccttctgtcatagaaactcacatgagacaaatgcgctcagcttcaattggtgtactagccctctcttggtacccacctgatgtaaatgatgaaaatggagaacctactgataacttggtacccactattttggataaagctcataaatataacctaaaggttacttttcacatagaaccatatagcaatcgagatgatcaaaacatgtacaaaaatgtcaagtatattatagacaaatatggaaatcatccggccttttacaggtacaagacgaagactggcaatgctcttcctatgttttatgtctatgattcctatattaccaagcctgaaaaatgggccaatctgttaaccacctcagggtctcggagtattcgcaattctccttatgatggactgtttattgcccttctggtagaagaaaaacataagtatgatattcttcaaagtggttttgatggaatttacacatattttgccacaaatggctttacttatggctcatcacatcagaattgggctagcctaaaattaatttgtgataaatacaacttaatatttatcccaagtgtgggcccaggatacatagataccagcatccgtccatggaacacgcaaaacactcggaaccgaatcaatgggaagtattatgaaattggtctgagtgccgcacttcagacacgccccagcttaatttctatcacctcttttaatgagtggcatgaaggaactcagattgaaaaagctgttcccaaaagaaccagtaatacagtgtacctagattaccgtcctcataaaccaggtctttacctagaactgactcgcaagtggtctgaaaaatacagtaaggaaagagcaacttatgcattagatcgccagctgcctgtttcttaatgcattgattaaagtttaatagttatcaaaatcacctaatttttaaaaatagctttcgttttgagttctggaaagaaaactgtcaaaatcagtatatactattagttatatttaaaaatatttttttaaattctttacagataatattatacttgttacccttcacaataccacatgagaaaatatctgagacaaaatgtatacaaatatattccttatggcataatttattgcatttctgactgaaatcaaaattctgatttgatggcaattgaattttcattttacaatagataaatgcttgtgttacctaaagcacttagcacacagttaaattatatttacatcctagacccaaataaataggattgtgtgtatatttgggatatctattgaagaaaaaaagaaaaccccttaaagataatgtacatgcttcatgtcatgtctttaaaataatttaatcaactttattgtcttagtatttagactctggataactctacaataatgaggaaattcttaagaataacaaaatcactgtaccttcctctcaattttgctgtgaacctgaaatggctttaaattaatactcttattttttatttaatttaattacataaattaaaccttaccatgaccaaattgtgttaggaaggcctgctatctacagcacagtgtgtcatttgcagatttgtggttacctataccacgctaggtgttttgacatgtttagtgtttctgctttacagtgctgaattccatattttagaagctatgaaagtccttttatgaaaaagttactgattgcttctcagttattaggaaaacagttgtttcacaattattatgtagatatgatgcccaaatatcatttttagtatatcttgtcgatctttaagttgttactattgtgttattcatgtctttaaatcagataccaaatattttttaggaaagaaaaatgttattactgtcattaggttgtcttttaatactttaagttattttgacgaaaagtaatagagaaaatttacttagcattttagattctagagacatggaaatgaaaattattttatgtctagagtaggtcctgaagtttggctttacattaagtttagcactgtatcagaatgaagaaactaatattttacataaaaactaatactttcaattttttatatagtaatatccccattttgtaaatgttagacttttatcatacctgtaagttaaaatacttgttatcaataacttgtcatattgtgacaaattgatcacttgtgtacgaaaaataaatctccttaaaaactaaataaaatgcactgtattcttacagttaatgtttataactatagtaaaaaattaatatatatcctattacataaatgttatttcttaggtgttccattaagaagagcaatagaataatgctaaaaaataatgcctataaatcttcagagtataaagacatccattcagaaacaaaaattagcactaaattttttataaaatagaccagatgacaaaatttattttatttttaaacagtggttttgacacaaattatgttattgaaaagcattattaatgtttaatttatttaaaattttggaatttgccatttctcagacaatgatcaggccttaggaaattaatacagtagtagtaatcattttctaggggaaaataaaagaataaatcactatactgatattttgatataagcaagcacttacatggtaatcactatatagatccaacctgtggattttcttcttatgtccatttaactagaatatattattttaggtataatttacaaatgtcacacctaataatcttttataatataccatatttcattaaagttntgttagagaagtatctaccacagaggagtttttgtcattgtgtacgttgtgtatttgaacccaccatgacagaaagtaaattttaggaaatagttatgagattaagggaaaatctataaaaacaaggttagcatattctcaacacagataccaccactttctttttcccattatagacatggtgaatccacacagcatacttcatctctgagctttgttgtgattcctcaacacattaccctaaccagccagcagtaacagatttcagagtaagataaagcagattctgtcttcattgcaaaaagttattctcaatggaagaatggcatctgatctcataattactagtttatattaatatagtttttttctccctttttaataaaataattacagtcatccctcagtgtctgtgggggattggttccagttacccctatagataccaaaatctgcagatgctcaagtccctgatataaactggcatagtagttgcatataatctatgcacatcctcctgtatacattaagtcatctctagattatttataacacttaatacaatgtaaatgctatgtagttgttataccatactggttagtgaataattacatgaaaaaaaagagtctgtacatcttcagagtttcagtcggcaatttcttggccatggatgtagaacctacagataaggtgagccaactgcattaggaaataactctaataattctgttaattcttagagaggaaaactttcaaaatcttcctcaggtatttattacaactgcctttaccattttagttgtaacacagtttaaattgttatgataacaagtaaataagagcaaagaatttatttcttaattcaaaactatacgtttgaattcaatatggtataacttaaagtggtataatacatacaatgcatgaatcataatggattcttttataagttattaatttttatggtttaatcagtctaattgttttgactgttatagaaaccaaatattttactgtttcttttaaggactaatattgtcaaaaactgctgttattaacttcacttgagttgtttaacttccttctgttttaagattgtaattaaaaattactattttgttatatggaatggttaatttttacctaataaaaacatagatgaaatacattgtattttaaaaaaaaaa

SEQ ID NO: 669785 - DNA, 283 bp, Homo sapiens
ccccctttaaacccattttttttcccctttttttatttttaacctttggggggcttccggcccctttgggccctgggggggcctttcccctgggttcccccctttcccaattttctggttttaaaaacctgggccatggttttttgggccctttttcccgggggcccctttttttttggccccttttaaaggggttttttgggtcccggcccttttttttggcttttcccccttttggggggtttcccggttgcccctttggttttgggggggttttggggga

SEQ ID NO: 669786 - DNA, 129 bp, Homo sapiens
aggctgcgctcaaagacaagcgagatcatgctatggaccgtgctgaaaagagagacctgctcctgccttgaagaaatgcgaaatttcttcatttctgggcttgaataggccctgcttcttctttgagat

SEQ ID NO: 669787 - DNA, 165 bp, Homo sapiens
gagcctggtccccctctagaggagctgttctgtaatcgataaaccccatcaacctcaccacctcttgctcagcctatatacctgccatcttcagcaaaccctgatgaatggctacaaatgtaatgctgcaagtacccacgtaaatgacgttagtgtctacctgtg

SEQ ID NO: 669788 - DNA, 306 bp, Homo sapiens
tttaatgccaacaaagacgcaccaggttgtgggggcaattttgctgaacccagtgggggcaagatgcttgtcaaagcaaaagcatcctctttacttcctccatccaatatgcagaggaagtggtaaggatggcatccgcatgcgcagcgtaaaagtgcacggcagtttaatgagagctcacgattatgggccaggcaccatacccactagccatgaactaactctgtggattctcacgcagctcttcagagccagaactactagtgcctgtctatcatagaggaagaaagggagacacatacagcc

SEQ ID NO: 669789 - DNA, 291 bp, Homo sapiens
acgggcagtatgaaatcttaaaagagcacaggacttggaagcaaccaagatacccttgaataggtgaatggataaaccatggtatacccagatgatggaaatatgatttagcactaaaaagaaatgaactatcaagtcaagaaaaggcatggaggaaactaaagtgcatattactaagtgaaagaagccaatctgaacaggctacatactgcatgacttcaactatatgacattccagaaaaggaaaaactatggaggcaatagaaggatcaggggctgatgggagcaaga

SEQ ID NO: 669790 - DNA, 406 bp, Homo sapiens
  misc_feature (134)..(135): n is a, c, g, or t
  misc_feature (247)..(247): n is a, c, g, or t
  misc_feature (347)..(347): n is a, c, g, or t
gctttcctgtcaccttcttctaactcttcttaatggtattttgttcgccaaatttttggggtaaaagacttttttttaatgaggtacttctttctttgaaggttttcaggcggtcaacttgtcgcctttttcanntgcaacactgtgaaggttatcacgtgtggctaatcgcacacaggctcttcaccctaccgcgatgtcttacttttgaggttaggtcgccatacacagaaccacgtgtatgttntacttcttcaccatttagagtgtgccctatctgtgtttccacacatagtccacattctttgtgtttaagtcgccttatagttttacacaggttcactttnttacaggtgctatttactgaagttatttattaaatatgcctaaaatacttaaaaaccaa

SEQ ID NO: 669791 - DNA, 139 bp, Homo sapiens
gcgaggaaagacaaagtccgcaccatgctggttaggcagatccaggaagagtcactgaggacctagctcttcacctacagcagtgtctataactccatcagcatggagccgctgtcagacatgtctgagctggtatact

SEQ ID NO: 669792 - DNA, 152 bp, Homo sapiens
ttgtgtagacgttcagtgaggagagtgccgtcatatgttcgttgcctgaggaagattggtagtgggtgagggtggttctaattaataaataaatgtatccgtgctattacggctatgaaagaatagtgtcgaggccccctgcgccgtattcg

SEQ ID NO: 669793 - DNA, 374 bp, Homo sapiens
ggaccgctgatcgcttagggaacagcgaggagaagaacagccttatgtcaggcagtcactgtgggagagccctactgagaactggccattacgaccaaatactctaagggactcccccaaaaaacagacagagaggatgagctttaaagtccttctgtgtctgaaatttggaatcccaggaaaccataagagggaagatattgactgggatgggctcaattctgtaatgaagcaatgcaaactgcagcttgcctattcgtatgtagtttgtaccactctcaaatgttggcaaagatatggagagacaggaactctgcactactggtccgagggtagattagtgcaatcaccttgtctatctaagcggatcagcc

SEQ ID NO: 669794 - DNA, 913 bp, Homo sapiens
ggaagagggtgtcgatgagtggtggtgactgagcggagcccggtgacaggatgtaggtgtggtataggagatctgcatatcctacatcggtgcgactagtaagccatgctaatttcagagaactcctggtgccaggcataaaattcacgcaccattctctgccgcagtgaaacgcttttgctccaggagagagttatgaccgtatctcaagactctgggctgggtgaatgttcagtagttggtgaccacgggaggaccttcggcatgaaggacatctgatattattccacgaaacagtaacaggttgttgactgtatggacaagttcaaaagattggtcttggatccatggacaatcaatgttaattccatgcgggaggatattggccctagccttagccactgtctgcaggtagggcaattgtgatgtggacccttactatattctcggggaccacgacatcacaaacattttgaagcatttgacgcatggaatcatccaattctactattaatccaagggtctgccactgggtccactataatgccttggaagacaacctattattccatccttcgtggttggcctggcatacttccagggctttctagcagggctcccctaatgtgtatcagctaactgtgagcatgcatgtgacaagtacaagcggaattcgaattacgacggaacctttaaggcccgggcctgtctggcattgactaggggtggaattcattggtcctgttagaaatccaggtaatagacttaagcagccacgaaatgtttcactttggaatatctggcggaacgatattcccctcctgttcatcactatgcgtgcgggtccgtccgtataagtattgggtagattaggtcttgaaagtgccccgatgggcggaaacatccgggttcg

SEQ ID NO: 669795 - DNA, 160 bp, Homo sapiens
atagatatgagaagatggcagagccgaacgtaaggatgccgaggaatggttcttcaccaatgacatgaggagctgaaccgctgaggtgccaccaacagcgagctggtgcagatgcggcaagagctgagatctcggagctccggcgcaccattgcagaacc

SEQ ID NO: 669796 - DNA, 164 bp, Homo sapiens
tctggcctgatgcactcctgataggctgaggactcagcaggagcaggcttgagtggtaagggattaggggagacttggaattcaatcttggacatgttgagtttgaggggcctattagacagttcctccaattcaatctactagaggccgggcgcggtggctca

SEQ ID NO: 669797 - DNA, 422 bp, Homo sapiens
  misc_feature (20)..(20): n is a, c, g, or t
  misc_feature (204)..(204): n is a, c, g, or t
  misc_feature (321)..(321): n is a, c, g, or t
caagaaattatttctttttnattttgttttgttttgtgtgtgagacagagtctcgctctgttgcccagactggagtgcactggcacaatcttggctctatgcaacctctgcctcccgggttcaagtgactctcccgcctcagcctcccgagtagctgggaccacaggcgcccgccaccatgcccggctaacttttgtaattttnagtagagacggggtttcaccatgttggccagactggtctcaaactcctaacctcaggcaatccatctgccttggcctcccaaagtgctgcgaattgtagggcgtgagccacttgcanctgggcccagatggatttataattcttaggccaaattaaaggaatactgacttaaggccagttaagtaaaatctttaattggacaagttggttgtaatttt

SEQ ID NO: 669798 - DNA, 93 bp, Homo sapiens
gagacagccctgagatcacctaaaaagctgctaccaagacagccacgaagatcctaccaaaaaaacaaaacaaacaaacaacacaaaaaacat

SEQ ID NO: 669799 - DNA, 413 bp, Homo sapiens
  misc_feature (133)..(133): n is a, c, g, or t
  misc_feature (136)..(136): n is a, c, g, or t
  misc_feature (159)..(159): n is a, c, g, or t
  misc_feature (171)..(171): n is a, c, g, or t
  misc_feature (179)..(179): n is a, c, g, or t
ctcgggtggccgaggggcttcataccagctgaagagcgacaaccgctggagccgcggatctcaccgccgctcagggtttttagaacttcagccataaaaatgggcagaattttccgtggttggggagttgccngcntgggcgtggtggccaaggccagngcgggggccggngcgaggcnttgttgccgtgggggggggggggggggggggggggggggggggggggggggggggggggggggggggggggggggggggggggggggggggggatttgcttgtgcaaactcgtgatacgatcctgaccaaccgctcagaactcatctccactcgtttcacaggcgccactggcagagcatttctttttaacaaggtagttaacctgcagtacagcgaagttcaagatcgggtca

SEQ ID NO: 669800 - DNA, 739 bp, Homo sapiens
tgtgatggagatggggtctgctttgctgcccaggctggtcgtgaactcctggcttgggagacagtcgctcctgaactcagacctcctaaagtgctgagggctttaatggtttcacattgaagcctgaagttgctaagacttaggttgtttcttatatctaggttggataagtacgatgaaagcgaacgcagagaagctttcacgttgtgagtactcgtaccagtgaaggatgcggtaatggcgaggaatagcagaataattggtgcttgtcaacagtttaagattctcctgtggatttgggtgagtgatcgttaaactgtttcgccaactctgccctaggatgtattcatttctctgtctaggctggtcggaatgggaagtttgatcatatctcttgtttggtgattccaagtacaactggatgacggagtattattgctgaaacactttgagcacgttgcgtctacgtagaaaccagttaacaagtgttatatctcataagaagaggtactgtcaagcagcgtgttcaaaacacaggtggcaatcagagtgcgcgccgcgcgcgaaggagcctggcgaattgaaaacgagtatagccggcgtactacagagggccccaaacgagagccgtcatgcgacacgaccccaggcagcaacgcccggagccgcagccgcacgccgcagaacacgaccaacggtgcgcacaggggggggtccacacgcgcaagcggcaagcgcg

SEQ ID NO: 669801 - DNA, 279 bp, Homo sapiens
ctgtatttagctactcggtagctgaggcaggagaatacttgaaccaggaggtggaggttgcaatgagccgagatcatgccactgcactccagcctgggtgacagattgagatttgtttccttaaaaaaaaaaaaaaaaagtttaaagagtttattgaatttacttgttgtaccttgtaagcacctcctcaactgcagtcggttaaaatactttgatttgacttgggatattgcttaattggtttaagttagcatttatttagtgcccacttgcttggcg

SEQ ID NO: 669802 - DNA, 1666 bp, Homo sapiens
  misc_feature (594)..(594): n is a, c, g, or t
  misc_feature (936)..(936): n is a, c, g, or t
ccgtggtatattttcccccgcgcggtagtatatgtgcgcgtcgctataacagaccaccaacgggctgttcccacgacacgcggggtgtttacaatgtggagaaagattgtttgcctcgtccgctgcgtgtttcttagaagaggatgaccccgccctttgcaaaagggcgccccacgccagttttgtggggcagaaggtgtagaataaatgccccgcccataaatattcctcggggcggtaagatgcaccaccaggagtctcctccacagaggctttgtgtgatgacgaaatagaggtgtcgccaagtactctctgtgccactgaggccgcagcgattgcttggtccggccagaagcgcaccaacgtgagtgaaggacagtgttgttatttctccgcagagagaagctgttcgctgtttaccaacctgggggaaaaagggcgccgcccccatcggatccccccacacggaatggtataaatgttggtgttttccccgccacagttctcgtctgttgtgggggtaaaaaataggctcgtggagccccccccagtggccccccccactgagagataaactgggggaagggcgcggtnttggggacccccccacacggggaagttccctccgtttccataacaccaacagggcgccatcacttgtgtgacagaaggacccacgtttgttttaccgaacggcggtttaattgtataacaaccccttttgttaatcgtgtttccgcgtcgggccgtgtgtggtcctggtccgaagagtacgccgccacagagggtgtgttccccccccttgtggagagagacttccccaacgagggataatatattgggtggcgacaaatataatatcgagtataagcgttgctcctctccctgtggtgtctcacaaacccgtcgcgcggacaggagcgcttactaagtggntattactaccacggagagagttctctcggagtgtccctctgattgcaccccaacgtgcgcccccaggagtcctgtgagtccacccagggagaatgttctctcacacgcgcacatagtgtcacccacaggagagtgtgattctgcctttgtgtgacacacactgtcgttgtgtgtggtgagacacttttttttgtgtgggacaccatgtcacccccccacggagatagaccacacacagtccctctcacacagaaggggcgccacacaccccccaacaatgtgtgacactctgtgaaaatatggcgcccacatgttctagagacgtatctgtttgttctccccctctcacaacaggtgcgcacatttcacgccacagagagagagagaatattctcttctccacaagagagtggctccacgtgtcttctcccccactcccctttatcccctcgtcgccctctcttatactacactcttggaagttttcttcacacctctaagagagacctaattgtggaaaagaacaaagaacaataatccacagatttcacgttttccctatgagaaacttctgaggcacgccaccttatttcttggctaaaatagaacctcaccctgctcatgacccacgaagagcactttaggataaatagaggaccctaactgaaggaaatcccttgtatatgaaaggagttattttagaaaacccaataaaaatattttattcata

SEQ ID NO: 669803 - DNA, 225 bp, Homo sapiens
atattccagtaagttattttgctctcactgttttaacaaaaaaaaaaaaccaccacccataaaattccttgaatacctggtcaaatggggagagttttaatgttttcatttatcattgtaaacccagggacatttttatacctcttttgtacgaggctgttacatgtagggcattctgtctttaggtagggataaattactctaaacaaaagagtcctagatagt

SEQ ID NO: 669804 - DNA, 419 bp, Homo sapiens
  misc_feature (149)..(149): n is a, c, g, or t
  misc_feature (375)..(375): n is a, c, g, or t
  misc_feature (377)..(377): n is a, c, g, or t
  misc_feature (410)..(410): n is a, c, g, or t
ggtgggatgtgccattttcagtccacatttggggagaagcacgcgtgttcttaagtttttagtgggttctagtaagaatggatgttgatttttagaattctctcctgtttattttttaacattttgtggtgggaatttgtgaaagaatncgaagtcaagagcatggtacggtgaggacccagcaccatctccaacctccccggggtccacgtggggtctgcgtgtggccgcctgtccctcagcacgatgtctgggtgtaaatctgagacatcacagcatgcaggctgcagacgtaggcatctctacaaaagaaggatgcgtttacaggagaatcgcttgaacctgggaggcagaggttgcagtgaatcgagatcnangcactgccctccagcctgggcgacaaagccgantccgtctca

SEQ ID NO: 669805 - DNA, 247 bp, Homo sapiens
ataggacctgtcacataaatggaaacacacagttgtaactgggattggcttttatattcagggctaactccacctgaagatctatcgaactgggagcatgtatcagctggttcgttccatttctgtacgctgcaggagtattccatacgtcccacagctttgtttacaccgtttcactcagttgttctctagctctttttagcatattgtgaacaacagctgctatgaaccattcactgcatacggt

SEQ ID NO: 669806 - DNA, 261 bp, Homo sapiens
acgtggatgtctctcatgtgttttgtactatcaaaacaaacaggtacaatacactacaaccagctatgtctggcattgctacactttatctaccaatgacatccttctgtgcctacagttaagcagcttcaacccttctttatatccctacaagctaccttcatcttttcctgtatatgttactgcctactttttattgtagctatttcttgtttccttttttttttttttggtacagattttcactctcccaccctcggc

SEQ ID NO: 669807 - DNA, 281 bp, Homo sapiens
tcgtaccctcccggctgctcgggaggctgaggggggagaatcgcttgaacccgggaggcggaggttgcagtgagctgagatcgtgccaccgcactcccccagcctgggcaacagtgtgaaactctgtctcaaaaaaaaaaaaaaaaattccagtattttgctaaagtttccataaggtttccaggattctagttctcctttaggagggatgcctcttgatctcattattttggttttaagattgttgtgtggcacgagttctggtaggacaaggggaaaca

SEQ ID NO: 669808 - DNA, 212 bp, Homo sapiens
ctatagctcgcaccttcaggcttgattgcaggcctgcctctggctccgtggactgctgcttggctggtggtctccgcagctggaaaccaactccaaacgtcttctccttcgcggagaaggctgatgtggcctgaagaagccctgtgtgcactggcccttgcaccctacccctagccatctcgggagggccccgcctgcaatcaagcctggaa

SEQ ID NO: 669809 - DNA, 175 bp, Homo sapiens
ggcctccaggaccctcgaaacccaggccctagggagtttgctcaggaagttcggagtatgcagggctggacctgggaaagccggccgtcggctggtctgggccttaacttattctcgggccgtgcggctgctaggttgctgttattttgtgctaataaaagagtaattaattcca

SEQ ID NO: 669810 - DNA, 434 bp, Homo sapiens
gcaggcgcctactactactaaattcggcggccgtcgaccttctgaaagggtcaacacagacatctcaatgctgccaacttgcaggtagccggtgcccttgtgggaatagaaggcaagagagggccatgtgcagtgcctcacacttgtaatcccaacactttgggaggctgaggcaggaggatgaattgagcacaagaattagagactagcctgcctgggcaacatagtgagaccccgtccctacaaaaaataaagaattggctgggtatggtggcacatgcctgtagtctcagctagtcaggaggccggggtggaagggttacttgagcccaggaattcaaggttgcagtgagccgtgaccatgccattgcacttcagcctgagtgatgaaacaagacactttctcaaaaaaaaaaaacgaaaaatgtccccct

SEQ ID NO: 669811 - DNA, 99 bp, Homo sapiens
cggcacgaggatgtgagcctcgtgtcatttccggggtggccacagggtagatccccggtggttttgtgttcaaaataaaaagcctcagtgacccttgca

SEQ ID NO: 669812 - DNA, 1255 bp, Homo sapiens
ggtgacgtggccgctttccagtcattggtcgggtttcggtcggcttcagtgctcggggaggaggcagatgacggtcgcggatgagcattggcaagtggcggcgtgcggtcaggtcggcagagggtgcagtccgcaggttatgcgtcgtcaatgatcccgcggaaacgctacgggtctaagaacacggatcaggggtgctcataccatgggttctctcaaagacacaggtcctgtcccctggcaactgcgtggcagtagcagcagcgacatcgcgcgtgtctgacgtatgaagaggcagtctcaaacagaagaaccggcccgaatcggtctacttgtgaggtgaagccgatgcactgaaggacaagcagtgtaggtggtccttgtgaccaggccaaagatggatgacatcagcagattgattcccgacggtgacacacgtgtccgcatgaaccaggacaagaaagacagacgcagcaaagcccgcccatcgcacacagagccgaaaccgtgactgcatgacataggcccctgagtgcacgaagagtccgagcacgcagacagcacgctacgcgaccgagacacgaaccgtgccacctagtaacagaaccgacacaacaacaccagcagacacagaagtaccaacgccaagcccaagcaatgcacgcaagcccaggacaaaccgaacaacgcagcacacaagaccacacaagcaagaacaaagcagagcaggcagtcaacgaagggccaaacactaccaaaacagcaagagcaacgcgcacgaacaccacagcgcaaaaaacccataggacaagacagaaacaagacaacggacaaccagcagaaagaaagaagcactcgggcatgggaagacgtcgcacagcgacatgaggacaagcacgacgaaacaaccaagcagtcagggcagaagagaaacaaacgaaacaacccagacgaagacgcgaaggaacagcagaaaaagacgagaccagcaggggaaccagaacagagccactagaagaacaacccacacaggcgaggcagacgcgaaggcaacagtgccagtacagcaccccagcgaccaaacataacagccccacacgcataagatcagtgagcgacagtcaagagaacataagaacaaagaaccaagcaacacacccaacgacaaacaaacgacgccactaacacaatggagaagaagaccggaccaaatcgaacacgcacaatagacggaaacatagacacactgcgaagt

SEQ ID NO: 669813 - DNA, 115 bp, Homo sapiens
tgttctattcgcatgcgagcgacggcacgccgttattgcagcacaaatgaacttacccgcgtactgtctaaaagtttggcattgaccgttacatcaacccgacaaaagaaattcg

SEQ ID NO: 669814 - DNA, 367 bp, Homo sapiens
gcaaggatggattaagaacagagagtaagtgaaatagcctggccgcgtgacttaaccggcccggagatgtgcgggtcaatggaccgcttgggtcggataggaccagagtgcttctcagtcaaggcctcagaacagaggagcacctgagtgccttcctggccgcgaaagcaagaacctttggccagaagaggaactgatctctgaagccccaggcgggtggaaagtcagggtttcaaggttattttgaatttaggtctgtgggccttgacggtggctcatgcttgtcatccagtgctttggggggcgagcaggaggctcgcttagccgaggagttccagagcatctggcacatagtagctctgtgtct

SEQ ID NO: 669815 - DNA, 454 bp, Homo sapiens
  misc_feature (10)..(10): n is a, c, g, or t
atcccttttncttggagatgttttcttgggggaaaaaaaatctagccccctgaaacctgttacaatgtttaaatctcccttttttaccttggctgtcataaaatcctcctgtttgagctaaatgtggcccgctgaagttttaaatgcccatatttttcaggctaaggccatggtggacaaagctaactcccctaaaatcctagctgggggtgttggaaaaaacggtacagtgcccctttcaaactccagggttaagtccgtttcccctccccgcccattataatttactacttttctaaagctgctgggtagtttgttttaaagccccaagactggccaaatgtgcccctgagtaaaggtcacccctttcatttgggggctcttttttgccttttaaagaatttttttctgtgaaaaaatgtatttttaataaaaaattttttgtggccaccca

SEQ ID NO: 669816 - DNA, 171 bp, Homo sapiens
gctctaagatctctccccgtacgccaaaaataaatatagggcttgtattgactaattaagtctgtgccgtcgctacagaagccctttcctttttcttaacgacaatttctcatctgtggtgctattgacatcttgggcgtacggggggacgagctcgaatcgatcatggtc

SEQ ID NO: 669817 - DNA, 357 bp, Homo sapiens
aaactctgtcactgacactacaaaataatgtgtactacagtgagtaatatccctgcaactgccatgatccatcccatatctataccctccaccctctctccacctattcacacatgcaatgccaaacaccctcttcttccatacacagaaatgccaggaaagcaagaccctacttgtcgtagcagaatggcaaaaaactgtatctgtcttatacccctatataagagaacccacattaaccacacaggatatgatgcaatataaaaagtaatcaagatttcccatccatcatacacatccttcccatgatccagtaaaatacaagatatccacaagaggctaaaaagcacaacccag

SEQ ID NO: 669818 - DNA, 154 bp, Homo sapiens
tcgcggtgagttgctcgcttgaggccaggagttcgagaccggttccggccaacatggtgaaaccccgtccccactaaataatacaaaaattagctgtgtatggtggctcacgcctacacgacggcagagcggatcacctaagttcagagccagg

SEQ ID NO: 669819 - DNA, 914 bp, Homo sapiens
  misc_feature (570)..(570): n is a, c, g, or t
gggaaaaaattatttggtggggggccccctcctctccctgtggggggaatttttcacgggagggttttggtgcggccacagaaggtgtctattgggggcgccccagggaggagggctcccctccctctcctggtcttgtgcacacagattttgttgtacccccgggtgtcccatgtgtaccgcgcgccctcgccataggtagcaccaggggcgtgtcctctcttaagaagagccccttttttccccgccatattttccgagagagtgttttctctctgccgctctttagaggcacaccccccctctggagagccctcttggttaagtgtttgttgggccccatctatctttttgtgctctaatacccgctcctcggtgttcacacaccccgccgggggcattgtgttacacgggccccaggggttttcgggtttctcgcgctggggagagccctctcccccctccccgtggttggccttccttcccactgccacggcgtttggcgcgcggagttgtatgaccatttttatagggtgttttatatagcgcgaagattccgcggccgaacgnggtttcttccccgatttcccgcacacacgtggtgttttccaaagggtgcccccgtggaacgtgcccaccagtggacgacccctcgcgagagctcctccttataccttgtgagagccctcttttttttatagccgccacaaccaccgagggcacggtctgtgcacactgttgccccccgccccactctttccacgccggcgccggttctaactcgcggggtgttgctgtgttgtgattttggcaacaggaaaaatccccctccccccccatggggggttttcccgagggggtgggccccgcccccccccgagagttccaactgaaaaaaacttatttttttttta

SEQ ID NO: 669820 - DNA, 410 bp, Homo sapiens
ttgttatactttccagaagtatacgttgtgacgatgttcctctgagacaggctcgttttctcaggtctttctacacttcccagattacctgcatgttccatgcttctacagctaggagaccgctcaggaaaacatgccacacgggcataccgaactttattacggggaaaggtcagtttagaattaccgctcctttcgtatgttaattttctggaatttcgtgttcgttaatttgaaagcactaaaagaacagaaggtaagcgtcagatttctgatgaggatgttcacgctatgcatgtcagttgggttcttttcctgcttctacagagcacggtcagcagttagttggatcagccgttgcgactcttgcatatcgtgtgtctaccctgtgggtccatccgagccatctt

SEQ ID NO: 669821 - DNA, 882 bp, Homo sapiens
  misc_feature (84)..(84): n is a, c, g, or t
  misc_feature (238)..(238): n is a, c, g, or t
  misc_feature (266)..(266): n is a, c, g, or t
  misc_feature (284)..(284): n is a, c, g, or t
  misc_feature (287)..(287): n is a, c, g, or t
  misc_feature (289)..(289): n is a, c, g, or t
  misc_feature (342)..(342): n is a, c, g, or t
  misc_feature (353)..(353): n is a, c, g, or t
  misc_feature (358)..(358): n is a, c, g, or t
  misc_feature (378)..(378): n is a, c, g, or t
  misc_feature (383)..(383): n is a, c, g, or t
  misc_feature (400)..(400): n is a, c, g, or t
ggctgtcgccgccgggagacaaagatggctgcgagagtcggcgccttcctcaagaatgcctgggacaaggagccagtgctggtngtgtccttcgtcgtcgggggcctcgaacagtgccgatgacactacccctgaggtatgctccatgatgacccgtacagcatctaaacgtgctcattccatgaccaacccactgctgcctcctccaggccccaggtatctctgtaagttctgcccncattgagcccctacttcaagtactccgntcatgatcaacaaggcangcncntacaactacccagtgcccgtccgtgatgatgggaacatgcccgagtgcccagncacccccagancctcngggcccagcctggagtggtnaaganactgtggcacctccacngacagaggcggcagctcccaggggttcccattgaaacaatgtgagaacctaataataaaccccccagttggtaatgcccaagagagggaaggtctcaatgtgggggagcaaatccaaaagaagcttctcagacgtgctgggcgcggatctgggaaaacacagtggggactaacatacctgcaggggccgctgaccccggtatgaacatgcttagccttcattccctccgcaagaccgtagcgtatcggggtcttgcggcgcccaccaaaaagcacgcggcggatgggctaccgctcggacaccgagagcaggggcggaccgcgaattaccaaggcccacaagccataaatatcacgcgcgcgcggtggtgaccacttttggggggcaaacacgtccccgcggcccgattctttacccccccgctcccaccagtaccacccactctttggggacaccccgagggcaacgaccgttgaagacca

SEQ ID NO: 669822 - DNA, 759 bp, Homo sapiens
  misc_feature (84)..(84): n is a, c, g, or t
  misc_feature (115)..(115): n is a, c, g, or t
  misc_feature (143)..(143): n is a, c, g, or t
  misc_feature (161)..(161): n is a, c, g, or t
  misc_feature (164)..(164): n is a, c, g, or t
  misc_feature (166)..(166): n is a, c, g, or t
  misc_feature (219)..(219): n is a, c, g, or t
  misc_feature (230)..(230): n is a, c, g, or t
  misc_feature (235)..(235): n is a, c, g, or t
  misc_feature (255)..(255): n is a, c, g, or t
  misc_feature (260)..(260): n is a, c, g, or t
  misc_feature (277)..(277): n is a, c, g, or t
ggctgtcgccgccgggagacaaagatggctgcgagagtcggcgccttcctcaagaatgcctgggacaaggagccagtgctggtngtgtccttcgtcgtcgggggcctcgtgcccncattgagcccctacttcaagtactccgntcatgatcaacaaggcangcncntacaactacccagtgcccgtccgtgatgatgggaacatgcccgagtgcccagncacccccagancctcngggcccagcctggagtggtnaaganactgtggcacctccacngacagaggcggcagctcccaggggttcccattgaaacaatgtgagaacctaataataaaccccccagttggtaatgcccaagagagggaaggtctcaatgtgggggagcaaatccaaaagaagcttctcagacgtgctgggcgcggatctgggaaaacacagtggggactaacatacctgcaggggccgctgaccccggtatgaacatgcttagccttcattccctccgcaagaccgtagcgtatcggggtcttgcggcgcccaccaaaaagcacgcggcggatgggctaccgctcggacaccgagagcaggggcggaccgcgaattaccaaggcccacaagccataaatatcacgcgcgcgcggtggtgaccacttttggggggcaaacacgtccccgcggcccgattctttacccccccgctcccaccagtaccacccactctttggggacaccccgagggcaacgaccgttgaagacca

SEQ ID NO: 669823 - DNA, 224 bp, Homo sapiens
tgctgaccacggcgtcgcaggccaaggcagtgctgagcgccgagcagtgcgcgaggaggaggtgcacgccggcctgggcgagttgctgcgctcactcagcaactccacggcgcggcaatgtgacctggaagctgggcagcccgactgtaacggaccccagctcagtgagcttcgctgatgacttcgtgcgcagaggaaagcagcattacaattgcgagcactcc

SEQ ID NO: 669824 - DNA, 819 bp, Homo sapiens
ataagtgatttactgatgatatgtcatatgatgcaaaaaaggttttgtgtcattaactgaaaagtagcagcttctctatccaggatgatgagtcaacaggtttcactaatatttgtcatgctgtacgcatttgtaagatttgtaaatgatgaaattcaaagaaaactttttctattgctaggagcctgccagaacaaaggccaatatataatgttgtgacatcatatctgataaccagaggtctggtatctacactcctggtgccccatcagtggttgtctccataagtcattttgcgttattacaaaaaaaaaaagaaatcctgatgttgacattatagcacactgctttctccacagagatgctgatatcaaaaacttgaagatacagtgaagttctggaataaggttacaaaactgggttaccggtatcaaagacccatttatgcaaagaagggttcaaacaaaaaaaaaacgcccaaaacaaaaaccgggacaggacagcgccattaacaccctccgggaccaatacaggacactccaggggctctccacaaaggaagcgtcctcatacgggaaatgcgaatggaacaggcgactggccagagcctaactataccaacgaagaaccgccacagacttgagcctgaaaggtgacatccgggacaaccgcaacaagcggcgcctaccacgaaacgagccgcccaactcgggaccacacggcgcgaccgtccgacctgggtaacaacccgggccacagctctccgaacaggggtcagggagggaacacagcggtgtagcttaaacgcgagacaaagac

SEQ ID NO: 669825 - DNA, 572 bp, Homo sapiens
gatcatatagcaactcttccaccatgaaaaaggagagaggttgtcctcattggaacaggcacttactcaggatatgggattagcctacctgcatgcaatgcttctcgccaagactaccatttatggactcaaggaatgccttatccactatcacggtattccacacagcattacctttgcccaagcactcactttacaggtaaagaagtgaggcagtgggctcatgctcacggaattcactggtcttaccatattccccatcttcctgaagcagctggatcgatagaatggtgggacggccttttgcggtcgcgattacaacatcaactcggtagcaatactttgccgggccgggtcaccatactccagaagaccgtgtgtgctctgaatcagcgcccaaggtatggtattgtttctcccatagccaggattcacagatccaggattcaaggggtggatgtgaaagtggcaccactcactatgatgcactcagcaaaatgtttgctttctgttcccacgcaatacggttctgatttactagtcatctatactccagagggcagacgctgcta

SEQ ID NO: 669826 - DNA, 349 bp, Homo sapiens
ccaggtggtattcagaccacagggtctcaatgggtgggtgaaccgtttaagctcgttgacctaacagggccgggcctttgaaaaatagaccctggctgcacggatctgcaaagcgcgtgacccagtgcggtttatcggcgcctggcgataaaaaaagctccctttttcagctatttccggtatagtgcgcgccggcctttaaccgggccgcgtataggtagcgcaattccccgaagtcagcttcggatgcacgtccgcacagacggactctaccttgacgaatctttttcattcatacgtatacgcaaatccccgccgacaaatcagacagggagactcttgagtctca

SEQ ID NO: 669827 - DNA, 1161 bp, Homo sapiens
gcctggactgtgtcttggttccagaagctgacgacccggcggacggtgagcgtctctattgactaaaagacagtgtccagtgctccgagctctaggcagtctactggggacctgcactctccgcgccgcacaccgatgcgccaacttctcgtggtcaacgtgtgaaaatcgatccgatcggaaaaacttctgatgggaattagctcaacagtgctccgggggtgacactgttgatgctagagagaagatatggcctgtggtctgcaggcggtgcacagcgcaggcaggtgggaagatcgaaacaggagcgggagacactttcgtacatcaaagatctccaccagcgagcgcaccgatcagcaggattaaccttcacacacgggatgggagagcaaggccagtagggaagacgcagacaagaacctggagtgccatgggaaaggctcacagtacaagagagacgcgaggagcgaaaacgatgcaggaaacagatgcaaaaagcagagcaaacgtggctcgaggcccgaaggcgaagacacagccataccatgaagacgggagcaagaaggcgcacgccggacaaggaacgcaacagactggcgacacgcacaacaagaagacaatgaaaacaaacagaagcagcgcggggaaacgcatcgacataaccaatagaacgccacatgacacccgcggacagacgaaatggacaacggaataggatcgtagacgacaccaagggggaacataagggatccccagaaaaaaagacgaacagcaggggccgccgaacgcggtaaaagacaacccgagcgaggctccggacaggggcaaccaaacacgaacaagggcgacacatagcgacaaagctagaccgccatggagataacagatgggagacgaaaatagaaaccgaaaaccaaaagaaacacaaagaaaaagactcagccaagacccacacgtagaacataaacacaccaaaacgagaaggagaacaagacgacaggcagcacggcagacgaagcggacagaagcggagagatgcaatgcaggacgaacccgaaccagaaagacagaaaaaggagcgaggcggagaacccacaagacccccaagcgcgaggaatcacacaagaaacggaagcaaggaccaagacgaaaccgaaa

SEQ ID NO: 669828 - DNA, 109 bp, Homo sapiens
tgtggagacggggtccactgtgttgcctaggctgatgtagagaccgtttataacgtgggaatgggaaccgctgacgggacaggtgtcctgcatggacttaacttttttt

SEQ ID NO: 669829 - DNA, 87 bp, Homo sapiens
ggagggaaggaaggagagcagaatcttcggaaggtgtttcatgtacctgagggatcctgccattacctccagagtctcccctggtga

SEQ ID NO: 669830 - DNA, 659 bp, Homo sapiens
  misc_feature (16)..(16): n is a, c, g, or t
  misc_feature (83)..(83): n is a, c, g, or t
  misc_feature (87)..(87): n is a, c, g, or t
  misc_feature (93)..(93): n is a, c, g, or t
  misc_feature (97)..(97): n is a, c, g, or t
  misc_feature (101)..(101): n is a, c, g, or t
  misc_feature (152)..(152): n is a, c, g, or t
  misc_feature (155)..(155): n is a, c, g, or t
  misc_feature (161)..(161): n is a, c, g, or t
  misc_feature (169)..(169): n is a, c, g, or t
  misc_feature (196)..(196): n is a, c, g, or t
  misc_feature (200)..(200): n is a, c, g, or t
  misc_feature (229)..(229): n is a, c, g, or t
  misc_feature (315)..(315): n is a, c, g, or t
  misc_feature (325)..(325): n is a, c, g, or t
  misc_feature (356)..(356): n is a, c, g, or t
  misc_feature (376)..(376): n is a, c, g, or t
  misc_feature (478)..(478): n is a, c, g, or t
  misc_feature (501)..(501): n is a, c, g, or t
  misc_feature (507)..(507): n is a, c, g, or t
  misc_feature (513)..(513): n is a, c, g, or t
  misc_feature (519)..(519): n is a, c, g, or t
  misc_feature (548)..(548): n is a, c, g, or t
  misc_feature (564)..(564): n is a, c, g, or t
  misc_feature (597)..(597): n is a, c, g, or t
  misc_feature (656)..(656): n is a, c, g, or t
tttgcgatggtgtgangctacatcctcccccagatggctacgatgtaggagttcgtgagggcggtgaggtaggtgaaggaggnattngccacnactntgtncaccatggtcttggtcaccacctggccaagggcccagggctggggccactncangatctntgtggggncctgcagggctgccggcagcgggggtngctncttcaggatgttgctgacgtcgtagagcnacacgttgccctcctcatccccacagagcacaatccccttatcagggcaggcgctgagcgagaagtaggccaactcggtggacgancattgcagcngcgccaggaccaccactgccaccgtggactngctgccccggcccccccacntcttcctccagctccacaggcagatggtgcccaggccgctccccttggaggccacgatgtcctcattcacaaatgccagctcatccactctccgtccagatncctcggagccctcaaagaagaanaattcntacttnacacancctccttttttgggggtggtgcagccggncgtaccagcagcagcngcagaaatcgcagccggccagcaggcgggcgtncgggcaggaggcgacagggcagaggcgcagggggatagaggtggtgtccagtgtgagcngct

SEQ ID NO: 669831 - DNA, 518 bp, Homo sapiens
tgcctaggtggccccgctagtggtggtgtttattcgtacgggctccgccggcgcggccttcgtcgtccttcgccgctggctagctgtggccttctttccaatccccccccgccggttgcgtcgtgtgatgccccgttccgtgcggctggcgctgggttatggtgtgtggcctggggccctatcgtgctaacgcacgcgctgcctgtccgcgcctccttgggtctgacgccttccgcttccgtgggtggccacacgtaatgcagggcatcccctctcgatcgtgagctcgccgagttccccattcctgtcctattggaatctcggaccgcatacacgtcctctccggcattcgactcttccttcccggtgggactcactgccttggcgctggggaagatgttgtttgcagttacatctcgattgttcggggcctgcgtgtgcgttctcggactcctcctagaagcgatgccatctccttctcctttgcacctttcgaaatgtcggtgtgcggtgatcgg

SEQ ID NO: 669832 - DNA, 499 bp, Homo sapiens
  misc_feature (125)..(127): n is a, c, g, or t
catccagcgcaggggcgcctgctgaggaacatccgaagcttgaggaaaccgcagataagtttttttctctttgaaagatagagattaatacaactacttaaaaaatatagtcaataggtacattnnnaaaatatgaagacttagaagagtagcatgaggaaggaaaagataccccccttctaaaacatgacgggggttgagatgaaatcttttcatggagtataaaatgtatttaaccgaaaatggagagaacggacttcagagccccgtattactaccattagttgggcattgcttttagatttatatgaaggtgccttaaacagcttaacgctcatcctaaaccggccgttatctaaagcactctccattccttttctcattcttatttgcccctttttaaccctcacttgtcccccttctacagcccgcagacttctccacgattcccttgctcccgtcatccaccaatatctctaaatatcgtccaatcttctgc

SEQ ID NO: 669833 - DNA, 192 bp, Homo sapiens
ggacccccgcgccggacccaacactttggaggccgaggcggcggccacctgttttcaggagccaagaccactatggcctggccggtggggcgtaatcccgtctccaccacaaaactacaataattagctgggcgtggtcgtgggcgcctgcaatcccagctagaggcaggagaatcacttgaacctgggagg

SEQ ID NO: 669834 - DNA, 591 bp, Homo sapiens
agcaagaagctggagcgctacctgaagggcgagaaccctttcacctgacagccccggaggaggagaaggagcaggaggaggctgatgggcggtgccctggacgagggggcgcagggcgaagcggcggggatctcggagggcgcagagtggcgtgccggcgcagcctcccgtgccccctaggtagccatgccccgcggggccgttgtctgcctgcacgaaccgcacgccgtccccagaggaggaggaggagggcgccgtgctccttggtcgtgggaaggggcgctgttatcggctctgagattcctgcgggcaagtccctgggtctctctggacgtgtgagtgacgacagaagagagtggctagcgcggggcgccccgtagacccgagctcggggcgggcccggaagtcccgggccggtgggccccggaaagtccttggggaaaaacccaaaaaccctttaaattaaaaaggatttttcccccatttccccaaaagtaataacaaataattataagaacatcggagtagagaactgtgcgactatgggcgtagagaacacatgagatggttggtttgggtttgtgggatgtc

SEQ ID NO: 669835 - DNA, 233 bp, Homo sapiens
attcttcctgtcacttatctaattcggctgttgattcttgtatagtgcttcacaaagttctcgtgctgtgtttttcagctccatcagtgtcatttacgtttttctctaaacatggttcttctagttatgcatttcctagtaacctatagtccaaggttctatagcttccgtcgcattcgggttacgaacatacttcctttatggtcagacagagtatatgtatatatatacca

SEQ ID NO: 669836 - DNA, 183 bp, Homo sapiens
actgatgttactatgcgcagcagcagcaggtacccttccgtgtagcctccacacctactactatcgagcccacgaccactctcggacccttaaaacactacagctacctcagacctagtctacggggcctctccaccagctaggcctactcacgctactccggagaagacctcctttaaccca

SEQ ID NO: 669837 - DNA, 743 bp, Homo sapiens
ctaagtaaaataacactaacaaacaaacccaaccagagaaagacacccacgaaaacaccacaaacaaaaaaaacaaacaacaaacacacaacaaacaacacaaaacacaaaagccaaaccacacccccacaaaaaacaacaaaaaaaaaccataacaaaaaacaaaaaaaaacaaaacaaactaaaccccagaaaagagacaaatatacatagccagccaccacaggacacacaaaaaacccaaatacaataaaaaaccgacagtaaagaatagttttagaacaccccctaccccaaaaaaagctaaaaactacacctagaataagtaaaaaaactaccagatatgtacacaataataatacaacagaaagtaaggcttataacattatactagaacactacaataagctaaagacccaaactagaaatagataaccccactaattagctatagccctaaaacctactaacagttaaatacaacaaaactagctacgccagaacactaacgagccacaagcataaaactcaaaagacctggcgagtacttacatattccctactagaggagaacctaattctaataatacaaaaaaccccagatacaacctcaccacctactagctcagcctatataccggccatcttcagcaaacctgatgaaggctacaagtaagcgcagagtacccacgtaaggagtaggtcaaggtgtgcctgagagagtgaagggtatttctaccaga

SEQ ID NO: 669838 - DNA, 417 bp, Homo sapiens
cccgcagctgaagtcatctgtcctctttccttactttctcacaacacttggtctctttgctcaagggcctagggctctacaatcagcaggtgataaagcaagctgggcctctgtccttccctttagggtggcaatttcccccataccccaggcaggtccagagatgccagtagccaggtactggagtcaaaaacctttgaaatctacttgatgctctattctactgcagctaagctggcactcaaactataagacaaaagtccttcctattcttcccttctctttccacaagcagaagagcttctccccaaggtcatcaccaccccagaaccacagagggtactgcaaggctactgccaatgttcacttcaggctcaagtgctcttcagtcatcttgtggtgaattcttccagacct

SEQ ID NO: 669839 - DNA, 1184 bp, Homo sapiens
cctcccccctagcgaaagaacaagcaaagcaaaaagacaaggacagcactgtagcttgagcagagatcatcattgttttttgtgtgctcactagtacacagggctcagcgccgtgtgttttttacagaccaagtgtcgtttcaacacaggtgtatcccgtaggtgcatccccctccatcagggccctcctcgagagcatacacgcgggtgagatgccctcacagtagggccccaaataacccacccgggtgtctccttggtattggcccccctctgtggtcgtcccagtgtgctccgcacccggttggtggcccctttatgcggcttctgtggtatttcgcacaataaattgtggagaacctccgctccggagtggacagtccaatcctgcaaagcgcgagcggaacttgctgcggaaaataccgtggtgacgaagccgaaagggagctatcagcgggttttacgcccttcagggcacccttgtagtggccccttgggacagcctcccgacctgctgcggattgttctttgaccgccctgtatgacgaggacgtgggtgaaggaggatccttctaccaagtgggagagtagccaggacccccctgagaccacaagggcaagggtgtggcccctaaatcttgtcacagccttctttcaaatggctccctgaacccgaggaggagtctctgacccaccactgagggctggtggggcccggggacctggagccccctggacacacagatggcccggctaaccccctggactccacaggggggcggcaacaacggccggttggcccattgggtcgcctcgtaagttgtagaatgttgttctgaaactaataaatgtggctcgaaagaggccggattggcttggggctgcctgggcccccctccacggatgcccccacggtgtccctctcctccccctggggcaccacgagaatatatttaataatataaagttcttgaaaatttggtgtgtcttggggtggggaaggggcaccaacgcctgcccctggggtccttttttttattttttgaaaatcaccttctcgggactgccgtcctcgctgctgggggcatattgccccaacgcccctgtaccaccccctgctgttgcctgggcccgggggaagggggggcccggtgcctgtaattattaaacatgaattccaatta

SEQ ID NO: 669840 - DNA, 133 bp, Homo sapiens
gccgcgggacacggacgtatgacacggaactacctctgacgtttcttctacattactgtgttacctgcctttgaactacggctggacctctccttttttacacacggtgtaacgcaccctttctcacggacca

SEQ ID NO: 669841 - DNA, 195 bp, Homo sapiens
cggcatggggtggggcctacaggtagaaagagcaacctgtggacttttgggaagtttttgagatgtgcgcgaagcacattgcatggagcattttgcctggagcatgttggttgccaatggaggaagggaggaagagtgaacagggcacagaggggccaccctgcaaagcttccttcctcacccacccccaggtcc

SEQ ID NO: 669842 - DNA, 458 bp, Homo sapiens
ctctataggatcagccagttatgtgaagctaaaatataaaattgattatgaatcagatattcagttgaacttccttttttcctaggatatactgcttttggtggtgtggtaacagcaaaaattaaaatgttttcatttaccatatagttatgtcactaaagtccttaatcagactctgtatcaaagtgtactggccacgaaaatgttaaagttgcattgtacgaattatttattttaattctgtacatatttttgaatttatatgtgtatatatctgtcactaataaaaataaagtatccttataatattgaagattataaaatgtcacttcctataatcatggcaaagagcattactcaaagttatagattacagtatgaaaatctgtaactacttcataaggtgtgatttccatgcaataactgcacgtttaaagtgtaccattttgttttgatat

SEQ ID NO: 669843 - DNA, 140 bp, Homo sapiens
gctcggaccttttgctgagaagcacctccaaaagggttggctttgaggctgtgccaaatgcagctttcttatactgtttatcatgccacttctggtctcgtcgggaagccgcggcgtactggctagcaggagatccgtct

SEQ ID NO: 669844 - DNA, 490 bp, Homo sapiens
tgagctcgattcccgaactcttcctgcgggtgcccaggccagctgaaccctggccaggcccagctgttggcttgcagcagccttcactctttggccttcttataatccctagtgaaggggttggcttttatttatttatgtatttatttatttatttattttgggatgactccgttgcccaggctggatatgcagtggcatgatctcggctcactgcaacctccacctcccgggttcaagcaattctcgtgcctcagcctcctgagtagctgggactacagacatgcaccaccacacccggctaatttctgtatttttagtagagatggggtttcaccatattggccaggctgatctcaaactcctgacatcaggtgatccgcccgccccggcctcccaaagtactggaattacaggcatgggccaccatgtctcctggccacctcgggagatttctaaacaaactaagacgcatgcttcattctcaggg

SEQ ID NO: 669845 - DNA, 485 bp, Homo sapiens
  misc_feature (149)..(149): n is a, c, g, or t
cagaagcatctttaagtattcaggtgtttttgagcttatggaggaggatacaggttttccagaattttgatttttgcttgaaaattcaaattttatattgtcagtttttcttagagtcttagtcgtttctgagaaaatgtctgccagtnttcaagtcctaataaccatggtttagatgttagtctttcaagtaaaaatggtattccgtaataaaagtgattagtttagctctcaacaaggtaagttatgctgcagaagtgctttatgagtacttcccttttacactgaatattaaaaaagaaatgtactcaacgagtaagatgaaattaatcattgttttctgcttctctgtcacgggactggcccctttttaaaaagtttcaagtggctggtgaggaagaatgcagtggccacagtattacttgtctggaccttatgctaagaccccaagcagctttttctaccattgattttgcaaccatcat

SEQ ID NO: 669846 - DNA, 124 bp, Homo sapiens
  misc_feature (51)..(51): n is a, c, g, or t
agaaaaaaagcaggggaagcacggggttaacggactgactgtagtcgcctncgacctgcggtcattttaggtcccgggaaaacggaaacccggaaagtcgcagcgagtattgagcgaggagcgg

SEQ ID NO: 669847 - DNA, 543 bp, Homo sapiens
  misc_feature (66)..(66): n is a, c, g, or t
agcccagtgtgtaaatgcatgggcccaggttgtgccagtgaggcctcatttacagaagcagtcagnggcgagatttgatcctgtgggctacagtttgccgaccccatgcatgaggcagtaaaaggccaagagcctggtataaattcataacgagaaaccaaggctctgaatcagccccgaagtgtaagcagcagcataatgatctggagcagcatcttggcgttattaaattcaacccattccgatggctgcgtcagcatctattgctctgtttattgtttttccttaagcaagcagttccatttctagaaatttatctcaagcacataaatctagagggggcacatcggtgttatttatgacgggaaaactgggaacagacacagccctaggctggaagaggcacagagtgatgtacagcatgggccagtggttaggagcagactcaggagccaggggacacggctccaattctagctctgtgaacacactggccgtgtgccaccctcagcaagttacttaatctctctctcttagggaaaa

SEQ ID NO: 669848 - DNA, 222 bp, Homo sapiens
gcgcgcgacctagaggaccccgtgctgcagaagtaatgtggttttgccatttaaaagtaatgttgaaaaccgcaattacttgtgcatcagtctaataataaacattgagatggaagtcagcagttgtgtaacttcgatgaataaataaagcattcaaaaggggaaaaaaaaaaacactccaccaggtttgaggtccctcatacatgggggcatcgataaaca

SEQ ID NO: 669849 - DNA, 209 bp, Homo sapiens
accaggtaactaacatcagtagactcgtctctatcaaaaattaaaaatagttgggcatggtggcacacaccggtagtcccagctactcaggaggctgaggcaggagaattgcttggagccgggagacggaggttgcagtgagctgagatcacgccattgcactccagcctaggcaacagagcaagagcgaaactccgtctcgttaggtc

SEQ ID NO: 669850 - DNA, 164 bp, Homo sapiens
gtggctctgcgaggcgagatgctgtgaggctctccttcttccccgtcgaccacaggccggccaaagattggctccagctctttgacgtcttgcgggggctgccactgtacacttgtgaaagggacgaactggcgtcttggggggtgcccgtcttgcgggggctg

SEQ ID NO: 669851 - DNA, 157 bp, Homo sapiens
gatcctcgtgaattgcaaacaggcaaaccagttaggagctgctgctggataaaccaggtgagcaatgagaaagctgggtctagtgcactggcgtgtgaaagagatcgtgatggaatttgggaagacacggaactgagtgtggaggctcaaggaggtg

SEQ ID NO: 669852 - DNA, 604 bp, Homo sapiens
agaccagttctctaccctatgaatgcatactaatctaacttactgtctctatggactgcctattctggtcctttcttataaatggaacgacgcaacatgcagcccattgttttctggctgctttcactgagcataatattttcaagattcacccatgttgtaacacatatcagtgcttcattcctttttatggctgaataatactccattgcatggacagaccatatttgtcttatctgttcatcactgacagacatttgggtttgttccattttttggctgtcatgaataatgctgtcagcatgtatgtatgtacgcggtttccttagtttttatctaatgtcattttcctgttccaggatccccttcaagataccacattatgtttagctgtcatgtttctaggctcccttggctgtgacatttctcaggttttcattgtttttactgaccttgacagttttgagttctggtcaagtatttcatgaaaactccctcaattatggtttatctgatgttttcctcatgattaagctgggttatgtatttctgggaggaagaccagagaggtaaagtgccaccgtcatcacatcatgtcaggagt

SEQ ID NO: 669853 - DNA, 563 bp, Homo sapiens
gccagggactcgctattgagagaggggaggtccctggcgaccacagtctgggtttctaggaacccttcctcacagaatgcacactctgtaccactggataaagcctccacttctcttccaggtgaacctgaggttgaggcatcctcacagctttcccaggcaccgccccagccccaccacatggcccagccccaacatttcactccagcctggccccagtcccagcccccacctttggctgagatccagacccaggcccacctctcaccccctgtcccaagcctggggtgctcttctccaccccagattaggggctgtggggcatcttaccctacatcccaggagaggacacagtctgtcatccccactggaaaggagtatcttgaatggcccttgaagaagcgaccaaagtggaagagggttttgccctctctcctcaaaaagtctcaggctggtctgagccaagccactggccaccttcccaagagaggccggcctcctggagccccaagtcagccccattctttcccgggtggcaccagccctgagctccagagcatggt

SEQ ID NO: 669854 - DNA, 1536 bp, Homo sapiens
  misc_feature (924)..(924): n is a, c, g, or t
tacacagcgtagatacatactagagtacgcggggggagtaaacctgtagcagcagtgtcaactaatagtactagcagccctctttcgttgggtataagcacgtcgtctgtggggagcacacccccatatttagaaaaagagcgggttctctttttcatcaaatttctcgggcgagagaattctagtagtaccctgcgggtgatccctctcttttctactactgcgaagtagacatatgcctctccgatcccaccttggtgtttagtgcagctccttctatataccctgggtggtggtagcattgccagtccgacccagttgtgtgtgttgtaaaagagggggtgcgctccaatgccttcttctgtggggttttttttctttctcccagacgagaaggagggtgcctctgtgcccccgcccccttcttcctgaccacctgtcctcaacgattgggggccacgacttccgacaaataagcgtcctctgcccccgccccccccattgtgtttgtgggggtaaacacaagatggggagaaaaccaacgcggcggccttttggtcgaatttgagaacagggtgctgtaatatacgcaccactcgtgttgggaataaatgttgttgaggagcgcacaacatttgcccccaacggggggaccacattttttcccaccaagaagatcctgtgggtagaattgcgtctccccctaatggctccttcattgacaaaacagcacccacgaggggtgtatcccgcggggcctttctcttgtgttgtgcccccccgcacacacgttgtgtgcacgactgatccaacgaccttgtggaggataaggcgaaaaacccccctcgtgggggacaaccactacatctctttgtccgggtggtgcagcaactccaacatggccccccacaacgccctgagccnacactgctgtgtcgcctctgccgcacaggtgtttctcgttggtagacgtgtcacacgcagagagatggtgtttcttctctgggtcggcgacttctctccggcgattagaaatagaccactctcataggggggcgccccacacacaggccgtgtgtgtctttacaatcaggtttgtgtgacacaaagcaccaagactggcgccctcgcctcgtgtcctcgttagacttctcggggcccaggtgctacaccgtgggcgccccacacttacaccagaaactgtgcttctcgctggaccacactgtgccttttggcccaaacacccagggccttccagcggcacccaagacttttgcgttaaaaagcgcatcatgagtgcgtgtctgtgggacagacctctctgagagatgtctccctgcttctgaggggcatcactttggagcccactgagagaacgcgacttgtgccacacccacattgcgagacctcagtcccttccaaagtgcactggtcacttggggcaattgtcgggaaacaccttctggggataaactgaggggactaaatgaaatatttaattcttgttaagatttaactgacttttctggcccttta

SEQ ID NO: 669855 - DNA, 380 bp, Homo sapiens
attgctctgactcagttgtatctgattgctcttacggatcttcgtctgctcttcggctttcttcatgtccttctccactcgtgaccgtcacatttcgttgtacccctagtatggttcgcacgtgtgatgtagacacaatccacctcccacagctgtcgcagcctactttccaaccttctggaatatgatacctgggcacacattatggagctccataatgtgtgcccactccataattgcccagacgttcgaggctgtagtacgcttcaagaggccactgctactctatcttgggtgaggcaagaccctttcaagctgtatgctgcttgcttgcttgtcgtggtcattagaaaccctgcattacttcaatcatgaattct

SEQ ID NO: 669856 - DNA, 1170 bp, Homo sapiens
  misc_feature (619)..(619): n is a, c, g, or t
ggcaagccgcgggccgggtcagtgacgctgggccgcccagtgggagtccacgcggggcgtcgggggcatccgtgatatgccgaagcgctacagaatccaggctagcccggtgctggagaagcgtgtgggcgtcgtggagtcatcttgtctggggcgatcgccaagagtcctctttgctggttcgtacttcgcccgaggcactagctagcgcgcattcacggcacgttgtagtgggcactcgcaggctgctcgtggatcagtcgctctatcagccgagttggctactaacttccatcgttcaaataggcttacttctattgtgcacgcatcgagcgtcacctattgtgagattgcggtaccatcgaatgtcatgtgctactcacgaggcgcgaggtctcctagacaccgaggtatcgacacaggaaccaactcttcttgtctatgtgcgagacatggtccacacgcgcaggccgctctactggaccacctggcattgcaatgcgagacagtgaggtcagactcactccgtgggcaccaatacaatgtagcgcgaccgctgcgtctctcggcatgtgttgagacgcagctcgcgagacgccagcgattgcgcgcatgcggntcaagcgcggtggactggccctaatgacactttgcgtcgtgtactatagcgaccttctcactctgttgcgccggtttcggcattaggtgcgtcagaagtcgtgtcaatccttgcttccagcaatattgcccttacaacatgggctgcctggcctagaggtcgtaataagacttggttgccgtgttccctggggccttggcatcgacttgtacattcccccggagatgcccatagtggcaagcgggcagtctaaagtctgtctattgggttctcgacatggaaacgtgggctcctctaatgcgtaggccaacctcagacttcatgctaatttgggactccgtccttgtaggcacctggggcccgtggacttccttgtcgtttgagctcccatcccagcgcgtacgccctttcaaagtggcgcagttgacgtctgggacctggaagtgcgaataccatggtgcggcatagcccgcgcccatatggacacccctgatgcccggaagagctcaccgggacataggccctggtgccctggagcaatcggccttggc

SEQ ID NO: 669857 - DNA, 210 bp, Homo sapiens
ggatctggaacgtctccctaacaaactcccatatcacaagcttccctccctgctctgcacacttctatgacactgaatctagtgggttagatattatacaacagtgttgtaaaattatctagtactacatatcctaagtagcaaaattgccttctactaggtcaaggtcaagcttattacactagtatgtttccctagactacgcacaac

SEQ ID NO: 669858 - DNA, 421 bp, Homo sapiens
gatgacccgccttggacgtgtttctttaacctcatccatataatagggccgtgggatggttgtagaggtaaagcaggatgatggtgttttaagaccagagcttgggaccagggctcctacacctaattttctctcctggtagctgaacaaaggtctaaattagcttaacaaaagaaccaggctgccgtcagccagagttctgaaggccatgctttcagtttcccttgttgacaattgctctccagttcctatgaaagcacagagccttagggggcctggccccagaacacaaccatattaggctagagcgtgaccagcaggggctctgtctctgctctgtttacacgactgccgaactttcaaaacacaacctctttactatttatacacaacaacaaaacaaaaaaacacaacaacaaac

SEQ ID NO: 669859 - DNA, 355 bp, Homo sapiens
  misc_feature (28)..(28): n is a, c, g, or t
  misc_feature (65)..(65): n is a, c, g, or t
  misc_feature (151)..(151): n is a, c, g, or t
  misc_feature (177)..(177): n is a, c, g, or t
  misc_feature (197)..(197): n is a, c, g, or t
  misc_feature (202)..(202): n is a, c, g, or t
  misc_feature (211)..(211): n is a, c, g, or t
  misc_feature (273)..(273): n is a, c, g, or t
  misc_feature (292)..(292): n is a, c, g, or t
  misc_feature (326)..(326): n is a, c, g, or t
tgtttaaatggaaaactgggtcccccanctgtgccttccaccaaaaaaccttcccaatggcccanttttggagaacctaaccctaacctagtcatgcctaacccaggaaatcccactggggaggaggttcccttttgaaacaaaatgctgntcagttagtaaccaagttactttgantgcaaaagcagctgtgtttnctganaagtactgnacaaatgtgtgtaattttctgtgccagacttatgactttttttcaagcactgtaatgtgggntggatggttagtaacaatnatatattagggtttctgtttaaaccctttcaggnctgaactgtatctccttttgttaattttc

SEQ ID NO: 669860 - DNA, 240 bp, Homo sapiens
tatctagaggatccggtctacccacaggtatgtatgccatgaaacatgtcatcatcccgcggatagaaggtactctggctaatatcatcacagagctggatgagagagagcgagaagagtcaataggtaaagaacatacaagagaagaaaaagattctaaaggaaaaatctgagaaggactgggagcaaaggagagcagctgggagaggtgcgggagcctggtgggccggtggttaagag

SEQ ID NO: 669861 - DNA, 293 bp, Homo sapiens
gggaggaggatgtcaggcagtcattgagtggcggtcatcggggggatatcctgcaaagagagaaacgatgatctgaatgaagcaggcgttggtgaggggcatgatcgagctaagtgggcatatgccgtggggcaagtgaattcattccactcccatgtatccaaacttacgatagtggagatcattcatgctaggatctcgatgtctgcctccaaagaggaagcctctatgtccgacagttgcgtcaggcatgggcagcacagaggtgaaggtgctttaccagtagttatagg

SEQ ID NO: 669862 - DNA, 191 bp, Homo sapiens
tttcgacggtgtctggggcatgagctagaggatggtggagcaggtagagacgctcccttccttagaatgtaccttgttgacaaggacagcgctgtgagcatcacaacttactgtgaggtatctgggattgagcctggtcaggaaacaggtagaccagcaggttccattgtatgcctgggacctggaccttg

SEQ ID NO: 669863 - DNA, 167 bp, Homo sapiens
ggtagaaaattgtcttgaccagctgagcttccatgatcggagggcaggcctcactaggagcaggagcatgtatactcagatgctgacagctgaggcttaatacatgatcataaacccaagagaacagtggggaggttaggacaccactggcgagggtaggacgcctg

SEQ ID NO: 669864 - DNA, 138 bp, Homo sapiens
tagtgtcaggggtaaactgcatggcccgtacaatcgcaaggagtctctttcctctctctctctctcatatgcacacacacacacacacacacacacacacatatacgcccaggtgagcataggaaaagggtatacgcc

SEQ ID NO: 669865 - DNA, 134 bp, Homo sapiens
tgcacccagacctgctatgatcctcttctaaggaaaggctatgtgcgaggttcaaatgtacaatgatggaatttcggtagaacacgctcatcatatcctaaacactcctaacatttaaatagcattgtgctccg

SEQ ID NO: 669866 - DNA, 617 bp, Homo sapiens
tttcggaaaagttcatcttttatatacttttttacactttctgtaataaaaaagaagcctcccagtactattgggccctcttttaaacgaccttcgaaacaactcccctctgtcttctccctgttcccgttctttctcccacgtctccgtttcctccgtctcgttccgccttactatggctctctcggccccccgtgcgcgcccctctggccctagcccctaccccttcctgtcctcgtcccaggtctccatgtgggtttctgggtggccacctgtctgccggctatctccctgtgccgtcccccgggccccttgcacgtttgtttttatggcccctctcccgccatcccctcttccatcgtgcctggtcgcccggtgtctcttccttttcctcacttcacgccttccgttttcttgggattttttcactgcttgctccgctccctttcgctcctatgaccgtccctctcctcttgcgttttggtcggtcacttctgcttcccgccacctctgcgtactacccgtccctatttgttttgccccgaggccctcgggtgggctctgcttccctctattgcctctgctcttttcgttttccttccgtgaccccgtcgccc

SEQ ID NO: 669867 - DNA, 114 bp, Homo sapiens
gcacaagggcattcctacaccctatatccccatacgtagttattatcgaaaccatcagcctacatcattccatgcaatagctcctggctgtacgcctaaccgctaacattactg

SEQ ID NO: 669868 - DNA, 883 bp, Homo sapiens
  misc_feature (876)..(876): n is a, c, g, or t
gcggtggctcacacctgtaattccaacacttgggaggccgaggcaggcagatcacaaagtcaagagatggagaccatcctggccaacatagtgaaactgtctctactaaaaatacaaaaattagctgggtgtagtggcacgcacctgtagtcccagctactcgggaggctgaggcaggagaatcacttgaacccgggagacagagattgcggtgagccgagatggtgccaccactgcactccagcctgtgacagagcaagactctgtctcaaaaaaaaaaaattttaaacaaaaattgggtttagaccaattcaactcaggtgaattttactgagcaatttggaaccggagtgaattctcctgagccaattttaattcctgtgatcatgccatacagtgtggcagttaacccaaaacccaattgggtgtctcattcctctgaagttatttccatcggatcatttctgtgaatttggcaccgatgattcatccatacatggttctcttatctgtgtcaaattcagcaggaccagttccctcagatagctccttggcttcagggggccctggacccatctcagggcacatacattcttgcttctgtacctggacttatgctcctctgcgaaggcctgcatcgtggtcacctgcctccttcacttttctcaggtatcccttgcggccatccattaattcggttccctctccccaattctgtacccctacggaattttttttttgggggaggtcgcttccccggcaggggatctgtccaaaaaagggttccccaggggaagaagccggggatcagttgagagtgagcgtggcctctctttgtgtcgctttctgtgccgagcggcggtccgctcctcccgnggggaac

SEQ ID NO: 669869 - DNA, 354 bp, Homo sapiens
tataaatgatgttgtatgtagtttgatagtaatagtattaactctgtagattactttgggcagtaaggcaattttaacaatactgatttttccaatccatgagtgtacaatgtttttccatgtgtttgtatcatctgtgatttctttcagcagtattttatagttctccttgtagagatctttcacctccttcattaggttcattcctagatatttcattttttgtgtgcctattgtaattggggattgtgttcttgatttgactctcagcttggaactttagtgtataggaaatgctgctgatttttgtgcattgattttgtatcccggaaactttactaaagtcatttatca

SEQ ID NO: 669870 - DNA, 412 bp, Homo sapiens
  misc_feature (23)..(24): n is a, c, g, or t
ctggctaagagtgaagaaaggannaacttttgagagaaagaaggaattgggagaattgttagagaataggcaagtattcattagaggaacacggctaagattgctaggcaaaattggattgctcacttggattagagcatgaaacaagttgacagcaaagagcataagcttcctttccccaccacagccccctccccacccatagcaactcgaaagcagcaaaagtttttgaagagtggcataaactggtatgtctttttagcaaaaagtaaaaaagaaacaaaacaaatagacccaaagaattctctgatggtccaggtaagagatgatggggaagcatatacaaagggatgtagtggcagtagaaatgatgaggaggagcctgggcaacatgacaaaacttcgtctctac

SEQ ID NO: 669871 - DNA, 1120 bp, Homo sapiens
gctggaggaagcagctgcgggcttgaccggctgtcggcccgccgcctccgctgcctgctatcggccccaatccggtccctctaggcgccggcctgacccggtctggcttgttcggggctcacgcggctgctgatggccgacagctcccgatggacatcatattatgtagactacttagggtgacatctgcctgagcagatctccacatgaattacacgccagggggtctgacagcacctgacgacggactatgacccaaattgtgacggacgagtgaagaatgaatgaagacagactgacgcctgggcggcacatggaggactatacacgtcgcggacgtagccagcggatgttggcgcagcagtggggctgatgcctattcgatccttgacggaagctagccatgttcactctgcttgatcgctacgaccctcccgtctgcgggcgtgccctccagatcgacgccacattgaccacgcttactctctcctgtctcctacgacggtactctcgaatccacgcactgctacaggctctctactttcggtcacacttgcccacgtgggccgatctgtccatgacactactgaggaccaggaatttgcgaaaggttccaagatgttacgtagctcacaacattgcatttggtaagagctggcctctgaccgtacccgccgcgtacagtccccatacaagaaccccatttgctttccgcacctcaatttcccctattcgacccccatcgacccaccatgtgtgcaagcggggttgatagtcgcacggagtatggtgacgcacaccgtgacaaaccccttcacctcctccctcccatcggcccctaggaccgcgcacccccatcttctctactgcaccggaccccccttcccatcgcgcggacggccacggcactatgcgctctcaacgtgcttcttccgggtccaaccggacacgggcggtcgagcccgttagagcccaaccttttgcacttgggcactccatcactgactttggccgcacccttcccaacgatcactcgcgcacggagcgagctcgatggagcggtcgtcccctatcggcgttacgccacctagcatgacaatctcgcgcgccaccagcgacg

SEQ ID NO: 669872 - DNA, 147 bp, Homo sapiens
cgccggcccgatgtcgatcctgtactatgattggactgactgagtatgggcctgtgaatatagattgcaacataacacaagaaatgctaaaaaaaaaaaccttaagctacatacatgtttactatcacaactccccagacattccaa

SEQ ID NO: 669873 - DNA, 817 bp, Homo sapiens
aagcagtggtatcaacgcagagtgcccattacggccgggggagctttaatttattaatgcaaacagtacctaacaaacccacaggtcctagactaccaaacctgccattaaataatttcaggttggggcgacctcggagcagaacccgaagcctccgagcatgtacatgctaacgacttcaccagtcaaagcgaactagtatactcaattgagtccaatagacttgagccaacggaacaagttaccctagggataacagtcgcaatcctattctagagtccatatcaacaatgagggtttacgacctcgattgttggatcatggactatcccgatggtgcacgtccgctacttaagaggttcgttctgttcaaccgattaatacgtcctacgtgatctgagttcagtaccggagtaatccaggtcggtttctatctacttcaaattcctccctgtacgaaaggacaagagaaataaggcctacttcttcaaatgcgccttcccccgtagaatgatatcgatctcaacttagtcattatacccacgatccagccaaggaaaaaactaaaaaaaaaggacataagaacctatgtgtttggcacgagacattggccccccgggaaaaagcgtgttactaaaacaccattgtgttgtagtcgaccggtggcacccataatgtgtcacgagcaaacggctgcgacaacacttggtttcccaaagaagagatctcgggtccaaacaacaaacgcgttgcagaattctccacaagataaagaaccgcccgagaggtcaccggaagtgtcttagaaccacccctg

SEQ ID NO: 669874 - DNA, 1577 bp, Homo sapiens
  misc_feature (927)..(927): n is a, c, g, or t
  misc_feature (1005)..(1005): n is a, c, g, or t
  misc_feature (1011)..(1011): n is a, c, g, or t
  misc_feature (1015)..(1015): n is a, c, g, or t
  misc_feature (1146)..(1146): n is a, c, g, or t
  misc_feature (1187)..(1187): n is a, c, g, or t
  misc_feature (1242)..(1242): n is a, c, g, or t
  misc_feature (1430)..(1430): n is a, c, g, or t
actcttcgcccttgctgtttgttctgttattagtagctttgtgtgatcgtatgtttgattgtattcgtctcttgttgtgttgcttatgtcgcttgcatccgttcctagttgttttcgttgttttcgcgttgtgtctgtgttgtgcgtgtgtcgcgtctttgcgtgctgttctgtctgcttgctcggttcgtctttttttcttgttgtcgcgtcgtgcgtagtgtggtgatgactactctttgaccccgcgtgtttccgggagacccccaccacgccggtgttgccgcacctaaatgaacctccgggcatattacaccctctcggatatttttatctattgcccccgcggtgcgagttaatactgtgttacacacaagggagacacagcttttcgtcgcaattcggtcccatttgttagagggacacacataatataggacacaagatggtgtacaccaaaaaaacccagcgctgtggtacacccgggctcccggagttttcccgccggaatagtttcgttcggaacaccatccacggcggtcccgcacatggacgcaagaaagaacatatgttgttggggtgaaaacgacctgttttcccctcctgaatttccaaagcccaagcagcacaccctaacattctttgccctggggtgagaaaatgcaaccatgaggcaacagagttgtttggggaggaattggaaagaaatttcacagagaacgtgtttgttgtcaaaaatagtctccggagggttctcgcacggaagtgcacctcccccgttttttaaagagttttgattgaaacacgtggttaagccgttgtatctatcaacatagccccccacccccaacggccttatatatgagaggcgttgccccccaggaataagcccaagtgtataaccaaggtggcgccaacccacgcgtngtgtccccacaacactggtgtgtagaaagaaatttgagtctacaggggagccccatttgagagaagagagaaagcctntgtggncttntcccccgcagatgagaaaaaatatgttcttgataacactcgcgaaaaaagctctataaatatattatatggagaaaaaaaaacacactctgcccgacaatataatataaaatatataatataaaataaagngagaaaaggagaaactcttgagacacctcttatatggtatncccgaggccacaaatgcacacggttctatgccacaaaacactataatggctatgntcctcatgagtttatctctatatgtgaggttttgtaagaaccacacaaaaatcaccacacaaaaatatggtataaaatattataaaaaccacaaattataatgttttatatatgaacccctgggagaaaagaaattttcacgcccaagtacacacaaatttataagcacttcctctttctttaatttntgtaattcctttaactgtggagatatgctcacgaaatgtcacgtttctgcttttatagtaaccacgagaattgagtaactgaggcaagggaaacgtaatttggattataaaatttttgctttaattaaaattcctttaaccagtgga

SEQ ID NO: 669875 - DNA, 430 bp, Homo sapiens
  misc_feature (1)..(1): n is a, c, g, or t
ntttcttgttgaggtataaaatgtaaacaccttaaaatgtcttccccttatatgatcactgtgtttgagtaattttgctggattttttaaacacttactttcaaaaaccaagttaatacctctgacatggaaattaaagcttcagcccagtgactctaagctaaggctaatatggagcctgcaaaaggaggttattaaaggcccagttaggttctttttggggagcctcccctgcagatgtcccagcctgctcacaccagccatgaagaagcctttatactgagaagctacagagcccaggaaagctggggacccacaggcagatgcagttaaagttaagatggaaggggattaggaaggtcttactggagatgaagttgttactgttttaaggcagtttctagacttacaaaataaaacaaagttatgt

SEQ ID NO: 669876 - DNA, 300 bp, Homo sapiens
tgctgtgcactggtgggatagtggaaactctagcctaaaaaaaaaaaaatgaacaaaacaaaaacaaaaacacacacacacacgcacccaaagcatctttcatattttgtcatctattctattgcaaactatggctttaaaataatttcaataagcctatatacttattttgttcacccattttttcatttttacaattaaaaatgaaaaggcaacaacaattgaccaaaaactataactgctaaagttggttattggtgtagggcggcaacttctttattcccacaggtgcaaacgcgg

SEQ ID NO: 669877 - DNA, 348 bp, Homo sapiens
aaaaatttggctccctttaataaaaaataattttaaaatagcttaaaccatgaaagtatacgttctgccatgaaagtataaatataaccggggaagtataagtattaccaatgaaagtgtaagtactgccagtggtaccaggggtccttgctccgagagcttccaagatggtggggggccacttacaaaatggaggcaggccacttccaagatggtggcaagcctcctgttctctgacctggggttcttggcctcacggattcgaaggaatggaatcttgagccgtgcggcgagtgttatagctctattacaagtcgagggtcacggaagagaaccgaggaacccaga

SEQ ID NO: 669878 - DNA, 637 bp, Homo sapiens
ccatcccgggttcagtcgtgattttccctgtggatatgctgtgtgaaccgtcgtgtgagtgtggtatgcctggatcaccgatggaatttgttataagcatccatgtgacaacttgcaggaccactaccacgtgggaccttgtgttgtttcttcccatatttggaagataaatttatgtgtagacttttttgtaagataccgggtaataactacaaatttattgagaatggtcttgccatgactcgtattcccagatgcttaagcaagccttgctgctaccaaatatttctatttttagaaagggtgttttatggacccatgcccccagttgtccagtcagagcccttggtgtttttccattgtttaaaatgtcaacctgtgaaatgggccattatttatgttttttttttgccttcctgataattgtatgtattgtataaagaacgtctgtaccttgggttataaccacctagtatatttaaacttacaggcttatttgtaatgtaaaccccccttttaatgtactgtaattaacctggttataatacgtaccatccttccctcatcccatcacaccactttttttgtgtgtgataaactgattttggtttgccataaaacccctgaaaaatattta

SEQ ID NO: 669879 - DNA, 650 bp, Homo sapiens
  misc_feature (69)..(69): n is a, c, g, or t
  misc_feature (92)..(92): n is a, c, g, or t
  misc_feature (104)..(104): n is a, c, g, or t
  misc_feature (106)..(106): n is a, c, g, or t
  misc_feature (110)..(110): n is a, c, g, or t
  misc_feature (116)..(116): n is a, c, g, or t
  misc_feature (118)..(118): n is a, c, g, or t
  misc_feature (122)..(122): n is a, c, g, or t
  misc_feature (136)..(136): n is a, c, g, or t
  misc_feature (139)..(139): n is a, c, g, or t
  misc_feature (148)..(148): n is a, c, g, or t
  misc_feature (167)..(167): n is a, c, g, or t
  misc_feature (170)..(170): n is a, c, g, or t
  misc_feature (176)..(176): n is a, c, g, or t
  misc_feature (183)..(183): n is a, c, g, or t
  misc_feature (185)..(185): n is a, c, g, or t
  misc_feature (188)..(188): n is a, c, g, or t
  misc_feature (195)..(195): n is a, c, g, or t
  misc_feature (205)..(205): n is a, c, g, or t
  misc_feature (221)..(221): n is a, c, g, or t
  misc_feature (223)..(223): n is a, c, g, or t
  misc_feature (272)..(272): n is a, c, g, or t
  misc_feature (274)..(274): n is a, c, g, or t
  misc_feature (295)..(295): n is a, c, g, or t
  misc_feature (304)..(304): n is a, c, g, or t
  misc_feature (307)..(307): n is a, c, g, or t
  misc_feature (311)..(311): n is a, c, g, or t
  misc_feature (336)..(336): n is a, c, g, or t
  misc_feature (350)..(350): n is a, c, g, or t
  misc_feature (360)..(360): n is a, c, g, or t
  misc_feature (362)..(362): n is a, c, g, or t
  misc_feature (385)..(385): n is a, c, g, or t
  misc_feature (392)..(392): n is a, c, g, or t
  misc_feature (404)..(404): n is a, c, g, or t
  misc_feature (435)..(435): n is a, c, g, or t
  misc_feature (446)..(446): n is a, c, g, or t
  misc_feature (457)..(457): n is a, c, g, or t
  misc_feature (464)..(464): n is a, c, g, or t
  misc_feature (473)..(473): n is a, c, g, or t
  misc_feature (490)..(491): n is a, c, g, or t
  misc_feature (502)..(502): n is a, c, g, or t
  misc_feature (506)..(506): n is a, c, g, or t
  misc_feature (508)..(508): n is a, c, g, or t
  misc_feature (541)..(542): n is a, c, g, or t
  misc_feature (549)..(549): n is a, c, g, or t
  misc_feature (554)..(555): n is a, c, g, or t
  misc_feature (560)..(560): n is a, c, g, or t
  misc_feature (572)..(573): n is a, c, g, or t
  misc_feature (622)..(622): n is a, c, g, or t
ggaattcccgggatcgcaggtcgagacagcaggcggctcaagtggacagccgggatggcagagcgtgcngcgctggaggagctggtgaaacntcagggagagcncntgcnaggccncnagcngcagaaggccagcnccnagctgatcnaggaggaggtggcgaaacnccngaaacngaaggcncngcngggtccngatgaaagcnaacagaaatttgtgcncnaaaccccccagggcacaagagactatagtccccggcagatggcagttcncnagaaggtgtttgacgtaatcntcccttgcntcnagcnccccggtgcagaagtcattgatacncccgtatttgaacnaaaggaaacncngatgggaaagtatggggaagacncccagcntatctatgaccngaaggacccgggcggggagctcccgtccccnccctatgaccnccctgttcccnttgctcngtatttggnaatgaataaactgaccnncattaaacgcnaccncntagcaaaggtatatcggcgggataacccccccnngaccccnggccnntaccnggaattctaccnntgtgattttgacattgctgggaactttgatcccccgatcccccatgcanagtgccccaagatcatgtgcgagatccc

SEQ ID NO: 669880 - DNA, 538 bp, Homo sapiens
aaaaaaaagcaccataagctgccttcccttctttttctttattctctgtcttccttcaaaaaaatgtaagctccatgaatagggtgtagtctgttttgtatactgctccctttatcctctggaacagcacctggcacagagtaggtgctcactaaatatgtgttgaattaatggatgaataggtataaaacatgtatgcaaagatactttgttttggaattctaggactaggaaagcactaagaatgctaccaccatcttttcctcctcagccattcattgctcctgtacctcctattcttagtatgttcatttttcagtgctattgatagctcacatgtttacattttagttgaaagattgtctctttcatgagcccaaattacaattcataagaatatcttttctttcatatttcctctgtgttggtaataaactttacttcagtttttcttttctcatatcagggaaaagattgtttagctatttataatgaattttaaataattgacttatgtatgataactgtatgagattta

SEQ ID NO: 669881 - DNA, 905 bp, Homo sapiens
gcctgtgaaaaagggaaataccaaaaccattggtacacgtgatgccttgcaataggtgctcccttaccaatttcagaagcttccctgcaagtagatatcgagagagcacattttccattagtagcctgtgtaataccccatatcacctctgctctgaggctgggtcctgcagcctgtggtagtcttggggaagaggtagccgcctgaaagcagagccttaagagaagcaatgtcggccctgacgcatggggtccccagtgggtggcctcaagaaccttcagaacctcataacccgagaaggcaaacagaatggtttcaggaagaggggtataggacgctcaaccacccctagggcttcgggaaataagatctgccccctgacgtggcacatttgtcaattgccccctcctaaagtggacagcgcaccaacactggacaagtgttacaccaacgactcacaggggtggtggtccaacagaggggctttagcacaggcagagggtgttaccctctatttctcatgcacaacatcgacggcgcatgacttcaagacagaaggaattccaaaccagacgcctaggagtagtggtgccacaagtgccggtaaatccatagcaggtgtggaaagcaaaagacttgaatggtatcagttggaagacgcaagggaagtttgggaagaatccagcactgtgtaaaaatggcaaaaagccctattctttacgagagaaatacgaaaaatgaagggcgggggaagagggggtttagaagagtggaaatgccggagtatggggaggcagagaaaggtggatcacgtgaggtcagggggttggaaacagctggcaaatgtgggacccaattttataaaattaaaaaacatacgatatgggggggggctagatacagaa

SEQ ID NO: 669882 - DNA, 847 bp, Homo sapiens
gatccatccagccctcgccggtcgccaccacgaccgatcccgccatggcgacggcgccgccgcagctcctcctcctcgccctgctctcctgcctgagcctcgcctctgccgccccgtcgctccggccgctcccacgcgccgacgacgacggcctcctcgcgcggaccaccggcagctcctcgtcgccttcggagcggggcgtgggcgcgcggacgtgctggtacacggtgcagatcaagacgagctgctcgtccccggcgcgcacgtcggacgcgatcagcctggcgttcggtgacgtgtaccgcgacgaggtgtacgcggcgcggctgggcggcgccgccggcgcgttcgaccggtgcgccaccgacacgttcaagatcggcgggccctgcgggtacggcgtctgctacctctacctccgccgcgccggccgcaccgggtggacgcccgagtgggtgagggtgtacgagcccaccgcccccagcgcgccctccaaccttccgctacggcgacccgctccccaacaacgtctggtacggcttcaaccgctgcccgcgcctcgcctcctcctcctcgtcatcgtctccttcctccgctgctggtgctgcacaggcgatgtagccattggtcggagcaggtcgtgggcactcgtgtatgtctgcacggtcgggggatcgaggtactacattgttggattcatttctgctgtgccgtgagtgattgcgtcgtgcggcctgtattagtcccgatccgagatggccttgctattatgggtacccacgagattaaaaccctcttcgggcttttttgggaacaccccaacacacaaccaacaaacacaaagccg

SEQ ID NO: 669883 - DNA, 394 bp, Homo sapiens
tagaggatcaccggaagcaactgcaacaaaaaagcacaaattatgctctcactctacatcagttgatagctgcattcaaagaggcgggacttctgttttcatcctcccagaagtctgtggcactggaacagttcttcaaagagagagaacagacacgcttccataatggtactaatttacagctgcaggcttcctttgcgggccacttttagaaataagtgccctgttagtaatgggcacagaacttgccagagagaggtatgaagtgcggtaaaggaggtcgcaaagggaagagaagaggtgaggaacagtatgatgagtggaaaacacagtgagatcagcagtgcactgaaatgagaaatgtagggagattccatatttatgtattctgttc

SEQ ID NO: 669884 - DNA, 252 bp, Homo sapiens
ccccatgctgacatgatcaaaatgccgaatgctcgacgcagttatcggttaccacaggctgttgaactcgataaggttaatgccctgcatgcggctggaaaaactcggtttgggtccgaggtacagaacgtcgcgggacgttgtgtaggaaatgcttaaggaacgcaacatgtctactcgtgacgcagggggaatatggtttgttgtcatgtgcagacctgagcgtgattgaagagttagttccacgcacgg

SEQ ID NO: 669885 - DNA, 103 bp, Homo sapiens
tgatttctgtcgtcctgtctctttttttctttccctaaccttctttcagccctcccctccctgtcttctttacccttgtctttcgagcgagtgaggagttggg

SEQ ID NO: 669886 - DNA, 1200 bp, Homo sapiens
gggatgtggtcaacttctagcgtgtcacaggctgcagactcccagtagtgtgtgcaagcagaggcgctgctccgatgtagtgacattatttcagtatacccttcaagccataagatgatattgtgttcaacttttctgctggaggctaaggcactgttattcctcaggcctccctagatgttcccagagacctagtgaacttctgggccccattggtaggtttatgaggctctccgttggaacttttgagccaaggttgaatgcaatgtctgggactctgtgtagacctctcggggtctagttcagtacaaattctgggaactcctagggaagttcgtagagatccccatgtggagaggcagagtgctctagcctcaccaggagacctcgtgagaggcgctacgaggagacatgatgtgggccgtgcttgaccagtctatccgtaggagatgaagcaggaggccgtcgggtgtgattggggctgaggtaatatcgggaggaacgatacctctgtggccatggaggtggcgtcgaccggctctactatagaggagacgagcttgctagataaggttctcgaagctcatcgcgcgtggagaagagtagctccacgcaggtgtgtccccccttccggtggcctacaaggaaaccatgtttatctccaaggggaaaaaaaaggaaattcaacttacatacaagacatagagagacagggaggtggcgtgcgcgcccgttcagaacagacgaaagcctcacccccgagagggtggcaccgagagagggctaggggcggggtgacctcacccgtgtttccaagggcggcaaagcggaagtgatgggacccgccggaacaagagacgtgacagtgcgggaaactcccaaatacaagtggcataagcgcggacaacagggggcactcgcgccgcacgttttatcacccaggaaaaggcttgctggggcagccaagctgggggcgacaccagcaaactggggcccaaacccctggggggggaaaaccctttgcaggggaagaacagcgggacaacccccctctgaacgtgcaacacgggggggcgggggtgggtgacaccaacaacacagaggtggggggcaaacacaacagaatgtatccacctctcacgacagagggaagacattcaaacaagggggtcctcctaagagggggccgacacataatac

SEQ ID NO: 669887 - DNA, 195 bp, Homo sapiens
gtaagagagaaccagtgcagcatacataggaggtagcggagggacaccgacagaagagccctcgttcccaaagaaaggtagtgtaggggggcatctatggaacagtcacctaagaggcaacagcaccagcaaggcctaccgtacctgcctagggtcccatagggtaaccgagctacgacatatcgtaatacatag

SEQ ID NO: 669888 - DNA, 304 bp, Homo sapiens
gccaggtcacgtgtgcactatatacttcgtcgacgcgtctgtacattacgcggtcgctgacttgcgacgatacctatggcgccagctgcaggcggccgccgtatgcatcctaggcctattaatattccggagtatacgtatgccggctaacgttaacaaccggtacctctagaactatagctagcatgcgcaaatttaaagcgctgatatcgatcgcgcgcagatctgtcatgatgatcattgcaattggatccatatatagggcccgggttataattacctcaggtcgacgtcccatggccat

SEQ ID NO: 669889 - DNA, 370 bp, Homo sapiens
atgacaggagttcaaccagtgcgtggggcatccgtaatccccgaccatgatcaacaacagcatgaacagtacaaccccatatcatggaaatcagagaaaaaaactttcccatcacgtggttacattcaaactttaacttccttagtaccatgctgcagatttcagcactgttacggtctggcaagaatgcccaaccctctggtgtctgatcatgtatctagcaacattgcagaatgaagaaaagacagccccggtctcagcccatggactagttcatacagtgacgcaggttcctgtcttttcacccttcctgctcagcaactaaaagatcaaggactaaaatcaaggaagactgggcagttcaaacact

SEQ ID NO: 669890 - DNA, 559 bp, Homo sapiens
tatgggcagaacaaactctgcaccgaaagaaagagatgccttgaaaatgtgtccatacttaagatgtttgccgaagtagcaagagcggagggtgactgtgtgagcaggagcgagatggcgccagctcctgcgggggaggtcctactgggcgctccaccctgtacaagaatggcaggctttatggcagctgccataggccccagggtcctcaggactctgcctctgcaccagtgctggtttcccgactaacttcaatctggagagatggtaagttatctaaccggctcttcttttggcgagactgctctttctcctttatcagagccccccatgccctttgcagctcagagtcttcttcctcagcgccaggcgccctgtgatccactttcgtcgtattctcttctttggtcttgggtgcagatcctaggcgactccataaattacctgatttcttctcccgagtatcggcgtagcgtcctttactatccttgcttgggacacctcgcctattatgcacatcagaggagtcgtctctccgaacggtggggtactactagaa

SEQ ID NO: 669891 - DNA, 1573 bp, Homo sapiens
tttatggatcgccaccgggagggctacgcggcggctgcagccatgggtgctgggcctgcgggggcgcggggggtgcgcgaggacctgcggggcggggcgggagagaaggctgccgggaccggccctagacactgagccgcggtgggatccccaccggctctgcgaggccctgcgagcgccagggaggcgccacgagggagccgggcagccgcgggccacttcaggggggcccgcctcgccgcccgggcggtcgagagatccttgggggcacatctcggggtgcggtgacccgcccggcgcatttcgggggtcggggcgcaattgccaggggacatctggagcccggccctgcttctgtcgggctccagggtacccctggatggctgcgctgtgccctcgccggccgcccgggcgccgcagcggctgagttcgccgggatcgccgggccgccgcccttgccacccgctgcatgctcggcgcccgggtcgcggcccacctggacgcactgggccccctggtcccctacgtgccgccgccgctgctgccctctatgttctacgtgggcctgttcttcgtcaatgtgctgatcctgtactacgccttcctcatggagtacatcgtcctcaacgtgggcctcgtcttcctgcccgaggacatggaccaggcgctcgtggacctcggcgtgctctccgaccccggctcgggcctttacgatgctgactcggagctcgacgtctttgatgcgtacttggagtagggtctcgactgctgttcccctcttccctacacgatccggaacccatgccctggaccagccgccagatcatgccgccgagctggttgggggcaccatctggacggggatggttccccaggaggagaccctcccctgcctccgaggcctacctgctcccctcaaaagcttcgtgccaacagagaggttcctgtttgaacccaggagagtggaagagagattgggactgagtgctgaggttgggaaggcacctgctcccacagaagggggaacgcaagaggcatcccaagacctcatctgcctgcagtgtcaaatcgatggcctggccttggcttctgattatttgcagctgcgatggatgtttacaggaacccagccagagtttgcctccctgcacttcatcccggagcgcacctgcttcccccacttcaccttcggagaggacacttcaaactgcggacacacgcaaaagcgactcccagctccgtttgatgtgagttgagccttcaggccagctgggtttagcccgaggctggtcttagatgcagcgactgtttcaggggtgactcagaagaaaaagaagctgaggaagctgttggggggctgagggtgggattctcgctccttcatttcaggttactcgttcttcagcaagttggcaaaacagacatcatgctggtgagtgccacgttactcccctggctggaaatgcttttctgaaagtatgagtgttgtgcctacttaattctgataaacctgtctaagcaatacttaggaggcttacttctttggattaaaaaaaaatgtatgcaactccaa

SEQ ID NO: 669892 - DNA, 2018 bp, Homo sapiens
tttatggatcgccaccgggagggctacgcggcggctgcagccatgggtgctgggcctgcgggggcgcggggggtgcgcgaggacctgcggggcggggcgggagagaaggctgccgggaccggccctagacactgagccgcggtgggatccccaccggctctgcgaggccctgcgagcgccagggaggcgccacgagggagccgggcagccgcgggccacttcaggggggcccgcctcgccgcccgggcggtcgagagatccttgggggcacatctcggggtgcggtgacccgcccggcgcatttcgggggtcggggcgcaattgccaggggacatctggagcccggccctgcttctgtcgggctccagggtacccctggatggctgcgctgtgccctcgccggccgcccgggcgccgcagcggctgagttcgccgggatcgccgggccgccgcccttgccacccgctgcatgctcggcgcccgggtcgcggcccacctggacgcactgggccccctggtcccctacgtgccgccgccgctgctgccctctatgttctacgtgggcctgttcttcgtcaatgtgctgatcctgtactacgccttcctcatggagtacatcgtcctcaacgtgggcctcgtcttcctgcccgaggacatggaccaggcgctcgtggacctcggcgtgctctccgaccccggctcgggcctttacgatgctgactcggagctcgacgtctttgatgcgtacttggagtagggtctcgactgctgttcccctcttccctacacgatccggaacccatgccctggaccagccgccagatcatgccgccgagctggttgggggcaccatctggacggggatggttccccaggaggagaccctcccctgcctccgaggcctacctgctcccctcaaaagcttcgtgccaacagagaggttcctgtttgaacccaggagagtggaagagagattgggactgagtgctgaggttgggaaggcacctgctcccacagaagggggaacgcaagaggcatcccaagacctcatctgcctgcagtgtcaaatcgatggcctggccttggcttctgattatttgcagctgcgatggatgtttacaggaacccagccagagtttgcctccctgcacttcatcccggagcgcacctgcttcccccacttcaccttcggagaggacacttcaaactgcggacacacgcaaaagcgactcccagctccgtttgatgtgagttgagccttcaggccagctgggtttagcccgaggctggtcttagatgcagcgactgtttcaggggtgactcagaagaaaaagaagctgaggaagctgttggggggctgagggtgggattctcgctccttcatttcaggttactcgttcttcagcaagttggcaaaacagacatcatgctggtgagtgccacgttactcccctggctggaaatgcttttctgaaagtatgagtgttgtgcctacttaattctgataaacctgtctaagcaatacttaggaggcttacttctttggattaaaaaaaaatgtatgcaactccaaaaaaaaaaaaaaaacaaaaaaaaaaaaaactttgtgtgggcgcgcgccccggcgcccctggaaaaagtttctcaaacccacgtgcgttggggcgcgcgcgcgcggcgccccccgtgaggtaaggggcaccagtgggcccaaaacggtggtcccgaagagaaaaccgcggggtcccaggacacagagcgggcggggatttccccacccaatataaaaagcgccgcggggggaaacaccgcgaagcgggttctgtgaaaccaaccccaagaggggggcatccgagaggaccaaataagggggaactcaatcaaccagagggacgtccagcgggaagctcgaataataaaaattaagcgcccccagcggggtagaaaacaaaaacacacgcataaccatcatatacaacactagaaagcacgtacacatcagcactacatcacacagg

SEQ ID NO: 669893 - DNA, 757 bp, Homo sapiens
gacagcccggctcctgtgggttcggcgaacatcgcgcggcggccatgggggcgcggctgggcctggcgtggccgggcccgaggctggctctgagtgcctggggctggtgtgccggctgcgtggcccgcgccctacgaacgcctgggtgcgtgtggctccgcgagatccagtccacgctccgcgagcggcggccggagcgcgccctggcaagactgctgcgccttccttgcgcccagtgacctgggccttgagaggacccgtccttcctgatatcctctacagagatgtggccttccttcaacccggatcgaccccatctcccatgacctgctatgtgaacctggcccgggactgcaagtgcccaaagaagctgcccagaaccccatgctgacagcacctgcgagatgtcctgccatgagcatcgacacagccccaggatgtgtggctgtgaccagccagcggacccagactcctagtcaccagtgagtccccaacaaaaccagtggtatccgctctgggcctgcaagctctgaatgcccaggtatctgcacagtcggaccctaggactctgcggcctaggcgagggcatcaaaggaaacagacaggacattggaagatgattgtgtagtgcatgcactgcatacactgggggtggataacagaagggactggataaacggatgaagtggagcatagatcaggatggcaagaaatggtggggccagggcaacatcagaaaacaacagtgaggatgagc

SEQ ID NO: 669894 - DNA, 313 bp, Homo sapiens
atgaggagtagtcagcgtgatgccaaaacgcgtcttcttaatccaattctaattctgaatgtttcgtgtgggcttaataccatgtctattcatatatagcctcgatgatgacagagttacaaagagctacactccagacacattcgtccaaatttttcagcagacgcactctgggtcgatgacctgaggtcggctctgcgatccatacgtggccgcaccccctcagcacgtgctgtgtcgcatgggtcaccgaacagtgtactctgttcctgacatatcggtataaaacaataaacttttaatggtaaaaaaa

SEQ ID NO: 669895 - DNA, 208 bp, Homo sapiens
ggatagagaagttaagagatgtaacataggacacacagcttacaatgtgatgcagcctggatacatatgactccagatatgtagctaatttgagcagataataagaggaggaaaaggcacaaacgcttatatgcggggaagggtgggcagggaagggaggaaagaagagattttgcttctaagggcagggaaagttggaaagattttg

SEQ ID NO: 669896 - DNA, 200 bp, Homo sapiens
tctggacgtggacatgcgaaaagatctgtacgccaacacagtgctgactggcggtaccaccatgtaccctggccttgccgacaggatgcagaaggagatcactgcgctggcacccagcacaatgaagatcaagatcattgctcctcctgagcgcaggtactccgtgtggatcggctgctccatgctggcctggctgctca

SEQ ID NO: 669897 - DNA, 1741 bp, Homo sapiens
tttatggatcgccaccgggagggctacgcggcggctgcagccatgggtgctgggcctgcgggggcgcggggggtgcgcgaggacctgcggggcggggcgggagagaaggctgccgggaccggccctagacactgagccgcggtgggatccccaccggctctgcgaggccctgcgagcgccagggaggcgccacgagggagccgggcagccgcgggccacttcaggggggcccgcctcgccgcccgggcggtcgagagatccttgggggcacatctcggggtgcggtgacccgcccggcgcatttcgggggtcggggcgcaattgccaggggacatctggagcccggccctgcttctgtcgggctccagggtacccctggatggctgcgctgtgccctcgccggccgcccgggcgccgcagcggctgagttcgccgggatcgccgggccgccgcccttgccacccgctgcatgctcggcgcccgggtcgcggcccacctggacgcactgggccccctggtcccctacgtgccgccgccgctgctgccctctatgttctacgtgggcctgttcttcgtcaatgtgctgatcctgtactacgccttcctcatggagtacatcgtcctcaacgtgggcctcgtcttcctgcccgaggacatggaccaggcgctcgtggacctcggcgtgctctccgaccccggctcgggcctttacgatgctgactcggagctcgacgtctttgatgcgtacttggagtagggtctcgactgctgttcccctcttccctacacgatccggaacccatgccctggaccagccgccagatcatgccgccgagctggttgggggcaccatctggacggggatggttccccaggaggagaccctcccctgcctccgaggcctacctgctcccctcaaaagcttcgtgccaacagagaggttcctgtttgaacccaggagagtggaagagagattgggactgagtgctgaggttgggaaggcacctgctcccacagaagggggaacgcaagaggcatcccaagacctcatctgcctgcagtgtcaaatcgatggcctggccttggcttctgattatttgcagctgcgatggatgtttacaggaacccagccagagtttgcctccctgcacttcatcccggagcgcacctgcttcccccacttcaccttcggagaggacacttcaaactgcggacacacgcaaaagcgactcccagctccgtttgatgtgagttgagccttcaggccagctgggtttagcccgaggctggtcttagatgcagcgactgtttcaggggtgactcagaagaaaaagaagctgaggaagctgttggggggctgagggtgggattctcgctccttcatttcaggttactcgttcttcagcaagttggcaaaacagacatcatgctggtgagtgccacgttactcccctggctggaaatgcttttctgaaagtatgagtgttgtgcctacttaattctgataaacctgtctaagcaatacttaggaggcttacttctttggattaaaaaaaaatgtatgcaactccaacccctggggccctgcctttttttttaactttgagattcgggaaaggagttctaggcagaaccttgtggctgacaaacagcagaagatccagtggggttgagagagtctgccccagtcgggctggcgtgaaagtcccaggctggccccctgcccctaggggatcctcta

SEQ ID NO: 669898 - DNA, 1445 bp, Homo sapiens
tttatggatcgccaccgggagggctacgcggcggctgcagccatgggtgctgggcctgcgggggcgcggggggtgcgcgaggacctgcggggcggggcgggagagaaggctgccgggaccggccctagacactgagccgcggtgggatccccaccggctctgcgaggccctgcgagcgccagggaggcgccacgagggagccgggcagccgcgggccacttcaggggggcccgcctcgccgcccgggcggtcgagagatccttgggggcacatctcggggtgcggtgacccgcccggcgcatttcgggggtcggggcgcaattgccaggggacatctggagcccggccctgcttctgtcgggctccagggtacccctggatggctgcgctgtgccctcgccggccgcccgggcgccgcagcggctgagttcgccgggatcgccgggccgccgcccttgccacccgctgcatgctcggcgcccgggtcgcggcccacctggacgcactgggccccctggtcccctacgtgccgccgccgctgctgccctctatgttctacgtgggcctgttcttcgtcaatgtgctgatcctgtactacgccttcctcatggagtacatcgtcctcaacgtgggcctcgtcttcctgcccgaggacatggaccaggcgctcgtggacctcggcgtgctctccgaccccggctcgggcctttacgatgctgactcggagctcgacgtctttgatgcgtacttggagtagggtctcgactgctgttcccctcttccctacacgatccggaacccatgccctggaccagccgccagatcatgccgccgagctggttgggggcaccatctggacggggatggttccccaggaggagaccctcccctgcctccgaggcctacctgctcccctcaaaagcttcgtgccaacagagaggttcctgtttgaacccaggagagtggaagagagattgggactgagtgctgaggttgggaaggcacctgctcccacagaagggggaacgcaagaggcatcccaagacctcatctgcctgcagtgtcaaatcgatggcctggccttggcttctgattatttgcagctgcgatggatgtttacaggaacccagccagagtttgcctccctgcacttcatcccggagcgcacctgcttcccccacttcaccttcggagaggacacttcaaactgcggacacacgcaaaagcgactcccagctccgtttgatgtgagttgagccttcaggccagctgggtttagcccgaggctggtcttagatgcagcgactgtttcaggggtgactcagaagaaaaagaagctgaggaagctgttggggggctgagggtgggattctcgctccttcatttcaggttactcgttcctccgctaattggctgccctcacataatactcgtgatcctcttac

SEQ ID NO: 669899 - DNA, 1876 bp, Homo sapiens
tttatggatcgccaccgggagggctacgcggcggctgcagccatgggtgctgggcctgcgggggcgcggggggtgcgcgaggacctgcggggcggggcgggagagaaggctgccgggaccggccctagacactgagccgcggtgggatccccaccggctctgcgaggccctgcgagcgccagggaggcgccacgagggagccgggcagccgcgggccacttcaggggggcccgcctcgccgcccgggcggtcgagagatccttgggggcacatctcggggtgcggtgacccgcccggcgcatttcgggggtcggggcgcaattgccaggggacatctggagcccggccctgcttctgtcgggctccagggtacccctggatggctgcgctgtgccctcgccggccgcccgggcgccgcagcggctgagttcgccgggatcgccgggccgccgcccttgccacccgctgcatgctcggcgcccgggtcgcggcccacctggacgcactgggccccctggtcccctacgtgccgccgccgctgctgccctctatgttctacgtgggcctgttcttcgtcaatgtgctgatcctgtactacgccttcctcatggagtacatcgtcctcaacgtgggcctcgtcttcctgcccgaggacatggaccaggcgctcgtggacctcggcgtgctctccgaccccggctcgggcctttacgatgctgactcggagctcgacgtctttgatgcgtacttggagtagggtctcgactgctgttcccctcttccctacacgatccggaacccatgccctggaccagccgccagatcatgccgccgagctggttgggggcaccatctggacggggatggttccccaggaggagaccctcccctgcctccgaggcctacctgctcccctcaaaagcttcgtgccaacagagaggttcctgtttgaacccaggagagtggaagagagattgggactgagtgctgaggttgggaaggcacctgctcccacagaagggggaacgcaagaggcatcccaagacctcatctgcctgcagtgtcaaatcgatggcctggccttggcttctgattatttgcagctgcgatggatgtttacaggaacccagccagagtttgcctccctgcacttcatcccggagcgcacctgcttcccccacttcaccttcggagaggacacttcaaactgcggacacacgcaaaagcgactcccagctccgtttgatgttactcgttcttcagcaagttggcaaaacagacatcatgctggtgagtgccacgttactcccctggctggaaatgcttttctgaaagtatgagtgttgtgcctacttaattctgataaacctgtctaagcaatacttaggaggcttacttctttggattaaaaaaaaatgtatgcaactccaaaaaaaaaaaaaaaacaaaaaaaaaaaaaactttgtgtgggcgcgcgccccggcgcccctggaaaaagtttctcaaacccacgtgcgttggggcgcgcgcgcgcggcgccccccgtgaggtaaggggcaccagtgggcccaaaacggtggtcccgaagagaaaaccgcggggtcccaggacacagagcgggcggggatttccccacccaatataaaaagcgccgcggggggaaacaccgcgaagcgggttctgtgaaaccaaccccaagaggggggcatccgagaggaccaaataagggggaactcaatcaaccagagggacgtccagcgggaagctcgaataataaaaattaagcgcccccagcggggtagaaaacaaaaacacacgcataaccatcatatacaacactagaaagcacgtacacatcagcactacatcacacagg

SEQ ID NO: 669900 - DNA, 492 bp, Homo sapiens
cggtttatgctataattttctttctgtgtacctttaaaactctggtagaggtgtttaacttcttaatgtctaagtggcaaaaatttactcaagcaaaaaaattttctgatagccattttatgtcctattattaccccagtattggaacgcacaaatttttggctaagatattgagtctcttaaataaactggagcctctagagagaattcaaaaacagtaacagtttagaagttaagaatagtaacatttaaaaagaagattattattatttttttctttcagcaaatatgagtatcagaaaccacactttgaaaaataaacatattgggggatacatacatgcacacacatatgccttttaaaatatatttcctttttaaaacccgtctttgaatcaagtggatgtaatgtgctacttttagaatggaaaatgcatttactggcacgtctctgttcaaatttattttccatgttttctttaataagaccaa

SEQ ID NO: 669901 - DNA, 827 bp, Homo sapiens
acaatcacaagagtagtggttcaaatactctcgtaagtattatgggtaattatgctgtcttaatgcagcctattgagagttgggttaaaaatcagtaatcagtacttgattacatcactgaactatgaatatggagacatcctcattgacaaatgagagggcacgtctaatcaggtctagtatagcatatcgaagcagtaggtgctaactatgggatgttttcgattaccttttgttttcaccttcttgacataatgctatttaaaggcttgaatttttcccttttatataattttcaccttctactttcaaagatgttgtagtatgctatgtgtgggtcattgcgaagagagtgcattgtcctatcattcctaaacctggtctgctttctacattcatggtatggagaaccatggtgagttcgttttgtacaggtattatcctgatggttgcttgcttaatgcatgtagaggctattttcgccattcgccttttcgtttctcgacctgttttgtaaaccctataattatgaagcgattgcttgaggaaaataacagtataaaccatagaatagaatagactgaccaaagatggtgtcacaggttatctcttttttaactaggttataaaatgagtgtatttctgaaccacttggcagacgagattcacaacagttaaatgttcatatctgaagtcaaggaagctaagaaccatgttcgctttccggtactacatgcattagccaaaaggtagtaagctcgggcgcccctgaggtatacttaactctcgaaaattcgctgtgcggaggaacaagcttcaagggaata

SEQ ID NO: 669902 - DNA, 701 bp, Homo sapiens
  misc_feature (695)..(696): n is a, c, g, or t
tttttttaaaaaaaaaaaaaaagaggggggggggggggggaaaaaaacccccccccccccccggtggggggggatataaaacaccccccccccgcggtttttttttaaaaaaaaaaaaaaaaaatttttttttttttttttgggggggacgttttttttttttttttttctccccaaaaaaaaagaagggggggtttttttttttttttttggggggaaaaaaaaaagggggtttcgccgcaacccccccccccctcttctttttttttttttgaggggggcgggagtattattttttctccaccccggggggggggggcccccctctttttttttaaaaaataaagaggggcccccaaagagggtgttttttttaaaaaaaaggtttttttggggacgcccttttttattttttgtgtgcgccacatttattttttttttctgcggcggaagggaagggaagaaaatttttttttccccccttttttttgtggggtttattttagcccaaaacccccggaggggaccctttttgggtgttaaaaaaaagaaatttttggccccgggttcaaggcgtttttggggtgggttcccctccccgggttaattaacccaaagggtgggttaaattttgtttttcaaaaaagaaataaaatatgaataggttctgtggctgttgactgtcattattcagnnagatt

SEQ ID NO: 669903 - DNA, 173 bp, Homo sapiens
actacagatgcacagaaacaagtaaggaaatggaagtgaaaccccgtacggtgactgcagaccgcaagtcctgtgctaccagatcacagaacttatatttccaccatcttaccaatgtggcaccctttgcccagaaaaacgccaggactgtatcgagggaatggacatcagaa

SEQ ID NO: 669904 - DNA, 498 bp, Homo sapiens
acttgaacctgggaggtggaggctgcagtgagccgagatcatgccactgcactccagcctggaaaagagcaaaactccatctcaaaaaaaaaaaaaatttcccaggtgaaacgggaaattttccttttgacgcccccggggggcctttgcaacgggggtgccttggtttacttcagcccacaacttctcaacccctttgcagcgaggggggagcatgtgcagcgttgacccaggggtcgcagagacaccagggcacaaggacgacaagggcggtactacgatttcacacctgtgttaccttgggcaacgggtgtcaacaaactttgtggaagcgtacttcaatggccgccacaaaaacgagtgcatggggagtccggggaagctacaagtttctctaatttacattagggacataattatacggggtgttactttataactatgctttaaactctacttttgtgtttatgaacacttccgtgtgtttacccaaaaaaa

SEQ ID NO: 669905 - DNA, 296 bp, Homo sapiens
  misc_feature (182)..(182): n is a, c, g, or t
ctggtgatcagaggatccgtgtcatccccttgtagggtctcagctcttctctaactcataacatcctcatcgtgctcgtcatcatcggcttcttcttcttccaactcagggcacttcttcctcctctggtaattttaataactgggtcttcactcccatctgcatagtctgtgtctgtccgncccacagacatccgagtcatcctcctccgcatcagcagaatccacattgtcactttcttcagccagtgggcaaacacaacaaaactctaacccctcggaaacttgtcaaattcc

SEQ ID NO: 669906 - DNA, 685 bp, Homo sapiens
atcctagtgtgaatgccaattcaaatactccagatcatatggggggtttccagaataccaatgttgaaaactcagaaggcccaagtttcagccaacaagggtcccttcaccaaatcctgaaaaccctggggcacccagaatgcggccaacagtcaatccaagaccaaattggggtcagcaaacaacatgactctagcatcccgaagtaaaaacagtggggatctctcacaaccaagtatcctgccttaaatcgccccaaacaattaacagaaaggtaaaaccaaacataagactggacacaatttaagactgaaaataaaataactaatgggacaacacaatggaagtccgagagaaaagtcctaaggaaggggtgacaaggacatgctttaagcaaaagacgttatttcatttcctaaggtctctgatactatggggaatggggcataagggacacttaactggtcaacaagagacaaatggggctgaccggattttcccaagggacccaagtgaaaaacttgccggataacccaacttgggtggacttaacttggcccaaagggggggccctggcaagggggggctgtgaaccaattgtccggcaagcaaaaaggggggggataaggggggacaccattggttcccttccgaaggttttcccaagggagggcctcgccttgtt

SEQ ID NO: 669907 - DNA, 214 bp, Homo sapiens
cagcagccgaccgtgagaattagacatatataatatagatcaacagctgatcaatgtggtcatctgtatcgttggtgtaaggccatcaacctgtataaaaagcataaatcttcagtaatcattgcgactcttgtctctgtgccacgtgtaataggcaatggtaaagatcgcattcaaaagataaaaatgtgctcgagactagttctcctggtcc

SEQ ID NO: 669908 - DNA, 288 bp, Homo sapiens
tgtccctcctgcctccctggcaggtccttctaggggccctctcctggctggctttccaggggctttccttcccctctattcagggtccttctcgggtccacaccccggtccagtcgttccctaggacttggcagagagctgtcctctcagccaagatctcagcaaaatcggcaaaggaataagcatgcagagtgaagtccagaggcaaccagacaaaagcatacagaatcctctcacagtggggtcacacaccccaagattaactccaacaacaataagatgtaacaa

SEQ ID NO: 669909 - DNA, 741 bp, Homo sapiens
  misc_feature (741)..(741): n is a, c, g, or t
gcggcggctagcgagcggctggccggctccggctggctcctcctcctcctttggtggcgtgcggcggccctgggacctgagacccggccccggctcccctctccgccacacccttgcgcccgccaacgccattgcctcgctgttaatcatgaggtcatcctgatagtggaggcaggttaggtagaaagtgaagagtgagacgatagagcgataatgcctaggagacaaatgaaggtgaatagtcggtaggagagagagaacacatgtaaaatgatgaaaaataataaaaaaaacaaaaatgaaaaagacaagagagaaacaaacagtaaaaggacgacccgaaagaaaaagcaaaaggcggtacgagggcaccccgagatacgagggcaggacaacgagtatagaacaccagcgagagacacgagcagaaagagaaacacgaggcagcgacatcaaagaataacacgacgacgacaccgaacatggaaacgaaaaggcacgaaaatacgcgacggaagacaaagagtaaagcgaacaaaagaagacgccgacaaataaagagggcaaagagaggcgaaagaaatacatacaaagcgacggacaagacggaatcaaagacaaccacgaggataaaacgccagagccagacgacgacacaacaacacacaaggacgatacatagacccaccaccaacgagcgcgcccccaccacgacaaagacaacagaacaccaaaaaaacn

SEQ ID NO: 669910 - DNA, 235 bp, Homo sapiens
cccaaattttttttttaaacacccccctttaaaaccccctttcgggggggggctttccccgggggaaagcccccttttttaatgggtttttttggggggccccccctttctaagggggggtttttttttttttttgttaagggggggaaccggggttttttccccccaggggtttttttaaggggggggggttcccccccttttttcctgaaaaaaaaaattgggtttttggcca

SEQ ID NO: 669911 - DNA, 319 bp, Homo sapiens
tgtgacgtatcctatctctaagccacagggttaatatgctgagaacgttaagaggtcaagatatcccgtcatgctatcctaacacctggcccacatttaaaaagattttctctcataataggagtaatacacattgtgaatgtatttaatgccactaaacagtaaacttaaaaatgattaagatggtaaattcttaaataaataaaaatgcagaaaattttaagaagtcactggatacacggccatgagcttttccctccttcatccaacaggtttttaacactttccccatgcaggaaaatgggctttaatagtggaa

SEQ ID NO: 669912 - DNA, 106 bp, Homo sapiens
  misc_feature (38)..(38): n is a, c, g, or t
aagctccaacaagagaggcagagaaacaggtgatggcntggaggcgggtgtggggcaggtgaaggtactttgtgtgattgctttaagatgggagagatggcagtca

SEQ ID NO: 669913 - DNA, 839 bp, Homo sapiens
taaaacaaacccggttcctggggggggggtgggtataatactaagttgaaatgatatcatttaggggggaaggcgcttggtgaagtaggccttatttctctgtgtccttccgaacgagggggaggaattgtgaacgtagatagaacccgaccgtggattaccccggtctcgtgaacctcagaactcacgttagagacttataactcgatagaacaaacgaacccttataaataggcggcgtgcaccaatcgggagtgctccgtgactccaacactcgaggtcgataacaccctatgggtgtgatagtgtgactctcaaaataggatggcgctgtaacccctagggtaactgggtccctgtggggtcaaaagtatatggcgatcaatggagtatagtagtctcgcattaggactgggtggaagtctaagcatgtactggctcggaggtaggaggtcctgccccgaggtcgccccaaccgaaattttaaaggcaggttgggaacgtaaagagaccgagggggtatgagaaggacacgggaagagcactacaaataaataaaagccccaaagggcctcaacgaacagacgggagaaaatgcacacgccaacatacaagggggaaggagcaacaacacacgtggtcgagaaacgtaaagaaacacggctgaacctctccggagagaccaatcaaaacggggccccctattaaagggaacaagaagaatctgccaccccatagccgggagggagcccgcgcggacaacatggtgccaggggcggggggcccaaacggggacaaaggagagaaggacaaagcgaaaagacaagcaaaaacactca

SEQ ID NO: 669914 - DNA, 495 bp, Homo sapiens
tccacgaaggtgagtggcaactttttatgtttgctaaatgggatggcaatattagatttacttcttctgcaaccgtggtgtcaaaaatctgatagcaattttgattatctgtcccattggtgactttgtttgacttgatgaagctttccaaccacggttatgctttaatttttaattccctggaggacaaaacattattccattgatcatattccacacttttctgaaggtcatcatccatcagaacttctgatgctggaattctggaaaaatttgccagaattccatgagataggcttctagtactcctgtcccattcttcaagtgtaagggtcttaacaaacacttttgggaggggttcaatacccagtgcttctgccacagaagaaggattccacgatgttttatcacccaggaaatttagatttggtatggatctcaaactagaacactgtttacttccattgtgatgtttggtccctgctttacgaaatg

SEQ ID NO: 669915 - DNA, 780 bp, Homo sapiens
tgtacaggcacggttccttacgccccatgtgtgctggtgtgtgtcctgcctgtatatgtggcttcctctgatgctgacaaggtgggtgaacaatccttgccagagtgggctgggaccagacttgttctcttcctcacctgaaattatgcttcctaaaatctcaagccaaactcaaagaatggggtggtgtgtgtgggcaccctgtgaggtggtccctgagaggtggggtgcctctccagggcacatctggagttcttctccagcttaccctagggtgaccaagtaggtgcctgtcacaccagtggtggctggcatcttaactgtgtgatgcagatgtgtcctggtttcggagtgtagcagctgtgcttgaggcatggctcgtcacccggagtttgggggtacccgttgccagagccaggtacatgactgcgggcggaaactatgggatctggccaagttggactttgatccattgggcagatgtcccatagcctccctggagcctgtcatggcctgtaggggatcaggcagctcactgatgccagaacacctcaggcgaggagaaccttgactccagctgtaacttgtctgacttggacttgtccgcctgataccacgaagtctccccttgggaccaagcttggaggttgccacatagaacacaacagtctagctgtccccagtgacactctgaagacttgatggcctgcatttccacaggtgagcgggctctgtcaccacaactcagtctctcatgaggttcattcatgagcaaactag

SEQ ID NO: 669916 - DNA, 142 bp, Homo sapiens
ggtcatcggtagatgcgccaggtactcggcaagagtctctggctggacttgagaattactcatcggcaggcaactgatagctccagtttcggtcaggacttgctgtcgacgccccgcggatttagtagtagtaggcggccgc

SEQ ID NO: 669917 - DNA, 309 bp, Homo sapiens
agaataggatagttagaaagctgcctatggctggagggagaggcttatggcgatctctaagctttgcaaggggcccttcagaagtcgctgtggctcgtagatgctcataggttgtggcatgggaatgaccctgttcgaagagatactcgcccagcccagcctccgggccacccagcctgtggaggttggtcaggtggtcacccatcttcttgataagcttcacttcctcatctaggaagtgagtctccaggaagtcacagagatgggggtccgtgcgggcagaacccagggcatgaagatccaaaaggg

SEQ ID NO: 669918 - DNA, 826 bp, Homo sapiens
  misc_feature (653)..(653): n is a, c, g, or t
gtcgtggcttgcagcgaaaatagcgccagcagtttgatcaactggtccagggcaataaaggctatgcccatcagcacagcaaagcttcgtcctctcaaagcgtcctgcatcttcaacattccattccttcgtgtgttttcgcctgaatcggcggcggccagaagatatcgcacggcctgcgcagcgtccatctttgcaccggcaccgcccggcacacgccctcctccacatagaaagagcgggcacagtcgccccacacattgcctgctcttgggctcaaatccaccgtgatcagattgtgtaaaccgacggcttcatcactgggccgatagtcgcgtcccgactccgaaagcgcactgcgcgaacccagcaacacgaaggccgggcagtcgtaataccaggtctccggatagccggaatccgcaagcatctgcgtcgccatttcggcaatggacgcttcagttgactgtggcgtgattcgcgtaacgagctgctgcagcaccgacttggcggcggcctggaccacgcgattaggcaacatggattgtctctgactgatgggggattgcgtcgatagtatcagcaccctcctcgacagggagacgtgctcggattttaagctcgttcccacgctccgcgtgggaatgcctacngtgacgctccgcgtcacaaaggcagacgcagagcgtccagggctgcgctcccacgcagagcgtgggagcgatcaagtctcttcaaaaaaccgaccatccgatgcgctcgctcaacaactccaacgccttcatccccgccagggaattgcccgccgcattcagctccggtgact

SEQ ID NO: 669919 - DNA, 617 bp, Homo sapiens
ggggatgaaggaggatgcggcgaatcatttataaatgtgcgctgaagcagtgactccgaagcctaaattccagtgagggtgagtcgagtgctgtgctttcatggtgcctcttcttgtatgaagcaaagtgtgtaaaggtttgccataaaggacaaacaatgtgaaatacttcatacattacagtggttggaatatacacattgggatgatatggtgcttccggagagcagagtactctaaatactgtggtactatcctaatttgcagcaaacagtcgagaatcttcaaaacagcctgagtcagtgagtcagtcattgcagcagtgggaatgatgacgatggggctgctcctaggaatagaagacatctgtgtctgctaatgagaaaagatgttgaatgtgaaatacgaaatagaacaaacatgaaaacacctgtgaaatggagatggtggcagtatcatgttgagatcccttcatgacctccctcgtgaatgactaatgggccctgggtagactctacgtgttgaaaactgaggaaaacattctatcgaacagagttgaagttacaatgtaaatgattccttgaagagctaagacactgtggtttgttgatgactgg

SEQ ID NO: 669920 - DNA, 248 bp, Homo sapiens
ccgatggcgaagtttccaacaatatgagtctatgtattataactcaactgtacatttaagatttttttcaagatgctcaaatttcatgttatatatcaaactgcaaaaaatgttttcacacaaagtcaacaagcagatggcaatagggcctgtggcaaatcattctcaaataaatgccattcttaccaatgtccactaaatgcaaatatctgcatccctcgcattgcaatctatgtacctgtagcata

SEQ ID NO: 669921 - DNA, 178 bp, Homo sapiens
cagagaaagctttgttgagatataatttacccatttaaagtatataattcaatggtttttaatatattcacagatttgtacaattatcaccacattcaattgtagaacattttcgtcaccccaacaagaaacctcgtaccacaccttagcaatcaccactcccttctgtcgtcttctc

SEQ ID NO: 669922 - DNA, 269 bp, Homo sapiens
actcactgcacgaatcatctggagctagagatattgtaaagcatcatatgacactactattgcttaaaaactccacgaatcttcaagagagcaatataggaatggagagccacaatatgttatctgaaaattgagatgtgatacgactgaggggcactctaagagtctataacccctggcacactgatgatacatggtctactcttagaagaggaatgctatctttctggagatgctctagggtagaacacggattgagactctatata

SEQ ID NO: 669923 - DNA, 200 bp, Homo sapiens
accccagcgtgctgggaggagtcacgtgttctgccagaaaagaagagctctctgttgaaattctctggggaagccctgggtttcatcaattgaggacactgcaggttttctcagaacctctgatagattgagcctgtgagtctccactacaggaatagagcgctcagttccccaacctttttacaccatgaaaacacttg

SEQ ID NO: 669924 - DNA, 830 bp, Homo sapiens
tccttaattataacattcacaggcacagaactaatcatatttatatcttcttcgaaaccacacttatccccaccttggactatcatcacccgatgaggcaatcggcaggccagaacggcctgaagcggcaggcagatacttcctattctacaccctagtagggctcccttcccctactcattcgtgaactgatttacactcacaacaccctagggctcactaaagcattctactagtcactctcactgcccaaggaagctatcaaactcctgaggccatagcaacttaatatgactagcttgacacgatgagctgtttatagtaaagatacctctttacggactccacttatgactccctaaatgcccatgtcgaaggcccccatcgctgggtcaatagtacgttgccgagtactcttaaaactaggcggctatggtataatacgcgtcacactcattctcaaacccctgacgaaacacatagcctaccccttccttgtactatccctatgaggcataattataacaagctccatctgctacgacaaacagacctagaatccgtcattgatactcttcaatccaggcacataggcctcgtagtaaccaggcgaattctcatgcaaaaccccctggaagcttcaacggagcagtcattctcataaatccggcccagggagttagatcctcattaatattttgctaagaaactcaaaataagaaaggacttcacagggggttaaaaccttcttcagggttaaatcttatcccactataggtttggagagttagaaggcgtaactcggtttaccccatttatcttggagaccc

SEQ ID NO: 669925 - DNA, 926 bp, Homo sapiens
tcggccccagcggatggggaatcttttttggggacaaatgtgtgatcacggcgccgccatataccgggggcgactgtgaactccccccctcccatcagagcgcggaattatattattttggagcgcgccacccggcccaacacacccagagggggcccccccgcgcagactcacacacacaacccctcgtgccgggcggagggtaccacaaaacaaatcacgctcccctcgggaggttgtgacacctggggggattttttctccttggggggcccaaggagagaagtgtgttacggttgctgtgcagcctagaagggagttcatcatgatgtgtgtggttgcgccacgcacagacgagcatttgatataacaggagagagtgtggtgtgtgtcttcaccgcagggaacaccccgggtggtggagagaatttgcgctcctgggggttcttcttgtgcacagacaccccgcctgccgcgccccgatgtggttggggagatctcccctccccttagtgggtggtcccccgctgtggcgccgcacacaaaagaggcggggccaacacgtctgttctctcgtgatggaggaaagaagaagatttgttactcaccaacgcatgtttttgatatcttctcgagagagaatattagtataaaagagagaaaaagaaaaatgcgcccattcaacacgctttctctgagggaggacacttttcccacgaacggcacaagatttgtgtgggtggcgcatctcgtctccacggagaacgcgggcaaacatgatggccggacaacatgagtgcttattgtttttaaggggcaaaaatgggggtttttttttggggaaattagagcccccccaagccaaataaaacccttttttttttttcccccaaaaaaaaaagggtttttttttttttttcccccca

SEQ ID NO: 669926 - DNA, 1050 bp, Homo sapiens
ggcctgaccacgcagttcttgggtctgtgctgctggcctggggttgtggttgaggccgggtctccgctcctgtgcccgggaagatggtgctaggtggttgcccgacctgatgaatttatagaatgtgaagacccagtggatcatgttggaaatgcaactgcatcccaggaacttggttatggttgtctcaagttcggcggtcaggcctacagcgacgtggaacacacttcagtccagtgccatgccttagatggaattgagtgtgccagtcctaggacctttctacgagaaaataaaccttgtataaagtataccggacactacttcataaccactttactctactccttcttcctgggatgttttggtgtggatcgattctgtttgggacacactggcactgcagtagggaagctgttgacgcttggaggacttgggatttggtggtttgttgaccttattttgctaattactggagggctgatgccaagtgatggcagcaactggtgcactgtttactaaaaagagctgccatcatggcccagggaggcgggtgaaagctccgtcttctgaattcatctctacaggctcaaaactcctctttgatatcagacctgatgttattttccttcttttggagggcatttgtttggttaagaaggcttctttggactttggaatttcaacccagattttaccttgcagacggaatgacaagcaaaaagtgttgtggggaatcaaatttgttcctttcctcatgcacaaaacataaaggatagtggcgagtttacaagctgtggatgggtttccatagtcttcctttctgtacattgctatatcttcagtcctttggagcaagtggacctaacaagttgagcaaaatgaatatttggatccatgttcctcttgtgaccctgagtcttcatgcaaggagatctgaagctgaacaatgaaaatcttcagcagaaatagaaatggccgtggattgtaatacacactgaaattctgactttctgaatttaaatgtagaataaattttaccaacttgga

SEQ ID NO: 669927 - DNA, 392 bp, Homo sapiens
ggcctgaccacgcagttcttgggtctgtgctgctggcctggggttgtggttgaggccgggtctccgctcctgtgcccgggaagatggtgctaggtggttgcccggttagttacttacttctgtgcggccaggcggctttgctgctggggaatttacttctgctgcattgtgtgtctcggagccactcgcaaaatgcgaccgctgagcctgagctcacatccgctggcgccgcccagccggagggccccgggggtgctgcgagctgggaatatggcgacccccactctccggtcatcctctgctcttacctgtagctaccagtggtcgaggcggtgacgtggagggtgtccagaatatatgggtttaagggaggcaggttggggcacgctgca

SEQ ID NO: 669928 - DNA, 520 bp, Homo sapiens
gagctggggttaatattgataattgttgtgatgaattgatggccctaagatagaggagacactgctaggtgtaaggagaagatggttaggtctaccggaggctccagggtgggaatagttccctgtctaagggaggatagactgttcaaacttgttcctgctccgggcttcaataataggcagatgggagcaggaagtaggaaaagaaggaggtaaagagtcaagaaggcttagtggttggttaattggcggggaaaacggccaataattcggggggcaccggatttattcaggggggaactaagtccaaggttggccaaaaaggcctccggaattaatgaatgggtaaatttactaattgaacgaagaattatttacaaaatggcattgggcttggttgaaccgattaaaccgcttcggtagacatgtgggtcggttaccctaaggaagggttggcttggcttagggccaagccccgggcccggggtaacccgaagctccggaatttccggtaaatcca

SEQ ID NO: 669929 - DNA, 1245 bp, Homo sapiens
  misc_feature (1245)..(1245): n is a, c, g, or t
ggccctttgacctgtcaaagtgcaaggacggctgcagggcttcattgtggagcctcggcagtatcacactgaggcaggggtcagctgaaagacaaaagcacaaaatggcgaatagtcagatggggaggtgggaggacagctgtccgggctacacagtgacagtgggacattccagactcatgtctctgcatctcctgctgccttaggtaacctccgtcccttggaggggtagggataaggcagtgacttaacattctcccagtcggtgcgaaggtactaacactaccttaccatgtacacacattaactggcagttcccggtggtcgacgatgtccaccagacaggcacggatgaggggtgggtactacagcagcacatgttgattgcccaagacaaacaggcctaagagtcccgtcctgggaccctcgaactcaatggcgacagaaaatccgcgcaatttaaccacgtgaaacacgacttcccgacgtgccagggacctccccacgttggctccgctatcacgcgaccgatacttgacaactgggacttgaccgactgctcgcacaattgactcaagatgcaagacacgctgccctggatacctctctttggcccaggcgcaagaccaaagaagtctgatactcaacaacaagtttcgacctctctccgaacgactctgggagtccacacaccagcaagtactacacagaccgccgggcaccttgctctaccaggaaggccaaactggcatctatgggccactagcgccaactctccccaaccacgttgtgggaacacaagacatggatatttcgcataccaagcggaatcttgggttcccacaagaacaattgaagttgaaaacgtcgtccaaaagctgctaagaagtaagctttcacaccagcctgtaacctaccttatcgcgtaccacgatccaacaacaaaaacgcacaccgaggaggtacagacaacacacggatgcccacagccaggcccatcagcaaccgcagcgaccacacaaggtgacaaagcaagcatcaacccagtgagacaaaacatctcaaccgacaaacaaggcgaggatcattacattcagaagagcactacataaagaatagcggctccagtttcactgagcattatgatacatgtacgagaacaattataggagacgacatacgaacatgtcacacaacaaagccgcagcattaagatagcgagcagagtctatgtctctatctccn

SEQ ID NO: 669930 - DNA, 263 bp, Homo sapiens
cgtgacataaagatggacataataaatcagcccagtaaaccaaaagttgggattccaagcctcaggtgacctccaaagtaccctctacatgcatagcaaatataaaacatttgaggtatcggaagtaatgatataatgatgtaatagcagtggtaaaaatagcataggtggtagttataatcagtgtaacttttacagaagactttatttaaatgaaacctaattgttattgacctacctatttcacaatcgggataccgagc

SEQ ID NO: 669931 - DNA, 187 bp, Homo sapiens
tgcaagtccagacacacaggcaatggataacaggattactcaccatgtcgtgcggccagcaggcatcagcagggcagcagcaccagcttgacatggcgcacgtacatggccagggacattgacaggtttcacaaccatgatcttacaaggaccaatgcagcaataaccagcattatttggcaacaac

SEQ ID NO: 669932 - DNA, 3040 bp, Homo sapiens
gatctggctcccggaagttccacgtcagtcagtctgacggtcagtggatccctctgcgacttgatatcaaaagaaagctaactgctagatctgatcgagttaagagtgtggatctgcatcctacagagccatggatgttggcaagtctttacaatggcagtgtgtgtgtttggaatcatgaaacacagacactggtgaagacatttgaagtatgtgatcttcctgttcgagctgcaaagtttgttgcaaggaagaattgggttgtgacaggagcggatgacatgcagattagagtgttcaattacaatactctggagagagttcatatgtttgaagcacactcagactacattcgctgtattgctgttcatccaacccagcctttcattctaactagcagtgatgacatgcttattaagctctgggactgggataaaaaatggtcttgctcacaagtgtttgaaggacacacccattatgttatgcagattgtgatcaaccccaaagataacaatcagtttgccagtgcctctttggacaggactatcaaggtgtggcagttgggctcttcgtcaccaaacttcactttggaaggacatgagaaaggcgtgaattgcattgattactacagtggtggggacaagccatacctcatttcaggtgcagatgaccgtcttgttaaaatatgggattatcagaataaaacatgtgtgcagacactggaaggacatgcccaaaatgtgtcttgtgccagctttcatcctgagttgccaatcattatcacaggttcagaagatggaacagtacgtatttggcattcaagcacctaccggcttgagagcacactgaattatggaatggagagggtatggtgcgtggccagtctaagagggtcaaacaatgtcgctttgggctatgatgaagggagcatcattgttaagcttggtcgggaggaacctgccatgtccatggatgccaatggaaagataatttgggccaagcattcagaagtccagcaggccaacctaaaagcaatgggagatgctgaaattaaagatggtgaaagattgccactggcagtaaaggatatgggcagttgtgaaatataccctcagactattcagcacaatcctaatgggcggtttgtggtggtgtgtggtgatggggagtatatcatctacacagcaatggcattgagaaacaagagctttggatctgctcaggagtttgcatgggcccacgattcttcagagtatgcaataagagagagcaacagcattgtaaagatatttaagaactttaaggaaaaaaaatcatttaaaccagattttggagcagaaagtatctacggcggcttcttattgggagtcagatctgtaaatggcttagccttctatgactgggacaatacagaactcatacgaagaattgaaattcagcccaaacatattttctggtctgactctggagagctagtctgtattgctactgaggaatcattttttatccttaagtatctgtcagaaaaagtcttggctgcacaggaaacacatgagggagttactgaagatggcattgaagatgcctttgaggttcttggtgagattcaggaaattgtgaaaacagggctttgggtaggcgattgcttcatttacacaagttctgtgaacagattaaattattatgttggaggagaaatagtcaccattgcccacttggacaggacgatgtatctcctaggctacattcctaaagacaacaggctttatctgggggataaagaattgaacatcattagctattccctgctggtttcagtcctggaataccagacagctgtcatgcggagggactttagcatggctgataaggtccttcctaccattccaaaagaacagaggaccagagttgcacactttttggaaaagcagggcttcaagcagcaagctcttacagtatccacagatcctgagcatcgttttgagcttgctcttcagcttggagagttaaaaattgcataccagttagcagtggaagcagagtcagaacagaagtggaaacaacttgctgaacttgccattagtaaatgtcagtttggcctagcccaggagtgcctgcatcatgcacaggattatgggggcctgctgcttttggccactgcctctggaaatgctaatatggtgaacaagctagcagagggtgcggagagagatggcaaaaataatgtggcattcatgagctactttttacagggcaaggttgatgcctgcctagagctcttaattagaactggacggctgccagaagctgccttcttggcccgaacttacttacccagtcaggtttcaagggtagtgaaactctggagagagaatctctcaaaagtcaatcagaaagcagcagaatcccttgctgacccaacagagtatgaaaacctgttccctggattaaaagaagcctttgttgttgaagaatgggtgaaggaaacacatgctgatctgtggccagccaaacaatacccacttgtcacgccaaatgaagagagaaatgtcatggaagagggaaaagactttcagccctcaagatctacagctcaacaggaacttgatgggaaacctgcttctcctactccggttattgtggcctcccacacagccaacaaagaagaaaagagtttactcgaactagaagtagatttggataatttggaattagaagatattgacacaacagatatcaatctggatgaagatattttggatgattgactgtaatgctttccatttacctgactaaacagatcattattatatataggtattgattgctaccctgaccacagtgctttggactatgagaaacttcttagatttttatatgtaaatgctgtggaccactgggagcacaatgcccacatcatcttaagaagagtttatgtgcagcatttaaatcactgtgttttccttgttaactaaaacagacatgggctttgatttttttcatactattagaccatatctcataaaaccttttgaattaa

SEQ ID NO: 669933 - DNA, 3307 bp, Homo sapiens
  misc_feature (8)..(8): n is a, c, g, or t
  misc_feature (11)..(11): n is a, c, g, or t
  misc_feature (32)..(32): n is a, c, g, or t
aagaatgnatntgctagtacgaggcgggtgtnaattcggccgaggatcggtgggtttatctcaaggcctgagtagccggtaacaaacgagggttcccgggattggaccgacgcagccatgctgggcatggtagcatgcgcctgtagtcccagctacttgggaggctgaggcaggagaatcgcttgaacccgggaagcagaggtttcagtgagcagagatcagcgccactgcactccagcctggacgacagagcgagacttcgccactgcactccagcctggacgacagagcgagacttcgtctcaaaaagaaaaaaacctctgcgacttgatatcaaaagaaagctaactgctagatctgatcgagttaagagtgtggatctgcatcctacagagccatggatgttggcaagtctttacaatggcagtgtgtgtgtttggaatcatgaaacacagacactggtgaagacatttgaagtatgtgatcttcctgttcgagctgcaaagtttgttgcaaggaagaattgggttgtgacaggagcggatgacatgcagattagagtgttcaattacaatactctggagagagttcatatgtttgaagcacactcagactacattcgctgtattgctgttcatccaacccagcctttcattctaactagcagtgatgacatgcttattaagctctgggactgggataaaaaatggtcttgctcacaagtgtttgaaggacacacccattatgttatgcagattgtgatcaaccccaaagataacaatcagtttgccagtgcctctttggacaggactatcaaggtgtggcagttgggctcttcgtcaccaaacttcactttggaaggacatgagaaaggcgtgaattgcattgattactacagtggtggggacaagccatacctcatttcaggtgcagatgaccgtcttgttaaaatatgggattatcagaataaaacatgtgtgcagacactggaaggacatgcccaaaatgtgtcttgtgccagctttcatcctgagttgccaatcattatcacaggttcagaagatggaacagtacgtatttggcattcaagcacctaccggcttgagagcacactgaattatggaatggagagggtatggtgcgtggccagtctaagagggtcaaacaatgtcgctttgggctatgatgaagggagcatcattgttaagcttggtcgggaggaacctgccatgtccatggatgccaatggaaagataatttgggccaagcattcagaagtccagcaggccaacctaaaagcaatgggagatgctgaaattaaagatggtgaaagattgccactggcagtaaaggatatgggcagttgtgaaatataccctcagactattcagcacaatcctaatgggcggtttgtggtggtgtgtggtgatggggagtatatcatctacacagcaatggcattgagaaacaagagctttggatctgctcaggagtttgcatgggcccacgattcttcagagtatgcaataagagagagcaacagcattgtaaagatatttaagaactttaaggaaaaaaaatcatttaaaccagattttggagcagaaagtatctacggcggcttcttattgggagtcagatctgtaaatggcttagccttctatgactgggacaatacagaactcatacgaagaattgaaattcagcccaaacatattttctggtctgactctggagagctagtctgtattgctactgaggaatcattttttatccttaagtatctgtcagaaaaagtcttggctgcacaggaaacacatgagggagttactgaagatggcattgaagatgcctttgaggttcttggtgagattcaggaaattgtgaaaacagggctttgggtaggcgattgcttcatttacacaagttctgtgaacagattaaattattatgttggaggagaaatagtcaccattgcccacttggacaggacgatgtatctcctaggctacattcctaaagacaacaggctttatctgggggataaagaattgaacatcattagctattccctgctggtttcagtcctggaataccagacagctgtcatgcggagggactttagcatggctgataaggtccttcctaccattccaaaagaacagaggaccagagttgcacactttttggaaaagcagggcttcaagcagcaagctcttacagtatccacagatcctgagcatcgttttgagcttgctcttcagcttggagagttaaaaattgcataccagttagcagtggaagcagagtcagaacagaagtggaaacaacttgctgaacttgccattagtaaatgtcagtttggcctagcccaggagtgcctgcatcatgcacaggattatgggggcctgctgcttttggccactgcctctggaaatgctaatatggtgaacaagctagcagagggtgcggagagagatggcaaaaataatgtggcattcatgagctactttttacagggcaaggttgatgcctgcctagagctcttaattagaactggacggctgccagaagctgccttcttggcccgaacttacttacccagtcaggtttcaagggtagtgaaactctggagagagaatctctcaaaagtcaatcagaaagcagcagaatcccttgctgacccaacagagtatgaaaacctgttccctggattaaaagaagcctttgttgttgaagaatgggtgaaggaaacacatgctgatctgtggccagccaaacaatacccacttgtcacgccaaatgaagagagaaatgtcatggaagagggaaaagactttcagccctcaagatctacagctcaacaggaacttgatgggaaacctgcttctcctactccggttattgtggcctcccacacagccaacaaagaagaaaagagtttactcgaactagaagtagatttggataatttggaattagaagatattgacacaacagatatcaatctggatgaagatattttggatgattgactgtaatgctttccatttacctgactaaacagatcattattatatataggtattgattgctaccctgaccacagtgctttggactatgagaaacttcttagatttttatatgtaaatgctgtggaccactgggagcacaatgcccacatcatcttaagaagagtttatgtgcagcatttaaatcactgtgttttccttgttaactaaaacagacatgggctttgatttttttcatactattagaccatatctcataaaaccttttgaattaa

SEQ ID NO: 669934 - DNA, 115 bp, Homo sapiens
tactctagaggctcccccccagtacgcaagaggtgccaggatctgcttgtgcaggaatgatgggcattatgtcaggctgcacctctactcaagcttgctgtacactgagcgggca

SEQ ID NO: 669935 - DNA, 3309 bp, Homo sapiens
gatctggctcccggaagttccacgtcagtcagtctgacggtcagtggatcggtgggtttatctcaaggcctgagtagccggtaacaaacgagggttcccgggattggaccgacgcagccatgctgggcatggtagcatgcgcctgtagtcccagctacttgggaggctgaggcaggagaatcgcttgaacccgggaagcagaggtttcagtgagcagagatcagcgccactgcactccagcctggacgacagagcgagacttcgccactgcactccagcctggacgacagagcgagacttcgtctcaaaaagaaaaaaacctctgcgacttgatatcaaaagaaagctaactgctagatctgatcgagttaagagtgtggatctgcatcctacagagccatggatgttggcaagtctttacaatggcagtgtgtgtgtttggaatcatgaaacacagacactggtgaagacatttgaagtatgtgatcttcctgttcgagctgcaaagtttgttgcaaggaagaattgggttgtgacaggagcggatgacatgcagattagagtgttcaattacaatactctggagagagttcatatgtttgaagcacactcagactacattcgctgtattgctgttcatccaacccagcctttcattctaactagcagtgatgacatgcttattaagctctgggactgggataaaaaatggtcttgctcacaagtgtttgaaggacacacccattatgttatgcagattgtgatcaaccccaaagataacaatcagtttgccagtgcctctttggacaggactatcaaggtgtggcagttgggctcttcgtcaccaaacttcactttggaaggacatgagaaaggcgtgaattgcattgattactacagtggtggggacaagccatacctcatttcaggtgcagatgaccgtcttgttaaaatatgggattatcagaataaaacatgtgtgcagacactggaaggacatgcccaaaatgtgtcttgtgccagctttcatcctgagttgccaatcattatcacaggttcagaagatggaacagtacgtatttggcattcaagcacctaccggcttgagagcacactgaattatggaatggagagggtatggtgcgtggccagtctaagagggtcaaacaatgtcgctttgggctatgatgaagggagcatcattgttaagcttggtcgggaggaacctgccatgtccatggatgccaatggaaagataatttgggccaagcattcagaagtccagcaggccaacctaaaagcaatgggagatgctgaaattaaagatggtgaaagattgccactggcagtaaaggatatgggcagttgtgaaatataccctcagactattcagcacaatcctaatgggcggtttgtggtggtgtgtggtgatggggagtatatcatctacacagcaatggcattgagaaacaagagctttggatctgctcaggagtttgcatgggcccacgattcttcagagtatgcaataagagagagcaacagcattgtaaagatatttaagaactttaaggaaaaaaaatcatttaaaccagattttggagcagaaagtatctacggcggcttcttattgggagtcagatctgtaaatggcttagccttctatgactgggacaatacagaactcatacgaagaattgaaattcagcccaaacatattttctggtctgactctggagagctagtctgtattgctactgaggaatcattttttatccttaagtatctgtcagaaaaagtcttggctgcacaggaaacacatgagggagttactgaagatggcattgaagatgcctttgaggttcttggtgagattcaggaaattgtgaaaacagggctttgggtaggcgattgcttcatttacacaagttctgtgaacagattaaattattatgttggaggagaaatagtcaccattgcccacttggacaggacgatgtatctcctaggctacattcctaaagacaacaggctttatctgggggataaagaattgaacatcattagctattccctgctggtttcagtcctggaataccagacagctgtcatgcggagggactttagcatggctgataaggtccttcctaccattccaaaagaacagaggaccagagttgcacactttttggaaaagcagggcttcaagcagcaagctcttacagtatccacagatcctgagcatcgttttgagcttgctcttcagcttggagagttaaaaattgcataccagttagcagtggaagcagagtcagaacagaagtggaaacaacttgctgaacttgccattagtaaatgtcagtttggcctagcccaggagtgcctgcatcatgcacaggattatgggggcctgctgcttttggccactgcctctggaaatgctaatatggtgaacaagctagcagagggtgcggagagagatggcaaaaataatgtggcattcatgagctactttttacagggcaaggttgatgcctgcctagagctcttaattagaactggacggctgccagaagctgccttcttggcccgaacttacttacccagtcaggtttcaagggtagtgaaactctggagagagaatctctcaaaagtcaatcagaaagcagcagaatcccttgctgacccaacagagtatgaaaacctgttccctggattaaaagaagcctttgttgttgaagaatgggtgaaggaaacacatgctgatctgtggccagccaaacaatacccacttgtcacgccaaatgaagagagaaatgtcatggaagagggaaaagactttcagccctcaagatctacagctcaacaggaacttgatgggaaacctgcttctcctactccggttattgtggcctcccacacagccaacaaagaagaaaagagtttactcgaactagaagtagatttggataatttggaattagaagatattgacacaacagatatcaatctggatgaagatattttggatgattgactgtaatgctttccatttacctgactaaacagatcattattatatataggtattgattgctaccctgaccacagtgctttggactatgagaaacttcttagatttttatatgtaaatgctgtggaccactgggagcacaatgcccacatcatcttaagaagagtttatgtgcagcatttaaatcactgtgttttccttgttaactaaaacagacatgggctttgatttttttcatactattagaccatatctcataaaaccttttgaattaa

SEQ ID NO: 669936 - DNA, 685 bp, Homo sapiens
  misc_feature (638)..(638): n is a, c, g, or t
gtctcgagtttttgttttttcattttttggcaaggatacaaaaaattttatccgaagcccaggtacaaacgggccaacctgcctctacagcgtccacagcaaacacagggtctagacaagggaggagtttccctcaaacggtttaaatcggttctccccgcgtcacaagccatcgggtaaggcaagcggaagtgtgcgttggggctccccgtggtggcctccgcggctcacaatactgagccgtggaaatgtgcgtgttagcaaaatatcctttgtggtttccccataaaaaaccgccgccgccgcccctcgggttcctcacaacaggttttaaaaaatttataaactttttacccccttgtttacacgctttaacggaaaggggaccctaggagagcccccgggtacaggacgcgggggcggattaaaagagcccagagaacacaggaggagcgcccgcctcccgggccccagcatcagaggcaggcaaaacacagaattgagacttgggcccaaattttgagggaagaaaaacaccctgaagtttgaggagcaagtttcctaggcaactgcaggtaaaggcgtgtgtgtatggcacccggaggcaatgccaaaggcgggacacgcccgccccttcnctaaagctcaagggcctaagataggacggggcccctgtgctgaccca

SEQ ID NO: 669937 - DNA, 4577 bp, Homo sapiens
  misc_feature (3024)..(3024): n is a, c, g, or t
gatctggctcccggaagttccacgtcagtcagtctgacggtcagtggatcggtgggtttatctcaaggcctgagtagccggtaacaaacgagggttcccgggattggaccgacgcagccatgcctctgcgacttgatatcaaaagaaagctaactgctagatctgatcgagttaagagtgtggatctgcatcctacagagccatggatgttggcaagtctttacaatggcagtgtgtgtgtttggaatcatgaaacacagacactggtgaagacatttgaagtatgtgatcttcctgttcgagctgcaaagtttgttgcaaggaagaattgggttgtgacaggagcggatgacatgcagattagagtgttcaattacaatactctggagagagttcatatgtttgaagcacactcagactacattcgctgtattgctgttcatccaacccagcctttcattctaactagcagtgatgacatgcttattaagctctgggactgggataaaaaatggtcttgctcacaagtgtttgaaggacacacccattatgttatgcagattgtgatcaaccccaaagataacaatcagtttgccagtgcctctttggacaggactatcaaggtgtggcagttgggctcttcgtcaccaaacttcactttggaaggacatgagaaaggcgtgaattgcattgattactacagtggtggggacaagccatacctcatttcaggtgcagatgaccgtcttgttaaaatatgggattatcagaataaaacatgtgtgcagacactggaaggacatgcccaaaatgtgtcttgtgccagctttcatcctgagttgccaatcattatcacaggttcagaagatggaacagtacgtatttggcattcaagcacctaccggcttgagagcacactgaattatggaatggagagggtatggtgcgtggccagtctaagagggtcaaacaatgtcgctttgggctatgatgaagggagcatcattgttaagcttggtcgggaggaacctgccatgtccatggatgccaatggaaagataatttgggccaagcattcagaagtccagcaggccaacctaaaagcaatgggagatgctgaaattaaagatggtgaaagattgccactggcagtaaaggatatgggcagttgtgaaatataccctcagactattcagcacaatcctaatgggcggtttgtggtggtgtgtggtgatggggagtatatcatctacacagcaatggcattgagaaacaagagctttggatctgctcaggagtttgcatgggcccacgattcttcagagtatgcaataagagagagcaacagcattgtaaagatatttaagaactttaaggaaaaaaaatcatttaaaccagattttggagcagaaagtatctacggcggcttcttattgggagtcagatctgtaaatggcttagccttctatgactgggacaatacagaactcatacgaagaattgaaattcagcccaaacatattttctggtctgactctggagagctagtctgtattgctactgaggaatcattttttatccttaagtatctgtcagaaaaagtcttggctgcacaggaaacacatgagggagttactgaagatggcattgaagatgcctttgaggttcttggtgagattcaggaaattgtgaaaacagggctttgggtaggcgattgcttcatttacacaagttctgtgaacagattaaattattatgttggaggagaaatagtcaccattgcccacttggacaggacgatgtatctcctaggctacattcctaaagacaacaggctttatctgggggataaagaattgaacatcattagctattccctgctggtttcagtcctggaataccagacagctgtcatgcggagggactttagcatggctgataaggtccttcctaccattccaaaagaacagaggaccagagttgcacactttttggaaaagcagggcttcaagcagcaagctcttacagtatccacagatcctgagcatcgttttgagcttgctcttcagcttggagagttaaaaattgcataccagttagcagtggaagcagagtcagaacagaagtggaaacaacttgctgaacttgccattagtaaatgtcagtttggcctagcccaggagtgcctgcatcatgcacaggattatgggggcctgctgcttttggccactgcctctggaaatgctaatatggtgaacaagctagcagagggtgcggagagagatggcaaaaataatgtggcattcatgagctactttttacagggcaaggttgatgcctgcctagagctcttaattagaactggacggctgccagaagctgccttcttggcccgaacttacttacccagtcaggtttcaagggtagtgaaactctggagagagaatctctcaaaagtcaatcagaaagcagcagaatcccttgctgacccaacagagtatgaaaacctgttccctggattaaaagaagcctttgttgttgaagaatgggtgaaggaaacacatgctgatctgtggccagccaaacaatacccacttgtcacgccaaatgaagagagaaatgtcatggaagagggaaaagactttcagccctcaagatctacagctcaacaggaacttgatgggaaacctgcttctcctactccggttattgtggcctcccacacagccaacaaagaagaaaagcagcctgatccttggccccttgagccgactggccatctggatggagcacgtgatacagctggaccaagttggttgcatcatcgattctgagaatgaaagggtttaatgttatctaggggttttcttcatttgattcacagtcctataaaagtgtgtgccaacttcaaactaaattacatttcagactttcctcaggctggagggattggggaaggaccttcagttttacagtttcaaaagcattttcaggaaaattgactaatttaggcctcacaccaantccgtgaggcagctagggcaggagtcactgcaggaagtgtccaatttatgaaagtgaatatattccaaatgtggctatattctttttggaaaaagagcaccatttctcacagaaacagcattcctaatggtagacaatttccaggccagcttacttcaccagcatgtaatagtctaatccaactcagaggacagaaacacagcttcatcccacataagcaggagggtggtggtcacagggatctcaaagtcacttgcctctaagtgacatttgctaacagacaaatgcctctacaagaggccccctaagattccaaggaaaggattcacaggaacgcattagtaaaatagcatcctagtgaagcaaatttgaaattatacacacacatcagacaaaaaggaaaatcgggttctacatcagcaatctgtcttaacttcagcatcacacaactacctatgaagaagacagaacaagaattcagttcttctggtctgtacttctcagaaatgtataaacaatttttatcaacattaaaactgtcctagcaaaaccaaacaatcactatcttttcacacagctgacactttcccaccatttgccatctcatcgctggagggcacagaaaaacgacactcaaaatgcttgtgcttttgaggctctgctatatacactaagtgaactactggcttccagttgggaatggagggctgaggacaccctaattcagtgcttccgcagctagcactcttcagccttccctgcgttccccttacctgagctgggggatgaagagcagggtgacagtgggagtaagtacagaattcctcaagccttggtagccttagagaaatgctctgggcttatactgaggctcatctaccctaaaggccatctctcaggaaaacagagctgttgtatcataaagcttttcagggggaaaaaaataaaaaatgttcatcacaaatctattgtgcttgttataatctaacaaagtccactaaatgtagtaacgaaatgtctccccaataaaaaattaagattccctttggagcttaggcatgtggccttataaagagcttaactggactgctacctgttggtatgttcagggcttcattaggttcatgcttaagtataatgcctgtgcctcacagaacaatttaaatttagcttaacaccccacccatacttaaagagcaaataaattatatttcgaaaagattttaaaataatctcaatataaaaaccaacagtgggaactgagtctggaataaatgtgtgcagaatcctaattcttttctgagctccactcagtgaggatatgcaccctctactgtccagcctgtggtttgcagtaagctcactcttctgttcagaatgaccacaggagggcctttacctaggaatagcaggaaaagctaagtaagtactcaaacttccctcccagtaagcatgaattgcttcagatgtaaagcttacatgtgatgagtaatactataatatcatacattaatatatcctaataaactttaattttcaaacaaaaaaaaaaa

SEQ ID NO: 669938 - DNA, 243 bp, Homo sapiens
actagtcacggttggctcagaatcttcagtgaagtctgagccatcttccccctgctctacctcctctataagctaccgattcattacttctctcccagtgaactatctagtcaactattaactaatcgtagtcaagtatgcaaacggggtgtagaactagacagggttgtttattggttgttgatcttaagcgctatatgaatggtgagattgttttaatgtctataatgggtgttaacttat

SEQ ID NO: 669939 - DNA, 365 bp, Homo sapiens
gcatagttataattgcccacgcctggctgtccccattctatgtctgcgccatgactgcgggtacctgccatctccactctgtcactagggctcctggctatggggacactgaggaccagccattgaggggtggaccctcagaaggcgtcacaacaacctggtcacaggactctgcctcctcttcaactgaccagcctccatgctgcctccagaatggtctttctaatgtgtgaatcagagcacaagcagcccctgcacaaagcccttccatgtcgcctctgcattcaggatcaaaccccgaacacctgcccaacctgctctcctcttgccactgcctcttcctcctgatttccaccttgccaggt

SEQ ID NO: 669940 - DNA, 3709 bp, Homo sapiens
gatctggctcccggaagttccacgtcagtcagtctgacggtcagtggatcggtgggtttatctcaaggcctgagtagccggtaacaaacgagggttcccgggattggaccgacgcagccatgcctctgcgacttgatatcaaaagaaagctaactgctagatctgatcgagttaagagtgtggatctgcatcctacagagccatggatgttggcaagtctttacaatggcagtgtgtgtgtttggaatcatgaaacacagacactggtgaagacatttgaagtatgtgatcttcctgttcgagctgcaaagtttgttgcaaggaagaattgggttgtgacaggagcggatgacatgcagattagagtgttcaattacaatactctggagagagttcatatgtttgaagcacactcagactacattcgctgtattgctgttcatccaacccagcctttcattctaactagcagtgatgacatgcttattaagctctgggactgggataaaaaatggtcttgctcacaagtgtttgaaggacacacccattatgttatgcagattgtgatcaaccccaaagataacaatcagtttgccagtgcctctttggacaggactatcaaggtgtggcagttgggctcttcgtcaccaaacttcactttggaaggacatgagaaaggcgtgaattgcattgattactacagtggtggggacaagccatacctcatttcaggtgcagatgaccgtcttgttaaaatatgggattatcagaataaaacatgtgtgcagacactggaaggacatgcccaaaatgtgtcttgtgccagctttcatcctgagttgccaatcattatcacaggttcagaagatggaacagtacgtatttggcattcaagcacctaccggcttgagagcacactgaattatggaatggagagggtatggtgcgtggccagtctaagagggtcaaacaatgtcgctttgggctatgatgaagggagcatcattgttaagcttggtcgggaggaacctgccatgtccatggatgccaatggaaagataatttgggccaagcattcagaagtccagcaggccaacctaaaagcaatgggagatgctgaaattaaagatggtgaaagattgccactggcagtaaaggatatgggcagttgtgaaatataccctcagactattcagcacaatcctaatgggcggtttgtggtggtgtgtggtgatggggagtatatcatctacacagcaatggcattgagaaacaagagctttggatctgctcaggagtttgcatgggcccacgattcttcagagtatgcaataagagagagcaacagcattgtaaagatatttaagaactttaaggaaaaaaaatcatttaaaccagattttggagcagaaagtatctacggcggcttcttattgggagtcagatctgtaaatggcttagccttctatgactgggacaatacagaactcatacgaagaattgaaattcagcccaaacatattttctggtctgactctggagagctagtctgtattgctactgaggaatcattttttatccttaagtatctgtcagaaaaagtcttggctgcacaggaaacacatgagggagttactgaagatggcattgaagatgcctttgaggttcttggtgagattcaggaaattgtgaaaacagggctttgggtaggcgattgcttcatttacacaagttctgtgaacagattaaattattatgttggaggagaaatagtcaccattgcccacttggacaggacgatgtatctcctaggctacattcctaaagacaacaggctttatctgggggataaagaattgaacatcattagctattccctgctggtttcagtcctggaataccagacagctgtcatgcggagggactttagcatggctgataaggtccttcctaccattccaaaagaacagaggaccagagttgcacactttttggaaaagcagggcttcaagcagcaagctcttacagtatccacagatcctgagcatcgttttgagcttgctcttcagcttggagagttaaaaattgcataccagttagcagtggaagcagagtcagaacagaagtggaaacaacttgctgaacttgccattagtaaatgtcagtttggcctagcccaggagtgcctgcatcatgcacaggattatgggggcctgctgcttttggccactgcctctggaaatgctaatatggtgaacaagctagcagagggtgcggagagagatggcaaaaataatgtggcattcatgagctactttttacagggcaaggttgatgcctgcctagagctcttaattagaactggacggctgccagaagctgccttcttggcccgaacttacttacccagtcaggtttcaagggtagtgaaactctggagagagaatctctcaaaagtcaatcagaaagcagcagaatcccttgctgacccaacagagtatgaaaacctgttccctggattaaaagaagcctttgttgttgaagaatgggtgaaggaaacacatgctgatctgtggccagccaaacaatacccacttgtcacgccaaatgaagagagaaatgtcatggaagagggaaaagactttcagccctcaagatctacagctcaacaggaacttgatgggaaacctgcttctcctactccggttattgtggcctcccacacagccaacaaagaagaaaagagtttactcgaactagaagtagatttggataatttggaattagaagatattgacacaacagatatcaatctggatgaagatattttggatgattgactgtaatgctttccatttacctgactaaacagatcattattatatataggtattgattgctaccctgaccacagtgctttggactatgagaaacttcttagatttttatatgtaaatgctgtggaccactgggagcacaatgcccacatcatcttaagaagagtttatgtgcagcatttaaatcactgtgttttccttgttaactaaaacagacatgggctttgatttttttcatactattagaccatatctcataaaaccttttgaattaatgaaggtacttgtttcctttctcaataatgaaaataggcttctagttttagaaggctgagccgaaactacaccttgcctagggatcagccccactgtcttttctttgtataactaaatctgcattttcaaatgttgtcaatcacatatttcttagagctgaatatccaggctgtagtctctaaacccttttcttgaactcattgcatcattccacaggtttggccccgaattatggtcaaccgactaccatttctggaggccagcactgtgcaacccctggtcctctgtaccccataaagccggggatctaataagtatacgttggcctatttggtacccaaaaaaacgcacaaactttttcagcgcagctattaaactgcaatgcaaacatgctaaaccggaccatccaaccacgctcagactccacagcgaagcaaaacaacgcagccagagaaaaccacgatgctacacaccacacaatgtccatacagccaggcgatgaagacacaattcatctagccgaccacgacagacaacagaatcaagtatgcaaccaaaacatcacacgacgattctctgcagtcatgcgtcatgtc

SEQ ID NO: 669941 - DNA, 3591 bp, Homo sapiens
gatctggctcccggaagttccacgtcagtcagtctgacggtcagtggatcggtgggtttatctcaaggcctgagtagccggtaacaaacgagggttcccgggattggaccgacgcagccatgcctctgcgacttgatatcaaaagaaagctaactgctagatctgatcgagttaagagtgtggatctgcatcctacagagccatggatgttggcaagtctttacaatggcagtgtgtgtgtttggaatcatgaaacacagacactggtgaagacatttgaagtatgtgatcttcctgttcgagctgcaaagtttgttgcaaggaagaattgggttgtgacaggagcggatgacatgcagattagagtgttcaattacaatactctggagagagttcatatgtttgaagcacactcagactacattcgctgtattgctgttcatccaacccagcctttcattctaactagcagtgatgacatgcttattaagctctgggactgggataaaaaatggtcttgctcacaagtgtttgaaggacacacccattatgttatgcagattgtgatcaaccccaaagataacaatcagtttgccagtgcctctttggacaggactatcaaggtgtggcagttgggctcttcgtcaccaaacttcactttggaaggacatgagaaaggcgtgaattgcattgattactacagtggtggggacaagccatacctcatttcaggtgcagatgaccgtcttgttaaaatatgggattatcagaataaaacatgtgtgcagacactggaaggacatgcccaaaatgtgtcttgtgccagctttcatcctgagttgccaatcattatcacaggttcagaagatggaacagtacgtatttggcattcaagcacctaccggcttgagagcacactgaattatggaatggagagggtatggtgcgtggccagtctaagagggtcaaacaatgtcgctttgggctatgatgaagggagcatcattgttaagcttggtcgggaggaacctgccatgtccatggatgccaatggaaagataatttgggccaagcattcagaagtccagcaggccaacctaaaagcaatgggagatgctgaaattaaagatggtgaaagattgccactggcagtaaaggatatgggcagttgtgaaatataccctcagactattcagcacaatcctaatgggcggtttgtggtggtgtgtggtgatggggagtatatcatctacacagcaatggcattgagaaacaagagctttggatctgctcaggagtttgcatgggcccacgattcttcagagtatgcaataagagagagcaacagcattgtaaagatatttaagaactttaaggaaaaaaaatcatttaaaccagattttggagcagaaagtatctacggcggcttcttattgggagtcagatctgtaaatggcttagccttctatgactgggacaatacagaactcatacgaagaattgaaattcagcccaaacatattttctggtctgactctggagagctagtctgtattgctactgaggaatcattttttatccttaagtatctgtcagaaaaagtcttggctgcacaggaaacacatgagggagttactgaagatggcattgaagatgcctttgaggttcttggtgagattcaggaaattgtgaaaacagggctttgggtaggcgattgcttcatttacacaagttctgtgaacagattaaattattatgttggaggagaaatagtcaccattgcccacttggacaggacgatgtatctcctaggctacattcctaaagacaacaggctttatctgggggataaagaattgaacatcattagctattccctgctggtttcagtcctggaataccagacagctgtcatgcggagggactttagcatggctgataaggtccttcctaccattccaaaagaacagaggaccagagttgcacactttttggaaaagcagggcttcaagcagcaagctcttacagtatccacagatcctgagcatcgttttgagcttgctcttcagcttggagagttaaaaattgcataccagttagcagtggaagcagagtcagaacagaagtggaaacaacttgctgaacttgccattagtaaatgtcagtttggcctagcccaggagtgcctgcatcatgcacaggattatgggggcctgctgcttttggccactgcctctggaaatgctaatatggtgaacaagctagcagagggtgcggagagagatggcaaaaataatgtggcattcatgagctactttttacagggcaaggttgatgcctgcctagagctcttaattagaactggacggctgccagaagctgccttcttggcccgaacttacttacccagtcaggtttcaagggtagtgaaactctggagagagaatctctcaaaagtcaatcagaaagcagcagaatcccttgctgacccaacagagtatgaaaacctgttccctggattaaaagaagcctttgttgttgaagaatgggtgaaggaaacacatgctgatctgtggccagccaaacaatacccacttgtcacgccaaatgaagagagaaatgtcatggaagagggaaaagactttcagccctcaagatctacagctcaacaggaacttgatgggaaacctgcttctcctactccggttattgtggcctcccacacagccaacaaagaagaaaagagtttactcgaactagaagtagatttggataatttggaattagaagatattgacacaacagatatcaatctggatgaagatattttggatgattgactgtaatgctttccatttacctgactaaacagatcattattatatataggtattgattgctaccctgaccacagtgctttggactatgagaaacttcttagatttttatatgtaaatgctgtggaccactgggagcacaatgcccacatcatcttaagaagagtttatgtgcagcatttaaatcactgtgttttccttgttaactaaaacagacatgggctttgatttttttcatactattagaccatatctcataaaaccttttgaattaatgaaggtacttgtttcctttctcaataatgaaaataggcttctagttttagaaggctgagccgaaactacaccttgcctagggatcagccccactgtcttttctttgtataactaaatctgcattttcaaaagcgagaaaaacaaaaaaagagaaaaaagaaaaaaaaaaaaaaaaaaaaaaaaaaaaaaaagaaaaaaaaaaaagaaaagaacaaaaacagaagaaaaaaaaagaagaaaaaaagggaggcgggcggccgaagcagcaacagaagacatcggacgcaagagggaaaagcgagtgacgaacgcacgacacgcacagtgagctgacaaacgagcaggccaccacaaaaggagaaaaagaagacacgagacaagagaggcgcgcgcgaagtatcaaaaggcgggccaggagagaacaacacacggcgagacactaagcagaacacatcactcatgtgaggggcagaacaaa

SEQ ID NO: 669942 - DNA, 2729 bp, Homo sapiens
tcattctcatgtattttgattctgtcacttaaataagaggaccgtcagctgtcctaaagagaaactgaaaaagcatgtgctttggagtcaaacaaacctgggttcaaaatcaggctctgttatgtcatgaatgtgtgtttgggcaaattatgaaatggaaacatatatatctgcttcataaaattatagtgagaagaaattgtgggtagaaagcatctggcacataggaaacactttacccaggaaatcctgttattatttcatgtttaaaatcgtaattcttagtttttgtttcttatatgttatgtgttatgtttatgttgcttttaaaaatcatttaaagacagtaggtcaaaaaattggtcattaagctgccaggaagtgttatctgtttgaatagaaagacttctatgggtctctttcacctgacacagtttattgtcggatgtttgtatcaaaagggagtatttacattgttctgaagatggaacagtacgtatttggcattcaagcacctaccggcttgagagcacactgaattatggaatggagagggtatggtgcgtggccagtctaagagggtcaaacaatgtcgctttgggctatgatgaagggagcatcattgttaagcttggtcgggaggaacctgccatgtccatggatgccaatggaaagataatttgggccaagcattcagaagtccagcaggccaacctaaaagcaatgggagatgctgaaattaaagatggtgaaagattgccactggcagtaaaggatatgggcagttgtgaaatataccctcagactattcagcacaatcctaatgggcggtttgtggtggtgtgtggtgatggggagtatatcatctacacagcaatggcattgagaaacaagagctttggatctgctcaggagtttgcatgggcccacgattcttcagagtatgcaataagagagagcaacagcattgtaaagatatttaagaactttaaggaaaaaaaatcatttaaaccagattttggagcagaaagtatctacggcggcttcttattgggagtcagatctgtaaatggcttagccttctatgactgggacaatacagaactcatacgaagaattgaaattcagcccaaacatattttctggtctgactctggagagctagtctgtattgctactgaggaatcattttttatccttaagtatctgtcagaaaaagtcttggctgcacaggaaacacatgagggagttactgaagatggcattgaagatgcctttgaggttcttggtgagattcaggaaattgtgaaaacagggctttgggtaggcgattgcttcatttacacaagttctgtgaacagattaaattattatgttggaggagaaatagtcaccattgcccacttggacaggacgatgtatctcctaggctacattcctaaagacaacaggctttatctgggggataaagaattgaacatcattagctattccctgctggtttcagtcctggaataccagacagctgtcatgcggagggactttagcatggctgataaggtccttcctaccattccaaaagaacagaggaccagagttgcacactttttggaaaagcagggcttcaagcagcaagctcttacagtatccacagatcctgagcatcgttttgagcttgctcttcagcttggagagttaaaaattgcataccagttagcagtggaagcagagtcagaacagaagtggaaacaacttgctgaacttgccattagtaaatgtcagtttggcctagcccaggagtgcctgcatcatgcacaggattatgggggcctgctgcttttggccactgcctctggaaatgctaatatggtgaacaagctagcagagggtgcggagagagatggcaaaaataatgtggcattcatgagctactttttacagggcaaggttgatgcctgcctagagctcttaattagaactggacggctgccagaagctgccttcttggcccgaacttacttacccagtcaggtttcaagggtagtgaaactctggagagagaatctctcaaaagtcaatcagaaagcagcagaatcccttgctgacccaacagagtatgaaaacctgttccctggattaaaagaagcctttgttgttgaagaatgggtgaaggaaacacatgctgatctgtggccagccaaacaatacccacttgtcacgccaaatgaagagagaaatgtcatggaagagggaaaagactttcagccctcaagatctacagctcaacaggaacttgatgggaaacctgcttctcctactccggttattgtggcctcccacacagccaacaaagaagaaaagagtttactcgaactagaagtagatttggataatttggaattagaagatattgacacaacagatatcaatctggatgaagatattttggatgattgactgtaatgctttccatttacctgactaaacagatcattattatatataggtattgattgctaccctgaccacagtgctttggactatgagaaacttcttagatttttatatgtaaatgctgtggaccactgggagcacaatgcccacatcatcttaagaagagtttatgtgcagcatttaaatcactgtgttttccttgttaactaaaacagacatgggctttgatttttttcatactattagaccatatctcataaaaccttttgaattaa

SEQ ID NO: 669943 - DNA, 1569 bp, Homo sapiens
  misc_feature (1233)..(1233): n is a, c, g, or t
gtattttcccgtttgaggtcttggtagtttttattttctttttttataaaccatgtgggtgcccctttataatttacctaattgttacaaaatttcctcaggcattgggtctggtcgggatagatatttatggaagtctttccaaataccactttctttaaacgtggtgaacactcctagtggtttccccagtatttattggaaccagcttatttctggccggaattcactctattagattcaaattattgggctcttgggggcaccaaaaattggcgcgggttgtataagcgaggctggaaccccccgagagtatggtcccgactcgttgcgggtccatcgcggggggcatatatcgctcttccactattttaaatttagagacacctcctcctttctaacagacggttcactgggctttcccacagataacctggggctcccttccttattaaaaaggggggaaacacttgcgcagatttttatacaagagggaggcaggcacgaagatctctatgttttctccattatatatttttaaacaagcgcgctatattgtgagaagggcgctataaacggcgctttattataatttccagcataaccatgtaggagcgggtcgaaccgctggcgcgggtatataataaaaccgcttccaaacgttcccaaagacacttctttttatcaactcccctttctaccaccactctgtggtgagacaacccacgacgggttattttttactatcttcttctctcacaacgaccgcctcaggagacctcctcttaatttgaaaataaccagattttttcacaacccacacgggttgggccgtgggaacaacaaactttgtcggggccgggtcccccacaaaacgatgtggtttgggggcgcaacagattttctcccaccgctccatattattaacccctttagagaaggcggtaaaccccgctttatgttgagggcgcaattaaattcttccataccaaactaaaaacgttccagaaggggtccccaaacaacagtctatactataacagcgtcgttataaaagacacccacaaagacgtgtgtccacaaaacacactttttagtggtctcccccccaagaggattaaaccatattttttcgcgcgtgggttcccgccgtgggtgtcttgaggggcacaccacacaactgttgcccacacaacggcgtcaggctgcttcaaacattcgtctaccaccgcnttggttcgctacacaaccaagacagagggcggcccaaatataggggtgcccccccactttaaaggagttgctatatttgtcttccccacagaagaaacatcaataaccgttgtggagggaggaccattccctcaacacgcggtcagtctctctagggcaccagacgcttcgccgttcaaacgacaacacttgcgtgcgcgagtccatacgcaactacatactatctggcggcgacatcttcgaacaatatgatatcggcggcagcacgactgcccacccacagcacgcataacttctccaacgactgtccgactactacttagcggcgcacgtaca

SEQ ID NO: 669944 - DNA, 136 bp, Homo sapiens
gagatgcagatcagcacctgcttctctgtcttctgaactgtctgggaccatcatggctcacactgaaggttttgttatccatcaagtctaggatttttcaccctcgacgttaccatgtacccaatcatatagaata

SEQ ID NO: 669945 - DNA, 3577 bp, Homo sapiens
gatctggctcccggaagttccacgtcagtcagtctgacggtcagtggatcggtgggtttatctcaaggcctgagtagccggtaacaaacgagggttcccgggattggaccgacgcagccatgcctctgcgacttgatatcaaaagaaagctaactgctagatctgatcgagttaagagtgtggatctgcatcctacagagccatggatgttggcaagtctttacaatggcagtgtgtgtgtttggaatcatgaaacacagacactggtgaagacatttgaagtatgtgatcttcctgttcgagctgcaaagtttgttgcaaggaagaattgggttgtgacaggagcggatgacatgcagattagagtgttcaattacaatactctggagagagttcatatgtttgaagcacactcagactacattcgctgtattgctgttcatccaacccagcctttcattctaactagcagtgatgacatgcttattaagctctgggactgggataaaaaatggtcttgctcacaagtgtttgaaggacacacccattatgttatgcagattgtgatcaaccccaaagataacaatcagtttgccagtgcctctttggacaggactatcaaggtgtggcagttgggctcttcgtcaccaaacttcactttggaaggacatgagaaaggcgtgaattgcattgattactacagtggtggggacaagccatacctcatttcaggtgcagatgaccgtcttgttaaaatatgggattatcagaataaaacatgtgtgcagacactggaaggacatgcccaaaatgtgtcttgtgccagctttcatcctgagttgccaatcattatcacaggttcagaagatggaacagtacgtatttggcattcaagcacctaccggcttgagagcacactgaattatggaatggagagggtatggtgcgtggccagtctaagagggtcaaacaatgtcgctttgggctatgatgaagggagcatcattgttaagcttggtcgggaggaacctgccatgtccatggatgccaatggaaagataatttgggccaagcattcagaagtccagcaggccaacctaaaagcaatgggagatgctgaaattaaagatggtgaaagattgccactggcagtaaaggatatgggcagttgtgaaatataccctcagactattcagcacaatcctaatgggcggtttgtggtggtgtgtggtgatggggagtatatcatctacacagcaatggcattgagaaacaagagctttggatctgctcaggagtttgcatgggcccacgattcttcagagtatgcaataagagagagcaacagcattgtaaagatatttaagaactttaaggaaaaaaaatcatttaaaccagattttggagcagaaagtatctacggcggcttcttattgggagtcagatctgtaaatggcttagccttctatgactgggacaatacagaactcatacgaagaattgaaattcagcccaaacatattttctggtctgactctggagagctagtctgtattgctactgaggaatcattttttatccttaagtatctgtcagaaaaagtcttggctgcacaggaaacacatgagggagttactgaagatggcattgaagatgcctttgaggttcttggtgagattcaggaaattgtgaaaacagggctttgggtaggcgattgcttcatttacacaagttctgtgaacagattaaattattatgttggaggagaaatagtcaccattgcccacttggacaggacgatgtatctcctaggctacattcctaaagacaacaggctttatctgggggataaagaattgaacatcattagctattccctgctggtttcagtcctggaataccagacagctgtcatgcggagggactttagcatggctgataaggtccttcctaccattccaaaagaacagaggaccagagttgcacactttttggaaaagcagggcttcaagcagcaagctcttacagtatccacagatcctgagcatcgttttgagcttgctcttcagcttggagagttaaaaattgcataccagttagcagtggaagcagagtcagaacagaagtggaaacaacttgctgaacttgccattagtaaatgtcagtttggcctagcccaggagtgcctgcatcatgcacaggattatgggggcctgctgcttttggccactgcctctggaaatgctaatatggtgaacaagctagcagagggtgcggagagagatggcaaaaataatgtggcattcatgagctactttttacagggcaaggttgatgcctgcctagagctcttaattagaactggacggctgccagaagctgccttcttggcccgaacttacttacccagtcaggtttcaagggtagtgaaactctggagagagaatctctcaaaagtcaatcagaaagcagcagaatcccttgctgacccaacagagtatgaaaacctgttccctggattaaaagaagcctttgttgttgaagaatgggtgaaggaaacacatgctgatctgtggccagccaaacaatacccacttgtcacgccaaatgaagagagaaatgtcatggaagagggaaaagactttcagccctcaagatctacagctcaacaggaacttgatgggaaacctgcttctcctactccggttattgtggcctcccacacagccaacaaagaagaaaagagtttactcgaactagaagtagatttggataatttggaattagaagatattgacacaacagatatcaatctggatgaagatattttggatgattgactgtaatgctttccatttacctgactaaacagatcattattatatataggtattgattgctaccctgaccacagtgctttggactatgagaaacttcttagatttttatatgtaaatgctgtggaccactgggagcacaatgcccacatcatcttaagaagagtttatgtgcagcatttaaatcactgtgttttccttgttaactaaaacagacatgggctttgatttttttcatactattagaccatatctcataaaaccttttgaattaaaaaaaaaaaaaaaaaaaacaaaaaaacttggtgtgcggcgcgcgcgccctcgggccctccggagaaacagtttctttaaacacatatccggtgtgggcgcgcgcgcggggcgcccaaggagggtaaaggggaccatgtgggccatataggcggggttccctatagggagagactccgggcgcccagggacataggggcgggggatttctctccccatatataaaaaaccgcgccgcggggggaaccgcggagggtttctgagaaaaacttcacaagagagggagagttgcgggagggtccatagaggggggagccttattacacacagagggaggtccaaagcggagacgcccagattactccaaaattaagcgccccggacacccggggggggaaatgacaaacgacaaaacaacagaaagaaaccaacacgaaaacaaaaaaaacacaacaaagacaacaaac

SEQ ID NO: 669946 - DNA, 514 bp, Homo sapiens
tgggctcacgagttccacccggcacagactccaaagctgcggagatgtataagcatgagccaccatacctacccacataatcacctctaccagacctaaactctcaacactgattacactggggattgagtcttaaacccaaagcatgctaggagggacacattcaaactgtagttatatgtcggattatgttgtatatagcccactgtatccaaactataatatcaacaagttgacacatataatacagttagtaactgtgctattatacattcattactaagtctttggaaactcatgtatattttatacttatagatggccgcataagcaatggcccctaggttaactagttggataaacataaccagctggatagtccaggtctagaacaatgatagtatttccagcagtggacatcagatcctagcagataacgaaaggctctagaaagtgactcaggccttgaggaggtagtgtatgctgaacaggctgatcatatggtatcacccag

SEQ ID NO: 669947 - DNA, 253 bp, Homo sapiens
attctatatccccgccgcgtcctttctccataaaattcttcttagtagctattaccttctttttttttttaaaatttccgttgaagtttttttaatccccaaaatctcctttaagtaaacacggcatcttacaatcaatccatctttctttttttctttttttctttttttttttttgggagagggagtcaaacccgaacacgggggaatcctcaaaagtcaacgggagggtatgcaggtcggggcaggggcg

SEQ ID NO: 669948 - DNA, 3230 bp, Homo sapiens
  misc_feature (3024)..(3024): n is a, c, g, or t
gatctggctcccggaagttccacgtcagtcagtctgacggtcagtggatcggtgggtttatctcaaggcctgagtagccggtaacaaacgagggttcccgggattggaccgacgcagccatgcctctgcgacttgatatcaaaagaaagctaactgctagatctgatcgagttaagagtgtggatctgcatcctacagagccatggatgttggcaagtctttacaatggcagtgtgtgtgtttggaatcatgaaacacagacactggtgaagacatttgaagtatgtgatcttcctgttcgagctgcaaagtttgttgcaaggaagaattgggttgtgacaggagcggatgacatgcagattagagtgttcaattacaatactctggagagagttcatatgtttgaagcacactcagactacattcgctgtattgctgttcatccaacccagcctttcattctaactagcagtgatgacatgcttattaagctctgggactgggataaaaaatggtcttgctcacaagtgtttgaaggacacacccattatgttatgcagattgtgatcaaccccaaagataacaatcagtttgccagtgcctctttggacaggactatcaaggtgtggcagttgggctcttcgtcaccaaacttcactttggaaggacatgagaaaggcgtgaattgcattgattactacagtggtggggacaagccatacctcatttcaggtgcagatgaccgtcttgttaaaatatgggattatcagaataaaacatgtgtgcagacactggaaggacatgcccaaaatgtgtcttgtgccagctttcatcctgagttgccaatcattatcacaggttcagaagatggaacagtacgtatttggcattcaagcacctaccggcttgagagcacactgaattatggaatggagagggtatggtgcgtggccagtctaagagggtcaaacaatgtcgctttgggctatgatgaagggagcatcattgttaagcttggtcgggaggaacctgccatgtccatggatgccaatggaaagataatttgggccaagcattcagaagtccagcaggccaacctaaaagcaatgggagatgctgaaattaaagatggtgaaagattgccactggcagtaaaggatatgggcagttgtgaaatataccctcagactattcagcacaatcctaatgggcggtttgtggtggtgtgtggtgatggggagtatatcatctacacagcaatggcattgagaaacaagagctttggatctgctcaggagtttgcatgggcccacgattcttcagagtatgcaataagagagagcaacagcattgtaaagatatttaagaactttaaggaaaaaaaatcatttaaaccagattttggagcagaaagtatctacggcggcttcttattgggagtcagatctgtaaatggcttagccttctatgactgggacaatacagaactcatacgaagaattgaaattcagcccaaacatattttctggtctgactctggagagctagtctgtattgctactgaggaatcattttttatccttaagtatctgtcagaaaaagtcttggctgcacaggaaacacatgagggagttactgaagatggcattgaagatgcctttgaggttcttggtgagattcaggaaattgtgaaaacagggctttgggtaggcgattgcttcatttacacaagttctgtgaacagattaaattattatgttggaggagaaatagtcaccattgcccacttggacaggacgatgtatctcctaggctacattcctaaagacaacaggctttatctgggggataaagaattgaacatcattagctattccctgctggtttcagtcctggaataccagacagctgtcatgcggagggactttagcatggctgataaggtccttcctaccattccaaaagaacagaggaccagagttgcacactttttggaaaagcagggcttcaagcagcaagctcttacagtatccacagatcctgagcatcgttttgagcttgctcttcagcttggagagttaaaaattgcataccagttagcagtggaagcagagtcagaacagaagtggaaacaacttgctgaacttgccattagtaaatgtcagtttggcctagcccaggagtgcctgcatcatgcacaggattatgggggcctgctgcttttggccactgcctctggaaatgctaatatggtgaacaagctagcagagggtgcggagagagatggcaaaaataatgtggcattcatgagctactttttacagggcaaggttgatgcctgcctagagctcttaattagaactggacggctgccagaagctgccttcttggcccgaacttacttacccagtcaggtttcaagggtagtgaaactctggagagagaatctctcaaaagtcaatcagaaagcagcagaatcccttgctgacccaacagagtatgaaaacctgttccctggattaaaagaagcctttgttgttgaagaatgggtgaaggaaacacatgctgatctgtggccagccaaacaatacccacttgtcacgccaaatgaagagagaaatgtcatggaagagggaaaagactttcagccctcaagatctacagctcaacaggaacttgatgggaaacctgcttctcctactccggttattgtggcctcccacacagccaacaaagaagaaaagcagcctgatccttggccccttgagccgactggccatctggatggagcacgtgatacagctggaccaagttggttgcatcatcgattctgagaatgaaagggtttaatgttatctaggggttttcttcatttgattcacagtcctataaaagtgtgtgccaacttcaaactaaattacatttcagactttcctcaggctggagggattggggaaggaccttcagttttacagtttcaaaagcattttcaggaaaattgactaatttaggcctcacaccaantccgtgaggcagctagggcaggagtcactgcaggaagtgtccaatttatgaaagtgaatatattccaaatgtggctatattctttttggaaaaagagcaccatttctcacagaaacagcattcctaatggtagacaatttccaggccagcttttcacacagctgacactttcccaccattgccatctcactgtggggaggggtcgc

SEQ ID NO: 669949 - DNA, 1357 bp, Homo sapiens
agcggatgggaatctaatgccgttacaggcggagtttaggcggtaatgctcactcacccacccacccactgctcaccctctgctgtgcggcctgattcctaacaggccacagactggttgtttgggagacccctggtttaaaagcttgttcttaatgccttaatggagcatgggaaggaaattttagacttcctgtcttttggatacttgctgaggaactggacttgagaccaacaataaaggaatagggcttcaagcagcaagctcttacagtatccacagatcctgagcatcgttttgagcttgctcttcagcttggagagttaaaaattgcataccagttagcagtggaagcagagtcagaacagaagtggaaacaacttgctgaacttgccattagtaaatgtcagtttggcctagcccaggagtgcctgcatcatgcacaggattatgggggcctgctgcttttggccactgcctctggaaatgctaatatggtgaacaagctagcagagggtgcggagagagatggcaaaaataatgtggcattcatgagctactttttacagggcaaggttgatgcctgcctagagctcttaattagaactggacggctgccagaagctgccttcttggcccgaacttacttacccagtcaggtttcaagggtagtgaaactctggagagagaatctctcaaaagtcaatcagaaagcagcagaatcccttgctgacccaacagagtatgaaaacctgttccctggattaaaagaagcctttgttgttgaagaatgggtgaaggaaacacatgctgatctgtggccagccaaacaatacccacttgtcacgccaaatgaagagagaaatgtcatggaagagggaaaagactttcagccctcaagatctacagctcaacaggaacttgatgggaaacctgcttctcctactccggttattgtggcctcccacacagccaacaaagaagaaaagagtttactcgaactagaagtagatttggataatttggaattagaagatattgacacaacagatatcaatctggatgaagatattttggatgattgactgtaatgctttccatttacctgactaaacagatcattattatatataggtattgattgctaccctgaccacagtgctttggactatgagaaacttcttagatttttatatgtaaatgctgtggaccactgggagcacaatgcccacatcatcttaagaagagtttatgtgcagcatttaaatcactgtgttttccttgttaactaaaacagacatgggctttgatttttttcatactattagaccatatctcataaaaccttttgaattaa

SEQ ID NO: 669950 - DNA, 428 bp, Homo sapiens
ctctcaggctcccgagacctcacaacgagaccacacatagtgtctccctctctccttagagctacgtatcgctctctcgaaactactcgctatagccacgagtagctatacagttaaactaatactgctacgctgaacactataacccacaccctatacagcttagaaatgtatgtcaatcagtaatcaaggtctgtcctctagtaaatacgtaagattctcctgacaatttcgtatcagcccactctctatctcttttcgcctttaaaaatccacttgtaactgctgctagataccaggcaacttgaatctttgctcccagtttacaatcttcaagcttggcccaagtgaactgtctacttacatttgtggttcctcagctttttcctatgaaggaggacaatcaggacatattatttagaatgtgc

SEQ ID NO: 669951 - DNA, 1675 bp, Homo sapiens
  misc_feature (759)..(759): n is a, c, g, or t
  misc_feature (1164)..(1164): n is a, c, g, or t
gaagatgccggccgagatacggctacgtgagcctgggtgcgcctgggggtcgcgcaaggtgcgcgtcttgctgccccgggcatgcgtttcgcgccccgtggatccgctgtgcgaacgcgctgaacgagcgttcgctctgacctgggctgaatcctctacggacggaaggctcggggctttcagcagccctgcgtgtagtgcttcgtcggcatgtgacgttagagactcgagggtctgctcgtgaggggggagcggtggggatccaatgggccacgttgggcattgccgagaggggtttcacaccgaaaatagacgggcatgggctggcggcgtacacagcgcctttggtgggtataccactatggtcaggatgggaccagcacaagcgggtaattgccgaagagcgagtggagaatgcgcagttccgttccctgagccgggtgcccattacaccttttcgagtacgacagaggcaccccatgcctcgctgggtcgaatacgccgctgtaaggcctccctccaggatagtaggcattggtcctaaaagggtctgggcacccgcaatgcaattccagggttggtgagtcttaaacggcgcggagaagggagcgcgcggagggtccccgggtgaacgtaaccacgccattcctgtcgagggggaatctcacaaaggaatccctaaatggggagaccgcatagagaagaagcaatcggcaaaagggccaaagagcaaaaaagcctgggcaataggcggaaaangagagacggcgtaaacaaggaaaaaagataccccggaggtggggctgaaagggcatgacccgaagaagcacacttggagggtaccggcaacaccggtggtattggacctggtcccaaagttgtaagagctcccgcgatttgtggaaaaccgaaagaggggcgtccacacactgggacattgtgtgaccgggaccaacaaattcgcccttgggcacagagtcaacacgtgttgaaagaccactgacaaaaaggggccttcagcgattggtggccacgcggcgcttctgaacccaatgttcacgcgtgacactttgaaacagacgccgaacaaaggtcgagagacacaattggatccgagacacaagcagaacaaccaaggtggcgtcttggacgcggaggcgacgnaaaaggatgcatctggaatgtgtgccagtgtcggaaacaggcaaaggaacagtttgtgacgagaccaatgtgcacccgtcttttgtacaggggacagacgacaaacatgtgctgtcttttgacacacaccattggcatgggggtctaggtgacccacagagaaagagaggaccaacattgtgagaattccgagagcgaccgaatcgcgcatctaacgcaccgctggaatccgcgaaaggtgggcgccataaaagaggcgaagactcagtggtgtggagcatggccacccaggctggagacagtcgtggcaaggcgcaaattgacgaaaccaccctgtgtgaagaacgcaagttgccaaatcgcgagaggagagcatctgggacaagaccaaagagatggagggttggacatgaagaaaatggagagataaccaacagaagaacgagcagcgaggagagtggcaacgcccacgatctgtatgcagcttcccacgtgagaggacaccacgaga

SEQ ID NO: 669952 - DNA, 525 bp, Homo sapiens
ggtgctggaagtgatatctgggcttctattggactatctggtgtacactgggcaaaggttacagatgctgctggaattctaacctgcgctgctggccctttcccacgggttttgggcctctcagaaggggcaaccactgaagaagtacatcggagctaccaggagctcgtgaaggtctggcacccagaacacaaactggaccagacagaggaggcacagaggcacttcctggagatccaggctgcgtataaagtcctgagtcaaaccaggaagccctggggatcccggaggtgaacagaaacttccccctgaggactgactcttcctagcagagctgggcaaattgtcccaaatctagctttgcccaagaatggcatcccagcagagttcacgcacctgcttgcaggggctgggcgtggtggctcatgcttgtaatcccagcactttgggaggacgcggcgggcagctcaccgacggtcaggagttacgagaccagcagcctggacaactatcggtgacacttcg

SEQ ID NO: 669953 - DNA, 840 bp, Homo sapiens
  misc_feature (487)..(487): n is a, c, g, or t
ccagagacttgtgtactcgatggaaggaccagcataacccacacagcccttcctttccttggtgtgcacgatggctctatgcagtcttatctccagctgggcctctgggttcaggtcagacgagtgaccacggaaaggaggtgcgtgacagcctactagttgtgcgtgtcaaggctgtgcgtgatgcaccagagatgatctccagcgggggatggttcccagcaggaacggagagcgagtgatcagctcagcgtcggcggtctgtaaggtcatgcaccccgaaggcatatgcgacgtaaggcggtctttcgtcatccactggtgaacgacagaaagacaaactggtggctattggccatgctatgtacgacaggacttgctctacaccaaagccaatccaactgtttcactcactgtgacaggtcgactacactacgcgacagctttggactatactttccaatagcccctgacttgatgccccgangccttcgaccacgggcgacgataaggagaagcaactcgaagcaccttactagaaggttcaacaaacgtgcatctttccatccagtccataactgcacagctgcagcttggcagatgatgacggttttttagcaacaaggcatacagacaggttcttgctaattcctctcagacagagagagcagaactacgtcggaccaatctccgtctcccatactccttgtgagcacccgggaggattatattaccctggggacagcgtccccggactcaataccccaacatgacccacttattcaacttcgatccagcgcgatggccaagggcccttaccggccagcgtgaagctttccc

SEQ ID NO: 669954 - DNA, 285 bp, Homo sapiens
cggccccctcccccacctccgcccttttgtgcgtggcagacggaaaattgaaagtacctcggattggttgctttccataactaattaaatgtttgcatagggtgtaacctttgtaacttcgcttcaggctctgattggttgctttccgctatcagactgattgtgggccactatatttgcgtggggtgtacaccaagtggccaatgggaaacctctagagggtgtttataccccagaaaattctataacccggccgcaccgctcttgagccccatgtttcggctc

SEQ ID NO: 669955 - DNA, 288 bp, Homo sapiens
tttagtagagatgggggtctcaccatgttggccaagctggtctcgaactcctgacctcaaatgatctcagttcactgcaacctccgcctcccgggttcaatccaattctcctaagtagtaggggttacagatgcgcaccaccgcacctggccaatttctgtgtttttagtagagactgggctttgccatgttagccatggtttgccaggctggtctcgaactcctggaactcatgtgatctgccggcctcagcctcccaaagtgctgggactacaggtatcctcagtc

SEQ ID NO: 669956 - DNA, 360 bp, Homo sapiens
  misc_feature (12)..(12): n is a, c, g, or t
gatccccctganttgtcaggtctatggttcttctcatgtgtctccatgcttgcttcttatagatgacatttgccacctgaactctgtgacagtgttggtgtctcatgggagtcaccgccactgcctccgctctgtgcctgcgtgtcaggctccctattataccatgaattcatctaaaggccctggatcacatgcattctactattgctcacagcctcagcacccagtaaggtcgctgaattggggccaggcacagtgcgctcacgcctgtaatcctcacactttgggaggccaaggagttcaagagcggcatgggcaacaaggcgaaaccccatcgctacaagacctgagcgagccacg

SEQ ID NO: 669957 - DNA, 136 bp, Homo sapiens
  misc_feature (112)..(112): n is a, c, g, or t
agataatgggtgttactaagctaaaaagctctatacagcaaaagaaacaaccaacaaagtgaagagataaacaaagaatagaagaaagtgtctacaaactgtcatatctaanaaagggctagtgaggttccatcag

SEQ ID NO: 669958 - DNA, 102 bp, Homo sapiens
gactttcgggtcgtgcggtctttggtatgcgcctttacctgtctaagcttgcttacaatgtggacagattactgtaacattctcacgtgtagaatcactgga

SEQ ID NO: 669959 - DNA, 249 bp, Homo sapiens
gtctcttgccactctcttcccaagattcttttcccaatttcccgttccaggtcatggtaagcatcatcgggtctcggtgctggtcatttcagcctgtcagcagggcagtttcaccacccggcgttgggggcgtgccattccctcaagccacaccgggcagcgcatctcagcaggtgccagcagcggcatctcagcaggtggccaggggtcactgcagcgtcgcacattcggtcagtccatgggtccatc

SEQ ID NO: 669960 - DNA, 345 bp, Homo sapiens
tactttcagggagagggttcaggtccaggaccttctggagctctttgagaactccagaataagaactcttttaggctgggcgtagtggctcgcgtctgtaatcccagcagtttgggaggtcgaggcggtggatcacctgaggtcagcagtttgagaccggcctggtcgacatgatgacatcctgtcaatatagaaattagccgggcctggtggtgggctcctgtagtcccagctgcttgggaggcggaggcaggagaatcgcttgaatctgggaggtggaggttgcagtgagccgagatcacaccactgcactacagctgggacaacggagtgagactgcgtctc

SEQ ID NO: 669961 - DNA, 213 bp, Homo sapiens
gcatggaccatgatgccaagatgaggttgtcagtacactgacaccaaactggcgggatggcagcagcttattctgccatataaccaggtcttatgagattgacgtcacatctaggggctgatcaccccacacttgtaacgcctgcctgtgaggttcaccacacttttcccagactctgtggtcttcactgatttcaaattcgccaatatcacc

SEQ ID NO: 669962 - DNA, 147 bp, Homo sapiens
atgacttcggcttcattaacgcagatttcttatctccaggaagttcaaataaacttctcccttaccttgtttggagccccattccactctacaacttcctttgtcaataagggacaatcacccaggggagcaaagggtggaggtccc

SEQ ID NO: 669963 - DNA, 338 bp, Homo sapiens
atacctttaatatgtcacgatgttaaaactggtcagatgtaaaggaagtggggctaacatttcctctggggatgctgaaagtggtgggtttactcagactctcacataaattcattggcttttcccttctccttccacctctattagctcttcatctcctaggggggattctgatgtctgtatggagctggccgtcatgccgggagtggcctgctcatgtatttacatgcgtgctcatctaggctatcgctgagcgcgctgcagctccttaccggctccaggtgcgcagggctccgccgcaaccaacgacctgacgtgccacgagccagggcgcgaac

SEQ ID NO: 669964 - DNA, 857 bp, Homo sapiens
ctgtggtccaggatgaggaggtggggctgcctttgaggctagccctgagtcaccaccacctgcgtcccggaacggtgtcactgatgatccagaggcctgctggcccaaggtctgcggactgagagccgccgccaacaggcacggcccctgcctcaaacggaggcccccgactgcgggagagtccccagcctaacggcacgccccctgaggccatcacctcgaccgccatgtctcaccccatccagcagtctcctgcgctgagaagaggctgtggacactatggacaccacacaaaggcccagacgaccaggacagactgggagagcacggtgtcacacgaccccagcagacaaaacacacaagaagcccacccaagaacagcacacaacacagacaggcgaacaaagaagcaaagagaggatgccaaagaacaaggaaccgatacatacaagacccaacgaagagagaatccaccaagcaacatggcatggcaaccaatagagcaaccaagacgacacacggagagaccaccattaccagagaacacaccacgcagcaagagccatacaaagacatccatggaggaacggagaaaaaacacatggcaaaacaagacgacacataagatgacaatggacagagaaggagcgaaaacagaacaaggaagatagggacaaaaccagacacaacgacagaacaacagaagagcacaaaaccaatggaaaaaatacacactacaaaatagacgagaataacacagaacaaaaaccaaacacatcagcacaaaggaacaaacgaccaatgaataaaacacatcatataaagcatgaggacaatgagacacccatccagacaag

SEQ ID NO: 669965 - DNA, 338 bp, Homo sapiens
tgtgtacagggctcacacctgatctcattcctgggttcctagctcctcctgaaggtgccgtatgaggtacctatgcactttccaaacgctaaagtgaatacgcacttggagaacacttgcttgatactatagtggcattgccagataacgcggacaaagtgagaactacgcaggtatatggatgctgccttgccaagacctcactcacccagacactcctggatactcaaaggtgaccagccctattgacgcacaggcaggcacaaggatgcaaccccacagatgggacccagaaagcttgaacgctaatcatgaagcagctgtataaggagagaata

SEQ ID NO: 669966 - DNA, 325 bp, Homo sapiens
  misc_feature (238)..(238): n is a, c, g, or t
tgtagaccccagcgccgcgctttttgagaatatagtattctcaatatgagaagtttctggacaaaagaaaatcccttgaaaataagacttcctctctgtacacgcatctcatatctcaagcggtactgaatacaggaatgctgactcctggggaggcaatgccttttcaatttttcaaattcaccatgccaaaaatggaacatttgaaaatactgcaataattgactacattcgccgnattcatctgaatgttacattttgacactcagcatattgattttaacacctgctgcggctttctatgcaaagaaatatggcccagaag

SEQ ID NO: 669967 - DNA, 280 bp, Homo sapiens
accccccccccccctttttttccggggggggggggggggttccaaaccgttttttttcattgggcccttttgttttgggggtaaaaggggggtttttttaaccaaggcttgggacaccctcccaagggaagggggattgtttttgggcccccttgggttttttttttggggggggggggttttaggtttttggtttttaaaaccgggcttttttttggggacccccttgccccaaattttttcccggatttttgggccccttttaaaagttttaagggga

SEQ ID NO: 669968 - DNA, 312 bp, Homo sapiens
tcgacgcatcatcacgctccggcctggatgatgcaatcatggcttactgaagtcttgacctcccaggctcaagtgatcctcccacctcagcctcccgagtaggtgggactacagatgcttgccaccatgcccacctaagttttgtatttttttgtagagacggggttttgccatgatggcagtctggtctcaaactcctggcctcaggtgatccacctgccttggctcccaaagtgctgggattacaagcatgagccaccacacccagctctgtctaatgtttttggtagagacaggggtcgacgcggccgg

SEQ ID NO: 669969 - DNA, 175 bp, Homo sapiens
ctagaggatccctgttgtcatacctgcactgttgttcatacctgcactgttgttcatacctgcactgttgttcatacctgcactgttgttcatacccacctatcttcctaagatggagatccctccaagatcaagtggtgcgatgcgtggagcggagtactgtcgtgaagtccac

SEQ ID NO: 669970 - DNA, 347 bp, Homo sapiens
cagttacggtatgtctccctgcaacacagctgttgtacctcatttgtggtctgtggaagccttaaactctccagctcagaggcctttggttccccagaggccgctgcagaacctcctcagccaacggcagttcccttagagctagccaaggagatagagatggcatcagaagagaggccaccagcacacgcagtggaaataatgatgggactgaagactactgacatggcaccatctaaagaaacagagatggccctcgccaaggacatggcactagctacaaaaaccgaggtggcattggctaaagatatggaatcacccaccaattagatgtgacactggccaag

SEQ ID NO: 669971 - DNA, 488 bp, Homo sapiens
taccctatacgcacgatttatggttcaattatactactaccttattataatactcccattaatgcattaaattaggaataaagtcaaatactcaccatatattcaatatgatgtcctacatggctgaacacaaatcagacatttacaaagtctcgtctctgggaaccccttcgcgcccatttcattttgatatttttaatcatattcaaccactcacattttggctatgtaaagtcatagctcaacttgttcccttactgctctgcagcagatcacctgcctgtctcttttcaagtctaaagcagaaaaacaaaaaacaaacaaacaaaaaaacctgttctaaactaatcctcaaactgcctcagtcagtccttaaaacgtgttttaagtgatgctatagaaggtgttttaaacatctgacgtcgtacaaaaaaaattccatcagtattctgggcacagaagcccatcctcagtaaggggtacggctg

SEQ ID NO: 669972 - DNA, 663 bp, Homo sapiens
  misc_feature (114)..(114): n is a, c, g, or t
cctccgtgataacagatagagcctcccctgataatacttttgtggtccaagggcccctttttccgccagaaagataattcttccgtttatggtggttctgggtttgttcttccnggccccttggttgaagattttttccatgcgtcgccacctctgttgggggaaaagtgttgatttattgccttgcccccccgcacccccacgtccgaaagttgtgatgcttttatttttacaaaccgcccggcccccctcccggaaatgtaaaaaagggggttgggaaagttttcccctgggccctaattccaacctgcccaaggatttgcttttttctattatggggaaaactcttttctggcccaggttttcccaaggccctaaaaaaaaaattttcctttttgggtagaagggccgaaattttggaaggaactaaattttccccccattttaagggaaaaatggccttttttaaaaaaggttttataaatttggttccttttcccctccaactctggaattccccaaaaccggccaaggtaggggaaaatttaaaattttcccccttttttttttgggaattaaaccaccccttactataacccttttagaggaatggggacccccgccggcctttaggaaaaaaaaggccttgtttttccccgtgga

SEQ ID NO: 669973 - DNA, 961 bp, Homo sapiens
  misc_feature (163)..(163): n is a, c, g, or t
aggaagaggaggcgggatccgggcgctgcgttggctgcgggcttggtaccaaatggggcgtgcccgtgccggatgagctggacccagatggaccgtcggctgattatggagcccggccgatggcgtgtgctgcaaggagaaggcactcgaagtttatgtgctnctatgccgcaggtcttctgtgtgctggtgctggctccatgccttggcgtgacaggcatgccgttcagctgcgagtgccttgtagtaagcccagggaactggcagcagctcacagcttttccatgatcattgaacagagacagagaaactgaaattcatgacttgtcacgacatatcgagtcacgggtgccgggcacgggtgatgcacgggttataatcctcagcgactttggaagggccagggcctggcggatcacattgagcccaggagttcgagagcagcctgggcaacatagtgagagcctgtctctacaaaaaattagctgggtgtggtggtactcacctgtcccagctatctggaaggccaaggtgtggaggtcaaggggctgcagtgagccatggattgggacactggcatttctagcctggggtgacagagtgagaacctgtttcaattaagaaaaatagatggatagatagatcgatagatagataggatagatagattgatttgtatgggccctagaattacttttgggtatcaaggtgttaccaggtaattttagggaaactcttggagcttaagtgacagggggatatttttaacattcaggctaaggggtccatggtcaccggttgggaaattgttcttgggatccacggagaaaatgttggagtttacttccgtaacaaaagcgttccaaggacacacggggatacccacggttcacagcgggtctgctaccctgtgaccaaacacggcagcataacgagagttatcaactatatatattagcag

SEQ ID NO: 669974 - DNA, 1510 bp, Homo sapiens
taaaaagggtcaattctattttatgggttctgaaagggaggattcacccaggtggatccttttccctacacttctccccttcccccaaatattgaggcctctcttcccaacttacgtggcatattcagcattctctaatctaaccctcctttccccttcatacttccataatactatcctaacccgtgccagaagtaccccaagggccagggcccctcaagcgtggtgggaggcggtggagcagtgagacaaccaagacaaagggacctgagcccgggcgccagccattcactcacagtactgacgcaggacaacagggtaccccgggggtgaacactcagagaaggcctctcgtggcagtgtgccctcacgtgggcagagctgggcgccagaacatcccacaaccttcacagagagtggacaagaggagtgaaacgggggggaccacacaccgagggcacaccccgaggcacgctgcacagccaacacgacaacagagctcacgaccagccctgccgcacaaaatccgggggaaagagcgcccacacgacggacgggccacatagatggcggtcgaaccccgtgtaccagaccagcgttggcaccatgagtaccgcggaaacaggaccctctaggggggcgcgacagcgtgatacacggcacaactgcggcatgcgccaagggggacccaacacagaccatgcgcgcgacaagcggggtacccaccccccaagattagctccagcgaaagacagaacccacgcgcagccaccgtgcgtgtgcgcaggccgggaggaccccccagaagatcgatcctgtgtgcgcacaacgtgtgggcacgacacccggggaccacaaagtccgcaccacggcagacacagcgagtagttacacagcacacaacggaaagccacacgcaggagccccaccacgcggggcgtacacatcgtggcgccccaaatattaccgggcagaaggccgcccatcacagaacaaagacatcccaccgggggcctgggtggaaacaacacagaaacacgttctcacgtgtgtccactacacagcgagagcggccaccaacagaatacgaccgacggcgtccacaccaaaaatatgatgcgcacaacaacacatagccgcgagagagccccccaaggggacttatttcgcaacagggcggctaccatgctgggcgcgggaacactaaccacatacggagcagccgtctggtagcgccaacaacaaagcacgggggggccaccccatgagagacagacgtgaagaggaaacaataaagggggcacgctgggtcacctccagtaggtgggaacacaacggagcgaggggggtgtgatccacaccaaaggacgaacgcgggtgccacccagctgcggcgaggaacgtaagcgcacctcccagcggggaggcgcagcgctactaaaacaagacggactgcgtatgccccacctcgctgctggacgtcgtagcaggtaaacacagccgcgagtat

SEQ ID NO: 669975 - DNA, 1871 bp, Homo sapiens
gatctggctcccggaagttccacgtcagtcagtctgacggtcagtggatcggtgggtttatctcaaggcctgagtagccggtaacaaacgagggttcccgggattggaccgacgcagccatgcctctgcgacttgatatcaaaagaaagctaactgctagatctgatcgagttaagagtgtggatctgcatcctacagagccatggatgttggcaagtctttacaatggcagtgtgtgtgtttggaatcatgaaacacagacactggtgaagacatttgaagtatgtgatcttcctgttcgagctgcaaagtttgttgcaaggaagaattgggttgtgacaggagcggatgacatgcagattagagtgttcaattacaatactctggagagagttcatatgtttgaagcacactcagactacattcgctgtattgctgttcatccaacccagcctttcattctaactagcagtgatgacatgcttattaagctctgggactgggataaaaaatggtcttgctcacaagtgtttgaaggacacacccattatgttatgcagattgtgatcaaccccaaagataacaatcagtttgccagtgcctctttggacaggactatcaaggtgtggcagttgggctcttcgtcaccaaacttcactttggaaggacatgagaaaggcgtgaattgcattgattactacagtggtggggacaagccatacctcatttcaggtgcagatgaccgtcttgttaaaatatgggattatcagaataaaacatgtgtgcagacactggaaggacatgcccaaaatgtgtcttgtgccagctttcatcctgagttgccaatcattatcacaggttcagaagatggaacagtacgtatttggcattcaagcacctaccggcttgagagcacactgaattatggaatggagagggtatggtgcgtggccagtctaagagggtcaaacaatgtcgctttgggctatgatgaagggagcatcattgttaagcttggtcgggaggaacctgccatgtccatggatgccaatggaaagataatttgggccaagcattcagaagtccagcaggccaacctaaaagcaatgggagatgctgaaattaaagatggtgaaagattgccactggcagtaaaggatatgggcagttgtgaaatataccctcagactattcagcacaatcctaatgggcggtttgtggtggtgtgtggtgatggggagtatatcatctacacagcaatggcattgagaaacaagagctttggatctgctcaggagtttgcatgggcccacgattcttcagagtatgcaataagagagagcaacagcattgtaaagatatttaagaactttaaggaaaaaaaatcatttaaaccagattttggagcagaaagtatctacggcggcttcttattgggagtcagatctgtaaatggcttagccttctatgactgggacaatacagaactcatacgaagaattgaaattcagcccaaacatattttctggtctgactctggagagctagtctgtattgctactgaggaatcattttttatccttaagtatctgtcagaaaaagtcttggctgcacaggaaacacatgagggagttactgaagatggcattgaagatgcctttgaggttcttggtgagattcaggaaattgtgaaaacagggctttgggtaggcgattgcttcatttacacaagttctgtgaacagattaaattattatgttggaggagaaatagtcaccattgcccacttggacaggacgatgtatctcctaggctacattcccaaagaaccaccagcacaagaaccacagggtaccgacgctcgaacttcg

SEQ ID NO: 669976 - DNA, 232 bp, Homo sapiens
taaggatccccctcagctggcccccaaggtacacgagttggtgcagctgcgttggcgatgctgtctcaggccatgcttaggggcatgctggatgcggacgggaaccagtttgtggcctatttcctgcctgtagaagagacgttgaagaaacgaaagcgggaccaggcggcggcgctggcctatgcaccagatgatgtgtatgactacaaaattgcttgggggccagctggag

SEQ ID NO: 669977 - DNA, 2202 bp, Homo sapiens
  misc_feature (649)..(649): n is a, c, g, or t
tcttgctgatcttttgttagccatacaatactcacttgtcacggttagtggccaggatttctagcttcatttattgtaactacagggtggaagtacattcaggacttcagattttgaactgctgtcttcttttaaaattaagagctgatttctgggatttaggccaagttcataggtaaattatgatttcagaatatctcatttcatcattgctttattctctgatagccaaatgaagagagaaatgtcatggaagagggaaaagactttcagccctcaagatctacagctcaacaggaacttgatgggaaacctgcttctcctactccggttattgtggcctcccacacagccaacaaagaagaaaagcagcctgatccttggccccttgagccgactggccatctggatggagcacgtgatacagctggaccaagttggttgcatcatcgattctgagaatgaaagggtttaatgttatctaggggttttcttcatttgattcacagtcctataaaagtgtgtgccaacttcaaactaaattacatttcagactttcctcaggctggagggattggggaaggaccttcagttttacagtttcaaaagcattttcaggaaaattgactaatttaggcctcacaccaantccgtgaggcagctagggcaggagtcactgcaggaagtgtccaatttatgaaagtgaatatattccaaatgtggctatattctttttggaaaaagagcaccatttctcacagaaacagcattcctaatggtagacaatttccaggccagcttacttcaccagcatgtaatagtctaatccaactcagaggacagaaacacagcttcatcccacataagcaggagggtggtggtcacagggatctcaaagtcacttgcctctaagtgacatttgctaacagacaaatgcctctacaagaggccccctaagattccaaggaaaggattcacaggaacgcattagtaaaatagcatcctagtgaagcaaatttgaaattatacacacacatcagacaaaaaggaaaatcgggttctacatcagcaatctgtcttaacttcagcatcacacaactacctatgaagaagacagaacaagaattcagttcttctggtctgtacttctcagaaatgtataaacaatttttatcaacattaaaactgtcctagcaaaaccaaacaatcactatcttttcacacagctgacactttcccaccatttgccatctcatcgctggagggcacagaaaaacgacactcaaaatgcttgtgcttttgaggctctgctatatacactaagtgaactactggcttccagttgggaatggagggctgaggacaccctaattcagtgcttccgcagctagcactcttcagccttccctgcgttccccttacctgagctgggggatgaagagcagggtgacagtgggagtaagtacagaattcctcaagccttggtagccttagagaaatgctctgggcttatactgaggctcatctaccctaaaggccatctctcaggaaaacagagctgttgtatcataaagcttttcagggggaaaaaaataaaaaatgttcatcacaaatctattgtgcttgttataatctaacaaagtccactaaatgtagtaacgaaatgtctccccaataaaaaattaagattccctttggagcttaggcatgtggccttataaagagcttaactggactgctacctgttggtatgttcagggcttcattaggttcatgcttaagtataatgcctgtgcctcacagaacaatttaaatttagcttaacaccccacccatacttaaagagcaaataaattatatttcgaaaagattttaaaataatctcaatataaaaaccaacagtgggaactgagtctggaataaatgtgtgcagaatcctaattcttttctgagctccactcagtgaggatatgcaccctctactgtccagcctgtggtttgcagtaagctcactcttctgttcagaatgaccacaggagggcctttacctaggaatagcaggaaaagctaagtaagtactcaaacttccctcccagtaagcatgaattgcttcagatgtaaagcttacatgtgatgagtaatactataatatcatacattaatatatcctaataaactttaattttcaaacaaaaaaaaaaa

SEQ ID NO: 669978 - DNA, 118 bp, Homo sapiens
ccgtctctaccttcgttcatgtttatactggtttctaccctcttgggaataaggaatccatctccgggtctattattgtccttaacgtatgatctctccataagataagttccataac

SEQ ID NO: 669979 - DNA, 112 bp, Homo sapiens
tgacgcatgcgatgctcaccgactggggaccgcaaaggggggggcacccgccttgtgcccccggaaggtgacccgcggccaaacgggggcaccttcttccccaaacatgaca

SEQ ID NO: 669980 - DNA, 1053 bp, Homo sapiens
ggcccaattcatgccagacctgggaagagtgccaaagagcactctagtattgccatcgtctgaagcgagagcatgtaccacttcagggcagagtccactaactagctgcgcccacttactcgtactactactaacactgttggtgtgcctctccatatcagaaccatgggtgagaaattagcaggaacagacgctgtctgtacgatgtgaagaatatccggctctgttccggaagctactgcactaggggtcttgggaagtcaaaccttggagagacgtcgtcgagacgtcgccagacgtcgcgctaggtccacccacatgactactctcccttctgtggtacacattttgactaccctcgctacatgatacttattgctgatcttactcaattgactgccacagtgaacatcaagaatcaacttgagaacctgtgagtttaccacaggaacattctcgaggctgactgttgcttgtactgtagttgctagcgtgactggtagtcggtgagagtatgcagagcctggggtcactctgctcgagaacatatgcgtgcgaacaaaccggatcagcgatggatcgcaatttcgggttctctaaccacgactgggcgtgtggacagatgacacgtgagagtgtgttccggtgtgtgacatgacagatcgtgatgtgccaactggatgcgccatggctagcaggcaaggaaggcacccctggtggaaagcaccttgttgacctgagaaggttcgaggcactctagtgtttcaagaaacaaatcccggatagcgtaggccccaggacatcccttatgcgatagccttccccaaagtttttccctaggtcaggacagtggtcgatgtagaagtgacgtggatcgccaagacgctggtgaacaatagccctccggattaaagcccggatgcgtactgacagcgccgtggaagctgggcttgtcccaaggggaaacacaactggccccagagatcctgggggtaatccttcaaataggaccccggcctgggaaacctatagctccttacaggtgactaagac

SEQ ID NO: 669981 - DNA, 576 bp, Homo sapiens
tcttgatacagattctgaaagatgaggtagtatatgaaaacacgtgcttatatgtctaacgaagtgtgtatatatcctgcctcaatgcactcagagaggcttcatcgatccattgacatttgatctgaatatgaaaaaaaaaagcagcagtattcttccaggaagaatagattcagtaggaactcagcaggcaggaatggtaggacatcaggtgtaaaattaaatgctgagtccagggaagtaaacagcacattggggcctgaatgctcagatgatgggaataaacaaacaaaaaaaacaaacagacaggaatggacctttcatgccttccctgtcatctaatcctgacttacagtaaggagaagctaatggaaaggtttataagccaggtatcaatgggttggaagcttgtgtaaatagcaaaggctcaccggctagcagagtggcaaggcggcacagcagggcagggccaggctggtagaaaagatgtccagctgggcaggttgtagtatgagtgcacgggagaagcgatgcgcgctaaaagtagcttactgagacaaaagaggacagatcccc

SEQ ID NO: 669982 - DNA, 106 bp, Homo sapiens
gggcttagaggagcgttggcttttttcttttttcgccattggcgtgttcttgccacttatatctggggatcttcgaaaggggggagtaacttttgcaaaaatgtaa

SEQ ID NO: 669983 - DNA, 88 bp, Homo sapiens
gggtcggcgggagaatactactgtgttatatcatgccgaaatcaatattctataaaaacaaagattgcctggcaaatatttcctttaa

SEQ ID NO: 669984 - DNA, 272 bp, Homo sapiens
cccaacccctttttttttttcccccggcccgggagaaaaattttcccaaaccccggggccccttggggacaaaagggccccctttttaacccaaatggatattccgggttggaaagccacccgggggccttggggggcttccccccaaaattttttccttggggttttccctgggcccggggggtttcccaaaaaaaaatgctttttttttttttagattttttcctttgcccatatattaaaggggggcccaaaaagggtttttcccccca

SEQ ID NO: 669985 - DNA, 985 bp, Homo sapiens
  misc_feature (327)..(327): n is a, c, g, or t
atgacactgtgtggtgttgtacccccccttatgtgtctgggccgcaccaagcttcgcctgtgtggcgcaaccacggtgttgtttccgcccgccgtcaaagtggtgtcttccccccccgcgccacagggttcttgggggtctcgccccccgcccggggtcattgcaagtggtttccgtcgaccgtggtggcggagccccggggatgacttctgttcttctgcaccgcaaggggccccactccgggcccgtcggtgtgcgcaccactgcctgcgttggtgcgttcgtcctacgctccgaacccgtgaactactgcttgtttggcccccngttccgctctagctgtctcttgccacaatcagagcgcgtattccattcgcctccacaaacgaggtcgctctcctacccccgggggtgcccgcccatttttccgcggagtcaccccgtggggccactaacgcgtacgccgcacaagaccgcccgtcgcggcttagtatatttgcccgcggcggctatatcaggcagtgttgtctgtgcacacgccaacacaatatgttgcgcgcggctaatacgccgtagaggctcccccacctttctcgtgcgggctcctcccgcaatgtgtcggtgcaccccctcggtagtaagatcactgctattgcacaccaggtggagggatcataccctctattgtcattacaaccccgcgtacaatttattaagattgttcgagagtcatttggaccaccttcctgttgagtcacgcacataactccctcatcaggttaagaacaacgcctctccctcacaccctccggcagcaacacaaatcatgggcaggccccccccccctatgccatccaccatcgcctgcaacccctccaaacacggaacctttcggcgaccacaaagtggaagaaaataccacacccccaccaacccgtggttccaccccacccccagggccccccaagttttccccaacataaca

SEQ ID NO: 669986 - DNA, 201 bp, Homo sapiens
tgggaggggaaccccttcttggcttttgttcctctaaaatctgtgtgtaaatattctctcggagcttttactcaaaaaggacgaaattgggtgttttttaaaaaataaatttcagaggagcccaaaaaatttacaaaagaatgtgggagagttatagggttagattttgaagagaggagattctttaatacaggaggagga

SEQ ID NO: 669987 - DNA, 131 bp, Homo sapiens
ccgaggccaaagtcacaaccgagggtctcagctcaacaagcctcaaactagaacacaccagttcctccctggtctccagctctacgacccaccaatgtaaaataacatcagctcctcacagatctccatct

SEQ ID NO: 669988 - DNA, 792 bp, Homo sapiens
  misc_feature (341)..(341): n is a, c, g, or t
ccacaacatgtggctacttgtactccttgtcttgtccgcgtgaggacagaccgacttacacccgggggccccctttgaagagcctatctgtgggccccccccccccaaccaaccccaacaggtggtgcttaaataatagtgtttttataatatttttttgggggaaaagtttttccaccaagggcaccccagaacccctggacctgggtttctcccccggaattcccgggcccccaaagggtttccccttgtcagccatggagggcgagggggagccagaaatgagattcggattctttcccccaggaccagctccaactcccacccatggaagactgtgntgtccccccctccaccatgccccagactccaacgagctccaggagccagaatggaaccgcgagaccagcggaacgcaacggcaacgcctaggctttgtggaatgtccagaactgcattagccgctgaggagagccacccgaatggcgcccccccaacacccacggggaatgctcatcactggagactgcgactgggagagaacacctgccccctccctcgggttgggtggcccaaccacggctggccagcctccacactcccaactctgccagacaccctgacacccaccccggctttgaagagcatggagggggagcctcagagctgacagtcctgcttagagccctttaaaagacttgaaagttcactgggactcagtttacctttatgccttagcagaagattaatcctacctagagacctttgttccctttaagccattactgacca

SEQ ID NO: 669989 - DNA, 1846 bp, Homo sapiens
  misc_feature (1282)..(1282): n is a, c, g, or t
  misc_feature (1385)..(1385): n is a, c, g, or t
  misc_feature (1406)..(1406): n is a, c, g, or t
  misc_feature (1412)..(1412): n is a, c, g, or t
  misc_feature (1414)..(1414): n is a, c, g, or t
cctgctcatggtttcgtccttcgtggtgttacgtggtgcccccctcccatttctctgttttggaggagagggctttcgctcggctcgtgtggcgcgctattgctacttcttcagtagacaatgtgctgcttcctcgtttgtacagagagcggccttttttccccctcgccctctctctgcccggggttatttaattgttttctgctgcggcctttcgtcgcgagtcggcccctctctcgtttgtgtctccctgcatcctatatcgtagatggggttgcttctcggttggggacacttccttccccctcaagtagctcttttcgagtctgccaccaacacaccacgtggggttgttttttttgtacgggccggtcgacacactcacccgtcccatgtggttttctcctcccgctgcgcctgttctagctccctgacatccacggagggtggtcttccctatactcggtggtgttttctctctccctccccctcccttttgggcgcgcgtcccctctcgcgtcccctccctttggggtgtgggttcctcaaggatgtttgtttttttctgcccgacccccccccccctggcggcgtcgctcccaaagatatctcttcccgtctgtggttgtggggactccccggggtggggcgctccccaccatatacagtgggcccgctctccaacattggtgcccccgcccgccggtcctcgcaccgcccgcgaagaaattgtggaggaatgttttcgccccctccgcccctccgtggtggtgttttcttctcacctcggatgattttctcgggggcccccctctccccacggtgtcgtggtcctcccctctcgcccgcaaagaggcggttgttttttttacacctcggggacctttctctccccagcgaggatgcgcgtttacgccacatttttgtcgctcgtcaactctagggcgcgttattatatttgtaggagcagaatttatagtggacaatatttgcgcccccccctccgggccgcgcaataatagggcgcaccaccccgccctctcttatagtggtcttgtagagcccttctctcctctcggcgaaattcttctgggagaatagtataccgcccctccgtctcgtcgacgatatagagaggaaatattgttgggcgcccctcttctgagagagccgtctttgttattatctcgtgagatattatcacggcaccactcgcgagttttgttagagagacactctcttttttctccgagtgttttggagcccactctcgtgatgtttngagaggtgttatacactctgtgtggtctcaccctctcgggtgattatatacacgcgcgttctccagcggtgcttctgagagtgtgtttttctcgcggagtatntttctctctctcagagagagnctctgngnctccagagacaccccgctagtggtgtgttttgtgtgtctctctgacgggggtgtctctgtgctccagaggtgttggcgaaagtagtctcccagcaccgctctgaggcgaccccgctgtgtgccctctcttctcttagactcggagagtgtctcttggcgccccgagcacacaccctgcgggcctgttgacattgcgttttgagttggagacaccgggttgccatattacacgcccgtgtaaagtgattccattgtcttaatattaagtgaagggtttttttgtgacacgcccatatttctcgatatttttgaagagaagcaccacaccacatatttggtgtttttactgttaagtgaggcacccttaggccccccggcccacaccctcccttgtgtaagggaaaattaaagatgctccccggaaccccaaaa

SEQ ID NO: 669990 - DNA, 184 bp, Homo sapiens
gatttgttttctatgaaagaaaaaggttaaatgtatgttttcatttttttatgtttctacttcatgttttaaaaaattattcattagtttcctttggaaaacttgggtcaaatcattcttctgaatgtccattagaatccctgtgattcaggaaaatttttgaatcttcaactttattttgaaa

SEQ ID NO: 669991 - DNA, 242 bp, Homo sapiens
ggctacattgagctgtacaaagcttatccccgtacgagagcaaattctgtgagattcagtgtacttagtgttattattgtcttgctcttggtaatcctatgtacttttttaaatttaaaaatatcattctgaaaaagggtacataggtttcaccagactgcccagggatctatagtaggaaaaatagctaaatctcctgctctaggcatcccatgactaatctaggaccctgaatatccacg

SEQ ID NO: 669992 - DNA, 900 bp, Homo sapiens
gggctcttggaaatgagcggagagcgacgcggttgtgtagctgccgctggggcgccgcgaataataagccgggatctaccatacccatgactaactatggaagattataccaaaatagagaaaatgtgggaaggtaccctatggagttgtgtataaggggtagacacaaaattacgaggtcaagtggttagccatgaaaaaattcagatagaaagtgaacgaggaagggggttcctagctaggtgcaattcggggaaattttctctattaaaaggaactttcgtcatccaaatatagtcaggtcttcaagggatgtgcttatgcagggattccaggttattactctccattcttgagttgcctttccatggatctgaaagaaatacttggattccaatccctcctggtcagtaccattggatttcttcacttttgttaacgagttattaattaccaaaatcctacaggggatggtgttgtacctcttagaaggagttccttcaccagagactttaaaactcaaaatctctggatttgatgacccacgggaaccacttaacacctggctgatttttgtcttgcacgggagctttgtggaataaccttatagaggtatatacacattaggtagtaccattctggtaacgatctccagaaggtatggtggcgtccagtcggtactcaatcagtgacttgggtatggcccatattggctggtatcatagaaccatttcctggttcgaatggcactctacgagttcagcttggcccccacatgtgtgccgagggtcctagattaaaaattccaggacggacgatccggaactgtgaggggtgtcaaatttttaccactgcggggcacttcggcgaagcggacaatcaacgtggtgatttaaacga

SEQ ID NO: 669993 - DNA, 850 bp, Homo sapiens
ggtaccggtctgggccacagcgcacggtagtgcatcgcctggttgaaatgtactcatcaggctgctttctcacagaatagaacgagtgggagacagaagcaccagtggtgggggagaccccagaataaagctcttgcgagaagtggagcagcgatgagtgtgcagatcaagtgaacataccctgcaggatacatcgcagtgaaggagaggtatgccaagtacctggctcacagtgcagggagaaatgccgggaaagcttcgcgaaagctcaggagtcccatggtggagcgcctcactaactccgtgatgatgcacggggcggcaaccaagggcaaagaagctcatagatatgtggcgccatcggtgggagcatgcctttcgagatcatacacctgttcacaggcgagaacccttctgaagggtcctggtgaacgcccatcatcaaacagtggttccccgggaggactcccacacgcatgtgggcgcgccgggactgtgagacgacagggttgtggatgtgtccccctgggcgttgtgaacaaggcatctggcttgctgtgcacgggcgctcggggagggtgccttccggaacattagaccatgtgctgaagtggctggcagatgagctcatcaatgcgtggcagggtcctcgaattcttatggcataaaaaagagaacgagtgaagcggtgggccagtccaaccggtgattccccagtggtgccaataactgtttgccttgggaggtcccggaaaagaagagaacaaaaaaaaaattggggcggcggccagaaagttaaaccctctggcgccgcacaaaagaatgcaggtgcaaacgcaaaggtgtgcca

SEQ ID NO: 669994 - DNA, 161 bp, Homo sapiens
caggatcccctgcaaaaaaaagacgccttcctcacatattactactccttcctttttagcatgctccctaaaaaagtaacgtcactgctcactgacaatgcaccaggtcgcccaagagctgtgattgagatttacagtttattagtgttttttctgcagca

SEQ ID NO: 669995 - DNA, 320 bp, Homo sapiens
aggggcctttccttgggacccatggccccaggaaaagttttgcaccagcaggacccctttgagggccttcaaggttttcccaggagtccccctttgcgggccccccaatgccccagttcccttttgggtcttgtgccaagtcccccccagggcctggggttgttgggagccaagggccccctggtattcagttccctcacgattcccgatcaggggcacccccgccccctggttatttgtaaaaatttttattggccccaattttcctcggaattggggggcccctttggttcccccagttcagtaataacgtgggggag

SEQ ID NO: 669996 - DNA, 115 bp, Homo sapiens
acttaagaacaaagtggtgagacttttggtagcaaaatctgcacggttcttaaaatccagaaaaggtgttggttgatatagacagcaggacggctgccattcggctgccattggg

SEQ ID NO: 669997 - DNA, 255 bp, Homo sapiens
gaacgtatgagatcaaaaaagaacaaatgttttattattacttgagcacaagtgtaacctaaatatttctatattaaagcttaatgtgctttcttaaagatgccaaaagtgtaataaggtcataacctgcattattctgacactaaaatgtaccactttagtaatgtgcattaatctgtaacaaggctctggcaattgtagattagtttggcgtcccaaggtgcatggacaatgtaaatacaattaaattttggg

SEQ ID NO: 669998 - DNA, 364 bp, Homo sapiens
ggtgtgccccaaataaacttatgaacgcccaaaaaaaaaaaaaaaaaaaaaaaaaaaaaaaaaaaaaaaaaaaaaaaaaaaaaaaaaaaaaaaaaaaaaaaaaaaaaaaaaaaaaaaaaaaaaaaaaaaaaaaaaaaaaaaaaaaggaaaaaaaaaaaaaaaaaaaaaatggggccaaattttggctcactttggcaaattccccttttggggggcattttaaaaataaaaggcccgttgtttaaaaaagtcaaaatgggaaaaacctggggtttcccaaataaaacggtttggataaaaatccccttttgccaaggtgggtaaatctcaaaaagccccaacctaaaggcttttcctttggctt

SEQ ID NO: 669999 - DNA, 532 bp, Homo sapiens
ccttcaaggtcggcctgttcaggggtcgtttgagggagctttgggtcctacttgagggcgaagcttcgagggaggggcccctgcacatcctgttggtcccgccggtcccgccttcctgtggaggctccctgggaggccgccgggtgtctggccgggcctcccaggaaaccgaggagcagggctgccccccatcctgcctcagagcccatctccggagcaagccccatgcccagggctcgggggcagctgtgccttcgctggtttccttctctgggaagggggcatcctgggctcagctgggtttggggtgaagatgagccttcctgggcgtgcgtgcccctcccacgcctgcgctccattcggcatcatctactccatctcacggccaggcctgggactccccacccggggggccggcctcggggcctcagccggaatctgctacaggttctgcggtggtccaggggccctagaggtgccagcctatgcccacctggacacctgctcagcgcacaaggcagccacagccaat

SEQ ID NO: 670000 - DNA, 293 bp, Homo sapiens
gtttttttttaaaaattttttccaaaaccaatgggggtttttatttggaaacaggtttcttttccaaacacaaggttttgggtggcaggcccccttttttttttggggggtgggttaaactaaaggttgacccagggaatggctttttttttttgtttgggggggaaaaaaggttaaaaccggttaaaaaaggggggttttgggggggggttaaaaaacccccccggccggggaaatggttttttttggggtttttcccttcccaaaaaattttttaaataaaaaagggttta

SEQ ID NO: 670001 - DNA, 1129 bp, Homo sapiens
gcagcagagctccgggctgaagattgcttctcttctctcctccaaggtctaatgacggagcccgcgacgcggtgccaccatgcggccagaaggcggtatcgcttattcttgtgctacctgcgtgctcttcacttgcgaggagcggagctgtgaggcaggtaatgaaaaagtgcgtcgtgagaagctcaggacagcggctccgggttctggaaaggccctgaccttcatggccgtcggaggaggactcgtcagctcgtgctgggctgtcgccgcgtctgggcgttcaccggcgccaggtcgagtcgtcggcccaatcgtcgtgtggcatgtcctcgtctgagtgatgctgggtcgtgcgatccgtgaatgcgggggcggtgtgcccgccgggtgggttagtggccacgctgcgcagagacctcgggggcttcgggtggctagctagcagctcgctcagtagtgtaactactctggctgcccttgaattggctactgcctaccgcaccagagctatcatcgatacgctgagagcagggaatgcagggaagctaaagccaaagcgatggtcgctcggaaaaacgcttgcatgtccgttcgccttcggattgggtgcctagaactgcatatacgcgaggtaagggaatggaaagggaaagcgtgttgggcccttgggtaagcatgcaactaatggtagagacgtttgttgattggaaaaagccaccggggaggccagttcccagccacaatgtgtcgggagtccagggcggtgtacaaaacatgtgcgaacgcgcgggcgcaagtgtacaagccggacggggaaatgtctgcgacctcccaattctgtaagaaaccgcaagttgccaattgccccttcccgaaaggaattgttacgaactcgctaagaagaggagtggaaccaccgcgcccggtgtggtttagtaaataaactggcgcaccccaaaagagtggggagactgtacacaaaccggtgggatgttgtcctgcgacagggaggaaagattatcccccaagaaaaattgctgcccagaaaaattttggtgggatatattgcgacaatttccccccaagaaaacaagccctaaaggttgttaaaaacacacgagaaaat

SEQ ID NO: 670002 - DNA, 585 bp, Homo sapiens
ggtgaccaggtctctccagagccaaagatggatggtgtgggcaggccaggcattcccatgtgtggtagccaggcctctgtcatggactggatttctgctgtgagcttccattaggacttgtccatccaggacacacccttcaaagaaagtcaccatccaggcaccttctgaatgcaccttcctgtccttcttccccgctcctccccctttgtctgggggctcacttttgcactgaacactcacatgtgtttcctccttcagtttcgacttgcacaggaatctgaagcaaaagtgaaggaaggaaggtatcctgggtgttaatttcctgcttcatatccaagtgatccaacaaaggagcacaccttcatttgtatggagagtgatgctctgatcctccctctggttttttttaaatagtattaccagcccagcccagaagtagaaactctgccagcatttccattagaaacctcatttttcagggtcttttaactgaaccataaaactttatttctcatatgaaacagatcctaaaatgatcttggcctgctgtcaggatttttttaaattaatatacgtattaag

SEQ ID NO: 670003 - DNA, 170 bp, Homo sapiens
gcagtatactgcaggttcacttctgcaatcaccagcacaagaccacctcacacagtacttccggcttcacttcttcgaacgccaccactgagaccacctcacacagtactcctggcttacagttctttgacttgccaccaccgggaaccactctcacacatgtactctca

SEQ ID NO: 670004 - DNA, 477 bp, Homo sapiens
atgataccccctttaccctgtgattattatgcattgcatacctgtatcaaagtatcccataaatatatacacctactatctacccacaaaaattaaaagacaacaacaaaaaaccccacaccactacctcactgatgccataatgtttaaccatgcctttcacttaaagaattccaggaaataagccaggtgtgtggctcgtgcctgtaatcccagcactttgggaggccaaggtgggtggatcacctgtcacctgagctcaggagttcgagaccagcctgggcaacatggcaaaatcccgtctctactaaaaatacaaaaaattagctgagtgtggtggcatgcgtttgtagtcccacctactctggaggctgaggcacgagaattgcttgaactgaattcagaagcagaggttgcagtgagccaagattgtgccactgcactctagcctgggggacagagtgagactctgtctca

SEQ ID NO: 670005 - DNA, 193 bp, Homo sapiens
ctcgctacctctttctggccacgccggcagcgctggagcggatagcatctttgcactggggatcatgccgtatatctcggcatcgatcatcatgcagctgatgacagccgtcagacccgcagctcggagcagattgaagacaggaaggtgaaagctggcccgtcgcaagcattagccagatacaccccgctac

SEQ ID NO: 670006 - DNA, 772 bp, Homo sapiens
ggcgctgtggggcgggggcgaggttcgggctggttgttccgttgcgagctgcagctgcgatctctgtggtaggcccagaactgtatgctgacttgtaagtgaagagcagtgtgctgctgtgttctttggggtagtgtctgggatcagtacgatgaatcatgtcaataaggtgtaattgaaaagtgatcctctcttcagagatgtaaaaacaaacaaatccaagtctgatctcgctcttctcgctcagatctgctcaagatctcgttctcgtcatttcgaagtctcggcccgaagccgatctctctctcgtcaggaagcgcggctgagtctaggtctcgtcagatcatatctccagctcataacagagaagaaacaccagagtatatcagaatcgggattccgaggtcacaacagaggctatagaaggccctattatttccgtgggcgtaacagaggcttttatcatggggcaatataaccgaggaggtatggaaactaccgtcaatggagaatacggcaagcatacagtcctcgtcgaggccgtcaagatcccggtcccaaagagaagtccttcacaagtcaggagcatctgaactctgatatcgctctgaccggtcagcgtctcatctccgtcttctcaacatagcgattgatctctaaggcagttgacgggaaaaagctctctaagatgcgcatccgggtgcgagtacggagagaggccgagcagaatcttgaggctcagtaaacttgagccaagctgcaatgcactgac

SEQ ID NO: 670007 - DNA, 353 bp, Homo sapiens
atgttgcaggaacatgggtaaaggccttcgccatctcttgggtggtaaaacactctatagaggtcctctggtgacagtctggaaggtttacttaagagtgatcttacaagtggggattttgactccaacaggtatggcctgggtttttgacggagcagtcttagccttgcgctcctcagttttcagtgctggctgccccgctgggtctactgactctccattcattgtaggtaccatcatgccctgtgttgaactctgttttgggggtgctgatgtaaattcccatttgcttctcttagaagtttcaccctgcttccttcattcagggcccgcgatttgtgtcaggctcatct

SEQ ID NO: 670008 - DNA, 84 bp, Homo sapiens
caggggtgggaatttttttttaatatgtgtcatgaataaagttgtttttgaaaataaaaattgtttggcctttaaaaaaaaaaa

SEQ ID NO: 670009 - DNA, 346 bp, Homo sapiens
tttatgattttcatcataacattttcctttctctagcttacttgattgtaagaacacagtaataatacatattttaaaaatgtgttaatcaacttattttattggtaaggcttctggtcaacagtagactattagtagttaaatttttggagaatcaaagttatacagtggccgggcatagtggctcatgcctgtaatcccagcaccttgggaggctgaggcaggaggattgcttaagcttagaagtttgagaccatcctgggaaattctccatctctactaaaaatcaaaaaacttagccaggaagggtgaacacctgttgtcccagctagaggaggcgtcgacg

SEQ ID NO: 670010 - DNA, 763 bp, Homo sapiens
  misc_feature (238)..(238): n is a, c, g, or t
ggttttttcctttcccctaagttctcgtgcatttttgggggagcttcctttttttcatgctgggctgaacccctggttgtgtcttgtgaagccatgtgttttcttgcagcttgggagacgatctccggggactgggtgctaacccttgcgggtactcccaggtgttgagctccctgcaactccctcctttgcccttgccgtctggccagcctttggggatcccggtgttggtagacanaccacctattgtgggctccccttagggccttagctaccatagcaccacgctctcatctctgcaagtcggcagcacacagtggatgaaggcaggagacccagaaagcagtgcagtgcagctctaataaaggccttatttttcttatggtaaatcatcttttacatcctgtatgtacacatgtgttaaagagacgtaacctagctgggacattgttatagactttgatgattctagccagtatctggatgtgtgtcaagttgcagactgtggccttgttactttttacagtggcagtacttaacaagccgagcaacagtgtgtcagaccatggcgtgggtatgtattgtgcagcagatccacgagactgaggcagcgtgtcttcttcagttggtttctgctctgtaatttacctctgtacaattcattgttactgttctgtttttctattaatcttttgtcaacttcctgattatgtaacaaagtatgtacagtctactttagaatctcttcctatcacagttactt

SEQ ID NO: 670011 - DNA, 509 bp, Homo sapiens
  misc_feature (54)..(54): n is a, c, g, or t
  misc_feature (87)..(87): n is a, c, g, or t
  misc_feature (126)..(126): n is a, c, g, or t
  misc_feature (150)..(151): n is a, c, g, or t
  misc_feature (171)..(171): n is a, c, g, or t
  misc_feature (184)..(184): n is a, c, g, or t
  misc_feature (220)..(220): n is a, c, g, or t
  misc_feature (274)..(274): n is a, c, g, or t
  misc_feature (286)..(286): n is a, c, g, or t
  misc_feature (310)..(310): n is a, c, g, or t
  misc_feature (335)..(335): n is a, c, g, or t
  misc_feature (338)..(338): n is a, c, g, or t
  misc_feature (351)..(351): n is a, c, g, or t
  misc_feature (356)..(356): n is a, c, g, or t
  misc_feature (377)..(377): n is a, c, g, or t
  misc_feature (397)..(397): n is a, c, g, or t
  misc_feature (403)..(403): n is a, c, g, or t
  misc_feature (406)..(406): n is a, c, g, or t
  misc_feature (416)..(417): n is a, c, g, or t
  misc_feature (425)..(425): n is a, c, g, or t
  misc_feature (429)..(429): n is a, c, g, or t
  misc_feature (438)..(438): n is a, c, g, or t
  misc_feature (441)..(441): n is a, c, g, or t
  misc_feature (444)..(446): n is a, c, g, or t
  misc_feature (448)..(448): n is a, c, g, or t
  misc_feature (454)..(454): n is a, c, g, or t
  misc_feature (472)..(472): n is a, c, g, or t
  misc_feature (481)..(481): n is a, c, g, or t
  misc_feature (489)..(489): n is a, c, g, or t
cccttttcattagcagagatgaattgaaatgtcatgtctgaatgcaattcctgnaccccactcccaccccacaaaatcccaaaagtnaaaataaatcaataaaatccccatgatttactaaaagtnatccctccaaacctttctaactannagctgcagtggatgaaaacnaaggagggaggcngctggccatcatgtagcattcctgtgcatgtaagcntgaagggacagcagcatgggagccagaatcctgaatgagagtggtatataattnccttacttcatncttgccccctccctacataagacncctctgtcctggtacatgggaaatnctngagcgcggatgcnaaggntggttttcgtctacaattggnaatgcctgccccttattaanttcccnggncggggtgagnnagggggcnccanagagaaagngcnggnnngncagggntgctcaacactcttgtcnattccagtntaatgctntttaataacaaaaccttctt

SEQ ID NO: 670012 - DNA, 130 bp, Homo sapiens
ttgccttctgtggtactcctccgtgaacttcccttaacgtttcatgttggcacacatactccccccagaccccacagactttgatcgccctgaaagcggcccgggggatcataggcgaatcacgccgccg

SEQ ID NO: 670013 - DNA, 418 bp, Homo sapiens
aacggccgtccagcttcacgctacacataaaaatatgttactacactacgagattatcagatagactccacttcagactaatcaagaagctaaaggacataaatttagaattaaagcggtataccaccaaagattagctgtataatctctgacagtgatcgccacagattcttgttaaaaaagccttgtattttctcatgtagagaaatagtaaacttctgtcgtgcagctgattcccaggcaggaacatatttaaaaaaatatttataacccagtgcgatgcctttataagatataacagactgcctcaatgaaaacagcaaaatattaatctaccaatcaggaggtcactgagctttctctgaagagcagatattatgatgcttagtatttttaaatatatttgcggtaaaagctt

SEQ ID NO: 670014 - DNA, 441 bp, Homo sapiens
agatgctgtctgatctgcagttagtgatctgttatttggtttcgacgacagacagacttgggctaaagtcccaaacaagtgtgagtattatctgggtatcaatctgtaatttttaaaaatgtattcctcccatactagatcataagagctagaaggggggcaccattcttgatgtattatctcctatatcctaggattttgcgctgtgccaagcatacagtagacactccattagtacttgttcaatcaattattaaggtaatgtaacttatactctctgagcccccgttttctcctttagaaaattaagaacctacagttgtgacaatgtttaggaaactccaaagtgctgtggtaacataagcaattgctacagtccttgagaaatgctacccataatacttagagaatttgatacaactcagtctgacaaagctaaga

SEQ ID NO: 670015 - DNA, 410 bp, Homo sapiens
  misc_feature (1)..(1): n is a, c, g, or t
  misc_feature (52)..(52): n is a, c, g, or t
  misc_feature (65)..(65): n is a, c, g, or t
  misc_feature (150)..(150): n is a, c, g, or t
  misc_feature (352)..(352): n is a, c, g, or t
  misc_feature (367)..(367): n is a, c, g, or t
natgagcctaaaggcataacttagttgccaacacaggttggtcactctcttnacttcctcctcancctcaaaccccctcattggtctcataagaagagatctatgaccaactaatctctggcttacagatgtgttaatctgtctgcatcnctacaaaggaatacttgagggtggataatttataaagaaaaggagtttaataggatcaccattctgcaggctgtacaagaagcatggtgccagcatctactcctggtgagggcctcaggaagcttccaatcatggtagaaggcaaaaggggagcagtggatcacatggccagaatgggagcgcgagctagaaggagaggtcncagactttaaacaancagatctcacgtgaacctctgtgaatctcatatgagaagtcac

SEQ ID NO: 670016 - DNA, 223 bp, Homo sapiens
ttaaattactccccccccccacccagctaatttttgtacttttagtagagatggggtttcacctatcttcttttgtattgtttactttacaatttggtggttttttaaatagtcataatgtttgattcctttttctcatttgtgtttctgttctattagtgagttttaagcctttgtttgttttcatgatggtagataccatcctgtctatatatgaagatca

SEQ ID NO: 670017 - DNA, 112 bp, Homo sapiens
ctcgtctttatcttggtacgcatagaaagagcaagtgtacttgacgtgctggctgactttcaattttcttcaccatttaccggagcgaggccccagtagcgggtcccgtatt

SEQ ID NO: 670018 - DNA, 267 bp, Homo sapiens
tcgtatacccataacatacccctgctcttggcaggtcttagcttaggacgaaacggtctggggacagcttctcccgggagagcagacagtccattcgggacttgctagaggaagacatgcggcccagatctcaggtgatccgagctccagcatctaccccaggcctctagcagagaccaataaggacgtctacggctccaaaagtgtggaaagggcagcgtctggcttcccttcgcttttcagaagcgatgccctgaggctatagtt

SEQ ID NO: 670019 - DNA, 1193 bp, Homo sapiens
acccactccaccttactagcagacaaccttagccaaaccattgtaccgcataataaagtataggcgatagaaattgaataggcgggtcgcaattagatatagataccgcaaggggacaagatgaaaaattataaccaatgcataatcatagtcaaggactaacccctagtaccgttctgcataatgaatgtaactagaaataacttagcgagggtagagccaatagcgtaagacccccgaagaccatgacgagctagctaagaacaggctaaaagagcacacccgtctatgtagcaaaatatgtgtggaagatttataggtagaggcgagaaacctaccgagcctggtgatagctggtcgtccatagatagaatcttcagttcaaactttaaactatgcccacagtaaccctctaagatcccctgtgtaaatttaactgtgagtccaaagaggaacagctctttggacactaggaaaaaaccttgtacagagagtagaaaatttagacaccctatagtaggcgctaaagagcagccaccaattgaagagagcgttcaagcgttaacatccactacctaaaaaatccgcaaacatataactgaactcctcacacccaatggggaccaatctatcaccctatagaagaactaatgttcagcataagtaagcatgaaaacattctcctccgcataagcctgcgtcagattaaggcactgaactggccaatttaccagccaatatctacaatcacacaacaagtccttatttaccctcatggtcaaccaaaacgaggatgggtcatacaggaagggtccacacaagtaaacgagcttcggcaattttacccgctgttaccaaaaatacactctagcatccaggtttaagagacgccggcccaatgaacacaatgttacacggccgaagagaacacataacacgggcaagggcgccaacacaccgggccagaaacacagagcgcattaaaggtcaccacagggagccagaccgcctattaacagagagatcgcccgacaagggggagcaaacgacggaacaacccagcgacaatcacagctagccaaaccgaggacaacagaacaacaggggcgggacaccccagctagagcaagcctaccagacagccacaacacgcagcagcaccacactacgccgacacaggcagcagacccggg

SEQ ID NO: 670020 - DNA, 456 bp, Homo sapiens
acacagcaggatccccataaggatactcactttaagcaaggggcagatagtagaagatgaaacctgcagatagcagactatccacatcaatttgtgaggatcttgtcatgctctaattgaagaggaccaacaattaacagtagaaacaatagccaacaccacagatatctcaattggttaggcttatacaattctggttgaaaaattaaagttgagtaaactttctacttgatgggtgccaaaactgttgtgcccgtatcagctgcagacaaaagtatagctttcaatggaaattataaacaagtgggatcaagaacctgaagcatttgtttgagaaattgtaacaggagatgtaacaacttcatagtacaatcctgaagacaaagcacaatcaaagcaatggctatgaagaggtggaagtggtgcaatcaaagcaaaagcagacgggtcaaaagc

SEQ ID NO: 670021 - DNA, 191 bp, Homo sapiens
  misc_feature (189)..(189): n is a, c, g, or t
tcccttagaacgctgacactgcgggtgagcttcccagtggtcaggcgatgattctattcttccctgattttttctgaaaagccaggtttattttcaggatatatggaatatgaaaaaggcgttccctgcttctggtttgtatgaaaatcttacattaacataatacagttgcgaaagagtaaatatttntt

SEQ ID NO: 670022 - DNA, 164 bp, Homo sapiens
  misc_feature (14)..(14): n is a, c, g, or t
  misc_feature (30)..(30): n is a, c, g, or t
gggtcatgcatagnggcatgtggaggcatnggcgctttgtataccagtggaagggttgtgcaggatagtggtacccggttccatagagtttaagcgcatgatgtaagatattagggatggccttaagatgtgacgcgccgttgtgaattgcgatcgctttgccc

SEQ ID NO: 670023 - DNA, 1221 bp, Homo sapiens
tgaatgtattctcctataataagtggtctcaacacccattctgcgcggaaaagtctcttcgactgggaagtgagtaagacctccggactctattaccccgaggtcatagtgtaaagctaaagcatggaagctcttgtgttgtgcctgctggtaagagtctttggtttagaagtcttcgttctgaaaagtgtgacaagtttcatgcatttgggctcacttatctttagctcctgtctacaatgtctatgagaaagttgttgagtaataaaattgggggacaatgagaagtctactagtgaaagttccaatgggaagtttcaagtgggaatggaggaaatgatttgtgttcaaaataagcttgtggtttatgtcgtcaacttagatgctgggctttgaatttacactaggttgtataccaggactttggttcagacttatcgccagaaggctgtctgcaaagtttaagcttcccctaccaaggcatgagaactatatagggttaacactctctgtaacagattgtcaaacctggtaaactcattcagacgaggggcagcatagattggcgagagccagcaagtctgctatctttcggtgaccatgtcacgttagacacacctggacttagcctacttggacgacacgtgcttccttctttctaaacacatgtctatttacaatgagagcttgagtattcttgcacccagtggttgtgaaatacagttgtccacgaaaggccaacatctggtcaccacagtctgtaatctccaagcacctttggggagtccctaatggatgggacagaggcaccattgatgccaatgatggttcaaagacacagaccctcggatcaaacagtgaatgaaactcatcggtcatctagcctgaaaaataatagaaaaactaggcacagatcatgagtgcatgcgctgtaacccgcagctatcttggagagctgaggcaatgagaatgcagcttgaaacctggagaggtggaaggttgcagatgaggccaagagtctgtactcattgccctccagccgctgggcgtcagatgcaacgactcatcgtgcaaagtatccagaagcatttattcaggactgcctgtgtatcttggtgagttatgttaaccaagctgtgttcaataagaagtacccatggaatgcctccagatacaaggtatattttttacccatacagctaaacacaaatatacctaatt

SEQ ID NO: 670024 - DNA, 851 bp, Homo sapiens
ccccaactttaggactggccagatctaactaagcctttctttttatatgtcgcatgagcaaaagggaatggccgtaagagttctaactcaagccataggatgtggcatcacccggtggcatacctatccaggcaattgaattctgtggcacctggatggagtcttgtgttaagacactagctatcactgctcggctggcacaggaagctaataagctgactttaggacagcaagtgacaatccagctactgcactcagttgataactttgatggaccaaagggggcaccatggttttcgaatccgagaataactcaataccaagggctcctatgtgataatccctgtgtaactttagagactgtgagtaccctaaatccagctaccttgctcccctattgaatcagtgccaggaagcccccttcattgctgagtggatgtggtagatgaagtgttctcaagccagagagatctgacagatcggccctcggagaactggacatcgaatattttactgatgggagcagcttcatactagagggagtccatgcaaactgggtatgcagtggtgacttggactcagcagtagaggccacagtctttgtctacaggacgtggctcttaggaaaggcaaaggtggtaggtcttataagaagtccctggtagcaaaagaccggagggaatattggccatgattctaatttggttgggccctgcgtgtagggggctattccaggaaaaggactttatcggggggtcacacagggtcacaaattgggggcggttggagagccaaggggaagaggggaaaggaaaaggggaaacaggcaagaggagggggcccttagaaag

SEQ ID NO: 670025 - DNA, 109 bp, Homo sapiens
ctcggccgccctgtggtgttaggcgcgtgttcgggctcttgcgtccccgcaacccacaccgcggttaacttggctcttcgggttcccgccgttcgacaaaccaggccct

SEQ ID NO: 670026 - DNA, 183 bp, Homo sapiens
cggcttctatacgatacaatgtgacttatgtgggacccccacaccggcgaaaggctgaggtcactccacatcaaccccaggaggctccatccccattttgcaaatggggaaactgtagcacagagaggttaagtaactagtccaaggccacggagcctgcagatgacagaggtaagactggaa

SEQ ID NO: 670027 - DNA, 856 bp, Homo sapiens
gatgtctatctgcggatcctgtgagatacatggtgctctggacttgcaaccaatggtgtggacgtgagacacgatcacgtgaactgcatcttgactgctctctcgtaccgcactcactgcaatctccgctcgcgtatttgcgaaacgtccgcgtgaccttgctactcggataatctccatggtatcttgcgagactcatgggacaagctctcgatctgtagttgtgtctgggttccctttctgtgtctaaagctaaaacaattgcatgtcttcactccaaggagtaacagttcaagagaatctatctacacaaccagaatgtcggagagtcagcacgttacatactatgtctcttgtgttcatattttgttgagcacatgtcgaggggctctccattatcagtcgctacccctacatgcgtcctgggtggcttgttcttagtgtgtcagaacacgccgcaatgcattgttcgtgcctcctcgcgtaaatggccgtttgtacgcccctggttttcttatcccggcagtaactttggcgcagacgcgagcacacgcccgtcagaagggagcctgaccgaaggctggttcctccccttgtaaacgacttgcaaaaatccctagggttggtgtctggcacgcagctcatcgtgtccatggcaccatctcaattggagagccaagctggaaacgatcgaagtggggtgtaaaaactctcctagaacgcgcatggaaaatgctggcctatcggaccccgtgcggaggaaaaaacggctgacacccaaggcccctttgtggatctttccatgcccatgtgtgttctgcaccgcaacggagccccccaatcttctgttgacttt

SEQ ID NO: 670028 - DNA, 141 bp, Homo sapiens
tgaaggacatcaaagaggtaagagctctttcagtgaacagtgaacagtgtcggcactgcaggcgcaggagaagccagagcagggcagagagaggccatgagggacaggggtggattaaagaaccaagacaccaggagaagg

SEQ ID NO: 670029 - DNA, 935 bp, Homo sapiens
  misc_feature (712)..(712): n is a, c, g, or t
caaacactgcaggctgaagacaccactatatagtggttggtacacccgggagtagatgtctgagtatgttaaacagaaagtatacctttctccaagaatggatcaaaatagtttgtattatggatgaacgcgacgtatgataagtgttagagactcgttggattgtgatggaatctaaatactatgaggattttacaaaaaaattaatactctaaagtattgcgagagtatgttgtgtgtcgttatttccatagctccaatcaatagtggacgcctaagctgtaggtgtgtgtggatatgtagacagaagagaattcgattgagatgatccacattctggaattttctagtgtgagatagaaagtgaagaattgtaccctatagctggaaatcaacatcagctatcatacttctttgctggccgagacgagggaactggacgtatggcagtacatcttagatgagcttgataacgagaacactgagccagtatacaacaggcgtgtcaatttagtgctcgaatactgaggcgcacaggtggactggcgtgtagtgagaaagtatgcactgcccagaagaacttcaccatgctttctggcgtctgggcatggttgaccatggactccagagggacgagaggatgttgtcatggaggggaatttccggtaagggttcaaagatcgtgtagctggaatcacttatgaacttgatnaggctcagtcgggtattgattgtgctgacaagtgttcgcgttgataagattcatgattctagctagcaatgcgtgagaaggtatatttcgaagaattgggagaggggggcgattggcgaacgaaagtgtggaaaaaaggggcacgggaagaagaaagaaggtcttgtcgaattggcacttctctagggactcaggggggaatccttaagtggggcttttaacg

SEQ ID NO: 670030 - DNA, 693 bp, Homo sapiens
ataagccccttattgacttcctatcaaatagatagccttacagctgaatttcttaccctgcagattgggtttaaactgtgcttaacagctttagttttttgtgagattaacagattgtgaaaagtaaacttagccaaatctcatgtgaggattaaaaaaagcgatgtacccagataagtcaatgtgtacactaaaaggatactaaacaattttaaattaactatattaaggtattatgattcaaaatttacagacacccaggcaaagtaataagggcactgtttaataattttgacttaaataataaaagtaaggcttataaaaatttaatgcccaacaattaaagagcgcggaccgggaaaaaatataaacgcccaagaattataccccgaaacagtcaacatctaaggtcaatcctttaacacctttaggggaagttaacgtttgcaaaacaatatctacaaagctctacagtaaataagacactactataagccggccaaattctgggtgaagttttaccacgtaaacctacggatgattatcccggtccatccaagggttcctagggacaaagcaaatggccaataacaagtagattttaaggaaacctgataattaccctacgggtcattcccatattaacctaagagtaaaaacacaacgtcaaacatgaaccctccctgggaccaa

SEQ ID NO: 670031 - DNA, 721 bp, Homo sapiens
actatatgctgtacccatggtgctatatcatgcctcattggttctacagagatggaaccatgtcacccgctaaggtgtggctaatgccagtgcattagctaggctgcttgaggctctggagtggatgctaccaccaactcgtccatgtgacaatgcccttgtgcttggcttctccaggatgtctacgaaattggtgcgtatcgtgtacggtctcctgattggctcgagtggtggactggtgtttctcatgacccggtgatggtggtgcacctttgtgtccatgtctcccgttagcgacggatgtagaatctgtcgaccttgcaccagggtagtgctttgagtcgatatcgtctctccctggagggagcagactgtgtgcgtctgtcacgtgtcaatgcacatgtgtcttgttcatgggaatgttcgggcggtggccctcggtatgtcgttgccttgatcaggaacataagtgtagcccatcgcgatctggtgagcagtctggacttcatctgccccgtttgatgatccttgaagcatccaggccaaaataaagcgccaggctagtgcccctgtatatggagtggccacacggttcacttcgcatgctaagattagcggaagctgaaagggagaagattgactcagccgttctggtaacaaaagctcggaagattggtcctaaaattctggaaggtctggtgatgcgtgccagtggttgaaa

SEQ ID NO: 670032 - DNA, 159 bp, Homo sapiens
gttgagccacgcatgtagtacttttggtgatcttgaacattatagtactggggcttgtaggctctgtgtttacgaaagctcctcttcccagccaaggaaggagtctatagggccctgccgtgccttggagagttgatcctagagcccgcgtgctatggg

SEQ ID NO: 670033 - DNA, 1808 bp, Homo sapiens
gtggcttgtgtggctggagcagtgacctgtgccaggaagcgtgtgtgcctgtgcctggtccagtgagctggtctgcaaagtgcaaacagtggtgcatgacagatgtgtgtggatgattgaatgcctgtgtgtgcaatgctgtgtgatgctagcctggctcactccgtgtgcacgacgggtgagtcgtctgacttgctacctgcacgatggtttgatgccctcagttatcctgtgtgtgagtggcttgacatgtgcgtgtggcatgtgctaaagctatgtggtcggattgttgaaggctgtgttgagacgtatagcgactgaccatggacactcaatacttagattgggaaatagacgaatagcagctaggaaggtgttgcgtggggtgacttagcagtcaaggatggttgcattgtgataacgtatcgaggtgctgtgaggcgtacctgattgtggatagataaggagcatataggggcgcgcatcgagattggtgggtagcagtggtcaggcagacgttggcgaaagtggttgagcggaattatggtttacgacattaagttgatgattacgaatagtgacattgacactgacgatatatgagtgctattacaggaatacactcttacgaagtacgcgttgtacctgaagcgcatatgagaccatttcgcatcccctagcgtaaacacacagtataataaacaatttttgagaccataacgcgtacgtttgacaccaattacgagcacaggatcgggagaagactaacatacgtgtactttgtgacactaactctgtgaatatgcaagaacagacaaagtactatatggcagtaagggcaaacgcgtaggtcagaccacattactaagggttggccattcctgggcggcctcaaaaagccatgcaccacattagcgacaagggatccctccctcacacacaacatccaccgggaatttgcacatccaattcgcggacacgcaccaatgttggggacttcccagaaaagggaatacgcggggagttattataatcacacagaaaataattttgaattcatcgcataattatggggtgcaggttttggaaatatgcacaaaaaacagagaagtaagcaagaaccctagggagtaaacatattggatgttatggtatccacaaagaaataaactagtattggtaaaaaaaaaaaaaaaagggagtgtaaaagtgaagtcgagaaagtgtgataattccattggtgtataaaagggataaaacctatagacaataagagggtgataataaaaaaatactagcaatgaatagaacaagtaacaaacgccccagacgacagatgggaaccatatgagcgaaacactactgggaacccgcataaactacagagaattacgccacacagagacgtacaaagacagcgagccaacagagaacaaagacacaagagaagaagagtgcgataacagcaagagctgagatcaaaatcgaggtgagaaacacatagcagcacacgacgagagcaagctaacgatcatagtcaatgacgaccagtggagcgaccctacaccagtactctagacaacaagagcacccaaggaagagccaagagtaagcacagttaaatataataaagaaagaagtcacagtagagcacataagacgacacagaaatagatagcgacagctacacagacgagcatgctacctagctaagcaacagagcacacaagaatacgcgatagacagcaacataagtaaagacataagacagcatacgagcgtaaggaagtatcgatgcatagcacgtg

SEQ ID NO: 670034 - DNA, 788 bp, Homo sapiens
gtgcgatggtgctccagtgaagtgtggagtgagtgaagtgaagccccgggtgaccccgaccacgaggccagcacccagtgctcgtgacctgtgtgtgccagagcatagcaatgggtgggtgtgcatgggtggacgatggggccccagccacggagctgtggagccccagtgatgctgggacccctggagaggagccagtggggatgagtgcaggtgggccacggggaagataggcctggagcccttaatgccccaaagatgagcaagaagaggaatgctggagctgagccggctgggagcagcctgcccacagagccaggccctcagagtgcctcagaggtggagaagatcgctctgaatttggaggggtgtgccctcagccagggcagcctcagtgacggggacccaggaagtgggcggtcaggaccctggggaggcagtgcagccctgccgccaagccctgcggagccagggttggcccgacaacggtgagggaagcggagggaagggtgcgatgagggatgcatgcaggacaaggatgcttgcggttggaccagtgcgctgcgtgaccgagagccattggcccctttgcctgggatcgcaccgtggcgccagtcgggcggccaagcgccggagggacagcgacccggacggtggaagaaacggggggttctgcacgcgcagcgtcacgccaggaccgcgggtacgtaccgcggggccgcccaacgggaaagcggaaggcaccacgggggcacagccccacgatcggcgggacccgccacggaggc

SEQ ID NO: 670035 - DNA, 658 bp, Homo sapiens
  misc_feature (364)..(364): n is a, c, g, or t
ctctctctctctctctctctctctctctctctctctctctctctctctctctctctctctctctctctctctctctcctaagattaaaaacgccctaacccacttcttaccacaaggcacacctacacccactatcccaatactacttattatggaaacgatcacgctactcattgaaccaatagccctggccgtgcccctaaccgataacattactgcaggccacctactcatgcacctacctggaagcgccaccctagcaatataaaccattaacctttcctctacacttatgatacttacaacactaattctactgactatactagaaatcactgtcgccttcaaccccccctgcgctgtnacacttctagtgagcctttacctgcacgacaacacttaccaaattttagtacaataaatgctgaatgaattccgggggggggggggggggggcccctcccaacaaaacctcgagggggggcccgtgtcccaactccgccctataaaagacccgtgaaaacaaaatcaagggcccgctcttaaccaaacgggccccacggggaaaaacccagcctttcccccacattaatggcttttaaaattcccccttttttcccggtggccaacctaagaagcccccccactgcgcactacc

SEQ ID NO: 670036 - DNA, 311 bp, Homo sapiens
tttcgcccaggccggagtgcagtgacgctatctcggctcactgcatgctccgcctcccgggctcatgccattttcctgcctcagcctcccgagtagctgggactacaggcgcccgccaccacgcccagctaattttttgtatttttggtagacacagggtttcaccgtgttagccaggatggtctcaatctcctggcctcgtgatccacctgcctcggcctcccaaagtgctgggattacaggcgtgagccaccgtgcccggccgagtggacttttttcccatgagccctatgggcagtctgctacttggt

SEQ ID NO: 670037 - DNA, 604 bp, Homo sapiens
  misc_feature (27)..(27): n is a, c, g, or t
  misc_feature (100)..(100): n is a, c, g, or t
  misc_feature (127)..(128): n is a, c, g, or t
  misc_feature (235)..(235): n is a, c, g, or t
  misc_feature (237)..(239): n is a, c, g, or t
  misc_feature (251)..(251): n is a, c, g, or t
  misc_feature (253)..(253): n is a, c, g, or t
  misc_feature (257)..(257): n is a, c, g, or t
  misc_feature (268)..(268): n is a, c, g, or t
  misc_feature (308)..(308): n is a, c, g, or t
  misc_feature (345)..(345): n is a, c, g, or t
  misc_feature (357)..(357): n is a, c, g, or t
  misc_feature (361)..(361): n is a, c, g, or t
  misc_feature (377)..(377): n is a, c, g, or t
  misc_feature (388)..(388): n is a, c, g, or t
  misc_feature (398)..(398): n is a, c, g, or t
  misc_feature (414)..(414): n is a, c, g, or t
  misc_feature (420)..(421): n is a, c, g, or t
  misc_feature (427)..(427): n is a, c, g, or t
  misc_feature (430)..(430): n is a, c, g, or t
  misc_feature (433)..(434): n is a, c, g, or t
  misc_feature (439)..(439): n is a, c, g, or t
  misc_feature (443)..(443): n is a, c, g, or t
  misc_feature (449)..(449): n is a, c, g, or t
  misc_feature (451)..(451): n is a, c, g, or t
  misc_feature (454)..(454): n is a, c, g, or t
  misc_feature (456)..(456): n is a, c, g, or t
  misc_feature (467)..(467): n is a, c, g, or t
  misc_feature (472)..(472): n is a, c, g, or t
  misc_feature (484)..(484): n is a, c, g, or t
  misc_feature (492)..(492): n is a, c, g, or t
  misc_feature (495)..(495): n is a, c, g, or t
  misc_feature (522)..(522): n is a, c, g, or t
  misc_feature (525)..(525): n is a, c, g, or t
  misc_feature (543)..(543): n is a, c, g, or t
  misc_feature (564)..(564): n is a, c, g, or t
atcatacatagctctctttcacatcangcagtagaacactgcatttacttcatctcaggatactggatacaagattaatagtcagtttgtctcaaaatangtcaatgtgttctgtctgaaaacatgnngagggcttggagtaatcatatcattttacgaggtgctttagaaaaccaagctacaggtcctgaatacattccaaaaatcctaaataattaccaacagaagagagaantnnngccagccagtanantcantaaagaagtanaaaggtgcagacaatgtaactttaccaggaagcttaaggnggggcccagcttctcggcaggagtcagcaggcctggnagcctccatggntggngctgctgtgtggaaanaaggccatggncttcttgaantcctggaagctccagngcatcnncaccanctnggnnctgancagnacccgnancangnccagctcctgnagcangagttcattggngctgaccnggnagccgtggctctcctgcagcatctgcntgncccctggctcttgtcgtngtgctccccgcgctgcttccnttccacaatctcgccacacagcctcttcacacttgtttgg

SEQ ID NO: 670038 - DNA, 558 bp, Homo sapiens
  misc_feature (90)..(90): n is a, c, g, or t
catggaagtggatgggctgagactctcgaacagatcgaggtggagattctattggtgaaacacgactcctggagccagtaaaagaaatcnacggtgggatgaaacaccagctagtcagatgggtggaagcactccagttctgacccctggaaagacaccaattggcacaccagccatgaacatggctacccctactccaggtcacataatgagtatgactcctgaacagcttcaggcttggcggtggaaaaaagaaattaataaaagaattcgccccctttttgatgaggaattagatgttaggttcccagaagaaaatagggtacttcctcctccagcgggtaaggttcctattggaactccagctcgaaagctgacagctactccaaccccttgggggggtatgacgggtttccacaggcaaactaaggatcgacttatgaaaagtgttaatgaccagcctttgggaatttttccatttttaaaacctgatgatattcaatactttgataaactattggttgatgttgatgaatcaacacttagtaccagaagagc

SEQ ID NO: 670039 - DNA, 131 bp, Homo sapiens
  misc_feature (84)..(84): n is a, c, g, or t
  misc_feature (88)..(88): n is a, c, g, or t
  misc_feature (106)..(106): n is a, c, g, or t
  misc_feature (113)..(113): n is a, c, g, or t
ggaggctgaggcagtggctccttgctcagcagctgcacgcgccgtggctccggatctcttcgtctttgcagcgaaaacaaaatnctgncagcgccggttgacctcngccgccntgtcgttgccccttagtg

SEQ ID NO: 670040 - DNA, 240 bp, Homo sapiens
cgtattcctaataacggaagaggcatctggtttggtgttcgagcctggcagaatgaagctactactcagaggaggagatattctaacgtagaacattagacccaagcagggtgaggaagaatgagagtggataagacaggggagctaaacaaattaaaaaaaaatacactgagaataatggaaaccagatttcttgctgtcagataaaagagttataaagatggaaaagcgtaattaggg

SEQ ID NO: 670041 - DNA, 136 bp, Homo sapiens
ggactcgtaccccacctggactgggtcctgcgctcgtccttagtgggccctacaaacccagtctcatgattcccccaaatcccccagacccatctgccatcagccaggccactagctctgttcccccacccaaagt

SEQ ID NO: 670042 - DNA, 151 bp, Homo sapiens
gcatgatcacgccctcgatactcattctccttatctgcttcctagtccggtatgcccttttgcttagcactcacaaccaaaactaactactactaacattctcagcacgctcaggcacatagagaacgcgtctgaactatcctgtcccgcc

SEQ ID NO: 670043 - DNA, 257 bp, Homo sapiens
  misc_feature (104)..(104): n is a, c, g, or t
  misc_feature (171)..(171): n is a, c, g, or t
gggtatacgcaaggcggtttcatcgcttgggaaatcctatcttgtatttaggtgccaaggttataacccactgtttgaacttgtgccagataattcttccaaanatgtctcttctccaagcaccacgtctagctctttcttgaccagtctgaagaagccttatggcatctnctctttcctggacaactttatctcatgcatccatagaatctactaccttatctaaccgctctggacttggccttgccatatgccaa

SEQ ID NO: 670044 - DNA, 103 bp, Homo sapiens
ccgttggtggttgatgtaaatgagtgatgcaggagtcgaggaggttagttgtggcaataaaaatgattaaaggatcccaactggtgacctggctgacttctgt

SEQ ID NO: 670045 - DNA, 950 bp, Homo sapiens
agagataaaccttacaagtgtagtgagtgtggctggaccttcagtcagaagtcaaagcttacgtgccattcgtagacttcttactggagaataacgagttgtaaatgaatgtggttgaggtttttagttcaatagaggtcacaaccgtagtattggtctatatcagatgaagttcatactcggggagtaatacctatgagaaaatgatgaatgcagtgtgactaatagtgtatggaagttggcaaaaaattaaggcttcaggaaggacaggaggaatatccaagtatttggtagagaaatgctgatgggattggtgaatgaatgtcactacagtggagctggtcgcattgttttaataccggtgaaaagacgaggaggaatgcatacctgagaggagagaacctataataccatgtacggagtggtgtgaggatatggctttttggggcattgatgtgtgaatcttggcacgaataatgcgtagaagttcacacgtgggtggcagaatagactttaccatgtgtatcgtgaggtgtgcgtaaataagcctttaggattggcacgtcgaaggagtttgtttacacggtcttgaaaatccatggtgtaggggaaaactttgagttaatggtaaatgactttgttcacaccgcgttttcatgataagtgcttaacgaccatggtgaatctctggggaaatccgtaaggatgaagcagactctggctagggtagaagttggggggggttacagaaattggtaatactgtgagggtcaacagaggaattaaacgctggggagaaacgtgaaatgtttgttgtggaggattaagctgtcttgctatggacgtgggaatatcacgggggaacccctgggtttgtgggcgtaacattggctctggaaaaaagttggggatacaaaataaacggcgttggattttgaataaaaaaaggg

SEQ ID NO: 670046 - DNA, 1000 bp, Homo sapiens
  misc_feature (620)..(620): n is a, c, g, or t
  misc_feature (629)..(629): n is a, c, g, or t
  misc_feature (686)..(687): n is a, c, g, or t
  misc_feature (700)..(700): n is a, c, g, or t
  misc_feature (719)..(720): n is a, c, g, or t
  misc_feature (804)..(804): n is a, c, g, or t
  misc_feature (821)..(821): n is a, c, g, or t
  misc_feature (823)..(823): n is a, c, g, or t
  misc_feature (831)..(831): n is a, c, g, or t
  misc_feature (837)..(837): n is a, c, g, or t
  misc_feature (840)..(840): n is a, c, g, or t
  misc_feature (842)..(842): n is a, c, g, or t
  misc_feature (856)..(856): n is a, c, g, or t
  misc_feature (859)..(859): n is a, c, g, or t
  misc_feature (865)..(865): n is a, c, g, or t
  misc_feature (876)..(876): n is a, c, g, or t
  misc_feature (879)..(879): n is a, c, g, or t
gaggtgatccacctgcctcaacctctcaaagtgctgggattacaggtgtgaaccaccgcacctgttccttataaggacaattgtaattacatgtcaggcccacggggacactccagaatcatctctccatggcaatatccctggaataaaagtcctccttccatagagagcattctgtaatgtgtccacagcatgcttatccaggtaagaacatgctgggggccattattctgtctcccacgtggaattaggacgtcgacatctttgggaccattattctgtctcccacatggaattaggacgtggacatatttggggacattattctgtctatcacatgggattaggacgtggacatctttggggccattattctgtctcccacatgggattaggacatggccatatttacgggacattattttgcctcccacgatcagtgagtaattcaatcgccacagataccgaaacgtcaactgagatggtggctgacaggtggtctagggcctacaggggacttcaggacttggagccgagagagagccgagcttgggatggatctgacggtgaggtgccagctgtttcctccctcgtgggtgttccacgtccctcctgcaaancccagcggncccttgcttcagagtttcaggggagatttgacgatggagcagaggcagcttccgganncttctaccctgancttttgattcacaagtcanngctgggggagagatggagccaggctcttggtgggggagaagcgtctaaaacacaagcaggacagaaaaagcgcggaaatccttnggcctgcaagaagtgananggggagantcccanagngngccccaggaagcanggnccactncccagggagancanattcctggggtatgaaacctgtgggcttcagaagaactcacgggcgtatttacctcagaagcagaggcctccggcgtccaggcaaacgaagaaggccgggacgtggataccaggcctagta

SEQ ID NO: 670047 - DNA, 569 bp, Homo sapiens
cttttgtgggacttcagtcatgctgataatagaatcttctgttcatacaattctgtaatatttatttgtacagttagtattctaatgaaaggatgaagagtctgaactagaataccattctgatgttggagcggccgccaacttttttttttgtacagttagtattctaatgaaaggatgaagagtctgaactagaaggtaggtttaagccatcaccaggcctttgcaaatggcctaaatggtgttccctttgaaataacgcttgccacaagtatataataagctatattaattgtgttttgcataaaattgccaaaacacagtaatgtgtatatagtggtataagatcttgaaaaaaatctctataattgtgctctttatctgtgaatgggaaaagccatttttagtaggtgactaccatttgaaaaactcaattggatgtatatctgaatgttgcattgtattgtacagtatgcatattattgtttgtggttgcatatggcaatgaagtgtttgttttatattaaaaaaaacctgttatgtacagttgaaataaattttgcatttgc

SEQ ID NO: 670048 - DNA, 642 bp, Homo sapiens
gagtaactaaaaactgtattgctggccgggcgcggtggctcacgcctgtaatcccagcactttgggaggccaaggcgggcagaccatgaggtcaggagattgagaccatcctggccaacatggtgaaaccctgtctctactaaaaatacaaaaatgagctgggtgtggtggcacgtgcctgtagtcccagctactcgagaggctaaggcaggaaaatcgcttgaacccaggaggcagagattgcagtgagccaagattgcaccagtgcactccagctgggcgacagagcgagactccatctcggaaaaaaaaaaaaaaaaaaactttgggggacagacattccaagagggaatgtgaggcaaagacttacatattaccggatttccaccaaagggccttgacagattgtgaactccccacgtttgcggctgaagaactctttaacctcttggaaactacttattatggcctagtgatacaaaacgtctataagggtggcccaaaaatcgtggcgggacaacaattcaattacacgagtgcacatgcggcacagccattgtgatagaggcagggggaaaacttaacaacacaggatcatctcagagaacacagagatagtataaccaggcgtcgctctcccga

SEQ ID NO: 670049 - DNA, 179 bp, Homo sapiens
atagacaccggatggtctcatctcttgactatgatctgctggctcagcctctcaaagtgctggggttacaggcgtaagccaccgaatctagctagacactgactttttcaacacattttccctggaagaaccaagacccattttgatgggcttcccaaaggggccattcaacgcctccg

SEQ ID NO: 670050 - DNA, 227 bp, Homo sapiens
  misc_feature (16)..(16): n is a, c, g, or t
  misc_feature (33)..(33): n is a, c, g, or t
  misc_feature (42)..(42): n is a, c, g, or t
  misc_feature (59)..(59): n is a, c, g, or t
  misc_feature (61)..(61): n is a, c, g, or t
  misc_feature (98)..(98): n is a, c, g, or t
  misc_feature (130)..(130): n is a, c, g, or t
  misc_feature (135)..(135): n is a, c, g, or t
  misc_feature (141)..(141): n is a, c, g, or t
  misc_feature (158)..(158): n is a, c, g, or t
  misc_feature (193)..(193): n is a, c, g, or t
  misc_feature (200)..(200): n is a, c, g, or t
  misc_feature (204)..(204): n is a, c, g, or t
  misc_feature (206)..(206): n is a, c, g, or t
  misc_feature (211)..(211): n is a, c, g, or t
  misc_feature (213)..(213): n is a, c, g, or t
  misc_feature (216)..(219): n is a, c, g, or t
tgcttatgtctttacngatggttctgtcaaacnacaaccccngagttataaggttgccncncattacagaagtgtcaattagatttaagacaattttncttttctttaaagatacagcatttaaaaaatnccccnaattgngttatgccaaagtttcnaacccttgtgcgtgtaacttgttacaaaattcccngaaaacntaananccccncncannnncccccccc

SEQ ID NO: 670051 - DNA, 484 bp, Homo sapiens
tcctaaggtgtgccagacgtggacgtgtcgggtgaagaagcaaggttagtatggcccagacggcttccggggaaacaggaaggagtgggacaatgagttaacctcctagagtacctttcagcgaggctcaggcagtacttcagggtgaggttcccggtggaattcactcactcagaatttcaaagtgcttgcggtatcaactcaagagatacaccatttgttttactattgttagtcggctgccatagtaactattttagttagccagggagagaatatatattagggaaacaaataaaagtattgagttgtctgtatcagttgaatgatctctctcggtgtgtgtgtgtgtgcgtgcacgcgtgtgtgtgtaagagagagaaagggagagagaaatggatgccacagttggactcatatgggtagctatggcttgtgtctgtgatagtctaaatataggtcttcaatgtgttgtaattccggt

SEQ ID NO: 670052 - DNA, 117 bp, Homo sapiens
cccccatgacctgtggctggaaccctacagtcccctactcacgacctacactctcctacccatgacccctgtgtggaaccctacagtcccctactcacaaccccgaacactggatat

SEQ ID NO: 670053 - DNA, 112 bp, Homo sapiens
  misc_feature (35)..(35): n is a, c, g, or t
gcagaaaagggaataataaggcaagagagagaganacgagaaaaaccaggcaagggtaggtcagatagacggtcagggacaaagacgacacccacgtcacggaagacataaa

SEQ ID NO: 670054 - DNA, 714 bp, Homo sapiens
cgacgatgatctacgagttactattgaggtatcgcgtatagctgaggaacactcgacgttggattgcatcatagcgtgcagtctcacgagttcgaaacgccaatgtgggtggatctctttacctgtggaataagaaagcagcctgggcaacatggtgaatgcccatctctacaaaaaatacaaaaattagccaggtgggtggcatgtgcctgtagttcccaggttcttgggaggccgaggtgaaaggattgcttgagctggggaggctgaggctgcagtgagccatatgccactgtactccaacctgggaaacagagcgagactccatctcaaaaaaaagcgaaagaaactggatcattggtttgaatacccctttcccagcagcagcgccccccaggcagttttacaggtgaatatacctgatatttaattaacaaatctttaagctatttctcagaggctaggaaaagaaggcaagcttcacaactttttttaaaaggctaagtttaaccttgatctcaaaaccatataaatacgatctaagaaggaaacattttttgtaggccaatctctcgctttcacaagcaaaaaataaacgtcttaagtggaatattaacgaaattgaaccagcaatgtttaaaaagtcctacatggttgagcagtagaagtatccggggatgcgaaatacttacatgaaaatctatctgtgtccac

SEQ ID NO: 670055 - DNA, 517 bp, Homo sapiens
  misc_feature (18)..(18): n is a, c, g, or t
  misc_feature (46)..(46): n is a, c, g, or t
  misc_feature (101)..(101): n is a, c, g, or t
  misc_feature (119)..(119): n is a, c, g, or t
  misc_feature (126)..(126): n is a, c, g, or t
  misc_feature (129)..(129): n is a, c, g, or t
  misc_feature (147)..(147): n is a, c, g, or t
  misc_feature (155)..(155): n is a, c, g, or t
agcactcagcaccaatgngttcagaccctcccaccgcctggttgcncttacaccgcgaggaagcttccctcgcaatttgtggtagattactatgagaccancagccctctgctcccagnccagctntgntattccaacccaaagagncaagcaantctgcgctgaccccagtgagtcctgggtccaggagtacgtgtatgacctggaactgaactgagctgctcagagacaggaagtcttcagggaaggccacctgagcctggatgcttctcctgagccgcatctcctccatactcaggactcctctccgcagttcctgtctcttctcttaatgtaatctcttttatgtgctgtattattgtattaggtgttatttccattatttatattagtttagccaaaggataagtgtcccctatggggatggtccactctcactctttctctgctgttgcaaatacatggataacaccgttaattccatgtgttttcataataaaactttaaaataaaatac

SEQ ID NO: 670056 - DNA, 869 bp, Homo sapiens
gatgagccactgcgcccggctgtaaatgtcaagagattcaatacatacacaagtatatctgctgagtacaatagcattaaattaaaatttcagcctgggcaagatggcgaaaaccccatctctacagaaaattcagaaagaagaataattagccaggttggtggcaagagtccccatctctacaaaaattagaaaaaaataattagccaggtcggtggcatttgcctgtactcccagctacacaggaggctgaggtgggagaatcacctgagcccagggaagttcaaggctgcagtacaccgtgatcacaccactgcagtccacccatgggtgacgagtgagactcaaaacacaaaacaaacaaaattaataactgaggacattctcggtcaaaaacatcacacaacttaattaacttaccattaactaccagaaagaggcagtacagtagcttgcgccatgtaatcccagcatatctggaggctgagcgtggccagatcactcgaggcaggaagtcaagaccagcctgggtacatagcaagacctcgggtccaaagaatacaaacaactcagtgcagaccaggggggcccaggccggaggccacaccagtcggacgccgtccggaagaacaggacactagaagctcaggctagcaacgcacacccgccacaccgcggcgcgccaacacaacagacgcccaacaccaggatcaacggggaacaacaacacagtaataaccaccacaacaacgaagctacgaccagaaagccgcgcacatccacaaggtgaccgacacgtaacctcgtccgccctcggctgctctacaagacgaagaagacagcaacgagcacgaaaaacaggaaaacct

SEQ ID NO: 670057 - DNA, 101 bp, Homo sapiens
cttagaggatcccccaatgaagaagataaagaaaatcaaggagcatgagacaaggtcagcagccacctcaacgtcggtaccgccgcaactggtacggcggg

SEQ ID NO: 670058 - DNA, 192 bp, Homo sapiens
aatctcactcttggccagcgcacagtgctcatgcctgtaatcgcagcactttgggaggctgaatgtagcgtgaagatgaaagacaggaaaagcatcgattgaaaatgacggctatgttgcccaagccgatctccaactcctgttctcaagtgatcctcccacctcagcctcctgaatagctgggactatagg

SEQ ID NO: 670059 - DNA, 474 bp, Homo sapiens
  misc_feature (261)..(261): n is a, c, g, or t
ctttgtgttctacatttcatttgctttttatattacacaatttttatagaaaacaataatagggacttctattctacctagcatagtagatgtacagaaaatttctcccagtagagaacacttaagagtgatgaataaaatatctaataagtcatggctgaaatgaaagtaaagtgatagggaaaatataagagacaagaaataagaaaggaagattctacaatgatgaaagcttgaaatagtgtttgctctcaggtcatntgataattcctaatgactatagctgggtttcaatgaccacaaggctgtgggacacagggataatgcatggggctacagcagcctggaagactgaattagagactcaaatgcagagttgggactcttcaggataataccatcaatggataaactaggaaatgccctgtctaaagaaggaacactgcctgtctcagtcttgactttggatggaag

SEQ ID NO: 670060 - DNA, 265 bp, Homo sapiens
aagtagctatagagtggagcgcattacatgggtgagccgtataatgttagaccaaatccccatgagccacaaatttacccctgtgacaaagcagcacatgtacctcctgaacctatagtaaaagttggaaagagaaaaagaaaaaaaaaaaagtctggaactctgaaaggtggatgggcctcttactcctttcagtttttgtcaggtttggcttcttgtatggtgacgctttattatttaggttcacacgcctttaggactatga

SEQ ID NO: 670061 - DNA, 373 bp, Homo sapiens
tgaattaaacagattttatgaatgtctatgtaagctactttatatttccctgtgtaggctttgcttacgtgaatgcttgcttattgcttcaaaatgtaaatcacagatagctctgtgcgatataattgaataatgagtaacttcatttggctaacttatacctataaatcttttaatccataatggcctttttaataacatgaggagatgaacaataatgtccattggtctacatgtatgccaaccacctgtaatgcattgggaactgagctagcagctggaaacagaggcacaagtaagacatagtgtctgtacacttcaagcccattagccagagggagcaatggaatgaatattatagcatgagtattta

SEQ ID NO: 670062 - DNA, 299 bp, Homo sapiens
ctgggcattgttggaaggggaggtgaatgtgtaaaagctacggtaggtaaacaacagacagtgaagaatgtcaaatataagctacagtgctaatctctgttggaagcactggattccgaagtgaagagcagtagtcggacagcctcatctgtatacactaagctctctagaagtacgctggaataaaatgccttgtaacgtccttggtgacaggacttcaatggagacacacaggtatccatccgtggaaacactggagttcaagaaactggtcctttcagatcattttgcgagggtct

SEQ ID NO: 670063 - DNA, 125 bp, Homo sapiens
aaactatactctctatactaatctccctacaaatctccttaattattacattcacagccacagaactaatcatattttaatatccttcttacgaaaccacacttatccccaccttggcctatcat

SEQ ID NO: 670064 - DNA, 437 bp, Homo sapiens
  misc_feature (338)..(338): n is a, c, g, or t
  misc_feature (340)..(340): n is a, c, g, or t
tttataatccaaagttctctggcaaaattgcctccatctctcatttcattcaacattcattcattcattctacaaaggccacttgtcatagattgtcttgtattatcacctacgattgaagtgtctttttctttctgtttaattgcaaagaatagaaattcactcaagcttgtttgcataaagggaggtgaattgaagagatgtcccaggatgtcttgtcatcaagccacatttcccaagagttccagtgaatgggacccttccagttatcattcaccctggacctgcttagtgcaggagagggttgggggcacagttccttccaagggggcctgtgntnggctgatgtagcagttgtgacctgcaattagcctacaatggggggcaaaatcatgtaacaaaaagcctattttgtattaaagcatcaaatatctcaa

SEQ ID NO: 670065 - DNA, 236 bp, Homo sapiens
cacagcagaattcagggcaaatcgaaactcgtgaaggtgcttgtcccagtgtttgtgctgggtccctacataggaagcaatcattgtcttcaaggttcgatttactctctcagtgagattggtctgtgggtgataggccgtggtcaacttctgcctcaggttccatctttggcaggtctcctcaaagagatcagagacaaattgggaacctcgatcagacaggatgtagtcgacgc

SEQ ID NO: 670066 - DNA, 110 bp, Homo sapiens
aagaagatgaagatgtagaaggggatgaggacgacgatgaagtcagttaggaagaagaagaattttgactttatgtaagaagatttaagattaggattaggatgtagaga

SEQ ID NO: 670067 - DNA, 963 bp, Homo sapiens
gctgcggtgaacttgcccctggaacgcgacgccgagagcttcctactgaagagccccatcgcggccctgatagcctggacaagagagtcatccatcattattccacatgtgaattctctatctgacgcgtggtgccccgcgatgtgcctgtgttcatcgagggcaagcgagacctgtgcgatgtcaactgactacgccgcagccatcgtacgtagcccatgacgatcatcatatcacatgaagaggcaggcatacaatggcagttctatcccgtcacgcgaccgcgaacgttcatgtgaagcccacaggcactacctggccgcatgcaagccacgacggcgcttcaacggcatgacgctacaagaccgttccgaccgtcaacgactccgcagacatggagctggaggaagcggagaccggcgaggaagctcatgatagacacggctgacaggaccaagtgacaggggcctgacgccaagtcgctgcatacactccacattgccattatcagaggccgtgaagccatgctgacactatgggccatgccgaggctgagggcctgcctgggacggccctccaggtgcatgtcccatgaggaacagatgagcagatgagagtggtcctgacactgctcatgacagccagcaccacgatttccacactgatgatcaatcgccaatcaatacaacactaatacctcggctggacgcacccacaacccactgagcacacgaccggccccacgaaccatcggtcgaaggcatcaacgcatcacagcgctcgaggcgctacgacaagaccccacgcaaaaaacaacaggggcacagcaacacacaagcacggtcactacacaccccacagggaaaggcgctatcaccacgggatacaccaccacagatacaagaggggcagcagaacacccatctaaaacaagtaacccacgacgagaataccctgagcaca

SEQ ID NO: 670068 - DNA, 242 bp, Homo sapiens
tcccgctctcctcgggctctctgcccccgccccgtttctcctcccccatcgcgagggccccttccctcccctccctgcgggcgggcaattcaaacccgaaagtgcaggaaggcggcgctcggggttggcgggcgggggaaagcgctgccgccaaaaaaccgccgccgagatgggcgctcttgtgcggtatggccccgcccctcgcccacgttccccgcgcacgagacgcgcgctgtcgccgc

SEQ ID NO: 670069 - DNA, 1266 bp, Homo sapiens
  misc_feature (1266)..(1266): n is a, c, g, or t
ggacgaataccctgatacgcatcatagaatacctatacagtagtaggtagcctatacacccaaagtagtactagacacacgtaggtacgagccctaacaatagccaccctactaccgtaccatacagtatggtaagagaataactagatagagacctaatatgcatatgacaaacgagggccctactaatagataatactagctataccggcactactagaaagctagacgcacacgccaacctaactgggcgatactagaaagccacctaatgtactacaggcctaccgatagcagtaggtagtacaaccaacctaggccttaccgttataccctagtggccatgctaacaataagcctagaccctaccggcagagtatagggcgagtacgaacaatagggtaccacctataccccaaccgtacttctcgatatatactatatattagctcttagggctatataggcccccatactacgaaccaagtcccgtagcgaacgcccgaggccaggtaattaccgaggcttactataaacaggataggcccgtgcaaacttacaatccccaaggccaagggtacttatacggaataggcccaaagggaaagcgataggaatagcggcttaggcccttaggtaggaacgccccacggtcctaacggggcgctggaattaaccttaacaacccggtagggacttagcctaggtacttatacccgggtagtggtaaccgggcattagttacgccattaggaacaggcggaagggcgttaccggcacataggcaaggcccaaggcaattaggccgtattcacacccggatatggccgacagtgaagaagccacacggaaaacctaaggtccaaggccctataagccttatcgaggttagggccaccacttagggcagttacaccccgctaagacccgagaatcaggtaaccacacgggacacaatggacacgggtaccttaggttaggcaccaattaccactgccaaaccccttaccggttagggcgccccttaacgagaagaggaattaggggccgaaggttaccaaacgccttttctacccacttatctcggcgggcgcaacaaattaaaaagcgccaaacccaaactgcccaccgaattaccgccagaggtggacagggcccttaccgttatataccgagacgatcgcgccctgtgcgcaatatacatttaccgagtgaacatgcgccaacgcgcttatcccaaccttataggagccccacagtaggtan

SEQ ID NO: 670070 - DNA, 339 bp, Homo sapiens
tgatataagtgcgcaaaggttacaatagatgtctaccctcaaaaatcaatatagaatgatttgtcatcatccatttaataccacaagggtatcagccacaaactagaaatatcactcatatgcaaataaaataacattcaagactatatatcgtagaggtatattacatcttgtaatggatggacataaatctattcacatactcatcctatcctcaaattacactattctctcctctcattcttactttgtactactcatattctcacactatcctcctacgcataaaatataatgtatcctaatgaacagagataccatacgtgggcaaggaaaaaa

SEQ ID NO: 670071 - DNA, 450 bp, Homo sapiens
  misc_feature (14)..(14): n is a, c, g, or t
  misc_feature (24)..(24): n is a, c, g, or t
aaccatggtccaancccaatcccntgtacatgaatgcctcataataacctaaaagtggaaacaactcatgtcccatcaactgacgaacaaaatggcaatataccccaaacaaggcaatccttactcagctataaaaaggaataaagtagtgatacatgatacaacatggatgaaccttaaaaatattatgcttgggtccagagtttcagtatgggaagatgaaaatagttctggaaatgtatgacgttgattattgaacaacaatgtgaatgtacttaatgtcaatggaatgtattcttaaaaatggttaaaatggggccaggcacagtgctcatgcctgtcatctcagcactttgggaggccaaggtggaaggatcgcttgagtccaggagtttgaggttgcagtgagctatgagagcaccagaacagtctagcctgggtgactttgag

SEQ ID NO: 670072 - DNA, 266 bp, Homo sapiens
caaatgtacttgcgatactggccctggagagaaagcgagaggagcgcagcagactgtgtgatatatgataattgccccaaatatttctgtcactaataacacgctactccgttgagcgacgagcaacattgtacagcacagctgccaaaatcccaagcacagccctctcagcacacaggccaaggccagggctcaggcagcttcccccaccattcctgcagcacacattatgcagtggcagcatggcactgtccagcccgttggaa

SEQ ID NO: 670073 - DNA, 974 bp, Homo sapiens
  misc_feature (974)..(974): n is a, c, g, or t
tcttcacctgaaatgcctctagtgaaaaaaaagaaaaaaaaaaaaaagggtgtcagccccctttgcgaggacctgtgttaaaaccgtgagaaccacgcgtgccgtgctaaacggacagagaagttcacccagccctcaggaagcaggtgtgttgggccactttggagttccctcaggtggggaaaagaaaattaagaagctcaccttcttagcccattgtgttcccgagtgcctctctgtggaaaccgaggtgtgtttgtggcccacttgtgagaagttctccctcgagtgtggggaaaagagaacaaatatagagaaagtctccacctctctatagcccgagtgtctcccaagtgcccctctgtggggggtgtgaaaacacctctcacccagagacaccctctctgagacacgcagggttgtgacgaggaagaggaaaccaccccgagacgagtgtgtgggcgcaagaagaagctctcctaaaaaaacacacccacccacgagagagagggcacacaacaaagagggggggcggcccccagaagagacaaccccccaaacagaacgcactttctctctcagagggctccagagagaaaccctcctttgtggggcatctcctgtgtgtgagaggcgccccgcaagggggagagagcccccagggggaaagttgtgtgagaggagagaaacacactgtgtgaccctccgagtgtggcggggagaaaacagaacaggcgaggagtactacgacggcggagaacacccaacgagcggacgacaccgccccctctttgtggggtggcggcacacagaggaacaaccacaccgggggaggaacaagcgccgctgaaggacaagaggagacgcccccccccgacgaagaaaaagaacacaacaccacaccaacaacagtggtggagggacagaaaaggcggggtgtttgaacacgacgacgtaagagcacacacacacan

SEQ ID NO: 670074 - DNA, 885 bp, Homo sapiens
aactattccatagggtcgcgtactaactccggtaagtgagcatgatcagaattggtagctatgatctgctgtatgagatcagtgggtggccttatgatcaatcagtgtaagcacggcatatatctgacagtacggatagacgctcaagaatggcgtgctgtatgtcatctctgtaccataatcagtgggtcactaccccgaacgtcgatcatcagatattaagctgagctcggacatccacggaagcaatatgaaatgatctgctgcagtgctctgagccctaggattcatctttctttttcaccgtaggttggcctgactggcattgtattagcaaactcatcactagacatcgtactacacgacacgcactacgttgtagctcacttccactatgtcctatcaattaggagcctgtatttgccatcataggaggcttcattcactgatttcccctattctcaggtacaccctagagcaaactagccaaaatccatttcactatcatattcatcgcgtaaatctaactttcttccaaaacatttttcggctatcggaatgcccgacgttactcgactacccggatgcatacaccacatgaaccattctatcatctgtaggctcattcatttctctaccagagtaatattaatacatttccatgatttgagaagcttcgcttcgaagaggaaagtcctataggtagaagaccctcataaactggtgactttgttgccccaacctaaacattgcaacggttataattacaaagggattacccaaaggtaagaaccaggtcatttcaacaaacaacacaaattgacgcccacatcttaaatattggcggaagagaacggatgtaagtgcaacggggaaaggttaagg

SEQ ID NO: 670075 - DNA, 409 bp, Homo sapiens
  misc_feature (13)..(13): n is a, c, g, or t
  misc_feature (20)..(20): n is a, c, g, or t
ttcgtctggttcngaggatncaagcttacgaggcaggttcactaggaaaactctataaatactttgagttcatttaactaaacttttgaattagtgaattatagactcaccttcagcccttaaactgtaacctttaacctttccatattctgcctggtcccagaggctcctggaaccacatgggtgaaaactgctttcataattgtaaatttctaagttggtttgatactgctaacacagaatcagatctagagaataccattagcttctaatatagagacatcaattcttgacttgtcaagaataaaaatctcatgagataataaagttgtactggtcttcagattttttttttttttgggtaatttctttcacttccctcgttaagctggggtacccgagctcgaat

SEQ ID NO: 670076 - DNA, 894 bp, Homo sapiens
gcgatgacgcaggcatgcgacgagagagtactgacgaccttcctcacggctcttatgtgagtccctcatgtcccataagcaagtggtcacccgtttcgtctccccggaaccctttgctctgaaatcgccctctccccgaattactggtcgggaatctcaactgaatgtaattcatggcccattaattttccaaggccgccccctatctaaattacgtattctccggaaacactattttttcggcacacaacaatagtccttacaagacaagtcaaaattacccccccattccttgctactgttcaaaagatggggatccgcacaccatttttgggaaataatcctgcaaaaattttaaaaacaaatctgttccccaacaaatggttatcgccccgcataattcctaccccggacatgtcccacatcttttgttccaaatatcctcggagcaaagaaatattatctaacatattaaaattttcgtcagacaccccccctcgttgtgcagaagagatatcaacccggaccaccacaattttctataaataatatagtcggcaccccatttgagaattctaaatgatttctacaacttaattctcgtcaattcaccacttaatgtgaattaacccactctatagttcttctcccttattaatatctggaggacaccctagctctgtgcattaaaaatacattctgccttaacacaccacgtgtagaataattcacaaatagtgagcagaagacacacagcgacccaccccacccccctgcgtagataaaaccccacaatgttggaaaccgtttgcgagactcttaactgtcacgctggaacacccaccccttggacccccctttcctccaccaacccttggggccaaaaaacaatac

SEQ ID NO: 670077 - DNA, 932 bp, Homo sapiens
ccatacgccccctcattatagtccgctttatacccatactccttaccacataattcccacttatgggcccgcaggttgtatactaccgtagggaccgccatattcctcaggggcactcacacacaccactaccgggctcccaaaaaggctctctttagtaatccgggagtatatcctctagtttttttgttcccctccccaagaagattttgtttctcttctcacacacaagagttttttttagcagccctttttgctcaccccatcccacgcgttgccgccctttccccccccctcatttggaggaggcgccactggggccccccccactcacgagtggctactaactcccgctctgtttatttcgctcctcggtgagagtgctcccaccctactctctctggaacagcacatagctcgctgtgttttatctctcgctcgctcgttcgaggagtgttcctctattcaccctcgggggggctgtccaccccactattgttgttatatagaggaacaccctcccgcgtgaccactcattgcattttcgagacccccgcgttttttgttcaccatgttttctggggggttgttttttggtacaccctccctgtcaaagctcatctcgggggttcttttggtgtgtcgtcctttcacaccattttctgcccggcgtattttccggcggctcagatcatgattattgtgataccccccacggcgttctccaccgggtcgtcctccggctcgcttgttgtgggtcgatacactgtctcctaaccttcatttgtcgtttctcattgccccccgccaaaattttctcccttaacacccaaaaaccctttgggtttgaaaaccccccccgattttggccttttttaaaattgggtttgtttttttttttaattttccattttttgtaggggggtttttta

SEQ ID NO: 670078 - DNA, 438 bp, Homo sapiens
acagatgaggcagagaaccctcttcaaagaagttgtatcaattgtatactaatcaacaacagtataggggaatattttatactttcaccaacacagatattaaccgttttttaatctttgccattctggtggacaaaactgtttcattgtttgcatgtattttgttagattacttgtaggtttcttagttattttgtttggttttctatgacttgcttgtttagcttttgctcagtttttccttggggtgtttgagaggggctgcttttacattcctttcttttgatttggtacaattaatcctgcctgtctctgaacaagaagtacactcaatgtatctggatgttttgactatgaaagtatgtctttaggttttacatcacattaattttttgtaggaacatataaaccttcggttctctgcagggtaccgagctc

SEQ ID NO: 670079 - DNA, 101 bp, Homo sapiens
agccacggccgcccccgaaaccacctccatagctggcagagtgagctctgctgtgctggtgggccctgtgctggtgctggtgtgcctgctggctggtgcgg

SEQ ID NO: 670080 - DNA, 114 bp, Homo sapiens
attcgagatgctctatagggcggtagtggtatgtatctaaagaagagataagcagatttatagaacagctacctccaatgtcagattatggtcttcggaataagaaatcatgga

SEQ ID NO: 670081 - DNA, 412 bp, Homo sapiens
  misc_feature (235)..(235): n is a, c, g, or t
  misc_feature (366)..(366): n is a, c, g, or t
taataagggaacctatttgattttaaaagtaatattgtaatgataccagaatagtacggcagcctcactttcccgaacttgagggagataaacataatttcccattaagaaaatccttgaggcccaagtattgtggcctcactccccgtaatcctcagcactttgggaagcccgaggtgggaggatcgcttgaggcccaggagtgcgacacccagtctgggcagccctagcaaanctccgtctctacaaaaaattaaaaaatgagccaggcacggtggcatgcgtctgtggtcccagctgctttggagactgaggctagaggatcgcttgagcccagaaggtcgaggttgtggtgagcaatggttngccactgcactccaaccttggtaacagagtgagccactttgtctcc

SEQ ID NO: 670082 - DNA, 771 bp, Homo sapiens
  misc_feature (180)..(181): n is a, c, g, or t
  misc_feature (439)..(439): n is a, c, g, or t
  misc_feature (475)..(475): n is a, c, g, or t
ttctacaaagtcagagcccccttcctacttatcttacaccatacacgggcagaacacctttcctcaactcgattaacccacccaactccaacctttatcccttcctgattctcaaataacactgacaccaactcccataacaacctcattctaaactttctctgtggaggggggctaccnnacccacacccccctatacccaccctgccataatttctttattgttgcggcttttttacactatcaaccgacctaactcacaaaactttgaataaccacactctcctttttccacatctttacatcccccacctaaaacaaaattcaaaagatccaccccctgcgatagatcgattccatcttgtcctctccaccgaatggctaccccctaactacccacttaaggtctttaacactttataccagtcccgtttaccanaagcggaaaatggccaatgaacacaaaacaatcaanaacccatttaaaacaccggaaccccccacccccattaaaaccccttactcccaccaatgcattcttattaccaaaatccccctaccctactctcgcgggaataacctacaagtactctagaccccttttcaaaattaatacccctcaacaaagcttcttatcaaaaaaaccctgtacatccaaatcaatataatcgacctattatcttaaaagcacaaatcccgttacatgctggactttctctcttcaaactccagccctatccatctttaacccttacttcttcacccctttta

SEQ ID NO: 670083 - DNA, 1204 bp, Homo sapiens
  misc_feature (342)..(342): n is a, c, g, or t
  misc_feature (503)..(503): n is a, c, g, or t
taatgattcggctctcactgttctaactccagcggtgcatgcgaccaagagcgtggcagattctgctcgtagatgcacctcgaggctagcgcacacgaataggagttcttaccacagcgcgtgaggtgacagcattcgcggtgattcaggccgtgtccatgcgggacatggtgattgcacctaaggcacttggcatgcagtcagcgtcgaatcgaacaatccaaggcgcatttcatgaaacgttgtcgtacgatgctatctcgactcatggaccagtgtcgtgatgttgttcggtcagtcttgatctatccaaaggggcgacttgtggatgcgtccgaatantgcggtctaagcggacaagggttgcctgtcggataatctatgtaatcgtggagaatatcataccagtagacctcatgtgaatcacacatgggatcagagtaaactcatgtaaccaagtcagtctcgcgtgagagagcatatcggaacgggatcacctgccntggtatagcgaccaagagctgtattcgagcgatctctaatttcgccgtgtgacctcagatcgcgaatgaactctgtagcagcgatttcagatgggaatgtaccgctggacagggaaggacaccggatctcctgccccatgtgtggctgtcgatagcggcaacggcggaacgctcttccgcacctataagcgagaaacttccgtttcgccccatttctgccaggacttctcttaagggggaagaaaaaattccttcgttggctttctgaatccttaggattttaaccttcaaacattacccaaggaatttggacttttggggccaccggcaacgcccaatttttcgtaaggttccccagagggaacaaagaatttgcggcggcacactttcctggagccgacttgggaggccatggcacgctgtggtctcatggggggactttagaattgggcaactttggattgtagacccattctttgcattgaggcaggttgggaagcattggcggcggaaacccaaagggctattcctaggtggcccatggttactttggttgtagagacatagaggcggacgttgcgcattccggggggacgagttacggtgactcccctttccctgcgcggagtgctcttgatgctccccacggcttccttccgagccaagccctttttcggacttaggccaaccccccctgttta

SEQ ID NO: 670084 - DNA, 1593 bp, Homo sapiens
gaagacaaatcctgtccacactcaatacttaggttacacctaagtcccgatacatctctatgcacacctattattacgctactcaaggcggaatgacgagactccacgggcatagggagcagctacgtgtactagataaccgactcggagaacgggattccacagtcgtgagcgctaggcggttgaaagtgcgcacatcgtatctaacctcccatcactatgcattccttgcgatcaattgcaagtagaccttgaggacaaatcccacgttgttgcagagagactagacccagacgggcttaagatctcggccgaagactcacaccgcatctgactctcaagcaagcagcctaagatgatgcagagctcggactgattgtgatgcgacccaactatccgtggggacaccagtgttgactacggtaacaatcaggcatcctagacactttccgaagttcatagccctagtcaaccttgggcatgatgctacaaaatcttgacgtcatgtcaatctgaagccttgtgtgccgatttgttccgcgcagttgcaattcgctgttgactactcccaccgcgtctcggttgcaaagtatcccacaccctttgctcttaggcctacaccgaataccccacggaaaagccattgaatgcctctttcgcaagaaaaacctaggcgttagaccctatgacccgtgtggttgcccccagggacttagtctgagagcagataccctttgttacaccaagccaacaatcattaatcaggcgacccttcatatgaaccgcaaacccccctatgcccaaggcgtacgcccttgaccaacccctgctatgcatgaagctaaccaccttcattcgccaggtggactttgccggcgggcccctttgcccaggcattgacttactttagacctaaagaaagagaatccttcctcctaggaaaccccccccacataattgttgaccccgacaccttttgtgcataccaaacgccttgactaaggccatagggcacaggctaactatgtggctagtgacgcctaatattacccgggtgcttgcacctaagaactttgccgcaaatgaacccccccttgcggcgccttctccagcttaggcctttcgatgttgcgcccaaattgcccctgtggaccttttccaaatgtggagggccttcactactagggtataacgcccaaacccaaaatcgaacccattccacacttggaccgtcgctcttgaagctggattccctgatagtatcgctctattcagccaagttgacccctggaaccgggaacttcccccctctgtttgcccttgcctttggaacagggctgtcttcacaggccttgtggacacaacgcttaggccgtctttgttggaccctttccactgacccaacctctgtccccgggcgactccctttgtgtgctcggccactttctttgggccctcctcagacgtggtcctccgtcttagcgtggacgccttggccccttgtgtggcatgccacacacaagtctgggtgcttcactctgttgcgcccttggccttggatcttgtcggccccagcgagcttggcttcacata

SEQ ID NO: 670085 - DNA, 708 bp, Homo sapiens
ctgctgctccgtggcccagagaccaggcctggccctcaattattataaggaggctggattatggagtgactgctctgcgcatctgcaaggactatgtgcccagccagctggaggctctgcaggaagaatatgagctgggaagctactaagaacgggggccatgggcgtgttggagggattcgtggacacaatgctcgcacactgcgcgagcacgtgctggatgatgtacatgcctgtgcctgtggacttgctacctcaaatgtgcgagactctgtgaaacagctggcctggcgtgagaatgtgcttggatgaaggcagctgaactctccatcaagtttctgcctccccaacgtaatatggaatgtcgttctggctgtaggaccccagctgatttggaatttggaaagcacatgtgcagctgcagagctctatctgaatctggaccttgtcaaggaatgcaatcgatgctttcatcgagggtgaggacgtggaacaaggcgaagctgtgtagctaaggagttagatcccaggtatgacgactatgtggaccaggcatcataaagagttcctcaagaatcagggcaacgtggactcgctggtgggtgtggctgttgatagctgcatgggacctgtatgtggagcagggccgtgggacatgtgcttggaacagctaacaagcagactaccagattctgcccagtatgtggc

SEQ ID NO: 670086 - DNA, 400 bp, Homo sapiens
cacccacatctggatctccccaggcaggatggtcagaaactgctccaacatgaggatctctaggatctgctccttggtgtgaactccggctgcagccattggaaacagagcttccgaagctgtctcagggtctcgtggggcccagacatcacctggtaacgaaactgcctgaagatctggcgtgcggcctcagggctggagagctcagcttcaggggcagcatctggtccagagaatggggagttctcagcctttgtcaaggatggaccagcccagggcctgccccaggtcaatgggcatcgtctggctttgcaggtcctttgaggtaaagagcttccaaggtggaattgtctctgtggagaaccaggtcttcacagggaagctcacgccgcggggccgg

SEQ ID NO: 670087 - DNA, 303 bp, Homo sapiens
tgacctcagggtcggcttaattattaggattttatgtttttaacaaaaacatttggctgggtgcagtggctcacacctgtaatcccagtactctgggaggccaaggcgggaggatcaattgaggccaggagtttgagaccagcctggccaacatggcaaaaccccatctctactaaaaatacaaaaacaggccgggcgcggtcgtcacgcctgtaaccccagcactgtgggaggccgaggcgggcggatcacaaggtcaggagatcgagaccatcctggctaacatggtgaaaccctgtctct

SEQ ID NO: 670088 - DNA, 811 bp, Homo sapiens
gcaagacttgtaaggagctctataattacaatatctgatatttttacagtctgatctttgacttctacatatagtggaaatctagccaatactaattggaggagatgggaactgtaaaagatcaagtatgctaatttataagcaaatagtaaaaactcataaaacagagtaaacagtaggggtagatatatcatttatgccataattcacataaagacgaatatataaatctaaaaagtcactttactatgctatagtattactagtaagtaggctataatatattatgttataattagagggccataatctacactactagtacactacaggcttggagtagcaggtaggtaataaatactacaaggctacactagcaatactactagcactaaccaggtatacaaagcagatatctacagtagacctacaagacctactacgaagtagctagggacatacacggcgtagagaccaagaaacgacccaagactaagataaaaggtcaataacaagacgtaagagaacaaacaagagactttaaccacagccctaatgagataccccagcaattaaaggagagagctagaagatagggaatgaacccaggcatagaagaccacaaggagaatattacaaggatccaagaacaggggggccaacaaataggatggaaaaccggtagatcatcaggaaaaaacaaaaaaaggctaggaaaggtaagcaccaagctaacccctagaaacgaaggcacacagccatagaaaggaagcaaaaaaaccacaggagagagaagcaaaatcaagaaggg

SEQ ID NO: 670089 - DNA, 372 bp, Homo sapiens
  misc_feature (141)..(142): n is a, c, g, or t
  misc_feature (147)..(148): n is a, c, g, or t
  misc_feature (151)..(151): n is a, c, g, or t
  misc_feature (154)..(154): n is a, c, g, or t
  misc_feature (160)..(160): n is a, c, g, or t
  misc_feature (172)..(172): n is a, c, g, or t
  misc_feature (176)..(176): n is a, c, g, or t
  misc_feature (179)..(179): n is a, c, g, or t
  misc_feature (186)..(186): n is a, c, g, or t
  misc_feature (188)..(188): n is a, c, g, or t
  misc_feature (191)..(191): n is a, c, g, or t
  misc_feature (193)..(193): n is a, c, g, or t
  misc_feature (195)..(195): n is a, c, g, or t
  misc_feature (201)..(201): n is a, c, g, or t
  misc_feature (203)..(203): n is a, c, g, or t
  misc_feature (208)..(208): n is a, c, g, or t
  misc_feature (213)..(214): n is a, c, g, or t
  misc_feature (221)..(222): n is a, c, g, or t
  misc_feature (225)..(225): n is a, c, g, or t
  misc_feature (238)..(238): n is a, c, g, or t
  misc_feature (241)..(241): n is a, c, g, or t
  misc_feature (248)..(248): n is a, c, g, or t
  misc_feature (255)..(255): n is a, c, g, or t
  misc_feature (257)..(257): n is a, c, g, or t
  misc_feature (260)..(260): n is a, c, g, or t
  misc_feature (262)..(262): n is a, c, g, or t
  misc_feature (265)..(265): n is a, c, g, or t
  misc_feature (273)..(273): n is a, c, g, or t
  misc_feature (276)..(276): n is a, c, g, or t
  misc_feature (281)..(281): n is a, c, g, or t
  misc_feature (303)..(303): n is a, c, g, or t
  misc_feature (307)..(307): n is a, c, g, or t
  misc_feature (317)..(317): n is a, c, g, or t
atttttaggtgggaaagatgatatgcagaatccactacaaggtgcaacagaaaatcgtattggaaaggacggtacatctggcgcagaccagcagtggcacgattccaaacaaatgtcagacgagagcgcttcatggggagnnactgnnaantanaatttnaagcttcatgangcanganatgttcnanttnanancactangnaatantaccnncgatgannaangaaatcaacctcnagntgtaccnaaagggncntangncanacgggganaantagcntttatggaggtacaaataggantctnctgtaagagnggggcagcaattacttaagacaaacctgcatatacatatcaacccgaatcaatgt

SEQ ID NO: 670090 - DNA, 112 bp, Homo sapiens
tattggacccgtttctgaccaaccactcaatcagtttcaatgatccagacctgtcagtcaccccactccagcctcacgcctcactcctcgtcatggcacccgtttctagacg

SEQ ID NO: 670091 - DNA, 526 bp, Homo sapiens
  misc_feature (336)..(336): n is a, c, g, or t
  misc_feature (353)..(353): n is a, c, g, or t
  misc_feature (355)..(356): n is a, c, g, or t
caaattagccaaatttgaccacttacctccctggacccagagattgggcttcttttgccgtttctcccagcccggcgccaagcctctttccttgaacagcccggcgggtggttggattcctgcctcaccttcatcaggggggtgtcaaggggggccccagactgtaattcctgttttctgcccgtgacccccccccgccccttatttcccttggcttagttttagagagaccactgtgacccctgccatcaatttgggggttgggaatttttggttaagccccccccccctttgttccccgggcccaacccttggggggaaaccgggggccccggngggggggcggtccccgnanngggggggatcttggggtggggagggaaggcccgcccttaaggttctttttatgcgctgctgtagataccgggatgaattttctgtacatgtttggttaattttttttgtacatgatttttgtatgtttccttttcaataaaatcagattggaacagtggaaaaaaaaaaa

SEQ ID NO: 670092 - DNA, 143 bp, Homo sapiens
ggggacaggcccaagatcctgatggacagtcccttgctcagggtccctttcctgcagtgaaacaccgactccttccgcagctccttggaaccggctcccggcccgagggcgatggtgtcctggtgctccaacggtgtttcgat

SEQ ID NO: 670093 - DNA, 459 bp, Homo sapiens
agacctggcggatagagccctgaggatctcccagcttgtgtgcgctgactctggcatcctacagacccggattatactcacactatgagagaggatggatcacagggtctaagggtggccattcagaggtagaagatggaggggcggcagattctggcagtggcagcagagggctcaatggacatggctagaggggtaaaaaattcaggacatcccccaggtgctgcctcagccagggctgcatgcggaagagattgatgtgaaagtctcgtggcggcgggaccttgctacgcaggggccctttagcgggagtttttgtcagcagagccaaagcaggggttgtaaagaccccagctcaccagacccacctgaaacaacctgaatctccgctcaaggaaaactgctcccccagatactcccttgcagggactctcatcctcctgggtcccactgcatagg

SEQ ID NO: 670094 - DNA, 137 bp, Homo sapiens
ggtagtgcaaggcctagccatggccattaagcaagatgaagcagttaatggctttctcatcataaagtaagaagtactgttgtgtctccacatgccatgaccgtatgtatagcaaaccatcctggctccacaaaaac

SEQ ID NO: 670095 - DNA, 257 bp, Homo sapiens
tatgttttttcccccccccccgggggggttggccccccccttggtgtgcgggggcccccccccttttttttccccccaaacccgggggggggggggccccccccgggggggggggggtttttttttgcgtttccatattttttgggggttcccccccccccccccgtggtggggtggggttttagagaccttttttttttcccctttgggggccccttttgggttttcccccttttaagcccccccttttttttgta

SEQ ID NO: 670096 - DNA, 150 bp, Homo sapiens
catttgttgagcggaccactcccctcacattccacaggcccatggactcactatctgtaacaaactcctaccaacacttaccaataaaaaaaaatgtgggtaaaaatttataataatattttttagaaaaaattttttttttttaattat

SEQ ID NO: 670097 - DNA, 707 bp, Homo sapiens
ccgggctgcaggaattggcacgagtttcttttcagctaatcctttcattatctcaccttgttaaagtgaaaatgtcattatagcttttttcaggtcagcgcccagatcctgctgctaaaacctcgtctaggtcctgatactttatgaatcagagacccatccgccaaagccatgttcaaagggcaggatcgagagtggcaagtatcactggtcacattcaagcgcctctttcagatgtgagtatcgctgtctataagcagaatatttgtccccgaaagatgtataagtaaatcatgtttaagagatcagtggccctattgtattgcataactatttcagagatgcctcgcgttttaatccacctgtaagatgtggtataggaggttaaccagtcgcccacgccccccagcacatatgggtggggggttctgcacgtttcactgtataattatttttataaacttaagggaaacttaaccaagaaaatgtgtgaaaggcgggctttgtgcccttggtttgcgtgggtctgtgaagtggattttcctagacggttggtttttggggaaaagagttaaggggcatggccattgaccaaggtgatggattaataccaggtgtgctttttcagagggaaatatttttggcatacccaaggggtaggggagaaagggttaaaaatatcctccatatcttggttattctttccg

SEQ ID NO: 670098 - DNA, 913 bp, Homo sapiens
gttttctattgcttaaactgaattaattttttttcatttatattttgctttaatatgacttgatttttttttctttctcgagtttataacatttaagtatttctggtggtttcagcataacctatacaggattagaaaaacagtggtctatcaaagtttttttttttttttgggttaaaagcttttcacttaaaggttaatatttttgccttatttagagaaaatcttgagaaaaaatacaaagagaaggtcttaaaaaagcagtattaacaaatttatttcccattcttaacttttatttatccctaattatgtggtggaatgggtctttccaggccaatggtgggctgggtccagagcccaacttcagggcggcaagtgggtttaccagggaatatctggggcctcaaattctatacggggtttccccccataagggcggtgacgccaggggacttttaatttaacccccgtgggattggctatacaactaaataatatctcctcggggtcagtcactgttacttctaaccctgttagtacgctgtatatggtacgccagaaacattttagaggtccgggtcgcgacgaggtgcttcacaactaatgcgtaatccccgaatctttacaatgtggggaaggctcaaccaattcctcttcctatcagggaaaggggacatggccagtgcgtttgggacctaagttcggggagaaggtccgccggccgttgtagtgtttctcccatgggaacgtaacagggatggtaggcatcatttggaaacctccggtggcccggaatgatacccaaagaagtgtctgggaaagcctcggccaagtacatgacccggagcgaaggaaagcaaggcacacgcgggatcaccggaacggttacgtaacaacgggtggaaactcc

SEQ ID NO: 670099 - DNA, 139 bp, Homo sapiens
cctgcctgtttgttgactcttagaggatcccccgctacaaggccccgcagaaaacgcctaactgtctgatgagagaccagtacatataaatgtaaaatgacatggatttaaatcaatatgtttaaaacaacacaaaatg

SEQ ID NO: 670100 - DNA, 215 bp, Homo sapiens
caagataaacacatacaaacacacacacacacacacaacacacacacacacacaggaacatcacagtcacattgctgaaactcaaagagagagagaaaatctaaactcataacagagttgcataacaggcaaacaatgacggacttcaaaagcagccacaataaagtactgacaaacatcaacaaataattgatggcaaggagcaaccacgggca

SEQ ID NO: 670101 - DNA, 141 bp, Homo sapiens
gagcatacactaggattcctgaagcagtttttcaaacaatcccattaggctagatgccaggcttctgcttcaggtggaaggaacctgtagatttttccacccttatagacgaagctcccttcagacacttggcatccagag

SEQ ID NO: 670102 - DNA, 150 bp, Homo sapiens
  misc_feature (12)..(12): n is a, c, g, or t
  misc_feature (106)..(106): n is a, c, g, or t
  misc_feature (111)..(111): n is a, c, g, or t
aaagattgctgnccaccgcacccagccgagttccctgctttcaatcgagatgaaggggacccagaatagcagaaatcaaggaactcggctgggtgcggtggctcangcctngtaatcccagcactttgggaggctgaggcgggcagatca

SEQ ID NO: 670103 - DNA, 126 bp, Homo sapiens
ttatgctgacaaggtaagcgattctcttgctcagcctcctgagtagctgggatacagggtggcagatgccggtaattttgtattgtagtggagacaggatttcaccatgttggtgcaggcatacct

SEQ ID NO: 670104 - DNA, 151 bp, Homo sapiens
agaaggagaaggagcggctggaggcggtttggagtgcgggtgtaacagcacacgagagcggctgctgtctgcgtcttgagggaccgttgagggttcctgtcatggggaatcgtatatgaaaaagttctggaaatatttaagaaatccaaaa

SEQ ID NO: 670105 - DNA, 484 bp, Homo sapiens
atcgctgtattagtcgggacgcaggcaggctttcttcctcctccgctgctcttcctgggcgtcccgcacagcaatccccaagagtaacagccctttgggagggggacatatcgtcttttatcgccaccttcccaaacagcagcagtggatcccagagtgggaggcccgttccccattctgggtgcttgagaagactgcattctcaggccctggtaggggagacttagcagcatggttggttgcctagtgtgggtccaccgaagctgatttgtgggatttgagagttggccaggttagccatttgagttctcatctccttgctcaggtggttgtgaagagctctctctctctctctcacacacacacacacacacacaggtacacacacacagacacactcacacactcaccctctctcaggagtagaactttgccaagatagcaaaggctaggtctgaagccctattctgcatatggctgggga

SEQ ID NO: 670106 - DNA, 118 bp, Homo sapiens
ccgtcaaaaatctctatgtgatgccagagagacctttcgtgaaatctctcctttttactgtgtttaaaaccccccagtgccacccatgaaatacgcaagctgcgtttcacgttcctga

SEQ ID NO: 670107 - DNA, 161 bp, Homo sapiens
gtaggaccactttggttttctttatttgcgtgtggcagttttaagttcattcagtttttaaaatcagtactttttcacatggcaaacaacttgcaccaacaaatttgtccacagcaattttgcagaccacattaacaaacagttacacatgcagcaacaac

SEQ ID NO: 670108 - DNA, 130 bp, Homo sapiens
agaaaaatgatgagcggtacctcatccctccttatgctcatccctccttccttggcctcccaaagtgctgggattacatggccttgcaaaaagttcttatctacagacacgtatagtgtaagcctcctct

SEQ ID NO: 670109 - DNA, 352 bp, Homo sapiens
ttcattcgccaatcttggtgaatgtttcactcttactgtaggatcttgtattatatctaacaattatgaagctacaaagtttttatgcagctgctttcattgtataactataattaacatttgtatttgaaagaaagctgggtcatacaaaaataggatagactcttaggagcccgcaatctgttgaggctcagtatatcttattcgctttgtagtctgctcgtcattcctttcaaagagcacactgcacataaggcatagtattcatctgtcttgttaacctctctaatttagaaatctgttgttcgtttcactggaccaattatcacatactatcatttgcctgattgaa

SEQ ID NO: 670110 - DNA, 171 bp, Homo sapiens
tatcgttaacatctgaaagggtcaggcagcatacttcagaaaaagcatcccgaggaggaagacgaatcgttaaacatacttaggtcagcttctagggtctcgcgaatctgtcttcttcagtggcaaccccgagaagactgatcagttgttcagttctaagacaatggccat

SEQ ID NO: 670111 - DNA, 106 bp, Homo sapiens
gtagcgcggacccagactacgccaaatcatttcactatcatattcatcggcgtaaatctaactttcttcccacaacactttctcggccagtccagaattgccccga

SEQ ID NO: 670112 - DNA, 689 bp, Homo sapiens
ggagactttttggctgcaagcgagccctgataagaaggcctacagttgctgggctctcagaagcctgtgcaggagggcaggcatctgtcagaacctccagtcatgtgctggcagtggtccggctgctgtaacagctggaagaggctgagggcatagaccctcagggtgccatggtcatctgtgagcagctaggggacctcttctccaaggcagggagactttcccatgggcagctgaggcttacctagaagcagctgctgttattgctgatctgcttgtgacagaccgtgtgctgagcgggccatcatccacgtgtccctggacagcacactgggagacatgaaggaccaccacatggggccgtgtcgccactattgaggaggaactgtaggctgcggcagctggcaactgtgctggatgaggccaagacctggctgaacttattgcactgtgcctgcgaggaggccggcgatgccttacgaggctgctggccccgtgcttccagaaagcgctcagctgtgcgtcagcaggcaccagggtcgccagcctgcagagagccaggtctttgggaagcatctaccatacctgtgcagctgaggctgcagccccagtgaatgcccctgtagacggaaactcagactgcgggagccttcagtgtagctgaagatgaagatgacggatggacgcag

SEQ ID NO: 670113 - DNA, 677 bp, Homo sapiens
  misc_feature (677)..(677): n is a, c, g, or t
tgcagttggtggggtctcaataaaagttattttccaccgcaaaaaaaaaaaaaaaaaaaaaaaaaaaaaatttttgggccccccggcccctcgaaaattctcttacacccaattccgttggggccccgcgggccccagagttggggtatagaggggcacagtgtgccaatcaccgtggctcccttaggaacacccgtgccaatgcacaactggcggggattccctaccccaaattaaaaacgcccgcggggaaaccagagcagttcttgtggaaaaaccccagaaagggaacgtgtgggaggcaactacagggggactcattacccacgcgcgacgtccagccgaacgcttccgaacactaaatatttatccccccccttctcgggtttataatgtatcatcaagtctctttcaatacaacattactaactacacatctcattccttcaatcatacttactgtactattcatacacaactaagtaaatcattacatatactcataaatctaatataaaaccatacaatacatattaacaactaatacaacaaacttatatacaactacatctaaaatatttatctctaaaccattaactcatactatataatcatacattatcatcactacatcattcataactatacatacacataatacacatatataacaaccn

SEQ ID NO: 670114 - DNA, 207 bp, Homo sapiens
gaggccttactgcttggtgtctgattgcccagctgagaatgccggtcagggcctctgcatcagcaggcggagccgtctgttaggagcgtccagagctgtatctggacactgccagccccgtggaagcacatgggcatcgagtcccacatgctcccaggcgccggttctctggttggcctggaattaaaggcttgatcgaagttgcca

SEQ ID NO: 670115 - DNA, 617 bp, Homo sapiens
  misc_feature (214)..(214): n is a, c, g, or t
  misc_feature (246)..(246): n is a, c, g, or t
  misc_feature (350)..(350): n is a, c, g, or t
  misc_feature (603)..(603): n is a, c, g, or t
  misc_feature (617)..(617): n is a, c, g, or t
cttatttttagcatctggtgttaatgtgacaatgaaagataacaaaataatgaacaatcaatatgccatataaaaggctgttaatataggccaatgtttatataaaatatcaagttataccagctatcccatgcatgatttctacagatgtcatacttgtaacaccacatatcgaaatgccatatgtgtgaactgcattaataagtgccatcanggacatgatgtagagtttattatacatgatangtttttctgagactgtggtgctagaacactgtctaatccttgtacattagctggtgagcctacacatgatacatatacactatataactctactccacctatanaatctaatacattacatcacaactgaattccttccctaaagaaaaagtcctgccattgtaacatcataacttaaaacactgttgtggaagaagattaaaatattttcccatgctacatgaagagactgtattaaaaatggatacacaaggtcaatttacacttataaactcaactaccaaaaagaaagtgcaatttattgactcaagatctcaaaactaggtgttttaacattacctgtataaatactttaanggacataattaaan

SEQ ID NO: 670116 - DNA, 183 bp, Homo sapiens
cacgaggccgacacaacccgcaagatttgttaaggaaatacagaaccaaacactgccggttgatttccttgcccacctggggtaagggttactgggtcccggcgattcagaatacacctacttttgcaaaggggggaacataattgataaacgacttcaagagcttggagcccggcatttcta

SEQ ID NO: 670117 - DNA, 412 bp, Homo sapiens
ctaatatgctcacattagccgtgagaagcttagcatctatagtagccaacctatcaatcgctaagacctccaactcgtacactaatgatgaaccatgcattggcggatgcaccgatattatcagtcagttccccacagcgattttcatgtgcctagaccaagatggcattatctactactggcactgagccacaacccttgccacccatatcatcgtaggctcctatgtagtctacttatgcgtagtactgatccctgtagcattgctcgatacacgggacatcatacaatgctcactgtgggctatatactgagacccataccttaataagggcctcagatatccactgatttgactgattaccatactaggctcacataccgcttacaatcgatttcctgcccttggccg

SEQ ID NO: 670118 - DNA, 204 bp, Homo sapiens
aatagaaagagcttctgaaaagggacacacatatataagagatggtgaaaggaatttgggatttagccatcccaggctacctttaggttgggtgaatatagccaggtttaggtagaggggtaactgtcacacaactcaccaaaagacctttttcacaaacctccacttgtaaaacgcaaaggcaccttcttagcacgctcgctc

SEQ ID NO: 670119 - DNA, 205 bp, Homo sapiens
aagggagataggagaaaaattaaaggaaaggacgaaaaggaagagggggggggaggtgaagaagaagaagaagatgaggagggtggagaagaagaaggaaggaaaggaatgaaccaaattgtcagagcttggttgaaaaaccctggtgttttgccccttgcttatcaggagtttttggtttgggaatggaacgtgggacatggac

SEQ ID NO: 670120 - DNA, 82 bp, Homo sapiens
atttccttactgcctcttgcttgggaacagcattgggcttttaaatgtctgcagaatctctgcgagtggaaggaaatttgcg

SEQ ID NO: 670121 - DNA, 848 bp, Homo sapiens
ctgaaagggggaccgtttcctagattgacttgtactcttgaaaccgcaattttatattgactgagggagtttgccacagtcttgataaggcaacccgcagcggaactatgtgttggcctagcaggttttaaacacaaggcacttgaaggagtttatttaaagagagcccataaatgagttgttactccttccgtatctgagtactggagagtgaacacctgaggaatgctttagtgtaaagtgggaagaacttttttgtaaatttgaagaacccacttggaaaagttttccaaagatccaaagttcagataaactaggaattggattattggtggttaaaatataacaaaaaaatttgattcaaccataaagtgttccaagactgctctgtcccctccacccatagtgaccaccataaccatgccttgagcaccagattaatagtggttccagtatattatcctttcaccacgttttacacgccaaatataatgcacgggtggatggagaccgggtaggtctgcaagcactcataatgctatttcataaactgggtgtgagctgggtgctggcttctcacgaggataaacaccttttgggagtgtcacatttttaacttaaatgttggatggacacccctttccaaccacaaaactaccactggagtctaattacccgcagtagatttgcaccaatgtttaagattaaacgtgagatcttcagaggaatatctgtttatggcagactgtttctggaccctagaatcacttggtttaccaattccctattttttcataagggatcattttccaaatcttttacccataaatggtgattgaaaggaccca

SEQ ID NO: 670122 - DNA, 448 bp, Homo sapiens
ctgggttatgcgtgagagctacgtacaacgaggcagaggaaggtcatgcaaagaactcatgaatagatggcactatgtgacttctagtaaaaatgatcccccacacagagagtgaggtagacaatgatataagatggtactagtggcatcaccctgaagtagatacctagtcccatttcagaaagatctactctgtattctaagagcaattggaaaccattcctgtgtttcaagtaggaatagtatacatgatcacattgacaatttgaaacatgtacactcaaactctaatgagagggctcagaatggatttaggcaatcctataaaaaatgaaattcagtcccatcaagcatatcctaaaggcaatcactgagactaagcagaagcatatatcttcaagggctccttccaagagagacactgagggcttcatgagcactaggccag

SEQ ID NO: 670123 - DNA, 381 bp, Homo sapiens
ctaggatcagtcgtaaaatgagtcgactggtgcagaacctgtaagcgtatatacataggagaggaaatatattaagccatgatcagctggtactagctttatatcaataattttatcagaaaagcaacctaaaagctaaggcagaggttgcccaaccccattcagggagctctgagtcttagcaaatatttcacgacacccccaggccaaaagaaataggtatgaacaactaacttagtagttatgtccttacaacttagtgtagagcactgtagaactcatcacaccttagaatcaaattggacaataccacactgtcatttcctgtactacatacattttcatgtagtagttgcttcatatcggagcaacctctgaaaa

SEQ ID NO: 670124 - DNA, 411 bp, Homo sapiens
ctgtcgaccaggtatggagtacagtggcgcgatctctgttcactgcaacttccccctccaggcttcaggcaactctgtctcagacctcccgaatagctggactgcaggtgcgagccaccacgcctttttgtatttttagtagagatggggttcaccattttggccaggctggtctcaaactcctgaattcaactgatctgcctggctcagcctcccaaagtgctgggattgcaggcataagccactgtgcccagcctaaaaaattctttataattttttattttacaagagacgggttacactgtgttgtccaggttggagtgcagtgcctttttacaggtgcaatcccactactagatcagcataggacagatgtatcatctgctctatatcgaaacctggtcgacagtc

SEQ ID NO: 670125 - DNA, 243 bp, Homo sapiens
agctccccctgtggttcttctgcggttcgtgtgtgctgtgtcgcgtgtgtgtgctgtgtgtgcctgtgtgtgctgtgtctttgtgtgtgtgctgtgtgctcgtgtgtgtgctgtgtgtgcatgtgtgtgcgtgtgctgtgcgtttgtgtgctgtgtgctcgtgtgtgctgtgtgtgcgtgtgtgctgtcgacaccctcatacacgacacccacggggtacccgcgctcgaacttcgtaactca

SEQ ID NO: 670126 - DNA, 122 bp, Homo sapiens
acggtcagctacttgggaggctgagtcaggaggattgcttgtggccatgatttgagtatagtgcattataattgtgcctgtaagtgatcactgcattctagcctcggcaacatagtgcggtc

SEQ ID NO: 670127 - DNA, 198 bp, Homo sapiens
ctagaggatcggcttatatgctgtctcatgtgtattaggcaaacaatttcagaaaaaaaatgagtcttgggatatgaatctctttttgatttaggatttgtagaaaattgacgaaagagaaaaatttgaaagacggtaactgtgaatctggatagtcataatttttccttatatccaagtacattcaatgaaggatgt

SEQ ID NO: 670128 - DNA, 308 bp, Homo sapiens
  misc_feature (6)..(6): n is a, c, g, or t
  misc_feature (32)..(33): n is a, c, g, or t
  misc_feature (45)..(45): n is a, c, g, or t
  misc_feature (136)..(136): n is a, c, g, or t
  misc_feature (176)..(176): n is a, c, g, or t
  misc_feature (255)..(255): n is a, c, g, or t
  misc_feature (260)..(260): n is a, c, g, or t
ccaggnagaagccagtggcagggacagagccnncagggagaaccntaacaagggtagtgtggaggggaaatttggggttggagttcccacacagcttcccctctggtgtactgcctagtggagtgtgagaagaaanccactgtcctccagattccaggatgatagatctgccaatnacagcttgcactgtacaactggaaaagccacaggcagtcaatgccagcccgtgaaagcagtgacagtggcttaccctgnaaagncccaggggctgagctgcccaaggccttggagcccaccccttcaccagt

SEQ ID NO: 670129 - DNA, 1004 bp, Homo sapiens
agacttcccagaccccggaggcgtggaggagaggagactgtttgatgtggtacaggggcagtcagtggagggcgagtggtttcggaaaaaaaaaaagaaaaaaagaaaaaaaaagaaaaaaaaaagatttttttctttctctttaatcgggaatcgtgatggtgtgggattatttcaatgggtgggggttaatatagcatgttatccgtggtcatatcttttaaagaatttcgggtataagaactgtttgagccgagttttataaaattaggtgtaggataactattaacaaagcgagatagagtggcgctagtgttggattcctacaagcgaaatttattcaccagctttttttccattcttaactcttttaagggattcaaacgcaactcaaattctggtgctggactttaaaaaaacaattcaggaccaaattttttcctcagggtgtgtgtttattcctttataggtgtaattgagaagacgtgtttttttccttcaccgatgctccatcctcgtatttcttttccctggtaaatgtaatcagatgccatttcatttgtggacgtatttatagtgggcaaacatattttcctttggtcccttttttctttccttcttttaacttcctttattccttattccttccttttccttttttcttttaaaacatataaatgggggaagtggtggtgtacccagccaatttaagggtcccctacagggaggggcgaagttcaaccttaacttgcactattaaaggtgaactgggaacctttaaaacacacaggacgcggagtcaacgctgggaaaatacccacagtcttgtgtacaccattcacaggcgggggataacgttaaaacagcgagtgataccataatacacggcggggacatacaccgcgagaaaaaccccatactcatactacacatggataatggaaagtatcacgagctacgcccgccatctaacagatgacacactctacaacatctatactcac

SEQ ID NO: 670130 - DNA, 305 bp, Homo sapiens
acaccggacatatctattacactagagcgtatagtgtaccacgcagtactatattctgaagtagagatacgcttttcccgatcagtcaaatgttacctctctcctactcctctgatataacagtattgaatgaatgttcggctacaaaatcaatacttggttgttagatatgaatctcaatatcacaccttatggaaaggttctgctagaaaagccaatactaccagagcttgaaatatggattcaaaaatgtctcttgtctctctggatttctcactcagagctcatagttagcgcgtgcatgt

SEQ ID NO: 670131 - DNA, 449 bp, Homo sapiens
tgcacgatatggtagtgctataggagctagaagtgtatctgggagcaagtagagtagtttgagaggaataggcatcgaataacgagaagactctgtgaaattatatattctgcagtgggataattatgttacctaaccagaatagtaatgacacatgcatttaaagctgataaaaatgacagtcgtgtcaaaaggaaatgacagcccaacttgtcatttccaaatgtttgtctatgccaaacgtgcttaggcatagaactttatatgctctttacaatgactttaataaaaataatacgctaatcaatgcaatcaaactttgaaggtaataacaatatcaattatctatttcgtcccctcgatactccttggctagttttgcatttctgctaacatcattggtcctggatgattctgaaacttcagcctacaataccataaagtcttta

SEQ ID NO: 670132 - DNA, 807 bp, Homo sapiens
cattccttaagtcctaattgggaaaaaaaaaaaaaaaaattgaattatttgaaaacctctggggtgtaaccaattgattgtaccccctaaacattattcaattaagcgtagtaaaagggacgctttcacacagattttcaggtctaattctggccctttctgggggcgccataattataaacattaattgtgtgtcccttggataaaaaaggtcattttccttcaaaagagactacagcgctagctgccctttggtgtaagacgcacgtttctaaattggtaggacttggtgtgcgaacttgtaatatcctatttattggaaaacgtgttttcacaattattaatttctaaatccatacgaacatccagggttgggagctggtatggatattggtccgatccatgaattggtcccacctcttattctaagtgggccaattatttggggaattaaagaggggaaataaagatggcggttcccttgggaattttaagtccttccagcgctgggagattttactgggttcatacaccctttggcctgaattaaaggttttccatggtaggagggactttatatccctttctggattacgaccacgttccatattatcttgaacctcaatatctcagaatctcttctacggtgatactgaatagacatacttacttagacaatgttccgccattcactaaaatatttgtcctattatcttacctttattcaagcttgcctggataacggagagggcgtccgatgctgaatttattcctgaccattgaacaccgttgactccggggagtcca

SEQ ID NO: 670133 - DNA, 662 bp, Homo sapiens
  misc_feature (650)..(650): n is a, c, g, or t
gggttgctgtaagcgattctaggatattgagagatgtgtaacatgtcctggatacgcatgaaacactctggatgcttgcatgatgtgactcgaggtccagatgtgctactaaggcagttcctgcgctatgtacggcccaaatcggtcctgtcaagatgctgtgcaggcatcaaggaaaagccagggacaatatagaagataaagtgatcgtgtcgctggcagtatacctggactctcctgagatcatgcattgtacacctagttaggcgaagaggactggagcagtacacatgcgacatggatatgactgagtagggagggtggtgtactcagattactgcttggatcagaatcctattatagatgtttactaccggagagagaatgtatttgctgacaaccattaaagtcagaagttttacgtccaggattatagcaataaagtataatgttttattaaactgcttcatctgtatgtcaaagcttggactctataagcaaatgcattgtttccgaaaacaaaaagatgtctcaggtctgtaagtgaatggctagggagctttcagtgtcccagaacttagcctttaccgtgtgaagtgtggctacaggcttaatatttccgtagtagatctatatcagatcacatagtngcataccgggat

SEQ ID NO: 670134 - DNA, 163 bp, Homo sapiens
  misc_feature (48)..(48): n is a, c, g, or t
  misc_feature (73)..(73): n is a, c, g, or t
  misc_feature (79)..(79): n is a, c, g, or t
  misc_feature (143)..(143): n is a, c, g, or t
cacatgcccgtgtgtgccgcgtcagtcatgccgaagcacgagttctcngtggacatgacctgtgagggctgtnctgaancgtctccagagtcctcaacaagctgggaggagtggagttcaacattgacctgcccaacaagaangtctgcatcgactctgagca

SEQ ID NO: 670135 - DNA, 94 bp, Homo sapiens
gagagagagagaacatgagttctgccggctctggtctgccattcgccagtgcagggatctggcacggaccagatgtggcgaatggcagcacagc

SEQ ID NO: 670136 - DNA, 382 bp, Homo sapiens
  misc_feature (4)..(4): n is a, c, g, or t
  misc_feature (27)..(27): n is a, c, g, or t
  misc_feature (31)..(31): n is a, c, g, or t
ggtnaattgaataattttctgaatttntatnaattatttattatcatactcatacttgtcaggcctttgggcccaagcttgcatgtatacatcaagatggcctgaaataactgaagaatcacaaaagaagtgaaaatggccagttcctgccttaactggtgacattaccttgtgaaattccttctcctggctcagaagctcccccgctgagcaccttgtgacccccgtccctgcccaccagagaacaaccccctttgactgtaattgtccactacccacccaaatcctataaaacagccccacccctgtctcccttcactgactcctttttcagactcagcctgcctgcacccaggtgaaataaacagccttgttgctcaaa

SEQ ID NO: 670137 - DNA, 236 bp, Homo sapiens
ggtggcatcggtgattcaaggctgttttttccacctttttcagtgcctcatactgtgatacaaaccaaaaccagattcaggaggtacatgtgcaggtatgatgactgggtatactccatgatgctgaggtttgcagtaccaatgatcctgtcacctacgtactgattatagtccccagtagtttttcaacacttgctctcctctctccctcccccaccagtagtccccagtttata

SEQ ID NO: 670138 - DNA, 942 bp, Homo sapiens
agcgggggggggcggaaacccaggtggtcgggacaggctgttgcaggagcgcgcgctcagcgaatcgagtgaggcatctcacatggcgcaaaagtccgaatgctgtagtgagcggacggcgcgcgaggcggcgagttccgaagagacgctcacgcgagggcgaggccgagggctcgtacggctgaagggcctcgagccttgaatgatgctgcgggggacagtggaactggagcgattccgtcccagaccccgatgtcgtcggagtccaatgtgtccctcggtccaaggcagattgaggcgcacgcggcgggcgcccagctcgggcgccgcacggcggtgcggttactcggacagtgagtgctccagactcccaggacgctgggaaacgttcgcagcgccagggcagggatggctgggaagaacctgtgggccccgaaaggcgggaatcagcggaggagcctcggggccatagacgaggagaccttcacggcgacttgtccgatgggcagccttagaggtcccggcgagaagtgcccggagggaaagacttggcggcgagctgcgcagcgccaggagaccggctgacccgccgcggtgcgcgcgactggaaaggcggctacacagtcatgcgcacgtacacgtgccagggggcgcggggcgaccggtgcctggggccggctgtgtactcgcgctgtgggaaagcccctcccgggaagagacacaaaggcctctcggataccggctcggccatgcgcaacgcgtgtccaacgtggcgaacgccccggggggcgccaagtccgggatgcatggttagtcggtaggtaggacccgtgacagaggttaacgacggggaaagggtcgtggtccggcacctgcggttacggggcccgaaggcgaaagtctgtatggaaggtgcacaccacggtgtcgagtggaagggga

SEQ ID NO: 670139 - DNA, 241 bp, Homo sapiens
  misc_feature (15)..(15): n is a, c, g, or t
  misc_feature (22)..(24): n is a, c, g, or t
  misc_feature (154)..(154): n is a, c, g, or t
  misc_feature (209)..(209): n is a, c, g, or t
  misc_feature (220)..(220): n is a, c, g, or t
tgtgactatcaaccnccgacgnnngcaggtgacccaggcgaagctcaagttcaggccgaagtcggacctaactaaaaaggcgattcgagagacaacgactcaaattccccaactggtgattccccgactttcgacgacaacccggctcgtactncagaaaacgcggcaccaaatatccccgaaaacccttcacagcgaccagcacccgngacagcacctnccctaccggatcgcgcaccag

SEQ ID NO: 670140 - DNA, 655 bp, Homo sapiens
ctcgagcttttctctcttccccctttatattcacgctgctgggcaatcacttcttctcctttgacatggccttgttgccactgtcctcctttgccttccttccttcttctacaggcttgaggttcaacagtggagtcacttcagccttgccataaccagcaaaggtgattgcagcggtgccaccttcttcatctatctcctcaatctccgcttcataacactgtccatcttcactccagactgccatacacttgtctcctactttccatgaatgagtagcttgagtagaagctgcgttagttctataacttctctgaaatccttcttcaattttagcaaatcttcactttctccatttccagataatgcagcttcaacttgctggagctgagctttgtagcttggcagctgccttgctaaatcctttgacaccttgtgtggcgctgctgtccgcccggcgctaaggcgccgcgcccaactgacccagcgcatcggtgtccccactacctctctacgcagagcgtgaaactacccggtcatcaggaacgccaccctcgcctgaaaggtatcacctcctcccctgctcatcggcacccgttcctctcttcacatctcccacctatctcgctttcacctgtccatctccctcctcccg

SEQ ID NO: 670141 - DNA, 573 bp, Homo sapiens
tgcggtggctcatgcctgtaatcccagcactctgggaggccgaggtgggcagatcacctgaggtcaggagttcaagaccaccctgggcaacatggcaagaactccgtctccatcaagaaaatacaaaacttagtccgcgtgtggtggcaggcacctgtaatcccagctactcgggaggctgcggcaggagaatcgcttgaacctgggaggcagaggttgcatgtgagccaagatcgcaccactgcactccagcctggcgtgacgaagcaagactccaatctcacaataggaaacatacacaatgttcttgaaccagttggggatagactatgaattttagaaaattggtttaaaggatacattcctaagggaattatagcagttacattctaaatggggaggctatggatgctttgatttcttccggactataattttctacatggttctaaggataaaccggtatggtgtgttaaactttaccaaatttattttttaagaaatgttttttacaacctagaaaacagataaaaaggtaatatattcttaaaagattttctagaaagtggtaat

SEQ ID NO: 670142 - DNA, 720 bp, Homo sapiens
agcggattgtcctgtggcagcaaccgggttgagaggagcgtggtgtctcctctctccgccatggcgtgtgctcgccaactgatatcggatgtactccgcaaaagggggagtcatctggcagaaatgtcacttttgcctgcatgtagtcacaggctcctattcgaccagatattgtgaagcttgtcaacgcgcaattgcgcaaaaatgatcaaacagcccgtatgctgatcagctggaattaccaggatcagtcaccactagtgacctgagtcttggtgagtactggcagatgcgtgtggagctccaattcccagagttcgagggtggtgggactcacctgcatctgcgccagggtgctcttctggaaacatgtgtctctggaagcccgaaatgttggcaaccaagccaataagctggcagccgattgtcacttcgaaagaggtgaaaccagcagactccaaataatacacgataacgaccctttcttgttttcctagctcgcttggggcacggtcattcaagttgcgcgtatcacatcccaggtggggtcgaatagtcctaaaatgcgctcactcggcaagtttgaagaagaaaggttatcccttggagaaagtttccctctttgggaataatggaagaaaggacttcacacctatgacaagaccgttacaatgaagagatccaagtggacagcagcttgtgaggctaccgtaaagtaaa

SEQ ID NO: 670143 - DNA, 1299 bp, Homo sapiens
  misc_feature (382)..(382): n is a, c, g, or t
cctggagtccactgcggatttgtcgaagctggtgcgctggtaagaggcctgctgcgacaccactgctccagtccgatcagtccacttctcgtagtctgaatgagctgctgagtgcggcaggtgagctgagccagggtcccagccatggccgcgagagttattcgcaggatactcagttacccaggtaggagaatcactgttcaaacgtttaaagagccaggcgtcgccatgtgccagggcttacctggaatcggacgtgagtcgatgacctcgtggttgggagtggttagtggtggctctatgtgccttcgctggctctccgttctaccctcaatttttctagcaaattggaggtgcctgggcaattcgcaatggactggcnatagcttccatatggcgtagaagagtggcatcgtccgcgtatgtcggtgtcatccgcgaacgagcaatgccaaccagttgtaggacttaccaggggagcagatcgcatacgcgcatagcgcgtggtagcaacaattccattggagacgccctttaacgcggactattcccaaacgcctatttcgttctgggatcccatatactaaagggcgagatctcgatctttaccgggacttgctagaaaacccttgccgagtagggcaatcagatgagacgtatttgtgacccaaaatggaggtgttacgacatacttagacgtgaagtttccccaggtggatgtaacgagctggaaggggaatgggtggccacgtggttggaaacggaaaggggacgaacttgagggggtactttgcacgttaaacaaagtatcttggagaagttgggaagcggttcactggaaaaattccattttcaaatcgaagggttacatagaaatcttattcggaactccggacagaacgcaactgttgggggcgctcaacgcaaatcatgtgacgctcccaaatgcgttggcccccaaattgtcgcccgaagtctcggagcaatgggtttcgcaattttcccaattgtgggggcggataaagcgataaaggttacaccacgcacccaattttttgggtatgtcccccaaaacaaacaagtgctgcgggggcacagggagggttaatttattcaataccaccgagtcacattaatggacgaatcaacaaaggagcgcccttactaaactatcgcggcatacaacaaaacaagtgtgtgcaccgcagaatcgacgacagatgctcttggtctcatacagagtgatattggcccccatcgtgtaagtagtagacgccacgtcactataaatatatcaca

SEQ ID NO: 670144 - DNA, 928 bp, Homo sapiens
ggccaggttatgctcgcaggagtggagaagcggaggcgcgaggaggagggggaatatagacgagaggtggaggatcctggctaccactctgaatccgataccgctgtcttcttcagacacctcagcggacagaaaaaggggaacggtgtgtctcaatccccctttccatcctctccatccactgtacctagagccattcagcaccattggtcgcagtgccagggcgcgtgggcctgagcaggagaaccgacaactcggagacgaagctgtgttacccgttcggaggagaccaggagccctcggaaggcaacctgtgcagcacatatataccaatcaacatcgcattgctgtgcaacacacaggcatacgcccgagcacgaaacaaacaaggtcacgtaattggggacgcaaagtagaactaagcttgatgagcacctacattgcaaccacaaatggggagcacgggcacagacatcatatctcgcaacattgcctagcttagttaatttatcagttgaaggcacagacacatctgggagacccattttgggctgccagcaggcatccacacagtgcacaagatcgcatcggcaagcgccagtgcacaggcacaggcgagagtgctgggagtagagaagacaacatcagcagcgaaagcagatggatgaggtgcagcatggggagccgacaccgcggcaacacgacgggcaacgcgcggcgcgagttcagataggccaaatgcaccgggttaaggaggaacactccggaaaggaggcaacacatatgacaagtgagcagcagaggcagcaagatcaccgccacacaacactgtagaggcgatgagggcagcacacatgccagccacgcggacatccacggaaagagagagacacgcaacacatggcgcacgcgagccacacacctgcac

SEQ ID NO: 670145 - DNA, 431 bp, Homo sapiens
tgaaaaaaaaaaaaaaaaaaaataataaaaaaaaaaaaaatttaaaaaaaaaaaaaaaaaaaaaaaaaaaaaaaaaaaaaaaaaaaaaaaaaatttaaaaaaaaaaaaaaaaaaaaaaaaaaaaaccttgtggcccccttggccccatccgcttttggcttgggccaggtttttcctgggggcccaatttggggttccttgggccatttccccttttggggggccgtttcccattacatggcccggggtttaccaccttgggactgggaaaaccctggggttccccaatttaaatcccttggaagaaaatccccttttccccggtgggggtaattccaaagggccccgacccgttggcctttccaaaaattggcccacccggatgggcaatgggaatttggaggcttaatttttggtttcgggtttttggt

SEQ ID NO: 670146 - DNA, 261 bp, Homo sapiens
  misc_feature (66)..(66): n is a, c, g, or t
  misc_feature (74)..(74): n is a, c, g, or t
  misc_feature (85)..(85): n is a, c, g, or t
aaagaagagggaactcagaggaccagactgcgccctcctccttgggctgtcctgtccgtatacctngtcaccangctggggaacntgctcatcatcctggctgtcacctctgactcccacctccacacccccatgtacttcttcctctccatcctgtccttggctgacatgggcttcacctccaccactgtccccaggatgattgtgaacatccagactcacagcagaatcatctcctatgctggctgcctgacacagatg

SEQ ID NO: 670147 - DNA, 843 bp, Homo sapiens
agcgtctggtccgcgcagtcagggcatcctccgcatcctccacatccttccatggctctgaagaataaattcagttgtttatggatcttgggtctgtgtttggtagccactacatcttccaaaatcccatccatcactgacccacactttatagacaactgcatagaagcccacaacgaatggcgtggcaaagtcaaccctcccgcggccgacatgaaatacatgatttgggataaaggtttagcaaagatggctaaagcatgggcaaaccagtgcaaatttgaacataatgactgtttggataaatcatataaatgctatgcagcttttgaatatgttggagaaaatatctggttaggtggaataaagtcattcacaccaagacatgccattacggcttggtataatgaaacccaattttatgattttgatagtctatcatgctccagagtctgtggccattatacacagttagtttgggccaattcattttatgtcggttgtgcagttgcaatgtgtcctaaccttgggggagcttcaactgcaatatttgtatgcaactacggacctgcaggaaattttgcaaatatgcctccttacgtaagaggagaatcttgctctctctgctcaaaagaagagaaatgtgtaaagaacctctgcaggactccacaacttattatacctaaccaaaatccatttctgaagccaacggggagagcacctcagcagacagcctttaatccattcagcttaggttttcttcttctgagaatcttttaatgtcatttatatacaaaagaaattctcaaatgttaaaataaaggaatagtttattgcttaata

SEQ ID NO: 670148 - DNA, 964 bp, Homo sapiens
agcgtctggtccgcgcagtcagggcatcctccgcatcctccacatccttccatggctctgaagaataaattcagttgtttatggatcttgggtctgtgtttggtagccactacatcttccaaaatcccatccatcactgacccacactttatagacaactgcatagaagcccacaacgaatggcgtggcaaagtcaaccctcccgcggccgacatgaaatacatgatttgggataaaggtttagcaaagatggctaaagcatgggcaaaccagtgcaaatttgaacataatgactgtttggataaatcatataaatgctatgcagcttttgaatatgttggagaaaatatctggttaggtggaataaagtcattcacaccaagacatgccattacggcttggtataatgaaacccaattttatgattttgatagtctatcatgctccagagtctgtggccattatacacagttagtttgggccaattcattttatgtcggttgtgcagttgcaatgtgtcctaaccttgggggagcttcaactgcaatatttgtatgcaactacggacctgcaggaaattttgcaaatatgcctccttacgtaagaggagaatcttgctctctctgctcaaaagaagagaaatgtgtaaagaacctctgcaaaaatccatttctgaagccaacggggagagcacctcagcagacagcctttaatccattcagcttaggttttcttcttctgagaatcttttaatgtcatttatatacaaaagaaattctcaaatgttaaaataaaggaatagtttattgcttaatataaattatcatcactttgcttctttactgaatcttctacactcttgcctgatacctaaatttaatgtttgtttttaactcaaaaaatgtactgtagtatggaaaatggatagcagtagaataaagtcttaagattattttttaattac

SEQ ID NO: 670149 - DNA, 484 bp, Homo sapiens
cagctctatatgcatttcttgaatgagtcttttaaaactaattttgttgagggttccctgtagggccactgcatgtcaaaaggggttaaccacccagacattcccactcagtccccagtcacccaaggggcagcttgcagcttgcagtaacaaaatgtcctttctcttcagagctgaggagaaaatccatttctgaagccaacggggagagcacctcagcagacagcctttaatccattcagcttaggttttcttcttctgagaatcttttaatgtcatttatatacaaaagaaattctcaaatgttaaaataaaggaatagtttattgcttaatataaattatcatcactttgcttctttactgaatcttctacactcttgcctgatacctaaatttaatgtttgtttttaactcaaaaaatgtactgtagtatggaaaatggatagcagtagaataaagtcttaagattattttttaattac

SEQ ID NO: 670150 - DNA, 829 bp, Homo sapiens
  misc_feature (656)..(656): n is a, c, g, or t
tgaaaacaaagtctttgctctatcacccaaacgggaccacaggggcttacttcagggctcattgcagcctcaacctcccaggctcaagcaatcctcccacctcagcctccctagttggcgtggctaattttggatattttttggtagagacggggttttcctccatgtgttgcccaggctggctcttgaacctcctgtgggcctcaagtgattctgcccacctcggcctcacaaagtgtgggagagttacagggggtgacgccaccagtgttcagccttaaactctgtgtgggtttttttattttttttttgtatttatttttgagagggagccacgctcccactctctgttgtgcccccccccggtgtgtgtgagagcgcctccggcggtggccaccaccattgtgtgtggcccccacacgtgggcacacaccctctggtgcgctccccccaggggtctacaagaagggtagacctcctccggcgcctcgcaacgcgccccccaatgtgtatacgctcgtggcgacaaacagacgggtgccgctgtgttccacacaacccaacccccccgagataaataaatcttggtggattgtcttaagacataaagaaaagaggggcgtgattagtcgcgccctattgtgtgtagacacccnggggggtggtagtactcctatagctagtgtgttatcaaaacactctctccactatttgttgtacacaacctgtgtgttccaataaactgcgcggttgttttataaacacacatgtgtaacaacacaaacacatagcaaggaaaaaacgccaaccaaaaaagaaacgccgcgaa

SEQ ID NO: 670151 - DNA, 991 bp, Homo sapiens
agcgtctggtccgcgcagtcagggcatcctccgcatcctccacatccttccatggctctgaagaataaattcagttgtttatggatcttgggtctgtgtttggtagccactacatcttccaaaatcccatccatcactgacccacactttatagacaactgcatagaagcccacaacgaatggcgtggcaaagtcaaccctcccgcggccgacatgaaatacatgatttgggataaaggtttagcaaagatggctaaagcatgggcaaaccagtgcaaatttgaacataatgactgtttggataaatcatataaatgctatgcagcttttgaatatgttggagaaaatatctggttaggtggaataaagtcattcacaccaagacatgccattacggcttggtataatgaaacccaattttatgattttgatagtctatcatgctccagagtctgtggccattatacacagttagtttgggccaattcattttatgtcggttgtgcagttgcaatgtgtcctaaccttgggggagcttcaactgcaatatttgtatgcaactacggacctgcaggaaattttgcaaatatgcctccttacgtaagaggagaatcttgctctctctgctcaaaagaagagaaatgtgtaaagaacctctgcaggactccacaacttattatacctaaccaaaatccatttctgaagccaacggggagagcacctcagcagacagcctttaatccattcagcttaggttttcttcttctgagaatcttttaatgtcatttatatacaaaagaaattctcaaatgttaaaataaaggaatagtttattgcttaatataaattatcatcactttgcttctttactgaatcttctacactcttgcctgatacctaaatttaatgtttgtttttaactcaaaaaatgtactgtagtatggaaaatggatagcagtagaataaagtcttaagattattttttaattac

SEQ ID NO: 670152 - DNA, 206 bp, Homo sapiens
ttccctcccccccccggcccccttttttgggaagggttttaggggggttgttagggggaccccccccaaccttttgggttaaaaaggaccccccttttttgggggttttttggggcccattgggaaaaaaaaaaaccaaaagggcccctgtttttatattgaaaatttccaagggttttttttaaaaaaagaacccgtccccccca

SEQ ID NO: 670153 - DNA, 905 bp, Homo sapiens
cgaaaagctgcagagaggattcggcccaaactcagacactggttcccctgagtgagaagcggtggcctctttgcagatcaaccaacttaatctggttgaacgtgctgttcctaatctggcgactcagacccctctgggaaacatcttttaattagcatctcagaaatgcatgggataaggtaaagtgcgatagattcaagtggaaagcaagagaatgaccagtgaccttgcttccattcccccattgagcttctatcatccgcccttccccatgtgcatccacttttcatctcctcatctccttttctagcctgttctttacatggggctcccttcttgattagaacaatagcgtgcgagaatcaggagctcaccttagcaggaccagcatctttggagccatcgggataaacactgacagtgagagttgaacaagtgaacaagccctagaaacttgaaataggtgcctgttcttgtcacggacgaatatgagaaatcgcatttggatccaggacccatgtgggcaccatcagcacgtcttgctatccatgcacctcagtaagaaagtggcatctgccttgggaccctgctccaagtgaggaagcatcgtcgttgccagattcatgctatctgcaactgagttcagatgcgggaagcaatagagagtccgcattcccgtttgactgctcatgagctggcacgggaaacgagaggcgtcacgtgcacacaaaccacgcacagaccaatgagccaaaaccgaggtcaaagacgcctgaagaacggcaaagaccggaggccgaggtgcgaagagaaccaaggtcggccgtgagcggcgagccaggaggagacccggcgagacacgagccaagccatacgcggaagagcgccggggtgggcagccccac

SEQ ID NO: 670154 - DNA, 196 bp, Homo sapiens
tttttttttctcacgtctctctgattatctaaatcaaacttattcgtgccgcatcggtatttattgtttatatatgctcttaatacttcttaatttttgatattcggaaagtgacagagtttggggcacatccgtcaaggcattgattctgagaacatctggattttttgaggtagtcctgtggattcctagcacg

SEQ ID NO: 670155 - DNA, 357 bp, Homo sapiens
  misc_feature (266)..(266): n is a, c, g, or t
ctctgagtttccccgcgcggcgcgcacgggaaaccaatgacaggttcctctggttgcgactggtgttgtgggctgagcgcgacaccccctaccccatgagtacgccgcgttataaaggaacttggtaaggttgactaaggtcttcccacactgaccttaatgctgaggattcggggtgtgggctcgccggtgggccaggacgagggcctctgtgcccgaaggctcaggccacagtctacacacaggatgtgtgactcgctgctatngtctccaaggtgctgttccagactggaagggcttgggcatacacgactgcaccgggtgcacttaaagacgccctcccttgccgcaccgccc

SEQ ID NO: 670156 - DNA, 747 bp, Homo sapiens
  misc_feature (20)..(20): n is a, c, g, or t
  misc_feature (95)..(95): n is a, c, g, or t
  misc_feature (113)..(113): n is a, c, g, or t
  misc_feature (211)..(211): n is a, c, g, or t
  misc_feature (240)..(240): n is a, c, g, or t
  misc_feature (323)..(323): n is a, c, g, or t
  misc_feature (344)..(344): n is a, c, g, or t
  misc_feature (426)..(426): n is a, c, g, or t
  misc_feature (483)..(483): n is a, c, g, or t
  misc_feature (555)..(555): n is a, c, g, or t
  misc_feature (558)..(558): n is a, c, g, or t
gaagtttgatgttgtgtcgnatgaccagaaatatgctgtgaacttaattctttcttatagcagttagcctatgggaaaattggttttgttctacnttattttatttaaagtcntaatttccagatcctatcaactccattaagtgaggacttactgtactgtaccctgaggctcatcttagtcttccctcatcccccctgcctttccttcnagtcagcctgcatggtggtctgaggcctncccccctacagcctctcccctttatctttcacggtaatcacccctcattactcgtacttctaactccatcttgaaagctgctncctggaagatccaaacggacncaaggagggactgaaggattagaaatgagggaagtaacccatgcactgcttatttgagatgggaaccgaggactttggccgntcctacacagagacagatggcagagagacaagtttctcagagatgcgtgagtaactngaatgcttttcctgagacccagaccagcctgctcaagagacactgttgcagctgccctcctggaggaactangangattttattctttacttcccagagaatggaaccaggacacagtagcattaacaaaaaaggatcgcatctcgtcagaacgtatgcattgcttctctcggattacctgaagttactccccttccctcaataataaggcattagaaaaaaatggaattgatcaaagaagtaagagtaacagaggaagactcg

SEQ ID NO: 670157 - DNA, 960 bp, Homo sapiens
gcagagccctggcccggggtgcgattgtgcccgcagcgcccccgtggtctgtccccgtgggacgccagtggcctctacctgctggcctggtgctgcaccctgctggtggccctgtggctcgctggcttgcgcgcagctgagctggggtgtagtgttgtgaatgggccatgggccccctggggcgcaagtgggtggcctggcgccatggaacccccgacctgtcccctcggaaaggagcctgtctctgtcactgcccgggccccgtggagggccaggccaccctgaagcctcccccgcagcacctgtggctggcatgcctcgtgaccccacatccagtaatcacagcaagctgctggtctacatcctgaacatgcagcgtgagcggctgcctgaagctgggagctggcagcctgcaccggcccatagagctgcgccgatgccatggacaccagcgaccggcccggcctgcgcacgacccgcatgtcctggccctcgtccttccatggcactggcaccggcagcggcggcgcgggcggaggcagcagcaggcgcttcgaggcagagaatgggccgacaccatctcctggccgcagccccctggactcgcaggcgagcccaggactcgtgctgcacgccggggcggcaccagccagcgccgggagtccttcctgtaccgctcaagacagcgactatgacatgttcacccaagacatgtccggaactcatcggtcaccagcgaaggcacgctgaaaacctcatcgtaacagccattggtcacggtgctggcaagctccggagcgtccggaaccaaattcatacctccttgaacaatgttcccgatcccaggtacaagcgagcccggtgggctgaccaccctgttttgcaggcacagacggtaaaaaaaagggtaacgattgacagagaaacaggaagaatgaagatcctatagaacaagaaaca

SEQ ID NO: 670158 - DNA, 866 bp, Homo sapiens
gctttgtctaagtacaacgaccccttagctcgttagaacctataatgagaaaaaacgcggatggtgtgcaaccacctctacaccgtgttgtgaaggcgtgttgtggctcgcagcccgcaaacgaagcaaccagcctttcccctcctttttggccgggaagtgtccccaccactatgtcctcttgaagtatagccgccgcgcatccccacctcgtggggggcaccctcggcgagcgatataaaacgagaagatcccgtgttcacccgcgactatggttttgtctccccttgatggcctgcatatgacgctcccctcccttataagataacgtatttactacacacttcggctttatgtttacacaaagcggtttaaattacctctccgccccacccccttcggacccacgccgcagtttttcctctatcccaacacacgtctttggtgataacaaaacttgcctcacaactagggaacacacttttctttcgtcgcaaaataccatgtttcctgtagttcaagtaaaagaaacactctcccagactcaagtaagaggccatatgtggcgcatgccctccgacgtgcaacacacaggaggtagattaaaactccacaccacgtgctgtactggataaggttcattggtaccacaacacgccgccacacaaggagtgtaggtgcaccacccgggagacccctctgtcataccctcgtctgaattggagacagacacctcctcctgtagggctagtggtagctgctcagtgccccccttcggcctatagtatgatcctgtaacacagatccattataacaattagaacagtccccaaaaaaaaaaaattcctgaaagacaaacaaagaca

SEQ ID NO: 670159 - DNA, 921 bp, Homo sapiens
  misc_feature (35)..(35): n is a, c, g, or t
  misc_feature (43)..(43): n is a, c, g, or t
  misc_feature (105)..(105): n is a, c, g, or t
  misc_feature (130)..(130): n is a, c, g, or t
  misc_feature (176)..(176): n is a, c, g, or t
  misc_feature (179)..(180): n is a, c, g, or t
  misc_feature (225)..(225): n is a, c, g, or t
  misc_feature (236)..(237): n is a, c, g, or t
  misc_feature (239)..(239): n is a, c, g, or t
  misc_feature (308)..(308): n is a, c, g, or t
  misc_feature (318)..(318): n is a, c, g, or t
  misc_feature (329)..(329): n is a, c, g, or t
  misc_feature (361)..(361): n is a, c, g, or t
  misc_feature (379)..(379): n is a, c, g, or t
  misc_feature (416)..(416): n is a, c, g, or t
  misc_feature (425)..(425): n is a, c, g, or t
  misc_feature (437)..(437): n is a, c, g, or t
  misc_feature (440)..(440): n is a, c, g, or t
  misc_feature (446)..(446): n is a, c, g, or t
  misc_feature (473)..(473): n is a, c, g, or t
  misc_feature (488)..(488): n is a, c, g, or t
  misc_feature (510)..(510): n is a, c, g, or t
  misc_feature (513)..(513): n is a, c, g, or t
  misc_feature (547)..(547): n is a, c, g, or t
  misc_feature (853)..(853): n is a, c, g, or t
  misc_feature (908)..(908): n is a, c, g, or t
ggacgggggcgcgggggcgcggcgtgcggcacgtnggagggcngaagcggcggcggcggtggggacatgcacgtagcccggcgctcggcatggctctcctggtgntcggtgctaggtgagcatggacgcntctttcgtggcgagtgaagtggtctggattcctctagtgatgatgnganngaattaactccatcaaatttcaaccgagaagttattcagagtganagtttgtggcnngnagaattctatgctccatggtgtggtcactgtcaaagattaacaccagaatggaagaaagcagcaactgnattaaaagangtggtaaaagngggtgcagttgatgcagataagcatcattccntaggaggtgcagtatggngttcagggatttcctgaccattaagatttttggatcnaacaaaaanagaccagaagantancaaggnggcagaactggtgaagccattgtagangcggcgctgagtgcnctgcgccagctcgtgaaggatngcntcgggggagcgaagcggaggatacagtgctgganaacaaggcagaagtgatagttcaagtaagaaggatgtgattgagctgacagacgacagctttgataagaatgttctggacagtgaagatgtttggatggttgagttctatgctccttggtgtggacactgcaaaaacctagagccagagtgggctgccgcagcttcagaagtgaaagagcagacgaaaggaagagtgaactggcagctgtggatgctacagtcaatcaggttctggcctcccgatacgggattagaggattcctacaatcaagatatttcagaaaggcgagtctcctgtggattangacggtgggcggacaagatccgacatcgtgtcccgggcccttgatttgttttctnataacgcccacct

SEQ ID NO: 670160 - DNA, 417 bp, Homo sapiens
  misc_feature (96)..(96): n is a, c, g, or t
  misc_feature (120)..(120): n is a, c, g, or t
  misc_feature (148)..(148): n is a, c, g, or t
  misc_feature (196)..(197): n is a, c, g, or t
  misc_feature (259)..(259): n is a, c, g, or t
  misc_feature (261)..(262): n is a, c, g, or t
  misc_feature (273)..(273): n is a, c, g, or t
  misc_feature (278)..(278): n is a, c, g, or t
  misc_feature (334)..(334): n is a, c, g, or t
cttttggggaaaaaacgggggggatttccccccaatttttcccacacgttgggggtttttgtggaaattccccccaagggcattttcccccccctnaatttccattttgggggagccccnttttttttgggggacccccggccacaantttttttccccggaaaaaccaaccccttttgggccctccttagggaanngggggggcggttccgcctttttttaaaaaaaccttttgggctaaaaaaacccgttttggaantnntgggggaaaanggggnttttttttttttgccattttaagcccaaaatttgccctgggcccttaacaaattanaaaaatttttccccctttaaaaacccctttttttaaaagggttttttccctttaaaaaaaatttttacccatttttggaatta

SEQ ID NO: 670161 - DNA, 269 bp, Homo sapiens
acctagaggatctaaacgacccgaaggacatcatcagggctaaagaggagtcttcgtgtgtactacgtacctccttgtacatctgctatacccaaattcagttattcagcattgttaggagttttaccttttaccatctcataatggatacctcatgtcttctgtattaaggtattttcaatgataggctgtagcttgtttcgtagttattggtgatggtgttatatccatacttttatctctaatgaaatgtagttgggttctgcctg

SEQ ID NO: 670162 - DNA, 2628 bp, Homo sapiens
  misc_feature (77)..(77): n is a, c, g, or t
ggggacttctctttcggtaaccagctcccttgcggatagtctatgttctccatataaacccagcacttcccttaatngagatacgtgggacttcactccgtccccagcccggaaccacaagtgagggcactgcgtttcctgattgacctctttggcgattacttccgcccaggggcctggaatactggaggcccttcgacggagaacaacaagaaaggcacttccggtgtctgttgccaggcgcgggcccagtgggccgtaggggcgacattgttgccgtcgtctttccccccccagtcccggggatggagatgtcgggactcagcttttcagagatggagggctgccgtaacctacttggcctactggacaacgacgagatcatggccctatgcgacaccgtcaccaaccgcctggtgcagcctcaggaccgccaagatgctgttcatgcaatattagcatacagtcaaagtgcagaagaacttctgaggcgtagaaaagtccaccgagaagttatatttaagtacttggcaacacaggggattgttatacctccagctactgaaaaacacaatcttattcagcatgcaaaagattactggcaaaagcaaccacaactgaaattgaaggaaacgccagagccagttacaaagacagaggacatccacctatttcaacagcaggtgaaagaagataaaaaagctgaaaaagttgattttcgtcgcctaggagaagaattctgtcattggttctttggacttcttaattctcagaatccttttctaggaccacctcaagatgaatggggaccacagcacttctggcatgatgtgaagcttaggttttattacaacacatcagaacaaaatgttatggactaccatggagcagaaatcgtgagccttcgtttgctgtcactagtaaaagaagaatttctttttctcagccccaactagattcacatggactgaaatgtgcatcttctcctcatgggctggttatggttggagttgctgggactgtccatcgaggaaacaccttgtttgggcatttttgaacaaatttttggactcatccgctgcccttttgtggagaatacttggaaaatcaaatttatcaacctgaaaattatgggagagagttcccttgctcctggaacattaccgaaaccatctgttaaatttgaacaaagtgatctagaggccttttataatgtaatcactgtatgtggtaccaatgaagtacgacataatgtaaagcaggcttcggatagtggaactggggaccaagtttgaggtagtggaaatgagacattgctgaacaaaagagaactgggtttacctgaccctctaaagcgctaagtactgtcagcctgaaaaaaatcttctatacagaaactcttccaaatactatatcagtaatgtctgaatgatttcagatgtgaaaattgacatattttagttgaaatacctttctggactacagacttacatatcatgtgaatacttacctatttctacccgagttgcagcaagtattctgaaagcttaatgcaaataaatcccactttagatcttacagctaactgtgtgccttagaaaccaggtaatattttccttttacttagtgaatattctgctaatatctgcacttttcatgtgggaaaggattaataatggtccaggcttcccctctttaagtttcatgtttacttttgtctaactctggataattgtattttacaaatgcatctcactgtagtatatttttaaaactattaaatattttagagatgtttaacgtaaactcaaagttctcattttagaaaatttaaataacattctttttgcaaaaaagtccaataatttaacagttgaagaaaaacttactacctctttaaatatttgagaaacatttttcaaagttatcagctgtagtccaagctaaatatcttttgtaatctgcaacattttccttactgtttttgggcagtgataaatgctgttctcgaaatagactttattcttacctaggcttcagccaacagttttatagagcagttactgtaatacaatataaaggaaatatgctgttgaaattttaaaggtatgcccagttcctaacttttaaacgaattaccgttcttcctcttggctgatcttggcagagatgacaaaaaaaaaccccaaaacaacccatgcatgtataatgtgtgtatacacatatacataagtatacatatactcccacattataacttagaatatttagttttttacctgttactaggtttgagttacatggttgagttgccaaattatttacatgctttgtttaaattcttcatcacctagcaactgtttgctgatcatggatttacttagttactttaatttataaaattaccatttggaaaagaactcaattgggaaatgtgatgacgtattgtacatgttactttttcctttgctataatcatctagggagactgataagaattttggaaatgggagcctggaaactcatctttgtttttttaatgctatgcctcttacgaggaatacgaattggtatgtcctaaaataagaacttaataaaggagggaaatcccttttgtctgctataaaa

SEQ ID NO: 670163 - DNA, 135 bp, Homo sapiens
acccagtttacttatgtctggaagctttgtgaagtatctgacactaaatgtatgctggcatgcagtcagaacctctgtaaaatggtgtcctcaggtcttcggaatctgctcctgacctgcctggtgaaatctggt

SEQ ID NO: 670164 - DNA, 1804 bp, Homo sapiens
  misc_feature (77)..(77): n is a, c, g, or t
ggggacttctctttcggtaaccagctcccttgcggatagtctatgttctccatataaacccagcacttcccttaatngagatacgtgggacttcactccgtccccagcccggaaccacaagtgagggcactgcgtttcctgattgacctctttggcgattacttccgcccaggggcctggaatactggaggcccttcgacggagaacaacaagaaaggcacttccggtgtctgttgccaggcgcgggcccagtgggccgtaggggcgacattgttgccgtcgtctttccccccccagtcccggggatggagatgtcgggactcagcttttcagagatggagggctgccgtaacctacttggcctactggacaacgacgagatcatggccctatgcgacaccgtcaccaaccgcctggtgcagcctcaggaccgccaagatgctgttcatgcaatattagcatacagtcaaagtgcagaagaacttctgaggcgtagaaaagtccaccgagaagttatatttaagtacttggcaacacaggggattgttatacctccagctactgaaaaacacaatcttattcagcatgcaaaagattactggcaaaagcaaccacaactgaaattgaaggaaacgccagagccagttacaaagacagaggacatccacctatttcaacagcaggtgaaagaagataaaaaagctgaaaaagttgattttcgtcgcctaggagaagaattctgtcattggttctttggacttcttaattctcagaatccttttctaggaccacctcaagatgaatggggaccacagcacttctggcatgatgtgaagcttaggttttattacaacacatcagaacaaaatgttatggactaccatggagcagaaatcgtgagccttcgtttgctgtcactagtaaaagaagaatttctttttctcagccccaactagattcacatggactgaaatgtgcatcttctcctcatgggctggttatggttggagttgctgggactgtccatcgaggaaacaccttgtttgggcatttttgaacaaatttttggactcatccgctgcccttttgtggagaatacttggaaaatcaaatttatcaacctgaaaattatgggagagagttcccttgctcctggaacattaccgaaaccatctgttaaatttgaacaaagtgatctagaggccttttataatgtaatcactgtatgtggtaccaatgaagtacgacataatgtaaagcaggcttcggatagtggaactggggaccaagtttgaggtagtggaaatgagacattgctgaacaaaagagaactgggtttacctgaccctctaaagcgctaagtactgtcagcctgaaaaaaatcttctatacagaaactcttccaaatactatatcagtaatgtctgaatgatttcagatgtgaaaattgacatattttagttgaaatacctttctggactacagacttacatatcatgtgaatacttacctatttctacccgagttgcagcaagtattctgaaagcttaatgcaaataaatcccactttagatcttacagctaactgtgtgccttagaaaccaggtaatattttccttttacttagtgaatattctgctaatatctgcacttttcatgtgggaaaggattaataatggtccaggcttcccctctttaagtttcatgtttacttttgtctaactctggataattgtattttacaaatgcatctcactgtagtatatttttaaaactattaaatattttagagatgtttaacgta

SEQ ID NO: 670165 - DNA, 183 bp, Homo sapiens
gatgccacatgcacgagaagagtaagcttgggagtctctatttttaacaccccaggtgattttgtgtatgctaaatgtacctaaccccttgcttccgttcattcttccaggcataattattgagtgcctgctagtgcaaaggattctctaggcacggaaaacagcagtgacaaaactgacaaa

SEQ ID NO: 670166 - DNA, 732 bp, Homo sapiens
  misc_feature (640)..(640): n is a, c, g, or t
  misc_feature (676)..(676): n is a, c, g, or t
  misc_feature (686)..(687): n is a, c, g, or t
  misc_feature (690)..(690): n is a, c, g, or t
  misc_feature (700)..(700): n is a, c, g, or t
ggggggggggagaatttgcttccccccaagcccttcaaaaaataagccccgcggccgggcccctggggtaactttggggggggagaaaaaaaaccccggcgggctcaaagggggggggcctttattggggggggggaaagagagccctttttgtggtgggtccaaaaaaaaataaaaaccggcgggtctctcggggggttctcccaggggatttttttttcttttttaaaaaaagtgtgtcccccaaaaaaaggggggtgggcccctttttttttccccccccgcggcgggtgggcccccccaaaggaaaatcttgggggcgcccgtgtgggggaaaaaagaaaaaaaccccctttgttttccccaaaaaggggggggaaaaaaaattttttttttttgggggggccccctgggcggcccttaaaaaaggggggggcccctcgcgcggggaagggtttcccctcttaaaaccccgttccaaaaaagggtgggcccaggggagcgtttttacccccttgtatggagattcaaaaaaggttgggaaaattttgggggagtcccccaaagttttcaagctttgcccaggttttgcagggaagggttcccaggttccggaaggctttgctctttgaccttgcanggcccttttcatcgttttcctgaatgtcacgcttcncgatgagtgnnagnatgtcgatgnaggcctcccggtcggtgctgagcagagactgg

SEQ ID NO: 670167 - DNA, 314 bp, Homo sapiens
gggaccaaatttgtttatttgaaggaatggttcaaatcaaagaacttaagtggatgttttgggccaactttttgaaaagggaaaggaaacccctacatgcatgccctgccttggggaccagggaagtcaccccacgggtatggggaaattagcccgaggcttaactttcattattactggctcccagggggggcttgccaaaaaaaaatttcgccaaaccaaatttgggcgctcccattttgcgcaagttggttacgtggtcacccaattttttgagggctttcacctggttatttagggaaggggtttaaaag

SEQ ID NO: 670168 - DNA, 228 bp, Homo sapiens
gagagtgcgctgtgtaacaccagtccgtgaattccgttctgcgaagcaatggtcgccggcaccccttgcttcctccctctgttgtctgcctgtgtgacacacaatcaataggcaataacttacttccaactcctacgcagaagtgggagaggccggcagccttgcaccgagagggcctatcctactctcttgcttcttccgcatacgtttctgtttgaggctagcaga

SEQ ID NO: 670169 - DNA, 300 bp, Homo sapiens
cagttgccccgcgttccccccttcggagaccgatggcggggaccttagtagctgctcggcgagccgccccagcaccggctcgggggccagaggcattcactccagactgggaaagccgagaagcttccactgggaccactatcatggccgcgcagttcgacgggggcgcggctctggcggcggactccagaacaaccactgggtcctacatcgccaaccgagcgactgaccagctgacacctatccacgaccgcattccctgctgccgctcaggctcagctgctgatacccaggcagtag

SEQ ID NO: 670170 - DNA, 952 bp, Homo sapiens
gggcggagaggaagagaaagaagagaaaaagagaaacaaacaaagacgaactgactcaacgcagtgaaatcgagatggtccgccagtgtgggacccgcggttggcaaccgggtcgggggaaaaccattcgggaatggaagcacccgggtccaagcagggcaatggccccgtcctagaccatagaggccgcatttcagcccaagggccgtgcccattgcgccccccggcggcctcccaaaccagactcccgggagttcgatcagcccatttccaggcagcagaaattgggcgttctcaccagagccttcaattcttgagtatctctgtggaccttccgcaacttttctcccaaaccccgtgcaggttaaagtggcttagaaaattcactagaagggctttgccccgccgggcatccatactgtacatttcgccccagatttcacaattctaactgcggtggatgatcttacttcgccccatagaaaatttttcacacgtctctcccaatagcaggaagcgtcattgagaaaagacccatgaggcaagagagactgaatgtctcaccacccggtggcgagcacatgatgctgaagttccaacacgggagatcccctctgatgtctaaaacactcttcaacaaatccacgggtctcatgtaaaaatcagttgcttatgacagtacttttcacataaaacaagacatgtttgtctacaaacaatttctgtatctacccccgccaactctcgccaaaaactcctcgctctcgccccgctgtattcagtactcattccctgcatctcccggacatctatcaggaccccgattcattcacaaccgtacaaatatcagtccaaaccaaacacatcttcttgcaacaccaactcaaaggacatagtgacaacacaaatttgaaggacaaacaaaaatttcttggcccctcccttcatgaca

SEQ ID NO: 670171 - DNA, 136 bp, Homo sapiens
ccatgtttctggcacatcatggggttctgatatattttacggattagtgcatgttctccgttaagttatatacagacaatgcagtctgagactgctcaatgatgtctcacacagcttcttgactctaatagatcca

SEQ ID NO: 670172 - DNA, 196 bp, Homo sapiens
atcacaccactgcacacctgcctgggctacaaagcgctaaccctgtcaaaaaaaaaaaaaaaaaaaactcccaatgaggaaaattttttattgattactctcctaattttcctttagaaatttataaaaaagcgtagggaaaataactttggtatccttgaaattttcacccccaaattggtctcaccgcaatttg

SEQ ID NO: 670173 - DNA, 420 bp, Homo sapiens
tttagctgattcactaagtattataagccttcacccggtcatgcagatgcggagggtgggggcgcgggctgtgatatggctggggtcctctgtcgtcagaaaacatgagctcatgccaagatttccgcaggtcaccggagatagcaccggctctctggagacaggcgtgacccccaggtcagctccttgtcattgaactaagtgggctcagtgtcagcttgaacgttagtggtgataagggccggataatggtagccaaactcccacggcctctttaggcctcccctggggacctgaggccagcaagaagggcaggtcagggaggggccaggaggaggagcaggcaggaaaggctgctggtgcctttggctcagccagtggggctctcagccctctgtagtgtgccctagggaccagttt

SEQ ID NO: 670174 - DNA, 907 bp, Homo sapiens
ggcgaacccactccagcttactcatcagacgagccttagccaaaccatgtagccaaataaagtataggcgattagaaattgaaacctggcgcaatagatatagtaccgcaagggaaagatgagacatctatacaccaagcataaatatagcgataggattaaccccgtatactcttctgctataagtgagattaactgtagcacaatacgactttgcaaggcagagcctcatagctaagactccccgatagcaagtactagcttaccttaatgtacagtctaatatgagcatagccggtctatgtaggcaaatatatgtggaggaacgactttatagagtatgatggcagattcaaaacctcaacagaattatgtgctagaatacgttcggatatgattctaagtactatatatccttaaatttcaaacattcttaaattcttacgctacaccgagactacttcataccattctctacctattgtggattttcttacagctcgttgaagaatcgcgaaaattaagggaactctaagtcattcctctttgcgtatcgcctccagtgaaagatatagaactctcttatcgaacccaagaaggtaggaatcaaactcttacaacacgcccaaatacgattagcagaacttcaaaacaccctttaattccaaaaccacagatttatacggaaacaagactgttttccgaaagttatccaaattcccatgcgccacattatacccctaattgaattttttccccccttaacaattttctacacatgtacaaatttactgatcacccaacccacacaaaatatgttagacccccacatttttcttaatctccaacgccattaattatcccacaaggaacacctttcaacctgctctaaacgtttaatctttag

SEQ ID NO: 670175 - DNA, 179 bp, Homo sapiens
ccactgctcttgtctaaagccttctgtctcctagggttatcctgctcatggtggtctgtgctcgagcacctgtgctcctgccagtttcatgtgtgccccttggagacgagcttcaacgtcatcaactcacactcctctccctgtcttccggctcctttcagcacgtgtgggctgtggac

SEQ ID NO: 670176 - DNA, 137 bp, Homo sapiens
atgtcaggtgagtatggtgtaaatgagtgaggaggagtcgaggcaggttagttgtggccataaaaatgattaaggatatagtataagagatcaggttcgtacttatacttgttgtagtataggctatacatttgtat

SEQ ID NO: 670177 - DNA, 910 bp, Homo sapiens
aagtgaatacaactgaagcattctgttattgtataagaaatgtaagaaaaaaaatatagaacgaagaggataggattctcgtttattgtatggatggaccctggtataaaatcactttggcgctttccattcatttggtttagcacagcagtgagcttctcgtactttcttctctttttttattcatctgcggattacagagcctcgctggctctgtacacccaggctagagtgcaggtagcacagatctggcgtcactgcacacactgccttccggggttcaagtgattctcatgcctcagcctcctgagtcgcggggataatggaccaattgccaccaccacccggctactactttttcttttattgggtttttcttagaaagaccgaccagacgctactggccgatcgaggaccacagggcgtgcgccgatgaacaccaccggggccatcacttatgactacaccctatgccattcggcgcataccacaaaagcccgggagaaactaacacgacacgtgaaccacaaccagatgtcggcacctagccagtcacgacaacaatggtgacccccagggtgataacacaccccgtaaaaccaggaaccccgggccgacaccagcagagacatggcaaccagaggtaacgctaaaccgggacaattgcagctccaaaacagtcgccacaaaaacccatttcccagccgcgcactatcaactcgacaccagaacgcgaccttcagccccactcacgggcacctcacagagagcactcccgcggtaccctccgactctagcaggcccatcaccgtcgacctatctcccaaccgcagcattgtaaccagcccatacgccacacccccgcgccccccacgacacatcccagagtggcacactcgcacacgcccca

SEQ ID NO: 670178 - DNA, 604 bp, Homo sapiens
actgatctagagttccccccgatggccatgacactgcagcccatggagatagagcagcgtgttgctcaactccacctttccctcatatcgacccttcccagcccgatgggcagatcatacacatgccccctgagtctctctgctatcacctgtagtttgtacgatgcttctgcaaatcctaccagaactctcatctccttcactgggctgcacaccatgaagcacactccctctgtacaacagaccctaggcttacctgcgtctctcagttgtgcaggaagcacagggaagggaaggggacagtaggcctaaataaagtaggctaggctgggaacaaggggatccaataagatctggtcctcactggcttttggtttctctccataggcacatcccctacactcagcttaaatcatttctgaccccccgtcccgatcgtgcccatgtggcccagtaaggtgggtccatgcaggaagctgagggaggtggcaagcccgtgcggctcgagcgcttctgcctgccctagtcggggcctagccggacgccggagaagacgctatagagccctggatgcccatcatgtcgtagtaatcttgacagccag

SEQ ID NO: 670179 - DNA, 111 bp, Homo sapiens
tagaggatccctgtttattgcccaacacggctcccaaagtgctgggattacacacatgtagccaacacgcccgggcgaaggttaagctttttcaagggttcagtaagatgc

SEQ ID NO: 670180 - DNA, 988 bp, Homo sapiens
  misc_feature (309)..(309): n is a, c, g, or t
tatacccttgccccccccttttttgggccaccccccccgggggtttaacacaccccccccggggaagggaggggaagggggggtaccccggggtaaggcccccttgtggggggaagagaacgtggtggcctggggtaatataacaaacgtgttgcgtccccggaggacccggtcgctctttgcccccccggaaacgtccttgtggtgcacccctcggagttgaacctgggccatagaggcgcgtttgcaaaagtctcgtgacctgtgggcacccaccctgtgtgggtgtaaactgtgcgtgctcctccnaatttttcgtgcgcgctctcacttgtggcggcgccatttttgaaggggagcaaccgcgccgccccgtggtggtatcactgggcggcgtattttccctagagaaaagaaagcgcggggaccccaccccttctttttttatagcgccgcggtgtgttctctccagcgtgcgagacgcaaccgcacgcgtattgtttgtgggcgaggctccacttatgtgttgagggaccccgcggagaagggtggggggctctcaccactcaagggcgcgtggtagaagagggtctccccccgaatgttggcgttatcacgagcggagacggcaggaagatagagcgacgcactctcctctcgcgacacaacggtgttagacgacacatgagaaagaagtggcggctcactcacaaaggtgagtgggccacccccactcaaaaggatggcgcacttctactaaaaaaacaggcgggggggtacacacagtattctctccccaccaaagcgcgacccccccacagaatagtgggtctttttgggctttaccccaggaagtgtagaccgagagaccccccaaaaaatagtagaaggggtctctgcaggcacacgagttgtcctcaaaaagttggggccccgggactacaccttctgctttgaagtgtgtaccaccacgggaggaactatagcc

SEQ ID NO: 670181 - DNA, 426 bp, Homo sapiens
  misc_feature (15)..(15): n is a, c, g, or t
  misc_feature (60)..(60): n is a, c, g, or t
  misc_feature (66)..(66): n is a, c, g, or t
  misc_feature (233)..(233): n is a, c, g, or t
  misc_feature (237)..(237): n is a, c, g, or t
  misc_feature (293)..(295): n is a, c, g, or t
  misc_feature (384)..(384): n is a, c, g, or t
  misc_feature (405)..(405): n is a, c, g, or t
tttacacagaaccanatggaccctcccaggctagtccatccaagtctcctgtccactcanccagcnctggggcaactcgggtttcaagcatagtatactctgtcacttccacccaatacacagggacaagggcactgccatgattccccctcctgggccctctctttgcatgacaaggcagttgtggtctgagacctggaggtcccgcaaagccagttctaggagggcctgancccnaaactcctccccatccccgcagttctccccctgacctcccagcacctcaccttccnnnggtggctggccagggagggaggccctggagaagcaggcagatgaggtcctgggtgacctctcaggtgacagggaggcacattgtactgntgtgaccgggcccactggccncctcagtgacttacgtgtcag

SEQ ID NO: 670182 - DNA, 604 bp, Homo sapiens
ggcagcttcattttccgccctccgggccattttcaacttgtccgtatcaaacccggtggccacacagggctaatcgagcccggtggcgcgcccctctttcagttgccccccgttgttctctgttcacgagccttgtcccaaccacaaaggttatccccaccccgaggtgcccccacggagaagttctccaaccccggctgttatccccgggagcaatgtggccccccccgcccagtctattgtcgagctcggggcacccaccccactggcagtgtggtgggctccagcggagcaggcccatgtgacccgtcttgctgccactatgtccccctggagaacaccaggtgactcctgttttcttccaaactaccggctttcttttggcacttagcacacacttgtctggtctgtttaccccctgttgagagccacactgggcttttctattcaatggaggggcctacatcaacacggtctttacccagagctcgcagtggtaccagcgggggacccaccgcccgtggttatgtagaaactcccccccctttttcgggctgggggtgtttcagctttacccctgaaccccacccgttctttcataaca

SEQ ID NO: 670183 - DNA, 365 bp, Homo sapiens
cactgaaacccgcatttatctaagactgggtggtgcaccatgaaacatgcatgtacgtcccaaaccatgcataagtgggcagcttcctattacgcagcaattcttccctctatggaacattgttcaactcagaatgtcaatctatggagctcaaatttttcctttcttaacctctctttatgagagacaggtcttgctctgtagcccaggttgcagtacaggaggtgtgatcatagctcactgcagcctcaacctccttggctcgagaaatcttcccagttcaacctcctgagtagctgggactaactggcatataccacctcacctggctaatttgggaatcttgtgtaagagagggtccccca

SEQ ID NO: 670184 - DNA, 304 bp, Homo sapiens
tatctaagtactctagaggatcgctttcactgcttcggatcatgcccccactgtttatggctaaccttattgtgggatagaggcttaatgataattgattacattctggaattcttggtaagaatacaaggggtcttaggagccaggtttataagtaagggggctgctcttggctacttgggacattagccagcagctagtgactggcactggttcccttctgtggctctgggcatgttacagatagaaaatgtgttgagtgatgcaaatggcgtagtggcctgacttctgtaaccaaataatc

SEQ ID NO: 670185 - DNA, 107 bp, Homo sapiens
agtacacggacgactctacataccaactattgtctatatgaaatgtatttttgtatgtttctctagcttgacaaagtatggtatagagaagaagcaggctatttgta

SEQ ID NO: 670186 - DNA, 236 bp, Homo sapiens
ggtaaactgcactgattcagtacatcagcaatttgaggagctcagataagattcttcactcgggcaggatattgccgtaaatcacaagacctccctgaagcaggttaatttggaagcctggcaaatgtgaactgtagattatcaacgcccatagtagtaagatgtattgaaagtgcctgattcgtaatatgcttttctacgcatcaccactcctctttcacacaccaagaatgtgc

SEQ ID NO: 670187 - DNA, 214 bp, Homo sapiens
cctagtaggagggtccgcgtggtcgaccaggctttcgggtgactcaggcccgtgcccgagggcccacggtttcaaccagcatcccgggcgactctggaccgtgctaggtgctgcggtgctgaactgctgtcccagggaactcgtacttggaccgagggcacccggggtcgaccagcggtccgcggcgacaccggtccaggtcaagcacgggtac

SEQ ID NO: 670188 - DNA, 477 bp, Homo sapiens
  misc_feature (189)..(189): n is a, c, g, or t
  misc_feature (219)..(219): n is a, c, g, or t
cccaccgcccaggtgggctcaccaatttgggggggcatcctttggccctccattaagggggttggcttcctcctccctcgttcacaagcccaggagttttgaaatgggcccccttttttggggggccccaaccaattgccccctaaggttggccccccggcccccgggttccccagtttttaacagtcnccttggggaaacccctgcccccatgggggntttttttgggttccctccccaagggtttcccccaaaggggggggtggttccccgttaaccctggggccccccaaaaggggtttttttttttctccctagtcccaggggggggggggggccccccccctccccttacaaaggggtccccttttttttttttgggggccccccgcccccccctcccatgggggaggttttcccccccgctcctttgtgggggccccttttgggttttttaagcccgttttttaatgccca

SEQ ID NO: 670189 - DNA, 359 bp, Homo sapiens
tgcctcaatgaacccagcactggcttaggcactgtgtcagcactctaggattagggtgccacacccatctccttgcccttcatagagattattctctgatgagctttaccactgagtaaagaacaagggtttccacggatcatcctcaccacagggaagactcgggtactgcttgtatcataagctggcccagccgagccggtgaccgcttaggattatcggatcccagtgctggaggggatcttgaaggtcccttggctaccaccctttctgccaactgtgcagccccgcgggctccccccttctgctctatcacttgctgtgccctgtcattactttcctctctggctaacagtctt

SEQ ID NO: 670190 - DNA, 878 bp, Homo sapiens
catgtcgctgcgcccggacagtgccccccgtgtgtccacatgtcgatcacctttcctgtctggaggccagagtgaggaggaggcgtccatctaacctcaatgtcgcatttaacaatgtgccccctgttgaacccctgggccctgtaccattcgtcctacggcccgatgcccgtgtagagccgtcatgtcacactgaatgcccatgagagtgcagggacagcacagggaggaaccgttacaggtgctgccgcagcgaggacgtagttgtcaatctcgaaggcccctggtaacgagagtaggtccgggagtggtcgtcgcagtgggcgctggtctctggggctagggatcgtttcaccttcggcggggacaagacgctcccgttctccacgtctcacgccgcttcgtcgccttggcgatatagagccctagagcgaggaccttttggccgctcgttcaacacggagaaggtgccgccgtccgggatggcggggtcccgtcgccgtggtggggccttggctttgtctcggatggcaggaagatcgcgcaatccgttttcgggatcataccttgattcgcaaactggcccctttagatttaagggggctgtgtcacggggttgcgttgcccccccacggagggttttgggcccctctgcggcgagatgcgaggcgtcgcacgggggcgcgccttggtgcgccgacatgcgccatacctcctttgcaatcaatcgaaggcgcccggactctcccgtcgggggagcgttccaccgggccatggtgcgtttgtccctgaggcatcgtttttcattctcgctgtcgtgtgcccatcggtgcgctgagtggtgtggcttgttccagcgtcctggttggagttgccta

SEQ ID NO: 670191 - DNA, 381 bp, Homo sapiens
gagctaattaaggttaaatgaagtcctaatgtgataggaccaacagttttcatgtgtctgctgcacagttaacagacccatgatgctcagacagcagggtttgcagcagagaaagagtttaacaaggcccaggtgaggaggtgaaaggagacgtctcctcaaatacatctccctcaggagttctgagctaaggtttttaaggggatcatggaaggtgaggggctggaaaatgggggtcgctgactggccagggtaaggaggatgattcactagaatgtggaaactgcattccttgctgagtcagctcctgtggggtccttcagagcagctggcatcagtactttcactggcgcccttcccccgccaacgccgccccttccc

SEQ ID NO: 670192 - DNA, 340 bp, Homo sapiens
  misc_feature (173)..(173): n is a, c, g, or t
cttggtgctttgaaaattaactgtcacaaacaaggagtatatggcttcttttttctttctttttaaaaaatctttctttagagctagattcaatcaggtgtctgaaatgtgagttaaacattactttatcctttggtgtagttcttattattttccatttattgtgcctctgnagcaagtgttccctttgaaaggcccatcccagagctcaggccctgcggggtcagcgctgctggttcttatcacttgctgccccccagatgctgtttccggtcctttattctacgtctctagttgagatagggccccactcagtaagtccgggctgggcctcaaaacc

SEQ ID NO: 670193 - DNA, 136 bp, Homo sapiens
ctggctggtgaacaggcctgaaggcagaatccctacccaatgaagaagtctgtaaccgatgttttcctgtgtctaataaactgtagtgacctttatccattgagataaggctcaagagagcaatgtgagatggaaa

SEQ ID NO: 670194 - DNA, 203 bp, Homo sapiens
aagcgaacattcggcctacctagagctgccaggaattcatgacatcctgggagccgccacagctggacactgatggagacctggatgggggccgatgcaaaatcctgctccttctcaccggcctgcagctgcaccagcacctggtggagctgatggggagagcgtcagcacccaccgtgtctgccccccgcagtgttcgcttg

SEQ ID NO: 670195 - DNA, 1017 bp, Homo sapiens
gggtctacgaggacgctagtttcccctatcatagaaagagctgatcgacgttttcatgatcacgccctcataatcattctccttgtctgtggtcctattcctgttatgaccgcttctatccttgaaccatgtcgagcacaccatgatagctaggactacaataacttaacctagtctgcgagcaccgcatcaggagaattcagaacacctccgtgcattgaagcattaatgcgcctgtcccgggccacttctactacctcatgtccctgcatgcggccccttcccatcactccgtacggcatgcagtgtataccataagcgagagcgaggtacaatgaatgccgctcccgttaccagtgcaaatcgaaattggccaacaaagggtagctgaagccgtacgagatagcaccgacatacggcggcatgtagagtgctgtcaactccgtatataattcgcccatgattccctgaggaaccagagcgaacactgtcgcactgccattgcaaggtctgactgatcgcatgtagataactcaccgattggaatagcgccccattgcgtaagtgaatgaatttacatgcgagcactcacggtcttgtcattcgatgacagtcctggtccccaagattagggctttaaacatacccaagatgccaatgtcccgggacgtcttaaaacccaatgccgattatcagcgatacaagtaacgggggctataactacggtcgaatggctacctggaacagtctgtggcagacacacacgcaacagctgggcagggcccatcgtatctcagaaaattaattgccccttagaaaaatgctgccgaaatgagagggcgccgcaattttgagcctcattagcatcgcaactcgaatccccctatgagagcccgaaacccaatgggagaaccagtggtttgaaactgggaagcttccgaatgggcctgaaaacaaatagccgggattttcaagcccaggggagaaggatgccaaagactccttgaaccctggaaa

SEQ ID NO: 670196 - DNA, 276 bp, Homo sapiens
gcccccccttttttttaaaatttgggggctgattataccccccgggaagtagaaggtagggggtttggggaaaaactagaatctcccccgcctcccttcttggttaagggtttcccccgtttgggtccattataaccctttggcccttttctatgttattttttttttggatgaaacccttaccccccctttttttttttgttcccttttttccttttgtttttttgttttgcctttccccccccctttttaaaaaaagggtttttgggcctttta

SEQ ID NO: 670197 - DNA, 928 bp, Homo sapiens
tggccaaaaacaaattaaagcagggcctatgtaaaaacagggcactctcaaaactcctggtacacggtttcacaaaatcaaaggggcccaaaattacgggaccacctaaagacaattgacaaaaagtgtgctggacgccagaggccaccctttcgtgcatagaatgagcgcacgcgacagtgtgactctcgcattttcttatcttgattaaggagacagaaaagaggctcttttcgaacagatttgaaaacaccaagggcggggtgctcttaaaaaaaacagcattgggttctcaaagaaaacactatagggaagcaccccacagagcgtgatataatttcttaaggacacaaatatcattcctattatgccaccgggggatatttggacccattattcctaaaatatcctataaagtatatgggacactcccattctttctttccaggataaacttggggaagagtgcgtgtccacacagtctgtgtttcttcatataaatttacatccttccacaagtgagttctgggcgcgcaaaataagtcctttctctttaattctttggggggcccctaaggggaggagggacacacagggtttctcctccgccattttttttctacactgtggggctcaccaaacacgaacttcctttttttgtatagctgtgccatctcaagaaaagcacaaaaaggcccccatttttactacctttgtagtatacccgaggactaactccttttagccacacaacacaattttttaccccgaaaatataaaggcttatattgggcccgaaatcagaaactttttggaaagcacccggtggggcgcccagataacgaatattattgggttccccgcgcaagggggcaacaaagcggtctgcaacaacattttttatttactccgaagggataatataatt

SEQ ID NO: 670198 - DNA, 1002 bp, Homo sapiens
cagaacaagagcgggttggtggatgtactgaagtcggacacatggactttctagctgaacagtcagacttcatccacgtccaggacagcgtgagcgtctaggatggtgtctcaccctgttgcccaggctgggaatacagtggcacgatcctggctcactgcatatctccatctcccgggttcaagcgattctcctgcctcagcctctcaagtagctgggattacagggctgcagaagctgagtggcatagcttagtgcagaggggtgaatgactgctgacgtgcattgccatacgagaccctgaggacaattagggacgaagtgctgctgcaatacttcttagagcaatgacatagtatgattaagcacgttccaagggcacagggggatagagcgtccatacagatgacgacctggaaacacggggatcaggcctggcagtgcgaccagggcgaccaagacgacatggcgtcatcgcctggtgaccggcgaagctggacatgctccccttgagcatggagacgtggcccaggtaccacggacaaggtatagcacacagcttgaattgctgcagcgctcaagggatgtccactgtgatgaggctgcggactagcaagtcctctcaagggaggttactgaaagcacgtcacattagggctttctagcgcttcaagactcgaccctagggtcgttccaacccataactttacatcgcgcgcttggaattcggcaagcggaacccccaaaagtggtcccactccgaatcagcagagtggaggacacatccccacccataagagaaacataccaaggaaacccaactaggcggatacacacaaggcggggctcaggaacgcaccaaccacacggatgcatgtacaaccgcctgcacccacgctacggaagtgacccacagggacacaccactcacctcggggcccaacgcggacgcaacgagttaagagaggcaagaacccttggcaccgacatacaaggggaaca

SEQ ID NO: 670199 - DNA, 228 bp, Homo sapiens
atgacctgtactgtgctatgtcgtgtacaatggctttatgttctatgtactgttcaggggtgtggtaggtttgttggtatcctatgtgggtcggggtggctttggagttgcagctgatgtgtgatagttgcgggttggttgctgtacttgcttgatacgcatgaggggggggggtttgatatggatagggttttactgtcctacaggtggtcaagtggtccgagcgga

SEQ ID NO: 670200 - DNA, 112 bp, Homo sapiens
gtaaagccagcgtccttcatagagaatatggtaaaatcgaacagaaagccattaaagaaagtttatataccatggagcacatatatgtgcagaaaatgtcacattatcttcg

SEQ ID NO: 670201 - DNA, 460 bp, Homo sapiens
cttcctgagcgcctggacccatcctctgcctccagcctctgccccagaactcacacctgtgccggagcccctttctccctcccacactcgccatctcccaggccgtttcgtctgtgcagggctggtttgttctggctttttttgtttgtttgtttctttgtctgtttgcttggtgtttgtttgcttgttttctgggggaaaaagccatatcgctaaaattctatagaggttgagatctttctcagtgtcaagtcctgaatgggctgggtttgctgcctctgggacccactgctaggaaagggccccagtactcctccacggatctggtttcctgcccagccctgggtaaacttagccggaagccttaggtcccattgtcggcgctgaggtgtctggcctgaggtcaatggtgcaaggagccgccaccgggttcgccagcctggagtgctgggctgtgtta

SEQ ID NO: 670202 - DNA, 205 bp, Homo sapiens
  misc_feature (25)..(25): n is a, c, g, or t
  misc_feature (87)..(87): n is a, c, g, or t
  misc_feature (135)..(137): n is a, c, g, or t
ttaaattcaaaactataaaactacnaatataacataggagaaaatcctaggtgactttgctttggtgatgacattttagatgcaacnccaaagacataattcatgaaataagtaattgataagtagattacattnnnattattattattattattattattgcaaaagccaatgccaagacaatgagtacacaagccatagccca

SEQ ID NO: 670203 - DNA, 293 bp, Homo sapiens
  misc_feature (171)..(171): n is a, c, g, or t
  misc_feature (181)..(181): n is a, c, g, or t
  misc_feature (192)..(193): n is a, c, g, or t
  misc_feature (254)..(254): n is a, c, g, or t
  misc_feature (256)..(256): n is a, c, g, or t
cttagcaggaagagagaactggaactgcaatgctagggcaggggtctcaaagtgtggttgctagaacagcagcatcagcatcacctgggaacctgttagaaatgcaaattttcaggtccacccagatctactgggagctctgggcatgaggccagcagtctgggttttacnagagccatcntaggagattcnntgatgtatgttagacgtttgagaacccttcgtgacccaaggaagcggtggctgtttcaagncnagtggaaacctccaaagaagaaaatcgacataaacat

SEQ ID NO: 670204 - DNA, 457 bp, Homo sapiens
  misc_feature (66)..(66): n is a, c, g, or t
acgccccggcagatattcacaatctcctcggagaagagagatgtgagaagagaacacgcccctcgngaggaaatatatttgtgcgaattgaggaccacccacctcgtattgttttggctctcaccaaccacgcccttctcttgaccccttaaacttttccacggccacggagtttcttataatgagaaaaatgaaggtaccacggactgagagagagaaaaacccacgaaaatttggcctctttctgtgggccactcaccttgggccagtccactccccactgacacacccacgatccaagccttgaaaatgagattccttagccctggatttccttctaacacactgttatccaatctgggtatctttcccggcttccctgacctgctttagatttttaagatttgtgtttttctttttccccaccaggaataaatgagagggaatcgacctgtta

SEQ ID NO: 670205 - DNA, 826 bp, Homo sapiens
acactactagtatcatattacttgtacaagcgatctatccgagactgcgacaacagactggatacactactacggatgatcacacatggtcaagcatcataacattatctaccctcagctggcaaacctgccctgtcccaccgcttctcactgaccgcttaaaccgtatgctcacagaagctaccattaagccatgacaaagcctctttaccaccacgagctgcgctcagctggatggctctatcaccctactactactataccagatactaaccattcgacacaccacgaacttaatacccgtgcatactgcaccaaagtgtcccataaacaactacaaagagaaagtgctatataagcactagcgcatcctagacgatcactcattgtgcaacaaggccaacacacgttcctatctaaagaaaaaacaggtaccgatatcacaacgagtagctacgctgcaccatccatatccctggaataaagattacgataactactctacaatcatcacacaaaaaaactaaaccccacgcactaagcggccaaccacgtcaaaccataagaaagattgaacacgacacgctacccacataagcatcctagaatcaagaaacaacaccccaccattcaatcacccaacacacaagataatactagtactgggcaatacaccattgcaccgcatgataagccataaccatataggcccataacctatcaaatacaagtaaccaacaagaagacgcttagacgtacaaatacgcacaactacacagtattccacgaagaaaacctacaggcacaaactaacctccaagtatgg

SEQ ID NO: 670206 - DNA, 273 bp, Homo sapiens
gatagctcggtccactctgggcgagctgcactcagaggcgagctgccttcctgaaaaacttctgctcattcgagacgagcctggccaacatggtgaaaccccatctactaaaaatacaaaaaactagtcaggcatggtggcacatgcctgtaatcccagctactcacaaggctgaggcaggaggatcgcttgaacctgggagttgaaggttgcagtgagctgagatagtgccgttgcaccccaccctgggcaacaagagcaaaagtctgtctc

SEQ ID NO: 670207 - DNA, 130 bp, Homo sapiens
  misc_feature (45)..(45): n is a, c, g, or t
ggatcccggaaggctgagatagaggcaggcgatgtcacttttaanccaatgcatggcatgatgtgctgcaatgagccgagatctgtaccactgcactccatgcctggtaacatgagtgagactctgtctc

SEQ ID NO: 670208 - DNA, 1322 bp, Homo sapiens
ggacgcgtgggtcgacccacgcgtccggcaacgttgaaatgcttaaacaggctgtgaaggatcataatgtaggttcacctcctaaatccccaacacatgcctctccccagcacacacaaacagagaaggactacccatctgaaagggacatgcagaacaccttcagatattatctcaacaatcaacagctaagctaatgtctagattctgattgtggtctagacatcgcagatacacaatatataccaggtctcatacagcggaacactgtcagtactacacacccaaaagcatgattcagctgcaatacaaaaatccctatatcttccacaagaaatgtaagctgactatatagcacttacacagacatatcactatccagaatggaaaggatcaccacattccagtcgtcccaaacgtcctatagcctagctgaaactgcacataccacacacgttacctgctgcgaattgacacacagaacagacaaattcctacatggcgattcaacacacacaaacattactaggcactatggggcatcatcacaccacaccacacgacgctctacaacaccacagatcacacacatgagacacatgtgactacaacgccctcgcacactctgcgcacacaacgtatatccagaaacactccatgcaccgaaagccatcgcactcagaactcgcataccgtacctaaaccacgggcggtcaaccagacgtaaacgagtaatggccacactccgctaacccaacccctgcaccactcccttgccatggtaacataccacggacatccgacgcaaccgatacacccgcactccccaatatcaaaaagcccacctagcaaaaccgcatacgaccaacacaaacataaccaagcggcaagccaggaaccaaacaaaagccgacaacacacacacaccgaaaccaccaacaacacatatagacacgaaacaaatatgacaaccgaccccgaacaactaatcaacacgaccgcacatccaaacactccccgaccataccacaccgaaaccacggagagagaacaacacagaaccagagcagaaacacaccaacccaacaaccaacaaccatccactgacacaaaaaatatcaacaacacagattcaccaacttgacgccaaacaccacatcacccagcacaaaacaacactatacaacaacacaatgccacgccatacagtatcatcaactaatacctacaccaacaacaaataaccataaacatactactacatctcacccaaaataaacagaatacacctcaaacaaacaataacacaaagatactaccta

SEQ ID NO: 670209 - DNA, 418 bp, Homo sapiens
gagtgacttcacactactgaacattgtctatgacactggatcccgggaaagcccttggactgacagtggcctcccctctgctcattgacagacggtggccccacctctgctcattgacagacactggccccgcctctgctcatatgacagacagtggcctcccctctgctcattgatagacactggccccacctccagtcattagacagacacgtggtcccgcctcttttcattggcagacactgagcccgcctctgctcattggcagacactagaccccgcctttgcccatagacagacagtaggactcccctccgctcattgacagacagtggcctcgcctctgctcattgacagacagtgtccccatctctgctcattgacagacactggccccgcctctgctcatagactgacc

SEQ ID NO: 670210 - DNA, 407 bp, Homo sapiens
ttaaagcacagcaaaatacatgggcaatttcagagaggatctattttttcttgtttaatgctgaatgaagaattattccacccacctctcagcagtagtgactgaccaaataagagggtgttacggtttggatatagtttggcctcaccaagttgtaggtcgaaatttgattcccagtgttggaggtggggcctagtgagaggtgttttggtcatgggagtggatccctcatgaatggcttggtggtgtttttgcagtaaagaatgaattatttatctactagttcccatgagagtgcccctgagagttggttgttaaaaagagcctggcaccttccctgtgctcattttgtttgtttttgtttttgagatggaatttcactcttgtcactcaggctggagtgcaat

SEQ ID NO: 670211 - DNA, 507 bp, Homo sapiens
  misc_feature (24)..(24): n is a, c, g, or t
  misc_feature (26)..(26): n is a, c, g, or t
ctccagcctggggtgacgagtagncnaggactgcgtcttctaaaaaaaagaagaaaaatacaaacgatgctcagtctatggctattttgtacttaaattaaactacaacatgacgacactacggatcagctatcagggtctctcttcagttaagttcagctgaacccttttcctgtttagaatattttctaaaagtataaaaaaacttaataaaagaaatggatggctgggcatggtggctcacccctgtaatcccagcactttggtaggctgaggcgggcagatcacctgaggtcaggagttcaagaccagcctggccaacacagtgaaactccatctctactaaaaatacaaaaattagctgggcgtggcgcggccgcctgtaatcccagccacttgggaggctgaggcaggagaatcccttgaacccgggaggcggagattgcaatgagcctattgcgcaactgcactgtagcctgggcgacaagaagggaatccgtccctccc

SEQ ID NO: 670212 - DNA, 349 bp, Homo sapiens
gtgcaagaagcaggcaaggggaagtgcagtctggagacctaagcgcgtggcagagcctggaagcgggagcgtggagggccgggtccaggagcctttgggcgagctctctgggctgcaccactgcccagagggttctgaccattttcagtctttgtcactcacctagggacttggagtccagtgtgagaacagctggctggccgtgcagtgtccggctcccctgcctgggctgagggcgtctccagtcctgcaggctgcgtcccaagaggaaggttcctgccgttggagcagaagggggctgttccagagtaggggcccaggtgctgggtgtgaggaacaatggtgtgtg

SEQ ID NO: 670213 - DNA, 782 bp, Homo sapiens
ctacattgaacagacacggtagaagactcgcccattgttggaatgtgaccgtctgtccttcaggagaggacaccagtgctgggggtgaaggagacactactgcccccacccctgagagccccgcatcgccatggcttccatcttcctgcatcaggctaggcgagtccgtgagaccctccatgttcatgagttatgatcgagaatcatgtgtttcaacaacatacgtaacaaatgaatagaaagaggaacataaaacaaacagaccgccaaaaggaagcatgagcaaaagatggtaacgcaagactgaggcatcctgaagaagacacattccctcaggacgccaactcatgataatttataacgactgattcacaagctgcgaaatccaaagacctatacatacctagcgtggaaaccacttgaactcaggaacaagatagcctccgagaaatggggaacacaaacattacaatgctcatatctgcgctaaccaacagaagacgttgtgagaaggcgtgcactgcacacagacatgcatggcgccaggacgagtacattaaatgtccagacccattccagcaatagactaccaaatggaccgatgcgagtaaatttccaacaccacacccacgttcattataccagcggctacaggaagtacacattggccaccattagcagaacatttatggtccaagcgcattcagttgaggatgtgcggcaccgagaaaacatggttgccacgtaaaagccacccagcgtatgtacagtggaggcaacat

SEQ ID NO: 670214 - DNA, 448 bp, Homo sapiens
cctaagatcctttctgctaccacagcatctgtctacgcatggtcactgaatagttaagccagttgagactactgtaagaaaaggttctttcaaaacattactgttcattgacaacgcaccttgtcacccgagagctctgatggagatgcacaggtagttaatgttgttttcatgccttctaacacagacatgaaacattcattctgcagcccatggatcaagaagtaaatttgactttcaagtgtgcttatttgagaaatacattttgtgaggctataggtgccatagatagtgattcctctgatggatctgggtaaagtaaattgaaaacctcctggaaaggattcaccatcctagatgccattatgaacattcatgattcatgggaggaggtcaaaatatcacaacaggagtttggaagaagctgattccaactctcatggatgac

SEQ ID NO: 670215 - DNA, 904 bp, Homo sapiens
gtgctggcggcggctgctttggcggcggttggtggccgtgcgggcggggagggagggggaggagagaagaggaggtggagaaggcttgggctcgtcgccgtctgacagtcggcttacccgctgggccgtctcctgacaagcgggagggatccgcggtggacccagggaagcggaggagcctggcggccaccccctcttcctcacttccctgtactctcatcgtctctcgtgcctccgatgcacgaagaaggaacgtcaatagtgacgctgatggaacgatctgtttgaaagctttccaagatgagatgggattctcctaagctatggtaacgatgatggcccagaagcaggaggagcgtgtggctgagcctccaagctaactttatcacccctcatgctctacggtttgaggaactactggccaacctactactatgaacatacatcagatagcgaaggaactatttgaacagctgaagatcaagaaaccttcagccatgacagcactaaggatggtagagacaggttaaatcctccagtgtaagcgtagagttcatcagatccctgattctggagccctagcacaaagtgaagagactccagcagcatgcatgcagcagcatgttcagctcttgactacaaatccacctttcttgccatcctgcaaacccaatctcaatccggaggccagtatgcaccaggatatgtcttaagagagctgggaaccgtttgctcaaagctccgatcgcccttcgacatcagtacaacccgaatgtttcagacccttgttccaaccctgtaacttgatgggagctattgcagctgattgtagacttcagcacacattgtcaggcattgactgcgagcctcataaaatgtcaggaagactgccatgaatttcccg

SEQ ID NO: 670216 - DNA, 400 bp, Homo sapiens
  misc_feature (39)..(39): n is a, c, g, or t
  misc_feature (110)..(110): n is a, c, g, or t
  misc_feature (121)..(121): n is a, c, g, or t
  misc_feature (151)..(151): n is a, c, g, or t
gttagggagaggaagggatgatcacttgatacctattanctaaagttctgctaaagatgattaaagttcaggcatccttatctagcgggggggcagagaaaccccaaatnacttgggcaancagttccaaaatgactctcttatttaattngtggagggggaaagaggactcacaggtagccagctgaccatgactgaggtgccagctgtactttttataaacttgaatgataaagaatagggggggggggtactactgggcattagggcaatataacagcgataataaaattctctattaggctgggaatgtatgacatgatgctcggagtgggaaaaagatcattggggaggggggcgaaataatagggcttagccatgggattaaatatgtgggggg

SEQ ID NO: 670217 - DNA, 125 bp, Homo sapiens
atatctaattttaaactagggtttgttttccttcagacaaacttacatttctgctattttatctatctattccttttatttatactcaacatttgcttgaaattgtaagttagtgatgccgctcc

SEQ ID NO: 670218 - DNA, 429 bp, Homo sapiens
acccctaaaaagctttatttggtgctcgattatgtcaacgggggaaagctctttttccacctgcaacgggagcgccggttcctggagccccgggccaggttttacgctgttgaggtggccagggccattggctacctgcactccctcaacatcatttacaggtgaggcctgcctgtgggtcaaagccaggaccaagccctttttgctccaacagctaggggttggggggaccctaaatcctgatgaaatcctgggggacttggtcctttgttttgggggggggtggagtttcctcctccgagggccaagggcccagcctttttggggtttccttttgcatttttggcaacccccatgaatagttttcctgccagggcccccccccgcccaggtttccaactttccccaataaatgggtgagacccccca

SEQ ID NO: 670219 - DNA, 162 bp, Homo sapiens
gaagctttttagtttatttaggtcccatttatttatttttgtttttgttgcatttgcttttgggttcttggtcatgaattctttgcctaagccaatgtctagaagagtttttctggtgttatcttctagaattctcatggtttcagatcttaggtttaagtc

SEQ ID NO: 670220 - DNA, 874 bp, Homo sapiens
aggcggtttgccccccctttggggccgaagggtcgtgttgtgtggggcgccgcgattgttgggggctcccttgtgtgcgccgcggtggttatggtcccttgtgtggccgggagccttcctgcgcgggttttggggagcgggcggccgcgcatttcagttggtctggcccctctgggaaccctgatgcagcgggcgaggggcttgtggaagcacgctgtggtttagggcgactgccctgttgggactcccgtcctcttgcagcagggcgctcttcgagggggtcctctccttgggaggtggattccactcatagggccatccactatggggtgccccgcatctccccctctgtcttgctgttaataccccccccaaaagaaaagtgatcactcctttctttccaccctagtaaaatatttctgtaccccctcacttttgttatgccccaccgctcattccccacaatagctcccaagaaattggcacactcctcctgcacctccttctgaaaatgagatctacaacaacactatatgtcgtaccactattcgctatatatctattgggtacctctaatacccagggcgctcgtataaaataaataggaggaggcagtaccactcacttgtccccccaccaccggggtcgagtcattgaggggcccgctattgcttcagagttaaccagtccctcgcgcccaccgacagcacgaacctgcacgacagtgccactgaatgtatgggggcgatcagctacaaagaaacccccatgttgaggcgcccccagggttattactggataggaaagaggtttgccccacgagggcggaagaaataaattgtaagaggatccagaggaaagcgccccacaaaac

SEQ ID NO: 670221 - DNA, 138 bp, Homo sapiens
ctgtggctccgcctgtgctcccgtgctagctttcgcaggctgtggcatgtggatcatgaggtcaggagatcgagaccatcctgctcaacacggtgaattgcccgtctctgctacaactttgacaaaattcgcctgggg

SEQ ID NO: 670222 - DNA, 332 bp, Homo sapiens
agctcactgttgacggttgggggacaaattttgtgtgtttgctgataattgcgtttctcaggccttctttctgtttgtgatctgtgcaatattttcctcctgctcctccccatggcctcctgccccacagtgtggataaaaaggggaattaccactatctagtaaaatggagggacttaccatatgaccagtccacgtgggaggaagatgaaatgaatatccctgaatacgaagaacataagcaaagctactggagacaccggtgagggaatgagcttgtggattcaagggattctgacgatgagggcatgaaagccaaaactccacgcatc

SEQ ID NO: 670223 - DNA, 464 bp, Homo sapiens
agctcggccccatgaactttgtcacagagcccagcagagtttgatgaagtgcacatgtctggcccactgctgccactgctagcatctgagcaagtcacctgaaggcccaataattggccctccaagacccactaacgctgttgtcagtttaagccactctgtgggccctagcacaggcttattcaacccaccgctgccatcactagggcctgaagactggcccacctagcatcttagttcccagccaaacttcaccacagcctccactaataagtgcaccttaagtcaatgaggaagtcacagataccactgatgttgtatactgccaaataaatcatacaggcatcacactactataggcactcaaaatcaaagccaaagcaccctactcaacaaacaacacgtaaaatcttcaggaaaaaaatcctcccctatgaaagcaatttcaaaaatggaagaagtga

SEQ ID NO: 670224 - DNA, 174 bp, Homo sapiens
actctagggaaacactgacgaatggtcagagctcctatcctgatctttcatcaggcgcctttcctaatatatggtcaactgtgatgtagaggtggggggaggggggagaaaaggaacctctgcgtagaggattagaaaattagtacaatgttcaatacgagctcaaacaaaatt

SEQ ID NO: 670225 - DNA, 339 bp, Homo sapiens
acggtagattacagaccttttaaaatagcatcatgttacaatgaaatacatgagggctgggtgcagtggcttacgcctgtaatcccagtgctttgagaggccgaggcaggcagatcacctgaggtcaggagtttgagaccagcgtggccaacatggtgaaaccccgtctctactaaaaatacaaaaaaaaattagccaagcatggtggtgcatgcctgtaatcccagctactcaggaggctaaggcaggagaatcacttgaatccagaaggctgaggttgcggtgagctgagattgtgccattgcactccagtctgggcaacaagagtgaaactgtctc

SEQ ID NO: 670226 - DNA, 713 bp, Homo sapiens
tggatacagaactgtctagctacttagacagccctaacaaatctggacttctcttttggttgttgctctttgagactggagctttggctctttcgcccaagctggagctgaagctggcgcgacccttggcttcactgcaacagtccacccccaggttcgagcgacttctccttcctcaggctacttgggaagctgacggcaggcagaatcactggaacctgggaggtggaggttgcagtggagccgaagatcacgccattgcacgtccagccctgggccaaccaaaaggagctgacaacttccgttcgtcaaaagacaacaacggtgcagctatctgcggaagtgcttgttgcgacagtgcttctccctccagcgctccactctattctcccgagagccccgtgggttcccctgcgggggtctcggacaggctcaattagtgcgcatacacagtgtcggacaattctccgcaaacacgtctacaatgactcgggaccttccgggcggatattcctatagtcgcgcacaacccgcttacagaggcgtgaattaccacgcgccacggcatacgatcgcaagcgcctgtgttgcgaaaccgtgtgcctaaccaatgcgagaacaactttccacccaaggaatggttcgttgcaaaccgtgttcgtcgataccataggccgcaacacccgttggtccacaagcttccttatacctcc

SEQ ID NO: 670227 - DNA, 699 bp, Homo sapiens
ggtcacatcctgtgaagaagaacgaagggagcatgtagctatacatatgaagaacgatggacgatggagatggagcaggtgtttgagatgaaggtcaagagaaaagagttcaaaatactgaatggatctctgaagactgagagtccagaggcgccatgagcaaatgacgaaagaattgggaaggacagcacaatagtaatcggaggaaaaacgtcgtcagtctccgaggcatgacgaaatgcgacaactggttgaagctcaacaatgtattttagaacaatgagacctcttcaagaactcttggacaagacctcagtaaggtaaagggataccgatcttggaaattctctaatgaccagcgagtaaacgtattagttgccagtatgccagcattgtgacaatcagggttcgttgggatccgttggaccgattggcatcagttgaatccataatgatggcatttaccaagcatgtacacaaaattattccctcattaagggcgtagatggagtattacagatgtccttgattggttctagggatgtgcggagttgaaaggtatgagctctaagtacgttacctaattctctgtttacttacacggatatcttcaggtgaatgcatgagagctttcagtgtggtacaatcatggtctgggggatgacgttcaggattctcacatataacggttctgtgtat

SEQ ID NO: 670228 - DNA, 2454 bp, Homo sapiens
gcttaagcaggaggggccggaaacgaagaaggaagcaccgagcaaaaaaggagaagaagacaaagcggcggaaaaagggggagggagatggggggcaaaagcaagtggaacagaagtcatcagcaactctgcttctgacctggggcctggaggatgtggagcatgtgttctctgaggaggattaccacacgctcaccaactacaaagccttcagccagttcatgaggcccctaattgctaagaagaatcctaagatcccaatgtctaagatgatgaccatccttggggccaaatggagagagttcagtgccaacaaccccttcaaggggtcagcagctgctgtggcggcggcagcggcagcagcagcagcagctgtagctgagcaggtgtcagctgctgtctcgtcggccacccccatagcaccctccggaccccccgcccttccaccaccccctgctgctgatatccagcccccacccatccgaagagccaaaaccaaagagggcaaaggtccaggccataagaggcggagtaagagcccccgagtgcctgatggacgcaagaagcttcggggaaagaaaatggcaccactcaaaataaaactagggcttctgggtggcaagaggaagaaaggaggctcagagcgacgaaggtcctgaaccagaggctgaggaatcagacctggacagtggcagtgtccacagtgcctcaggccggcctgatggccctgtccgcaccaagaaactaaagagaggccggccaggaaggaagaagaagaaggtcctgggctgtcctgcagtggccggggaggaggaggttgatggctacgagacggatcaccaggattactgtgaggtgtgccagcagggtggggaaattattctgtgtgacacctgccctcgtgcctaccacctcgtctgccttgatcctgagcttgaccgggctccagagggcaaatggagctgccctcactgtgagaaggagggggtccagtgggaggccaaggaggaagaagaagaatacgaagaggagggagaggaagaaggggagaaggaggaggaggatgatcacatggagtactgccgcgtatgcaaggacggcggggagctcctgtgctgtgacgcgtgcatctcctcctaccacattcattgtctaaaccctcccctgcctgacattcccaatggtgaatggctgtgtccccgatgcacatgccccgtgctgaagggtcgagtgcagaagatcctacattggcggtggggggagccacctgtagcagtgccagcccctcaacaggcagatggaaatccagatgtcccacccccccgtcctcttcaaggcagatcagagcgagagttctttgtcaagtgggtaggactatcctactggcactgctcctgggccaaggagcttcagctggaaatcttccatttggttatgtatcgaaactaccagcggaagaatgacatggatgagcccccacccctggactatggctccggcgaggatgatgggaagagcgacaagcgtaaagtgaaagacccgcactatgctgagatggaggagaagtactatcgttttggcatcaagccagagtggatgaccgtccaccgcatcatcaaccacagtgtggataaaaaggggaattaccactatctagtaaaatggagggacttaccatatgaccagtccacgtgggaggaagatgaaatgaatatccctgaatacgaagaacataagcaaagctactggagacaccgagaactaattatgggggaagaccctgcccagccccgcaagtataagaagaagaagaaggagctacagggtgatgggcctcccagttctcccactaatgatcctaccgtgaaatatgagactcagccacggtttatcacagccactggaggcaccctgcacatgtatcagttggaagggctgaactggctacgcttctccgggcccaggcactgacaccattctagctgatgagatggggctaggcaagacatacaaaccatcgtcttcctctactcactctacaaggagggccacacaaaaggtcccttcctggtgagtgcccatctctaccatcattaactgggagcgggagttccagatgtgggcacccaaaattctatgctgggatgaccatacaacggggtgacaaggaccagaccggggccatccattcccgtgaagcaatggaaattctccctttggaaggacaacggcatccagaggggggcgcacgaaaagcttacacatgcacaggaacgacacacgaaacgtccacccgacaaccgaccaatcggcatgcaacgcaaccccatgaccaccgacgaggcggatccccccgagggaccgtcgcgccacacagaaggcgccacaccacacaagcgacaacgccagagctcacaggagagccacacacaacggcgacgcacacacaaatgg

SEQ ID NO: 670229 - DNA, 683 bp, Homo sapiens
  misc_feature (683)..(683): n is a, c, g, or t
tctcctgcggtgagcctggtggcactgcatgaagcaagctggatcacacaccagatgaactggacccacccgtgaatattggggcaggggtctagactcttgacgggctggtccaaaccgatgcgctcagatccggacatatgggctcactatgggccgccagggttttcggcagtactcaaaggatctaggtgctattaattcagactaaaagctgttgcttcaaaggattatacgacccatatactcattgaaataccatgataacatttggtatataaaataaacatttgaaaaaaaaaaaaaaaacatgtcggccgcctcatgccagccgcctctagccaggcgaatgtagattcatgcaagcttatgcatgcgtcccgtagtccaagctcacttgtccaatgcgccctataatgagactgatcacaattcaacgaccgcgggtctacaaaaacccgactgggaaaaacctgaagtgacccaacttaaatgccttgtaggacatccgcctttatacagatgaggtaataacgaataggccttcacaagaggcccttcccatgagtggcgaatgcagattggaaacgggaaaatgtaggcaaaaatagtgtgaaaaaattggcaaataagttcatgttgattaccggattgccatgtggacaacatcctgaacaggaccn

SEQ ID NO: 670230 - DNA, 1997 bp, Homo sapiens
tgagctcgtcagattccctttcatccgaagagccaaaaccaaagagggcaaaggtccaggccataagaggcggagtaagagcccccgagtgcctgatggacgcaagaagcttcggggaaagaaaatggcaccactcaaaataaaactagggcttctgggtggcaagaggaagaaaggaggctcagagcgacgaaggtcctgaaccagaggctgaggaatcagacctggacagtggcagtgtccacagtgcctcaggccggcctgatggccctgtccgcaccaagaaactaaagagaggccggccaggaaggaagaagaagaaggtcctgggctgtcctgcagtggccggggaggaggaggttgatggctacgagacggatcaccaggattactgtgaggtgtgccagcagggtggggaaattattctgtgtgacacctgccctcgtgcctaccacctcgtctgccttgatcctgagcttgaccgggctccagagggcaaatggagctgccctcactgtgagaaggagggggtccagtgggaggccaaggaggaagaagaagaatacgaagaggagggagaggaagaaggggagaaggaggaggaggatgatcacatggagtactgccgcgtatgcaaggacggcggggagctcctgtgctgtgacgcgtgcatctcctcctaccacattcattgtctaaaccctcccctgcctgacattcccaatggtgaatggctgtgtccccgatgcacatgccccgtgctgaagggtcgagtgcagaagatcctacattggcggtggggggagccacctgtagcagtgccagcccctcaacaggcagatggaaatccagatgtcccacccccccgtcctcttcaaggcagatcagagcgagagttctttgtcaagtgggtaggactatcctactggcactgctcctgggccaaggagcttcagctggaaatcttccatttggttatgtatcgaaactaccagcggaagaatgacatggatgagcccccacccctggactatggctccggcgaggatgatgggaagagcgacaagcgtaaagtgaaagacccgcactatgctgagatggaggagaagtactatcgttttggcatcaagccagagtggatgaccgtccaccgcatcatcaaccacagtgtggataaaaaggggaattaccactatctagtaaaatggagggacttaccatatgaccagtccacgtgggaggaagatgaaatgaatatccctgaatacgaagaacataagcaaagctactggagacaccgagaactaattatgggggaagaccctgcccagccccgcaagtataagaagaagaagaaggagctacagggtgatgggcctcccagttctcccactaatgatcctaccgtgaaatatgagactcagccacggtttatcacagccactggaggcaccctgcacatgtatcagttggaagggctgaactggctacgcttctccgggcccaggcactgacaccattctagctgatgagatggggctaggcaagacatacaaaccatcgtcttcctctactcactctacaaggagggccacacaaaaggtcccttcctggtgagtgcccatctctaccatcattaactgggagcgggagttccagatgtgggcacccaaaattctatgctgggatgaccatacaacggggtgacaaggaccagaccggggccatccattcccgtgaagcaatggaaattctccctttggaaggacaacggcatccagaggggggcgcacgaaaagcttacacatgcacaggaacgacacacgaaacgtccacccgacaaccgaccaatcggcatgcaacgcaaccccatgaccaccgacgaggcggatccccccgagggaccgtcgcgccacacagaaggcgccacaccacacaagcgacaacgccagagctcacaggagagccacacacaacggcgacgcacacacaaatgg

SEQ ID NO: 670231 - DNA, 101 bp, Homo sapiens
gtcagtcattacccacagctcgttagtacctccttcctctttatctggtgacctttctactgattgcattgtacctctttccctgatgggagcaagatgcg

SEQ ID NO: 670232 - DNA, 2132 bp, Homo sapiens
tgggcaccgctcaaaataaaactagggcttctgggtggcaagaggaagaaaggaggctcgagcgacgaaggtcctgaaccagaggctgaggaatcagacctggacagtggcagtgtccacagtgcctcaggccggcctgatggccctgtccgcacccatccgaagagccaaaaccaaagagggcaaaggtccaggccataagaggcggagtaagagcccccgagtgcctgatggacgcaagaagcttcggggaaagaaaatggcaccactcaaaataaaactagggcttctgggtggcaagaggaagaaaggaggctcagagcgacgaaggtcctgaaccagaggctgaggaatcagacctggacagtggcagtgtccacagtgcctcaggccggcctgatggccctgtccgcaccaagaaactaaagagaggccggccaggaaggaagaagaagaaggtcctgggctgtcctgcagtggccggggaggaggaggttgatggctacgagacggatcaccaggattactgtgaggtgtgccagcagggtggggaaattattctgtgtgacacctgccctcgtgcctaccacctcgtctgccttgatcctgagcttgaccgggctccagagggcaaatggagctgccctcactgtgagaaggagggggtccagtgggaggccaaggaggaagaagaagaatacgaagaggagggagaggaagaaggggagaaggaggaggaggatgatcacatggagtactgccgcgtatgcaaggacggcggggagctcctgtgctgtgacgcgtgcatctcctcctaccacattcattgtctaaaccctcccctgcctgacattcccaatggtgaatggctgtgtccccgatgcacatgccccgtgctgaagggtcgagtgcagaagatcctacattggcggtggggggagccacctgtagcagtgccagcccctcaacaggcagatggaaatccagatgtcccacccccccgtcctcttcaaggcagatcagagcgagagttctttgtcaagtgggtaggactatcctactggcactgctcctgggccaaggagcttcagctggaaatcttccatttggttatgtatcgaaactaccagcggaagaatgacatggatgagcccccacccctggactatggctccggcgaggatgatgggaagagcgacaagcgtaaagtgaaagacccgcactatgctgagatggaggagaagtactatcgttttggcatcaagccagagtggatgaccgtccaccgcatcatcaaccacagtgtggataaaaaggggaattaccactatctagtaaaatggagggacttaccatatgaccagtccacgtgggaggaagatgaaatgaatatccctgaatacgaagaacataagcaaagctactggagacaccgagaactaattatgggggaagaccctgcccagccccgcaagtataagaagaagaagaaggagctacagggtgatgggcctcccagttctcccactaatgatcctaccgtgaaatatgagactcagccacggtttatcacagccactggaggcaccctgcacatgtatcagttggaagggctgaactggctacgcttctccgggcccaggcactgacaccattctagctgatgagatggggctaggcaagacatacaaaccatcgtcttcctctactcactctacaaggagggccacacaaaaggtcccttcctggtgagtgcccatctctaccatcattaactgggagcgggagttccagatgtgggcacccaaaattctatgctgggatgaccatacaacggggtgacaaggaccagaccggggccatccattcccgtgaagcaatggaaattctccctttggaaggacaacggcatccagaggggggcgcacgaaaagcttacacatgcacaggaacgacacacgaaacgtccacccgacaaccgaccaatcggcatgcaacgcaaccccatgaccaccgacgaggcggatccccccgagggaccgtcgcgccacacagaaggcgccacaccacacaagcgacaacgccagagctcacaggagagccacacacaacggcgacgcacacacaaatgg

SEQ ID NO: 670233 - DNA, 889 bp, Homo sapiens
ggagctaaggaaggtggtggagtttcaccatgccagacggtcttcgtttcgtgagacatcgttcgtcgtccagtgggccgatctgatcatctgcaagacccggaggaactcggtcttccaggcagggcatgaagaacaagatcgtgatcttcgggctggttgaggcagccggccctggctgccttcctggtacctactgccccggggatgggacgatggccctggcgcgattgtagcccgtcatcaatgccgcagctggatggattctgtgaccttcgcctacagtttcactcatcttcgtctactgacgacaaatccgcaaagctcattcctgcgtcaggaacccagggcgggttgggatggacgaagggaaaggcatacatacatgatcctcaggacgcacagtcgagaagtcgacccgatcgtcatgtacccccggtgcccccgattaaagggacggcgaggggaagctgcaaccaatagtgagagggacccacaacgcaagataaccgaggtgatacacgtggagaaggcgaaagggaagcaaccctgggatacagaacgtaggaggggccgaccaccccgactctgcaggtggatgctacaccaagacacacaactaagagggggtcgaacagcggacccagtcagaaacaagacacacaaagtaaagaccgtacgacatcggacagagtaacacgcgtaactaagacacgagaacaaacagacaagagacacacacaagacgcagacagcaaagcacaaagcacaaacaaacacacacgacacgcaagcaaaacaacaaagagacaagcaaaccacaagcacaagaacccaaaagcacacaacgcgagcgggggaccgacagagcaaacagcaagcgaacaga

SEQ ID NO: 670234 - DNA, 189 bp, Homo sapiens
  misc_feature (4)..(4): n is a, c, g, or t
  misc_feature (94)..(94): n is a, c, g, or t
  misc_feature (116)..(116): n is a, c, g, or t
  misc_feature (161)..(161): n is a, c, g, or t
  misc_feature (174)..(174): n is a, c, g, or t
cctnagggcagagccctcattgacccaatcacctcttaaaggttccatttctcaatactgccccactgggcattaaatttcaacatgagttttngaggggataaatattcaacccntagtaaactgtaaatgtagatcacaaagctcactttttgattcanctcatcccctggntcagaaggttatatt

SEQ ID NO: 670235 - DNA, 153 bp, Homo sapiens
gaccgcagctctctctgatacggaaggagtggctaccagagcacgaatgatgaaaggtgtaaattctggaacaacgattagaacaaggaatggtattcacagaatatgaaagaattcttaagaggaggcagcagtgaagagggagtgcagcag

SEQ ID NO: 670236 - DNA, 868 bp, Homo sapiens
  misc_feature (868)..(868): n is a, c, g, or t
gcactgaatgatcctggtgtcgtcgcatgggccgcgtcccgccctgttgttaccggtattgtaagaacgaagccgtacccaaagtctcgcttctgccgatggtgtccctgatgccaagattcgcatttttgacctggggcggtaaaaggcaaaagtggatgagtttccgcctttgtggccgacatggatgctcagatgaagtatgagcatgctgtccatctgtaagccctggatgggtgcccgtaatttgtgccaagtaagtacatggtaaacaagttgtgggaaagcatggcttcccgatatccgggtgcggctccaccccttgcacgtcatccgaatcaacaacgatgttgtcctgtgctggggctgacaggctccaaacgaggacattgcgaggatgccctttggaaagcgcccagggacacttgtgaacaggtttcacataggacaaggtgatcatgtccatccagcaccaagctgtagaaccaaggagcatgtgattgaggccctgcagcagtggccgaggttcaagtttcctgggcagccagaagatccacgatctcaatagaagtggggcttcacgcaagttcaatgctgatgacaattctgaaagagcatggctggctgaaaaagacgcgatcaatcccagatgggctgtgagcgtcaaagtacagtcccccagataagtgaggccctcttggaacacaggtggaggggaccattgctctacagtgaagggcatatccaattggtgctagccacacactcgtaaatatgtacacccagataaacttactactataccttgttcaacaaccaagacaagcacagcagacgcctcagaacataaagcaactatcataaagan

SEQ ID NO: 670237 - DNA, 382 bp, Homo sapiens
ggagccccaggcctgttcccctcaaatacctgggattacaggcgcccgccaccacgtttttctaatttttgtatttttaatagagacatgcgtccaccatgttggccaggctggtcttgaactcctgacttcagatgattgcctgacttggtctcccaaagtgctgggattacaggcataagccactgtgcccggcccctccattgccatttgatagccgtagtttgtttacaatttacaggtttgaatgagttcattcaacctgtaatcttgtggagcataccgtgtgccaggcactgagctaggtactggatctgtgaagatgactaaggtatgatttttaccattaaagagctcatgactttgaggggaaaagaccctg

SEQ ID NO: 670238 - DNA, 957 bp, Homo sapiens
ggccgggggagacgcacgcagttgaaattgtttcgtccgcacgatgtaccagaggtctccagagccttctctctcctgtgcaaaatgcaactcttaaggaaaaattcatgtgcaccaggtgtgggaagaagaggcaacaggttccaaacaattaaaggatcacttgtagtgggtgtgtggaccaaggtggggtatggggtggttgataattcaagcatttggtgggaagagtcttcgtggttgatgaactttgtgctctgtgtgggattgttgtggaaagataagggctttaagggggacgacttggattggatcttgcaggcaagtggggacgcttaattttctttacaggaaccttaaaattgtgtggcacgataacgagattaatcctgtggacccggccaatttctaaagatggtccgtgggccacacggcaggaggctccgtaccaccaagaaggggaagcagtccgcctcaactctgtggccacacggacactgggtactgtcctcacaattcataattccctccaagattcgtcacggtacaggtcttgatggcatcatacttgtggtgggttccccaacccaagtgcacatttcttacggtattgttacccttggaccactatggtgcattacccaaaaacaccgcgtgcattgcacaggtggctgtagtcgtggatcctgcaagaataccggtaccttagtgggtggaaaactgtgccattcaatcccaggcagctgccaggatggcattggcgggaacatggcaccccaaggtggggcgggctggcagggcggcaacgtgcaggggtccctcaggatgatcccgacggcactgcatgtatctcacaactgccgccgcgcacaggcggcaagccaaagtcaaccaaagtgaccacggggcgaagagggcgggcaaacagcgaacaccgcctccccaagagggtctcaa

SEQ ID NO: 670239 - DNA, 432 bp, Homo sapiens
ccgtacgcttctgctacgctgagcggagaacaccacacacggagagcatcactttgaggtgagtattgctccccactcaagggctcgccatgcctcaccatccccgtctactctctgatgtgcgtggcttccacgacctccttctccactgggccgctggacccccggctgccttgaattggtctagaatgcacggagaggaaccctacacaccctctgtcagcgccaggggactcagcaccccatcctcagccaggtgcagcaggcctgtgctgatgccaggacccagatcacggacagcacggtagtagcgtatgcagtcaacacgcagcaggctgtcatcctctccaaaaagcaccttggacgattcgggagtgtgaccgtgctggcgggccgcctcgggttggctggcgcgtgacaggggatcctcta

SEQ ID NO: 670240 - DNA, 265 bp, Homo sapiens
  misc_feature (12)..(12): n is a, c, g, or t
tacggaggtggntagtgtctggtcgtatagtctaggtctttaagtccagttagtagtttcttttcgtgtgtggtgttagggagtgtgtaatttcattcttttccatgtggctgtccaggttttcctagcagccacttattgaacaagctgtcctttctccattgtatagtcttgccttcctttgtcatagatgagttggctgtaggtgtgtgggtttaattctgggctttctatcctgttccactgatctatatttctgtctttg

SEQ ID NO: 670241 - DNA, 162 bp, Homo sapiens
atgactcacttggactccatgatctatttctatagaaagactaaacaacgaagtcaagtcctacggagtcgcgaggggtcagagggtttcaccctgataacgtccggcccattttggtcccccgttggggcacgcatccactttcccagtgtatgtgcatgg

SEQ ID NO: 670242 - DNA, 327 bp, Homo sapiens
cgtgatctcccagaagcctgagaccaacgaagacgcgtgtgacgctgccctacggcacaaagagggttctctcctcagccaacagagctgtggttggtgtggtggcaggcaggtggccgaatcgacgatcccttcgtgaagggtggccgggcgatccacaaatataaggcaaagaggaacggctggccacaagatacggggtgtggccataaagtccggtgacgcatcctcttggaggtggcaagcaccagcacatcggcgagccctccatcatccgcagagagttccggtgtcggccgcaaagtgggtgtcagtgctgcccgccgg

SEQ ID NO: 670243 - DNA, 521 bp, Homo sapiens
cgtaacatagcacagcctctacggatctatactactcggatcatccatctccaacctgcctgcagctcctatgcttagccactgagcttcagcgcgtactagagcgctatagctacacgaggacaccacaaggattctctccccaggaaccactggcgctcacctggatcaagttcatagtagaacatgttatgggggaagcgtccgccacacatgcagaagggccagaggccaagagatcaatgagagacctcctggctctactggcagtaatcataagagctcccaaaagtaataaaaactggctctacttttatgaggtagactatcactccaggaggctcacccatatcagggactccaggccgtcctacttccactgagaagccagtcagtcattgcgattccttcccatacgaggatcagttttacaagatcccttctctatcttctgcaaagcttgctccaacctgataatttcacttagtgttctcagacgactagctggagggggccgcgcg

SEQ ID NO: 670244 - DNA, 973 bp, Homo sapiens
  misc_feature (228)..(228): n is a, c, g, or t
aaaaaacatggtgctgtggtttagaaagggatgctgtgttgcaacggttaggtgtagggaaaagaaagacagatcagactgtccctgtgtctatgtagaaagggaagacataagagactccattttgaaaaagacctgtactttaaacaattgcgttgctgagatgtgttaatttgtagcttgccccagccactttgatccaacctggagctcacaaaaacgtgtgtntgtatgaaatcaaggtttaagggatctagggctgtgcaggacgtgctttattaacaaaatgtttacaagcagtatacttggtaaaagtcatcaccattctctagtctcgataaaccagggcacaatgcactgtggaaagccacagggacctctgcccttgaaagcagggtattgtccaaggtttctccccatgtgatagtctgaaatatggcctcgtgggatgagaaagacctgactgtcccccaaactgacacccgtaaagggtctgtgctgaggtggattagtaaaagaggaaagcctcttgcagttgagttagaggaaggcactgtctcctgcctgccctggaaactgaatgtcttggtattaaaaccgattgtacattcagttctgagctaggagaaaaccgcctatggtgggaggtgacgacatgttgcagtaatgctgtctgttattcttttactccactgagcatgttgggtggcgcagaaccattacatctggcttacgtgcaccgtccaatcatagtaccttcctgacttattatagaataatgcttcgcacgtttgtgttgacttctcttaccgtgctctacaactccttcgcgaatatgatctaaaacaggggaaacagcggggggagagcatgggacgggccccgccggttcacacagaacaaacaaaaaaaaacacaacaaacaaggggcactgcgaaacttgaaaacaacaagagtatgtatatccttcac

SEQ ID NO: 670245 - DNA, 223 bp, Homo sapiens
gtccctcacaagaccctggaactcttttaagaagaagcgctcagcctctaatcccaacaccttgggaggccgaggcaggtggatcacgaggtcaggagttcaaggccaacctggccaagatggtgaaaccctgtgtctactaaaaatacaaaaaatttagctgggcgcagtggcggatacctgtagtcccagctactggggatgctgaggcagaagcaggaag

SEQ ID NO: 670246 - DNA, 1053 bp, Homo sapiens
  misc_feature (601)..(601): n is a, c, g, or t
ctaacatggaagaccgcagaatcttagggaatggggttctagaggtgatgcagtgcatatggctcacgaacgagaaaggagtgggtgacaaatgtgtcatgcctggagacaagctccagtcgccagcactctgcgtagagactcgcgtacatgcgcacatgccagacgggctctgggtatcgaggacacgcgttcgaataactttgttaaaggagataccgtaaggacctgctgaagaatgttctcgtgccgcatacatgtggcgatctgaccgcaggggacctatccccagaagtaagaatgctgacgtacatgaagccgagagccttgtggtcctaggggaccacatcaatcacctttctgcaatgcattaactgccaagcctggtgaatatcatatacacatggcagaaagatgctctggctggttcatcatcacctctttactctggagctgtgaagcaaagctagtcttctgccgttagatttacaagtacactcacagagtcagcacatgcgctgggcacaataggttctctagcgtagagggctgcacaggacattcgcagccactgagacaaccagcttggacgggtagacanttcttgacgacactcggtattgcgctcgagtagtaggtacctatgactggatcgactcaggcgaccgactacgatctagtcccaaaagactacttgtctcactgcgaattgcgaggtggcttgtcaccaaggcaaaacaattctagaccggggcattgaatgcgatgcagtgccttgtcacaaatcatttgctaagagcccctgaggtgcaagggggaggaccccccttgacctgtgggcatgccagatgaatccccaaggacccatgttcattgaaaagatttcttttaacgggaagccttatcttcaagaggaccaaaaactcaaggaggacagaggagtaacgggagagcctcaagaaaactccggaagaactgaacccgtatggaagaccagctggggacaaaggggccggttgtccctggctctcagagcacgggtgatggagacca

SEQ ID NO: 670247 - DNA, 313 bp, Homo sapiens
gagcaagactctgtctcaaaaaaatataaataaaaaaataaaataaaattgctgaatgtagtgggttgcagctgtagtctcagttactcaggaggctgtggtgggagaatcatttgagccaggagttcaaggctgcaacgagatatgatcatacaactacacgctagcctgtctgacaaagcaaaagcctgtctttaaaaaaaaaaaaaaggagcttttagaactaataaattagtagggtcagaggacataagatctttagacacaggactaccagcaccaactgaaactaaaaatttttttttttttgaaa

SEQ ID NO: 670248 - DNA, 647 bp, Homo sapiens
tcagccgcccctttgccactgagagccccgggatgtcctcaccggatactttccatagtgaccggtggccacttggctaatagaatatcggctgatattgtccactaatccttttgtaccctgcacctggcgttgtctaattaaactcggacccctttcttgtgaaatcacggtaaataagacttgtctcggtcaccctgtgcccctcgtccacgactcgaggcccgctggtaaccctgcacccgtgctatgtggcttctctttgaggatttttgggttttgtaactaaattcttgctgccctcatactttttatgtattagaatcatattcgtattgcccttttaaaacccttgggaatcctcccaaggcctgccccactgtatttacccgtaatacacggaagcactggcacggcacccactgccaaccccaggatggactggtcccgtccccgtgtccgtggccggtggtttcctgcctggcctggaatcactcatcaccctgattgattggctctgctggtcctgggccgcgtgcctcataggtgtgtggatatgatgacctttctttaaaatgtatgtactttaaccaatacttaattgtattaaggtcatgtacccaggatttgataaagtttaaataatt

SEQ ID NO: 670249 - DNA, 400 bp, Homo sapiens
aactctactcccaggttcaagtgattctccggccgcagagtcccgagtagctgggattgcaggcacctgccaccatgcctggctaattttctggtatttttagtagagatggggtctcaccgatgttggccaggcgtggtctcaaactccatggcctcacgactccaccatgcctcgagcctcccaaatgtgctggtgattacagtgcatgagccaccagtgcccgtgtcacgtagcagcgttttgcaaatgcttatgtccatctacttgactcccgatagtaccgacaactgacgatggtttccatgtggcgtttgccttgatcaccgcaggacaaagctagacgggtctaccctatttaaatacagctgtggtacagtatagacaaggtagagccgag

SEQ ID NO: 670250 - DNA, 190 bp, Homo sapiens
  misc_feature (90)..(90): n is a, c, g, or t
ttttcctctttcgttgttcgcctaaggctgctgctgtagttatcgtcgaagagctcttatgcgtgcatcaatccgctcagtctgattggnccagtcattgtgtgggctctcgtctggtcgcccccccttttggttcccgagcatgctgtttttctctcagccttctctccaaccttaaccaaatcggcag

SEQ ID NO: 670251 - DNA, 631 bp, Homo sapiens
ggagagagagagagagagaactccgcgagcgagtcgtctgacacggagctgccagagaaggagcgcggcggggaacccaaggggcccgaggacagtggtgcgggaggcacgggctgcggcggctgcagacgacccagccaagaagaagaagcagctggcggcaacgtacgcacttcacaagccagcagttgcaagagctacgggcccgtcagaggacgtacccgatgacatgagggaggagatcgcgtgtggaccaactcaccgagccgcgcgtgcgggtctggttcagaaccgggagccaagtggcgtaagcgcgagcgtaaccagcagctggacctgtgcaagggtggctacgtgccgcagttcagcggctatgcagcctacgagacgtgtacgccgcggtactcctacaaaatgggccgcagagcctggcgccagcgccgtctcacaagagcttacttttcaatccatgaccgctgtgtgcagtccatgtctagacccagtcattctcatgacatgcgtcagatgggccagggcgtgctggatgccactcgggctcaaaaatcaaaactcacggtctcgtcatcggctgtgcggggttgccgtacggatccgctgcctacaggttacg

SEQ ID NO: 670252 - DNA, 1324 bp, Homo sapiens
ttttttttttttggggaacccgggttttattttattagaaaggaaacaaccaagcaccccagtgtctctgtgccgcggaattccgcggggggaaactgtgccaaacagcgcggggaatgcgcacccagcccactgtgtcgtggggaggtcctcttctctttctcgaggccacagaaatataaaccggtggtcacttcttttattgtgtgtcacgccacaacatatatcacccagagaaaaaaggtataaacgtgcacgagcccaagagccgaggaacgatgacacgatgttaatgtgatgtcattctccaactatctctccaaaacacctcgagggggacgcccctttattaaaccctttagagaggagggagagcccttttgtgtgcttacccaccaaaagagcccaatctatctcacacagagacccgagggggctatttgtattgtttatgccacacacagagacatattacatatatagcgggggaaaagagggggataccccttatagaaatttatcatgtgttctcactttaaccgcgcctcttcaacagggagaaacagaaaaccccctgtggagaaacccccgtgggtgtgtggctcataagcacatctctatctcgcccacagactatatttgtgttcacaccccctgtgtgtgttgtgggagaacagacatactgtgggggggcggcaacgcccccaagagaaaaaaaggtctctctctcacaaagagggggggctcttgtaacagcagagcgggggagcacacaagatatgtgggcgctcttgacaggggggggaaacgtcttgttgggcagttataccagtgttcgtcggcacacgtttgaggagaacaaagcaggggagaaaagtctctctttcacaagagtccccagtgttggccgctctcgcctactaaaattctctagagatatcacgcaacagaaggcgaagcgcgtatctactaagaagtatatcccctctgcgagaggggggggcccccacagagttttttcaccgggcttttacccccacgggtctctttttttgtggtccccacagggtggtgtgcccctaataaggggggaacagtcgcgattattatataaaacggctaatgagacactggtggcccgggtctcgttttatcacaaccgtgtcggtagatcgtgggcacaacaatcttgtgtgaacctttggggggactccctttggtggcagaaagggcactttatacttttctgggtggggtgttggaacatttatcttgggcacacaattcaccttacagcgaagatttaaaaggcgtttcaaggggg

SEQ ID NO: 670253 - DNA, 811 bp, Homo sapiens
tgcgatggctcaagcctgtaatcccagcactttgggaggccgaggcaggtggatcacctgaagtcgggagttcgagaccagcctgatcaacatggagaaaccctgtctctactaaaattacaaaaaatcagccaggcgtggtggcatgtgcctgtaatcccaggtacttgggaggctgaggcaggagaattgcttgaacctgggaggcagaggttgcagtgagctgagattgcaccattgcactccagcctgagtaacaagagtgaaactccatctcaaaaaaaaaaaaaaaaaaaggggccacgggacaagtatacagccttttataaaaggccccagaagaaacacccttctcgataccttgaccttgggactttctagcctccagaaggttgtgacgggaaataaatctcgtgtggttaaagccactttggagccttgggcaacttggggttagggcagcccccaaaacttaatactttaaacaattctcatctcgggtccatacttacatcttttcgtgcccaccttctttaacacttgggtatccctcaggagctctacaggggcccctccttttcgcccggtgaccataacgtcctccccgggggactaacgacaggcgggctctacaattaacggacttgggaatttcacgaagtggcttcagccctaccaatcttaaacaagcgtggccgtttaagtttcccccaaattctacatttcgaacttctcccttgcgcgggtcattacacacaagcacacctacgcacacgccgaccaactacttttcggcgcgcagcgagaccag

SEQ ID NO: 670254 - DNA, 503 bp, Homo sapiens
catcaggtttcatctacgtcctcgtgctcaactagtatgcagctaatatatcttccatcaggacgatgaagcgctgatttgtcatagtgatttccttgcatgcgccgtggtttgccgcccttcaaacatgtagataccatactggaatgcagcctggggcaaagcttctttgttgttcatatactcgcgtgatattcttcactggcgctatcaaagtcccagagcgggctacagggccccttcttgtgaccctggtccattttgctatgatccatcgtcctcatcacgtatccaaaggcaagtcatccatcgtggctgggtagcacgctgcataactgttggacatgccaaagaaatctcccagctgctttttgtcttctggcttcttcagcgattctgtgccttcccagccagcagacccagcaaacttttcattgatggacttgatcaactccttggtagacccaggtcctttgtcaacgtccatgggctcatcatctact

SEQ ID NO: 670255 - DNA, 153 bp, Homo sapiens
taaaaaaagacccagaaagaaattgtcaaaaaccaataaatgaaatcccccaactccccagaaacaaagcatacatcattattttggccgggactacacccccgaccaataaaatgaaaacccatcgttgtatttcaactccaagccccccca

SEQ ID NO: 670256 - DNA, 1326 bp, Homo sapiens
  misc_feature (375)..(375): n is a, c, g, or t
  misc_feature (466)..(466): n is a, c, g, or t
  misc_feature (496)..(496): n is a, c, g, or t
tattctaagggggaaggccccttttaataaaactgggtacattttaactttctcctttcttttcagaaatgtgcttaattaaaaaaactttgtgtggttatatacttataaaaaaccattaaatctcagcacaaacaaagagaaagcgattccaacactcactctcgtggtgagtgagaaaaaggaggcaagtggcaattctcaacattagagccaagagaaaaacttcttacgcgtgggaggaacagagaaaattcggactcaggcggaggcaaaacaaccgcgggggcgtggcgtgccgagacactgggcgagggccagggcggagggagggagccctcctataagaaggattttcccaagagccacacaccncaattccgcgtggccgagaaccgaggagaagcccagcccgcggtctcttacactctccgcgagagagaaaaagcgagaaaccctttagagngccctatagatgtggaatccactttcaaanatctcgcggagtctacaaactcgcctttctattttttctacaaaaaaagaggcctcaccacattatgctcctccccttccctttcccacagttccctcgtgtggcggaccggcgggcgggcgccccggggacccattttgtgtttgttctcctttcaccccaagcgtggcccccgtggttcatcctcgcgagaagcctccaagaagggggtgccgcccggggcagcggtctcccttgggttccccctccgggtggcgcacccccggggactcaggggtttcagaacccctgtggggggtgtctcccccaatgaacacacatggcgtatcaaccccatattcaccggaaaaaaggcccccctggcataaaaaaaacacacccacactttttggatcccccaaggggggcagggggggaaggaaatccccccgtggaggaggcagaaaaacacggggagacacaagtagggggggcccccccaaagaggggcgacacgcggtcatataggccccggaggcgccccacaaagaaccaaacttgcgcgcaagattccccgacggaaaagaccccgggggaaagatgtacagaaacgcacagacggtaggggggagcactactacaaaaaacaaacaccgacagcggggcaaaaaaccccacttcgagcccgtacaacaaaacaccaactacaggaggcagcacgcccgacttacatggcatgacgaaacccgaatatataagatgtcaacacaacacacaagacaagcaaccacactagacactgcccacagaaggatcccaccacaagcactctagcaccccgcggacgacag

SEQ ID NO: 670257 - DNA, 199 bp, Homo sapiens
  misc_feature (12)..(12): n is a, c, g, or t
attcgcggccgnggtcgaagcatagtgtcacgcacctgtgatcccagctacttaggaggttgaggctgggaggatcacttgagcccaggagtctgaggctttagtgatctaagatcatgccactgcactccagcctgggcaacagagtgagaccctgtttctaaaaaaaaataaagttagctaaattatctgtcgacgc

SEQ ID NO: 670258 - DNA, 309 bp, Homo sapiens
agggggggggggggggggggggggggggttttttttacccgggtttttttttttcccccccctttccccggggggcccccccccccttttttttccccccttttaagccccggggggggcccccccccccggttttttttttgggggggggggggggtattttttttccccgggggcccctttttccccttgggccctttttggggcccccttaaaaccattttttttccaaaaagggggggggggcggggcgggttttcccggggtttttttcccccccggggcggttttttttttttttccccccca

SEQ ID NO: 670259 - DNA, 1129 bp, Homo sapiens
atcagttgtgtcctccgcctttatttagtttattcgacttattgtgtttccgcaggctctaactgaatttttgggcaaccttttggccacgaataagagagcaactaaggcgaaaatactcaaagtcgccagcgatgttatgtttccagctgcaaaatacctttgcagtgggcccaaaaattcgttatacggcacttggaattgcgggcacgtggtttgaggagtggcctcgtgggttatattccctttcttcagcaaacggggacaagaggcttcgggacgtgtatttgctgtggctgaattattgtgtacattcttctccttgcctcaagaaaattaaaagccggtgctctccaattacctcccagttcgcgttagccagtgtgagatctccagaacttccaaacgtgtctcagtgcgggcaattatctcagcttttcgctttatagctttctccgcccacagacttcccaaagcggcatagagtcgcgtgacagacggtacaattcggccgaaagaagaaagaaagataaaccgagttccccggttagtgtggccacccgaaggaaggcttgtgaatctcagggtgcctcgacaagttgtgctcgctcggaaaagcctcttgtgcaccggctttggctctaagtgtgctcatttgaaagaaagctctaggaattctcgctcatcgtgtgactctcgccatgtggatatagaacagtgggtatccctcgccttgaagaaacaccaaagcgggcctcctttgctggggctcatagattggattcccaggttgttgtccaccgacgtggaccacatttggccgacaaggtctcctccagttgggcacgtttctgggtccccatgtcctcattatcccacgcagtgttggccatggtttggtggaatgggacaaccactttgctgtgccggtcaggaagtggcatccaatcggtgtcgtccacacgccgaaaaatcctgggccaaggtgcacagccccaagaccagggctataaaaaccacgcgatactatggtgcagcaatttgggctgggaatctgagacgggagttgacccgtgcgaattcggccgaatcccgcaaagtgcgatattcgatgcggtccctatggacg

SEQ ID NO: 670260 - DNA, 1495 bp, Homo sapiens
  misc_feature (13)..(13): n is a, c, g, or t
  misc_feature (815)..(815): n is a, c, g, or t
caagctttggtgncacacgacacttctctgtttgacacgcttgttggtgtgactaccacgaggaagtggctgcttcaaagatctagcccccctgttttctcggcgaagggtgtttataccacaaggggggaccacctgtgttctcactaatgtggagagaccctgtatgtaagagaccacgtttgtgccgccagacgacccagcaagaagggtgtgagcgccccgcccctttagtgcctcgtgtcgcccacaggtggtttgttggggaacccaacaaaagtgggaaggcctgactcggatggataacacaaagaagagtgttgtccactgggaggaaaaaagagggttgtaatcaaccaggagatattttctccccacaggaccacttatatacccctctcctcttcttttatagaaaacagaatgtccccccggaattttactcccccccccgaaagctcaaaacgggtgtcccaccccaccagctgcgtatatttatgtgtacactcttatattataccacgcccgcctctttggggagaccccccccccacttttggtccccttcccccaccccctcctgcgccccctgtaaagccttgggggttctcacgaaaaaatctcctgggtgccaaacccactttgcataaacaaaattcttgccaactcgcatgtcacaagacccactaggcacacttttgtgttaccacaacgcttctctcttggaaacaaccaccacctttgggggatataccgcaccccccaccgcgcacgaaatttgtattgttgcctcaaattgtgcccctctgataagngaccacaatagcccgccccccttctctttggaggaccccacagcgtgcacacagacacacaccccacatgtgcgctgtgaaaacaccctcggcgcccacacacacgtgtgtagagggcgaacactctgtggcccacgcccacttgaaatgtaaccggcgagttgaaagcaaagctctcgtgggaaaaaggtgaggcgcaccacattgtgggcgaagtctgtgaagcaacacacgcgggtgttatatacccctcaaaccccctcggtggagaactctcgtcggtttaaccacgcgcttaacacatatagggtttgtcccgccttacactattaacacttctaagcactccccactcccacatcttgacaccctcgggggccaagggtttctttcttgacaagttggggtcttaataacccctccccctcgagtgaaaacacacagacgctggtaagctaaggggttggttaatcacatcacgaaagagtggtctcccctcacggccctgggggaataaaggaacctgggcccacagccaccaatgcccaactcacatgtcccaatatctgctttgcctggtgttggggaagagattgggtcttgtccccccaccccccttctgtggctgactgtaatactgtaccaccgtttctgaccccttaaaagctgttgtactctga

SEQ ID NO: 670261 - DNA, 938 bp, Homo sapiens
tggacgcgtggtctaaacctatccgtccgagccgcccatgcgtatatgtgcctcagctcacctcggtatatcttgcgatccgtaattttgacctcgatagtaatgagactatcgtctactggccagaacagttatatgagcagttcgcgttactggagcttgatgcatctctagtgtaatcttcgttagggaagcgtactcctgtgagtcgccgtcttacgagaaggcttcgtacctagcagatgcataaaaatcgtctatggcttatattagtagatatttagggtcgcatatggttgttaatacatagaccgtcctctgtcattgtcaaggacgaagaattatttgctatacctgaaggtctggattcttatgagccattttcatccgacctggagactctgactacagaagaattaatggtgtttaggatacacggtcctttatgacctttatcatagttagaagatgaggaattgggcgcaggggctcacgcctgtaatcccagcactttgggatgctgaggcgggcagatgacgaggtcaggagttcgagaacagcctgaccaacatggtgaaaccctgtctctactaaaaatacaaaaagtagccagacgtggtggcacatgcctgtgcatgtgctgggattacccagctactcaggaggctgaggcaggaggattgcttgaacctgggagggcagaggttgcagtgagtcgagatcacgccactgtactccagctgggtggacagagcgagatttccgttcacacacaaacaaaaacaaaacgcgcgggtacaggggcccccactatattcccacctttggagccgcgcggctgccccggtccccgaataccctctgtccccacggaaccccctggctaaaaaacattccggtcgggccaccgaacacaacaccgcgcagcgaacgtacca

SEQ ID NO: 670262 - DNA, 398 bp, Homo sapiens
cacaccacctgagtcatgtgttgccttacaatgttacaacacctacaatgttgctaggcaacaggaattctttagctcgattataatcatatgggaccaccactgtatacgtgatccatcactgaccaaaatgttgttatacgctatacgactgtatattttaaggctatcaaaatcaaaacagcatggtactagcataaaaatagacacactgaccaatggaacaggacagaaatcccagaagcccacacattaatagtcaactgatgtttttttttacaaaggtgccaagaacacacaatgggaaatggacaccctctttaataaatggtgctggaaaaaatgaacatccacatgcagaagaatgaaactgcatcttcatctcacaccatatataa

SEQ ID NO: 670263 - DNA, 1607 bp, Homo sapiens
cgggggtctccatcctggaccaggacctggactacctgtccgaaggcctcgaaggccgatcccaaagccccgtggccctgctctttgatgcccttctacgcccagacacagactttgggggaaacatgaagtcggtcctcacctggaagcaccggaaggagcacgccatcccccacgtggttctgggccggaacctccccgggggagcctggcactccatcgaaggctccatggtgatcctgagccaaggccagtggatggggctcccggacctggaggtcaaggactggatgcagaagaagcgaagaggtcttcgcaacagccgggccactgccggggacatcgcccactactacagggactacgtggtcaagaagggtctggggcataactttgtgtccggtgctgtagtcacagccgtggagtgggggacccccgatcccagcagctgtggggcccaggactccagccccctcttccaggtgagcggcttcctgaccaggaaccaggcccagcagcccttctcgctgtgggcccgcaacgtggtcctcgccacaggcacgttcgacagcccggcccggctgggcatccccggggaggccctgcccttcatccaccatgagctgtctgccctggaggccgccacaagggtgggtgcggtgaccccggcctcagaccctgtcctcatcattggcgcggggctgtcagcggccgacgccgtcctctacgcccgccactacaacatcccggtgatccatgccttccgccgggccgtggacgaccctggcctggtgttcaaccagctgcccaagatgctgtaccccgagtaccacaaggtgcaccagatgatgcgggagcagtccatcctgtcgcccagcccctatgagggttaccgcagcctccccaggcaccagctgctgtgcttcaaggaagactgccaggccgtgttccaggacctcgagggtgtcgagaaggtgtttggggtctccctggtgctggtcctcatcggctcccaccccgacctctccttcctgcctggggcagggctgactttgcagtggatcctgaccagccgctgagcgccaagaggaaccccattgacgtggaccccttcacctaccagagcacccgccagagggcctgtacgccatggggccgctggcggggacaacttcgtgaggtttgtgcaggggggcgccttggctgtggccagctccctgctaagaaggagaccaggaagccaccctaacactcggccagacccgctggctcccaggccctgagaggacagagatgaccacatccctgctggatgcaggacccgtccaaagatgccccggggaggggtgtcagcccacgttgctggcctttggggtcaagaggagtagggatcccaggctgccctggacttagaccagtgtgtgaggttggacttagaccagtgtgtgaggtggtaacagcggccgcagcagggggttggcctagacctgggatttgtggggaaagctgctggtgtgaccagctgagcacccagccaggagacctgcagccctgcgccttccagaagcaggtcccaaataaagccagtgcccacctgaaaaaaaaaa

SEQ ID NO: 670264 - DNA, 662 bp, Homo sapiens
  misc_feature (444)..(444): n is a, c, g, or t
gttagaaaaaccacccccccctcttcgaaaaaaaaaaattgtggtgggggggaggagcgtgtttttttattcggggggcgcctttttttataaaaaaaaaacttctttttttaaaaaaaaaaaaaaagggggggcaaaaaaaaaaaaactcccccccccccaaaaaattttttaaaaaaatttttttttaaaaaaaaaaagggcccccccccttttttttttttcaaaaggggggggggggggttttttttttggaaaaaaaaacctttcccccccgttttttccccccaaacccccccccccacatttgttaaaaaaaaaggggcgccgggtaatttttctccaaaaaaaaagaaagaaaaaaatttttttccccacatttttggggggccccaacaaccaaaaacaattttttttttaaaaaaaagaggcttcccccccccntatttttcaattttccccaaagggggccccttaaaaaaatctgagaaaagggcaaccccccgggggtgttttggttttttttttccccaaattttttaaccgggggaccccccctcttttttgtgggctttttgggaaaacccccccctgggaataacccgggctaaaaaaaaaaagaagggaaaataaagggttccccccttccattgcgccaaagg

SEQ ID NO: 670265 - DNA, 836 bp, Homo sapiens
ccacgcgtcggcttccgctccctcacagctcccgtcccgttaccgcctcctggctggctcgctgcctttcacgcggcaccttgcgtcgtgtctgcgcctgggggcctgctcctgccgcgcgcacccccgggggcttcttggctccggcacgggtcgtgcccagtttcctgcacctgagtgcctgccggccagccggccgccatggtgtgcctacctctctccagcccagacacggtgaagtgctccgtgggactggggtctggtgccccgtgccgtgcctgcgtgcccctacctgtgcttctccgccatgcaaggctggggcgtcttccatggagtgatgctcacaactgtattcctgagctggacagtgagacagccattgttttcttgtctacgatgagacatgtgagggggaggcaagttgccttgtactgtgccaaatatcttcctagaatatcatccagaacgatcagaatggcctacatagggaaggcaatgctacaagcaatggcttgtaagaagatgccttctatgtgctatttgacgccaaatttgaccactgaagaagtcattaaagaggctggcacagatatgcatgggcgaaccactgaggatgaagatgacacaacgaaaaacgtagctgatgaacgactgattgtgtgacacatgaggaggctgcaactgcttgcatgaagaggctaccattgactaatttgaagagctgctgacacgctacgggcagaactgtcacaaggggcctccccacaaggaaatctggaggtaggggacaggcgatgaaaccagttgtccagtggctcaatgggggaaggaggact

SEQ ID NO: 670266 - DNA, 151 bp, Homo sapiens
atggcggcaccctatgtacactgttcttctgcctaagcttgccatcctattgtggaataggattatactaaaacatttaaagacctgggtgttacatatgtgttgtgtgaagcttgttaccagttgtatggacaaaatccaccaagatcca

SEQ ID NO: 670267 - DNA, 1185 bp, Homo sapiens
  misc_feature (586)..(586): n is a, c, g, or t
gggcctgagcagggtgctggggggagagcgcgatacctcacgcgggctgccgtcctaatcaacgtgcctatggcgggaccacgctcggagcctgcctcttctgcgactgttactttttctttgcgggatgggggtgggggttccctctccaggtggttgtccaggcccaggtcccgaccctgggtgctcagccagctcggctaggccctgcgcctccctgcgcttcccccttcaggaagggtgtgtgccacctcgttgccacagggactggatcccagtcccgcccctgtccccaagtggctgcttgggggagaggcgtttgcatcactggtgttgtcacctccctgtttctccaccaagggcttgggcctctcggggctggggcctcccaggggatggggacccagaggtgcagtggccgccacatccatggcctaggagctactgggcaggttcccggcacacatctggtgggctgtctgaccaagagtgtgccttttcccccagatggtcttgacgggatcacgtggggctctctgggagttgagggtggccaaattaccgcggaggaacatgggggtcctcnagaagggagaagctgcggcagcgggcgagcgcgcacgcaagcaagggccccccactgtcgcggcagcatgcgggggcccaagccaggccggggtgcctaacatctggcggggctggggacaaggcgcgccaacgcttggcacgaccaacaccagacggcaattcacaacctaccgtggtgtggccaacaacccccccattgttagggaattcggacaggggataggcagcagtaagctagctaggaacgcactagtagtatagtcgacgcacacagtgattgttccgggacgggctgcaccggagaacagcacaatgcagcaagccgcacagctggagaggtcggccgcgcgagaggcgccgagggaccgggcagacgcaccttcgggcaacgcggctgggcggggacgcgcgaccaacccgccgggaagcccgggacgaagggacaccacagaagaaagtgagagggagaaaatgggagaccagaccacaaatacacaaagatgagacgcacgtcgtgaacacaacctggagtacccgatctctggagatcaacgacggggcaatctgcagagaaaaccggtgaacaagacacaccca

SEQ ID NO: 670268 - DNA, 501 bp, Homo sapiens
  misc_feature (249)..(249): n is a, c, g, or t
  misc_feature (431)..(431): n is a, c, g, or t
tgactttggactctctcgggtacttgaagatgacccagaagctgcttacacaaccaggggaggaaagataccaataaggtggacatcaccagaagcaattgcctaccgcaagttcacctcagccagcgatgtatggagttacgggattgttctctgggaagtgatgtcttacggagaaaggccatactgggagatgtccaatcaggatgtaattaaggctgtggatgagggctatcgctgccacctccnatggattgcccagctgccttgtatcagttgatgttggactgctggcagaaagacaggaacaacagacccaagttcgagcagatcgtcagcattctggacaaactcatccgggaatccaggcagtctgaagatcatcaccagcgcggctgcaaggccatcaaaccttcttctggaccaaagcnatgtcgatatcgctaccttccacacaactggtgattggcttaacggcatgaggacagcacctgtaaggaa

SEQ ID NO: 670269 - DNA, 557 bp, Homo sapiens
  misc_feature (16)..(16): n is a, c, g, or t
  misc_feature (515)..(515): n is a, c, g, or t
cctcggaggtccctgnctggactgctgagacgtacaagctctacgtgatcactactgcatcaacatctgactagagcaaactctaatccgcctctacagcctctggtatcatatccgacacacttactaacctacacttcatctttattatagatcaacttaaacactgatctacgcatcaattgtaccatctccattacacattctcatactcttatatacaacctatcactttcacactactcttcatgtctatctaccagcgcgtacacaactctacctcaaccgtactatctacatcaccatccataacctattacgaatgcctacatgtactaccagaatctattaccgctccactccatattcacatacactttactcttattaatctctatcactgccttacttcaccatcctcgcatcacttccttcacttctttctactatcacatccatctctcaatcctctccaccttcacccattctctctttcatccgaccattgctttctncactacactcactcccactacttctcacccatctctccctcc

SEQ ID NO: 670270 - DNA, 207 bp, Homo sapiens
aatctcctgcacttgtgatccgcccgcctcggtctcccaaagtgctgggatcactggcgggagcccccatgcccagcccgtagcatgttacatcctcgagtggctcatcaccggcagacctattgtttctgtagcacagcctggttaaggagttgaaagtggacattgggtttgaaatggtccccaatccggcggatcctctacagt

SEQ ID NO: 670271 - DNA, 166 bp, Homo sapiens
cgcgcgcagcgcgccgcgggcgaggcgatgttgtcctggctgatcccggcgaaaagccacttagcggcgcctggggttggccatccaggcggaatcgttggagtgttgcacgtagtcggtgcgttgcaactggggcaactggtcggccgggaagatacccggctgg

SEQ ID NO: 670272 - DNA, 135 bp, Homo sapiens
tcaagcgtcagcttaccacgggctctggaagaccgactgaggtaaagcgcccggaaggcaagtcgagttcatttcttgaagaggccggcgcgcgtaggctgtgacattgccctgcgactgcttggattacaagga

SEQ ID NO: 670273 - DNA, 403 bp, Homo sapiens
  misc_feature (4)..(4): n is a, c, g, or t
  misc_feature (10)..(10): n is a, c, g, or t
  misc_feature (40)..(40): n is a, c, g, or t
  misc_feature (55)..(55): n is a, c, g, or t
  misc_feature (68)..(68): n is a, c, g, or t
  misc_feature (119)..(119): n is a, c, g, or t
  misc_feature (360)..(360): n is a, c, g, or t
gtgncccccnaccccaaaaatctcatcttgaaattgtacnccccaaaaatccccnacgtgctgtgggnagggacccaagtggaagatgaattgaaatcaatggggggtggttccccccnatactgttctcgtggtagtgaataaatctcactagacttgatggttttacaaaggggaaacccctttcgcttggttctcatgctgtctgttccctgaagccatgtaagatgtgacttgctcctccttgtcttctaccatgattgtgaggccaccccaggcaggtggaactgtgagtccgttaaacctcttcctttacaattcccagtcttgggtatgtctttattagcagcgtagaacagnttaatacagcaaccaatggcccggaacacttccatcctgagtt

SEQ ID NO: 670274 - DNA, 987 bp, Homo sapiens
  misc_feature (386)..(386): n is a, c, g, or t
  misc_feature (389)..(389): n is a, c, g, or t
  misc_feature (391)..(391): n is a, c, g, or t
  misc_feature (521)..(521): n is a, c, g, or t
  misc_feature (545)..(545): n is a, c, g, or t
  misc_feature (551)..(551): n is a, c, g, or t
  misc_feature (702)..(702): n is a, c, g, or t
  misc_feature (987)..(987): n is a, c, g, or t
gcatcgcatagaggaccagcagaaagatgctcgagtgtggaaggtgttgatgcggtactaccctgctgtcgaagctgattccctccggtgcaggccgggaatggctggagcggcgccgggcgatcattcgggcctgtaagcaccttcgtggaccagcgagcgcttctcacggccctcaatctggcgagagctgtgccaggcgcgctcggtacgcaatcgtggagtgactacgcagtagcaagcgtagtgtgcttgctgtgttccgtgggagccttcgatcgctgttacctgtgctgtgtgtgacgctccaccttattgattgcttggatgtgcgctctggtgctgatcgtgttgtctccggacgtccctcgattacactatcatcntantntctgtcggcgagcacatatagggagattcgcgaaagccttttggttgaccgtcttgttgggcacagcgagcacggtcgcagctcaccagcagcagatactaggtaagtggctccttgcgcgtggcgtagngcataattctcccttgttcccgcnttcctntccttgggacgtagcgtcatggggttgtcgggcgcctccagaggccgggtccatctcatagtggtttgccatgggggcaaggcccatggccgtgtgctgggttcaatcggggtcgtccgcaacagtcgtgaccatttcacagcgcgagaanttcgacgcggctgctgccgaccggcgggcacggacgccttgccaggaattgggaagccgcggttgatcgacagggtcgatcatatacatgggggcaaccatagtccggagacccttcaccagagggaccaaagcttggacgcacaacacccgttgcgcacattgaccttggtacatagcagacgtgctcattgacgtgcatcagggcgccacaagacgcacagtccccagtctaccaaagcccaggggcgagggcgaatccccgggctttttgcacaacttacan

SEQ ID NO: 670275 - DNA, 120 bp, Homo sapiens
aggggcagcatgtgatgtaaattagtcactccacctaccatcttcctacttactagcaaagaatcgaggaagtcttgccactctagctgggtaatcagcgtttcactagacgttgatcta

SEQ ID NO: 670276 - DNA, 203 bp, Homo sapiens
ctccgttattgcgctctgaatccggtacgtcgcgttaagaggaacgggcgcgcaacggcgtgatccttgaggatcttgtccgttgcaatcgaggtccactgcgtgtcgtcgaaaccgtcttgttcgttatcgaagtagagcgcgtcgaccgcctcgcccacccactggtcaagctcgtttttcagcgggccattgggcaggga

SEQ ID NO: 670277 - DNA, 1137 bp, Homo sapiens
tcaaaacagccttattaaatcaggccccaaaggacaatgtcgggggtatacagtgcaggtgggattcctccccgggaggtcataccatgacctttctggggtaaaagtggacgtgctggggcggggattgttggggaagcggcctggtgaagacaggctgtcagggttgcagcagtggacgctctgggattgagacgtggggagcacggcgggtcccttgtgggaggtgagacaagtggccctgtgtgtgtggtacactcccgtgtccccccgaccccccagcgggccgctgggctctggcacaaaggaacacactgtgtgaggctgggttccctccagctgtgggtggggggtggcagtggagtgtggggccataaggaagcagctatttaggctccagaggtggcagatcggggaagagtggctcagttgggcagggccctcggggagacattaaaagttcccagaagaaagccgtggccattcccgtggtcctccctcccgagtgttcgtggtccgtggagaagggtggggaaggggtataagggggcacacatgactttctcccctcttccggatctgtgtagagaaccagtttgtaagcgtagaggggccgggctcctgcacctaaggtgggtggcccctgggacccgtgccccaaggcccttacacctttgactttcaatagatactcacgtaaggaatcccggaaaattgcacacagtggtttgggttggcattggtggcttgggggccatggggggtcccttggataggccttagcttgggggggggccctctcaatacttcgcgtgccaaggggtctccccaaggaagggcccgggttttgtggacaagaactcccaaccgggttctggcagcgcaaacacatctcggggggaaatgggagtgaggcagaccaaatccaaaacgagtgttcccccagtggtctctgcacaaagagtgcaaggacacaagaggttcctgaggagaacccctaccacagggggggaaacacacttagcacttggtgcgaccaagtggttcatcctctggagaattcacacaagagaataagcgaacaagaacggaaatatgctgaacacaacgcgagagaagagaacagtagagaacaag

SEQ ID NO: 670278 - DNA, 563 bp, Homo sapiens
  misc_feature (63)..(63): n is a, c, g, or t
  misc_feature (65)..(65): n is a, c, g, or t
  misc_feature (81)..(81): n is a, c, g, or t
gctaggttggagttggaaccgtggagatgcggaaggaaaccccagccgcctagtgcccccggngnccgggagtggaatctncccccaaatgcgcccgctgatggaacggcagttggaggctgcgcggtacggtccgatggggcgcttcatccatcggggcctccagacctgagtgggctgcatgatgggccggatcccgtctggcatttttaaggacccactgtgccgacccgcaacgaaggcattctgcatccgccggagtccaaacggaggctggagtggctgacctcacttgggttggggagagaggtattctagtggacatccggattcaggtgcgtgatagaacttgtgggaaatagatgagaatgagacaagttatggcacaagaaaggttcatgcaaggtatgaggcagtgatgacactgagtcataaagccagtgtattgagcgtactggaaaaaaggatgtcagtggatagaaaagacatcatgaatcaaagggataagggaccttgatcagaaggatgatactgagatgatacagaggtcatgagaggcaggt

SEQ ID NO: 670279 - DNA, 264 bp, Homo sapiens
cgacatttgcaccactgtgtggggatttctccacatcaaaaagcaagtaattggccaaatgtggtggctcacgcctgtaatctcagcactttgggaggccgaggcgggcagatcacctgaggccaggagattgagaccagcctgaccaacatggagaaaccccatctctactaaaaataaaaaggtagccaggtgtggtagtgcatgcctgtaatcccagctactggggaggctgaggcaggagaatcacctgaacccgagagg

SEQ ID NO: 670280 - DNA, 697 bp, Homo sapiens
tacgaggcacgaggctggtgaacagtggtcatctgctactgcggcagcagcaacgatggggcctcggccgggctctccctctcctctggcgtggctaccagaccgagcggggcgttttacggctaccggccgaggaagcccgagagccgctgagccccagggcgccctggagcgccccccagttgatcatggccttgccaaggttggtgacagtatattgtgcagcatggttcataaagctgccaacaatcaagccccgcgtcttcaccggacaagccctgccttgcagaatgttgccttgaaaattccaagccctggtgcagacacttgcaggggacccgttccacacggccacggattattcgcaacattggggaaaggcaagagggcctcattttgagggcacacgtgtttagtctatcttcaagtcaattctacctgtgggcagatttcttatttgcaaaccttccgcatatttatcacgaagccccaaggaatggagcacacacgaacgttgggtttttgggccctaaagccggggattttggaagggaaaacttgcgcagaacatggggtgcgcccggtttttagcgcgacaggaacacggaggccgacaaaccccaattcttggttcggacacacttacattgccttgggacacttcttccagggaaggtttgtggacccaactttttac

SEQ ID NO: 670281 - DNA, 408 bp, Homo sapiens
gcaaacagaaagtaaggatggactggatattaccaagcatccaccatcctggacaaccagatggaaccttcatcttctaccttctcctcttccctccagatcttgagcctaccctcctctcacatctcctcctgcccaagatgtaaggaagcatagtaaggatttcttcccatcgtacccttccccacacataccaccattgttttcttctatatcccaccccgatgctctcccaggtgggtgtgagagagacctcattctctgcaggctccagcgtggccacagctaaggcccatccatttcccacagtgaggaaagtgtctgggcttcttctggggctccaccctgacaagtagggtcacagaggctggatgcacagatttctgcctcattcctctccatgatgcc

SEQ ID NO: 670282 - DNA, 363 bp, Homo sapiens
  misc_feature (246)..(246): n is a, c, g, or t
  misc_feature (288)..(288): n is a, c, g, or t
  misc_feature (299)..(299): n is a, c, g, or t
  misc_feature (334)..(334): n is a, c, g, or t
  misc_feature (363)..(363): n is a, c, g, or t
ccgcacagcttcttcaacaaaagcagcccgagaacttttcttcgtcctagtcctgaagatgaagcaatatatggccctaataccaaaatggtaaggttcaacgaagggagacagcgtgggcctcctggttggctggtggcaatgatgtcggcgatattgtgttgctcgcattcaacgacagggaccctcgtgcggagcaggacgaggccgttcaagaacggagaccagagttctgacaggtgaacnacactaggatttcagacggattaagtgcgggacggatgccgnttctctacctntgttagaaatcccttaaaggtgaacatggtgaccnaattttagctcagaagccgaggccgatgn

SEQ ID NO: 670283 - DNA, 488 bp, Homo sapiens
aaaaaaatgaatagatttttattggtccataaataaaataggacctgcaaagaatagatcttagatttaaataaaaggcggctttgatgttggtaaaacaaaataaaatatgacaaaaaaaatatttttttgttccattcattgtactctagttggaaatcctggttccttttttgagacaggttctctcactcaggctggagtgcagtggcacaatcaagttcactgcaggcttgaactcctgggttcaagtgatcccccttcctcagtcacccagatagctgggactacaggcatgggccaccacacccagctaatttttgtatttttagtagagatggagcttcaccatattgcccaggctggtctcgagctcccgcactcaagcagtctactcacctcagctcccaaagtgctgtgattacaagcatgagcccccacacctggactgagttattttttttgagacagggcaagactcagtctca

SEQ ID NO: 670284 - DNA, 108 bp, Homo sapiens
ctggcagctggaaatcaggagaattctgaaccagaaggcgaaggttgcagtgaaccgagatcatgccattgtactctagcctgggtgacaagagcaagactccgtctc

SEQ ID NO: 670285 - DNA, 201 bp, Homo sapiens
acagtaggtgatggagaggctgatgggcttctacctatttctgtagctcacttatcattctcttctacccataaatatttccccaaatctgttctaccagttgctccttttaaatgctgttaggcctcaatctgagacccccacaggtccattctgtaatcagaatccaggaaaccctttctctttaccattcagcctctg

SEQ ID NO: 670286 - DNA, 369 bp, Homo sapiens
cactgtcgatcaatgccttcctgtcgagctcccctgttctgaggatctgtgatagcatcgaatgttgccccagccccataaatgggcttgtccgcgctaggccgttggcgagctgttttcagtagtcgtgctcatctctctgctcctgtttcaaccagtcgcattgcatccccatttccgatcctcaacatttatatcctgttgaatcactgctccttgagtattcctattgctgaagacatcaccatgtacctactggcatctatagcagttctcttcctcagtggaatcaagagttttgtaatcgtaaaaaaccggatgagagtcatgggttctgcctctaagagaagctgtaataaaggtgcttgg

SEQ ID NO: 670287 - DNA, 119 bp, Homo sapiens
gaaagctccttcaccaggaattcacacacctcacagtaaagcatcagacttatgctcgggacctcgtgcatcttaattgggctactaccagttaccagggcagggatgacattacttgg

SEQ ID NO: 670288 - DNA, 144 bp, Homo sapiens
cgccccaacactttccccaacaggtcagcaatttgtgtgggttttcattccactgcaggtgcactcacatgccagtcatctttcatgttttcaatagcatagggcaagcaacattgcgtccagccggtggggcattcctctcag

SEQ ID NO: 670289 - DNA, 237 bp, Homo sapiens
tagagcggctcaggtgagaactggaggtcttgccccgcaagggctctcttctttccttgacctagtaatttcacatgggcatacattatgactaccataagtctagtaaccatctgacagcatacaaattgatgataatattattgaccatactccttatgccttgtgttatcgcaccttacatttacaagtaaatccccttcatctagacccctcttctttccccctgcaagcacc

SEQ ID NO: 670290 - DNA, 410 bp, Homo sapiens
gcatttccaccggcggcactggttaacccagcaaagctaaagctatgctggaggcgtttacggtcagcggagaggtcccggaccccggggagggctctgcgctcttcagcgttgtggatgaagtggcagcgtggcccgtaggggcaaaagccgatggtgtggaaggtgcggcacagctccgtcttgtacttggggtggcgggtcaggctgcggagctcgtggatgccgtgtgcgaactggcacttgtccccgtacttacaggcaccgttttcctcaaaggggcggcacagctccgtcttgtagcggctggagttgacctggccgcccccgggctgcttctgggtggtcagcagccgctcgcccccttccgagaaggagcggtctcggaagcggctgtctcgcgagctcag

SEQ ID NO: 670291 - DNA, 290 bp, Homo sapiens
cagacaggagcggtgttacgtggtgatggcatagaaaggacgactcacagggagctgagcatgcggacagagcaggtatgccaccgacttgaagattgggagcagccctcccggtggtggagaggttgtgcaggatgctggtggtgcagcgggctgtgtccagggcgctggtattctgcatggtacgcacgacagcggccaccagctgtggcgagcccatcaggtcccgccgtgacgcctccttcttcgacagctggtcacaatcatggccgccttggtcaccaccaccg

SEQ ID NO: 670292 - DNA, 129 bp, Homo sapiens
ccttgcagaatcaaggtaaatcttttcatcacatatgcacactcatgcatgggcacacacactcatcacataattgcgcatgcacacacatgctctgccgggcacttatgcgcagccgagctacgtaga

SEQ ID NO: 670293 - DNA, 857 bp, Homo sapiens
  misc_feature (607)..(607): n is a, c, g, or t
gcttctaccggccgtgtaccagtcaccctggtcagtcttcaccatcgtcagtcgctcatgtacttcgccttgtaccagggatgactctgttccagaagacaacatctgggagaggcatcctctctgttattttgcttctttcggttatcatcagatgtgtcagctttgcccaatggtccgttcactcgacctcatccagcctatatggcgaatggtgttaggactcgagatgtgctctacttcctgttcctggtattcctacgcttcctgaagtttcgaggcgaggttaaatctctagatgtattggctagatccgaaatcttcgatacgccacaagggaagcagatgtcatgggagtatgctgtgaactgccatgtgatcacctgggagaggattatcagccacttggatatttttgcatttggacagttctctggggctgggccactgaaggcacttgtcgtgatccgtagtgacggtctctgctgtgacaactcagtattacctgggagctgagctgagctctgtcttcatgcatctccgtccccaattttgccgagtgctggtgggatcaaagtcgattctggacatccgtgttgtgcaatgngggtggcattttggtggggcatgggtcagtatgacggtttttagagatgagcgacttacactgggcaaagcttcaaggcacattcatagcacacaccgggaagatcaagagagctgttctgaagttcactcctgggtagtggaacctatgtgcgatggtttgagcccaaatattcttttcagagagtacttgaggtaccttttaatgatcatctggggtgattggggtgaaactcttttggaagaaattt

SEQ ID NO: 670294 - DNA, 155 bp, Homo sapiens
gggggaaagttggttgggtgggagggagccagttgggatggagggacgtttacaggaccgcagacagggccaacgtcgaagcacgaattcctggtctcggggcaccaacgtccaatggggccaccttgatgatgggcaggcgggaggtcttggtg

SEQ ID NO: 670295 - DNA, 1233 bp, Homo sapiens
  misc_feature (844)..(844): n is a, c, g, or t
cgagaccaatacttatatcagattcgtcgtagaccgcaaatacataacggcaagaggtgaacgattgccgtacgtttagctggtggtcggtgagtgctaccggtgccactctagcagtgatgctaggctcagactctagacgagagctcgtcagtagagaggacgaacaacagctacttgggtggtacctgagagcccttagaagactattgcgaaaagaggaagtcgactgaggagagaataagactggaagtccaacgggttgtatgcaatcttctaataaggagtcgtctatgtgcaatgtcgtggtcctctaggtgcacatgtatggagcatctctcagtgcacagagcttatctcagagggcttcatacacactctagcaccagattgccaactcaattagtaccaattcgaaacgagtcatgacacacttttcgaatcgccatgcaaagcgtgcctcatattgctgtacaacttagaaaaacccaacattaacaacatgacaattgtcattaatcgagttgtccatagactgtgctcaacgtcccgttgtaaagatgaagatggatcacttcttcttgtggaaatgggcggatgaggtaaactaaggttattctagtcctcgcgagacgagcatattgtcccccaatagggcgggtattaattccaagatgtagggcaacaagggcaccaggtttggcctaaacaaccataacagttggtgccgtcgggctattatgatggcgcgagataaccttttccccatatttcccccgttaatgtagtgttgtccccaagaccgccgttaacctttggcaaatgcaaagaacggtgggcaccnataataaagggggggcgataaaaccatatttattccatagccgacagtacgaggtacaccacggtgagaagcctatacagcgcttggggggcagtttcccccattcatgatgcgggtgttatcaacttaaaacgaaggtaccctacagcgacatgaagaccgttattaaccggttgatcgccattacatactagacacgcgaggcactaaaataggaaaatcactggaagtttagccgcatcatgggcaacgcaagaaagaccgacttaaactcaagcgcaattaaaacctaaatatgcattattaccaggaaccatattattggatcctctgggaacattgtgcgtccctatggagagcacctcatataaatcgttcgcgagacaaac

SEQ ID NO: 670296 - DNA, 724 bp, Homo sapiens
  misc_feature (432)..(432): n is a, c, g, or t
  misc_feature (610)..(610): n is a, c, g, or t
  misc_feature (617)..(617): n is a, c, g, or t
agcgggacggcgccgtgtaactgcgagagtcggggtcggtgcggttcgataagtggtcggttcctggagctgcggtcttctgctagcctgatccgaagcttcagcgctccgcgcgcctccgtcagcaccatcggcggccagccgcgtggcagccagacgccatgtacccagccaggccggacagcggggaccgcgagaagcccgatagagggcggcagggcgacctgatcgcacgcgcgtccgtcgagacgtcggcacgatcggtcacctgggatgacgcccagcgggcctcggcggccgggcgatgcgcctgcgggccactgaagctgtacggagccagcctgcacgggagctaggacgggagacacggcgggcatgatcatggaagccgcagaaaggcagcgggagacccataggcgcggaaggatagtncgcaggcagtgcgcgccggcagagcacgtcggtggcagacaccagtggagtgacaaagggcgctttctgtgcccgaccgcaaagtaggtagtaaagccatgggctcgcgtacttgcgtcgagtacatgtcccattgggacagtctcctttgtgcgcggataggagagaccctaggtgnagaagcnaaacagtgcacggacatggtgtgcaacatgggtctcgttaccattggcagagcaccactgtgtatcgtcacagcaagccacagtttcgcgtgccagtggaaagatgg

SEQ ID NO: 670297 - DNA, 224 bp, Homo sapiens
agaaaagatatacacccgtatgatgaaataatgaaaaacataaaataacaaaatgaatcatcgaagtagattcactatcgcagaggtcacagggttaaagcagagctaacaattgaaaggaggagaacatgcagagagcagaagaaaactgatagtacacgtttatctactatactttcttttccttccttccttccatccttccttatttttctaataactag

SEQ ID NO: 670298 - DNA, 303 bp, Homo sapiens
gcggtgaaggccaagatctcgaccgcccaggcggcgttgcctaagggtgtagaactcaaggcgatctacgaccgcacggagatcgtcgccaaggcgttgaagacggccgagagcgccctggtcgaaggctcggtgctggtcgcgatcgtcctgttcctgttcctgggcgaggtgcgctcggccgtggtggtcatcgtgaccctcccgctggccatgctcatcgccttcctgctgatgaaccagtttggtctttccgccaacctgatgtcactggccgggttggcgatcgggaccggaatgatg

SEQ ID NO: 670299 - DNA, 376 bp, Homo sapiens
gtagtgcagttgtaacaagcttgcttttcaaaaatgatgattttaggtgtgtgtgtgtataaaccaggcagttatttctgaatattaaaaagaaataggttgggtatgtgccccatgcctataatcccagcactttgggagccaaggcagaaggatcgtttgaggacaggaattcaagaccagcccaggtaacatagtgagacctcatctctacaaaagtaaaaagttagggtagggtacagtggctcatgcatgtaattccagcactttaggaagctgaggcaggcggatggcctgagctcaggagtttgacactagccagggcaatacggtgaaaccccgctccagcctgggcgacagagtgagactccagctc

SEQ ID NO: 670300 - DNA, 1132 bp, Homo sapiens
tctcgcagactccgcgagcgtactgacccggcgactgacaggctccaactacccgggactcagtattagccttcgaccatcactggactccatctgcaacaagaggaggcattccggagtagccctcggatgaagaccccagacacacagctatgagtccacttcgtgctgacgtctgcgcagtaaacatgttctgccatgtccaggcatccaaccggacgcaccaaagcaagcacggcacaatgcgcatgtaacccacaggctctatcctgcgacgaacgcaccgaccctgcgctacgacaggttgggcctctcacacgccacacacgcgcgccaaaacccccgcccctcatccccatctcccccagcggccaaacaacacgggcctcacagtgcgtgaaacacccaggcacccctccgctacgggacacaccattggccatcctgaccgctcagagccacgtcgtaccttggcacgccttggcaagctttccattcccttggcgcccttggtcacaaacgcgggctacacacgcacacctcacagacttggcggatataccgcagtcctcacctttggtggcccccactaacgcaggccctttacgatcttgtccgagaaaacctgcccctcgccctctaggcacaccaccgccattggccagcgccaaacagctctaccgattatggaccggtgaaccgccaccttttgctccccctacatcgtgcacagaaaaccgctaacaacgctgcttatcgctgccccacgcgtttggggaccccccaccactgctgcctgcccgccccccccgatacagcgctctcgtcacactcgagtacaccgcgccacacaggcctcgcaacaccatcttcgcctgtgcgacacagcgtattatgggggccacccttctggttcgggccgcacaaccaccctccgcagcaccaccatactcggcggacggaccatcaaagagttttcaccaaaaaaagggagtctggcacgccccgcgccaccccattatgggcggccgagtggcctagcagttttgcaacaccaccgcgaccgcagatatttgctacctcaccccctctccatcgcccctgcgccgcgacgccacgtccagcgtcccca

SEQ ID NO: 670301 - DNA, 214 bp, Homo sapiens
  misc_feature (92)..(92): n is a, c, g, or t
gctatagatatataataataaattataaatataatgagtaaccttccttaaccaaccaatttaagggaattgggccttaattaaattttttnaaaaattaaccaaggaaattaaaccttggtttaacccggaagggaattggttgggaaaggaaacccaaggaaattaacctttggttggaaggtttcccgggtggggaaattggttaaaaatt

SEQ ID NO: 670302 - DNA, 133 bp, Homo sapiens
gggtctgaactgaacaacctgctgtgtagtgatgcatgactatatataatctctagataacttatgatacctaatacaatgtaaatgctaggcaaatagttgccatactgattgtatacggaaataattacag

SEQ ID NO: 670303 - DNA, 400 bp, Homo sapiens
cgacaagcaagtgaacagtacactgcattctcctgcctcagactccgaaggactgggacttttagaggcgagctaccaagcccatcctgtaaccattttaaaatgtacaattcagtggcattaagtacattcagaatgcagtgtactgttgtggagtcttcccgctatctagttccaaaatttcatcaccccaaatggaaatcctttacccattgacagttactccccattctccccttcctctagcccctggcaaccactaatctgctttctatctatggatttgcctattctggacatttcatgtaagtggaatcctacactatgtggccttttgtgtctggtttctttcactcaggatcatgttttcaaggttcatgcatgttgcagtgtgcttccg

SEQ ID NO: 670304 - DNA, 226 bp, Homo sapiens
gcttaagtcctgtagaggagcaagggtaactagagacttacatgggccccaatatcacaagggcatctgctaggaaagggaaagagtgagactgggccttgttgagagcaagaattattagagagggagccagtgagaggctgaagctagatagggcaattggggtggaccataagggcagggctagagggagctaggttcctctgctgggagtgcctctttactt

SEQ ID NO: 670305 - DNA, 349 bp, Homo sapiens
atcacgtgtgtatccagaacaatttgagagaaaattgtacacacacacacaatatgaaaaatataggcctgtatgcggtggcttacgcctgtaatcctagcactttgggaggccgagatgggtgcattgcttgaccccaggagttcgacaccagcccgggcaacatggcaggactcccatctttacaaaaaatacaaagcccagtgtggtggtgggagcttgtagtccttgctactaaatggggagcgctgaggtaggggagtcgcctgagcccaggaagttgaggctgcagtgagccgtgatcgctccattgcactccagactgggcgactggagtgagacctttcct

SEQ ID NO: 670306 - DNA, 179 bp, Homo sapiens
tgcagcctgggtgacatagtgagaccctgtctcaaaaaacaaaaacaaacaaacaatgagaagttagccaggcatgcaggctcacatctataatcccagctacttggaaggcagagttatgaggatcacctgaggccaggagtttgagaccatcctgagcaacataaaaaaaccttgtc

SEQ ID NO: 670307 - DNA, 881 bp, Homo sapiens
gctgcaaggttctgggagctggacacggaccacgacctgctcatcgacgcggacgacctggcgcgggacaatgaccacgccctttctaccaagatgatagagaggatcttctcaggagacaggcactacgaggcagaaaagtgcagacaggaagggaagatcagctatgccgactttgtctggttttgatctctgaggaagacaaaaaaacaccgaccagtcatcgatgtactgggttcctgctgctatggaccttggacggggtacggcgccctgtccagtgttcgaagctcggagtacttctacgaggagcagtgccgaaggcgtggtacgagcatggccatcgaggccctggccttccaggactgcctctgtcagatgctggacctggtcaagccgaggactgaagggacgatcacgcgtgctacggacctgtaagcgctgcaagctggccaacgtcttcttccgagcaccttcttcaatatcgggaagtacctcgaccacgaggcagcaggagcagtatctccctgctcagggatcggtgacatgcgggtggccccagtagctcgtcgtgactggagagaaagtacgcggtccgaggagtactgacattcctgcgttggtccgatggtagaccggcgggagagccctgggtaggacgggttcgaggtccgagttcagccgctgtggcgcggaatgttgggtgtcgctggggccccccggtggcctaggggcccttctttcggggggcctcgaccgtggagtgcgcggcgtgtacgagtacgcatggggggcaggacctggtcgtgtgttccgccgcttgaaccgcgtgggggcggtccctgtgcccacggcccgggcgtgtgctgggggatggggtt

SEQ ID NO: 670308 - DNA, 120 bp, Homo sapiens
gaacgggtgtgcggttggggagcaaatgaggcagaagcagcaacggctgctgaagaacatggatgcccacaaggttcatgctggacctgctgcagatcctttacaaccgcatcacccgtt

SEQ ID NO: 670309 - DNA, 603 bp, Homo sapiens
  misc_feature (465)..(465): n is a, c, g, or t
  misc_feature (596)..(596): n is a, c, g, or t
atccaatccaaggtgtcccaaatcatcccgcacatccacacaacaacaacaacaacaacaacaaacaacaagaaaaccacaaaccaatcccccccaccaaatccacccccaaaaccacaattccacacaacacctcacctcaaccaacacctgacgaccagcttgaggctaatacaagccgaaaaggtccagctatttggttggggcgggacgtcacaggaacccacaacaaatattagcacagtatagtttctacccgatactctaggtatcgggataggagggttcggtaggtcacaaatgggcaacaaagatggctgtagctctcttggaatgaccgggtacctcatcgtctggttgatagcacacgtaggtaagtaggcagagttcccgctatccctgcctgctgtccgacagggccgcgaccggtaaaggcaaacttaacaaggtcgacaaaagggaggngccctatttggacttagctctgatctaacgcaataggagggcgtagagaatatgaggtggataaagaacccccaacacccccccaaatatcccctcagaaaacccaaaacaaaatccaccaaccctacaanccaccgt

SEQ ID NO: 670310 - DNA, 1682 bp, Homo sapiens
  misc_feature (1397)..(1397): n is a, c, g, or t
  misc_feature (1510)..(1510): n is a, c, g, or t
ttggatcctggtaatacctaatttttttaaccttttcttaacacatctaaccaccaaatataaatatacatctgggtatcacccccagcgttctaacacaacattaaacctatatttttgtgttattttttccctatagaggaaacacccacagagggagaaagacacgagaaatattatcagagaaagttctcagagaacactcttggaaagttgaagtaaaacacacaggttctccacacacagaaacaatctcaccgcttattcacaacatatctctccacacaaccctcacttttcatatagagcgcctctctatctcagagatatatattcacgcccacgcgtctcacacagatatatatatctctcacagagacagtcgtctcagagagagtctctctcacactctctgtgtgcgactatatcaactactaccactctctctcacacagcagagtcacagagacacccgggagagtagtctcacacagagcacctctctagagcacacagtgtcatcatcacagtgctgtgagacactgttgtgtgcgccccactaacatatatttctcccgacgagggttttttattatcctcctctatgatgagactgatgacagagacgacgacaacaacagacgcggcccgacgagatgctcgtctactatcactatatcatatcatcatgctgctgagctactcctctcatctcctcatcctcaccgctggtgtgctccactctgttgttgatgaagatgatgctgctccgaccacatatccttcttctactgctgaggcggcactactactataccttcattctttcttcctccctcctcctggtggagaacgaacatcgattgatgattaatcatcaaccccgaacaataaacaatcattccccccttgttctgctggcgggccaccatcacacatgttttttcttttctaataaagatggttgctcttcatcccccaacgctgctctcctcttcttcccagccgcggaaaacaaaaggtgtgtgggtataatctcctctcataattattttcttcctcccacaggctgttgatcgtacacctccctttttcttccgccgaagaaaaaacagatttttttctataaaacagggggtcgtcacaactcgtggggggcagtctttttcagcctaccacacccaacactccttgcatgctgggcggccccactaattttctacaccgcacccaagaaaataattatcgttgcgactcgtggcctactaaacacaccgcctcctgcgggtggggaccttattacaccataatcaagatttgataaagacaatagacgatctcaccctcttcctctttcaacacggccaacacatcctcgatccctactactaattcantacacgcgcccaactattatattgtctgcaagcaagcgccgggcggcaccacaggcgggtggcttgtgctgccctcccccaaccccactcgctgggtggcagcgaacacacanctttactctcctccccacaccaaccacacgcttttcatgactactctctccgagcggagcaaacctagtggggtaactacccccgggcctccacaaactctgtcatgcatatcataccgcctatataaccaacaaaaaacttatctccccgaaaaaagccctcgccactaag

SEQ ID NO: 670311 - DNA, 480 bp, Homo sapiens
aacgagaactcacttgagctctgtggtgagaactaatcaccgaggtgatggtgctaaaccatacatgaaggacctgcacccatgatccagtcatgtccccaggccccagctccaacactggggattacatttcaacatgagatttggagagggcaaacacccaaatcacatgaaacacaaaggttttcaaaggaaacaatgaggaaggttacataattgttttgaaataattatccttggctacgaaaatcaataacaatcgtgatgccagtccatggttggaaggcagtagttactgggcagatatccttacagaaatttttttttgtataacgttgtcacggactttgtgcaaggttgtaatttttgtagaatctttttcatcatcaggcatacacgcctgagaatgctctcttcatgggcttccccagctcgagaaatggtttccccattttggaggaatcccgtatggagaccacg

SEQ ID NO: 670312 - DNA, 883 bp, Homo sapiens
gcaatggctcttaacaactttcgccaaattgcttttcaaaagtctatagccatttcaccactacctctcattatcagtatttaatactttcgtctagtttacttggtgagcaatagcccctgtggcttggatggggccggatgtctatctacttttatttgccgatatatagtgaattgcccattcatgtgcttctgtccattagggtactctatgcagactttctctttctcaacaacactagtcatcatgaacgacagcggtcttggcatgggcacggcgcgctcacgcttgctaatcccagccacctttgcggcaggctgagcgctggcgtggactcgctttagcgtcagcgacgtttgacgaccagcctggccaacggctggtgaaacccccatctctacgcaccactacaaacaaacagttagcctggcgcattggtgatagggcacctgtaatcccagctactacggcacggcctgagtcaggacgaatagcttgaacccaacgaggcacgaggttgagcccagatcatgaccactgcactccaagcctgaggcagaacacgagcagagaacatcacggcaccacaacacacacaaacacataaagggtcccagcgcaaagaagacaacatgtgtacaaacatacacgacgacgcaagacccaacgacgaacactaacacacaccacaaaaccctagggccctcaaagcaggacaccccactggcccctacaccaagaaccaaacggtcgcaaggacacaatcaagtccgtctcagagcgccctgcaccacacaagccacagaaccataccaagggcatacaacagaactaaacgcccactcacgagcctcagacccccagctccattatcagcgca

SEQ ID NO: 670313 - DNA, 334 bp, Homo sapiens
ccgcagccgcattctcccagacctccaatgagcaacattctactctctacctccatgagaaccacgtttttacgctcgcacatatgcatgagaacatgcaatggtatgtcttcctagggctatggcttactttcatttaccatcaatgtactccactatccatccatctagccacaaatgacagactttcattattatggtcatggttgactaatatcccactgccgtatatctaccacattttctttatcccattcatctgttgcatggatacgttattgttagttaaaccagacatagccttgaatctgtaaattgctttgggccgtcatgg

SEQ ID NO: 670314 - DNA, 930 bp, Homo sapiens
caacattttgataatgcatttaatcttttgcatgaaatcacattctaggtcactaaagcatattgatgattttaaaatattatatagcttcccattggtcggcacagggcattggttctaatggattgggagagcccggcaacgttgtcacttcattgaaatactgattcgttacgcttatagcatgagtgcgcagtacaactagaagtatgttcacattgcatgcgaagagtataaattgatagcatttttgtataccgtctctgaaaatacatatgcagtatagcgtcactgttccaaggcgactgaatgaaagtagactcatctagagttcttgatagttactgccagcgaagaagttataactatgtgtagtaacttagcatgcggaaatatcttaattaagaaattcttcaggataacgtctgccattctgggaactgacagtaaaattacgggcaccaaatgtacttgaagtttagtctcagttgtgtgtcgtgaatctttgtaggagtgtactgtctccttaaagatcatatacctgttcttcagctggatacagctatattgtctagaggtcagaatcagtgtaatattaggttcagttggtcccgcttcagttaagacgaaatcatttggtgactatactgaggacatttgcttgtcagatgttaactggtcagaacatgctaccataacaatttattgagactaactagctgtcaggaaacaaagaataacacaaaaagtttccaagtctcaagaagaacttacctggatcacataaccattctaaaggtctctttcctggagcgatacagggttctttggtctactttcctgtagtgataaagtttcttttactctaatgcttcggttgtccctactaagggtcaatccagcaacagtgatagaatggcccaaactgaa

SEQ ID NO: 670315 - DNA, 970 bp, Homo sapiens
gtgacgcgtggggttatagaggtgaatacagattttagctatcggtctccaaatattcaatcatgttcctaatacttgtatctctctctgtgtgtgtatgtaggatagtcattatatgatggtgatacatctgcacacctcactgacacgtatctgtatactctatgtgtgtaaaaagatacagtcgattccattatttgaatatctgattggggaagaggaaactgcacagaagccaccttgatttatgtacaaccgcccacttgaactcctgcttccaagatttatacacttttatacctagagttcacctcagtaactgccttaggggtggattgccaaggtgtttaacggtcttattgacacacacaggttaatttcccctatctctcacctaccctcatgagtctatacacgcagatatcttaaaatacattccaaaactgctgcgggggttaacctctcaacacacagagagcaacgcccgcatcaattacagtccacactctccaagacactaatcacctttcctaacagaaagtgagtgctcaaaggggcaagaaaacaaccacatagccagctggaacacgggataacataaagtctataatacgtgccccaccaccacaagatcccgtctagaacagcgatcaaaaatgctactacacagcaatagaatccagcaccggcttaatatgtaccctacaggacaacaaaagaagatacacacgcgacaatggacgtggccccgaccgtggcggcaaggagaaaagaccaacaacagcaagtaaagacagcctacaaaacgcaacagcacacatcaagcaccactgtcgccagcaccccggcccgaacaagcaaacagcctcgacaaaaaacgcgacgacgcgacgacaggaaacaagagaccacacccacaacaaacaacaaaagcaacaacaaacacaacagagacgaaaccaacagcaga

SEQ ID NO: 670316 - DNA, 1850 bp, Homo sapiens
cacagccaccagcagccagccccctccgatacacctcccggtcctctcctacagacctgacacccctccacctgaatgaaaagcacatctcgtggacgaggaggaccggagcaccatccgtataggctcaatggacatcagcatcccatccacacgcaccaggacccagcacgggcatcaagaagatgagagagaggacagactgcgggacaggcgtagaaaaacagcgaggcagcatctacatgccgaaaatctacacatgtcagccatggagaacacaataagagagccagaacaacacacaataaataaaatcaaacaagaagtaaaacagacatacagagaaacacgacacaccaaacacgaaaatgaaaaaaaaaaaacaccacacaaatacgaaaaacaagaacaagaacaaataaacagacataaacagcagagaagaacaagacacaacaaacaacaccacgaacacacacacacaagaaaagagaaaaaacacaaacacacacaccaaccataaaacagcacaacacagacaaataacagaagagaaacacaaaagacaacaccagacaaagagacaacaaaagacaagaatacaacaaagtaccgcaactcacacttgagacgacacaaacatcaacaactaaacgagcaactacaacagaaagaaaacaacgccacataaaggaatataaaaaaaaacaaattgcacaaagacaaaccaaatacagacagagacatgaattatgacaaaagaaacaacaaacacacaaaatagaaaacaaaaggaaagaaacataacaataccgcagaacaacagcacacgaaaaaaggaagaacaacgagccacgcacacacacacgaaaacagacagcaaaacaacaacaacacacagacgatagacaaaaaaatacaacacaaccaacatgattcagacacacgaaagaaatcacatgacagagacacacacaccatacagacaagccaaaaaaaagagagaaaaccaacacaacaaaaaccataaaaaccaaagacgaacacacaacagatacacatccatagaccaacacacacgaacacagagcaacaaccacacaaagagataaaaaagaaacaacgaaaacagaaccgaacacaaacacaaagaaaaaaggaaagcgaaagcaaaaacagacagaagcgaacacacagcagagaacatgaacaaagacaacaagacagacaacaaccacacgaagaagcagaacaaaaaccacacgaagagagcacaaacaacaacaacagaaaccagacagacagaagaccagacaaccgaaaccaaatccaccatataacacgaacacgaactactgaacagatgagaataaaaggaattcaacacgcgaaaagacaacaacacaaaacccaacgacaacaaacaacaaaggcgaaaaaaaacagaaccacagacaacagcaacacaaacagaacaacacaacgacaaaaacagaaagctcagacaacacacacaaaaaacacacaaccgcaccagagagcagaacaaataaaaaaaaagtccaaacaagcacaacgacgaaaaaacaaagcaacaaacaacagagaacacccaagcaaagcacaccagacaggagactagaaaacagcaagaaaccaacaccaccacccagctcaaaccaaacgaagatacaacggacatgcagcaccacacaaggagaacgcaccgacaacacgaccaacaacaacaagaacaaaaaaaaaacgaccagaggacaacaacacgatacacacaaaacaaaagacaacccaccggacgtagtaaacaagcaagtacaaaccgagagaac

SEQ ID NO: 670317 - DNA, 337 bp, Homo sapiens
tggttgggcgcaaaaccccttaaaaagggtttaaacccgccccttcagtcgtgtccccccccccctttggggctgcctgtggtttttttgccctctttttggggggcaggccctttttggggttttttccccttttttggggccccggggggggtggttcccttttccgggccccccccccctttaaaaatgggttaggggggtttccccccttgggcccccccccttggtgttttgcccccccccccccagccctgtttctgcccccccttttttggggggtttgtggatgtttttcccttggccccccatccatttatttttttcccccccccca

SEQ ID NO: 670318 - DNA, 294 bp, Homo sapiens
attaccggaacagtagtcagagggcgtgagccgttacgggcagggcggtaacacaggcctgaacacccttctcctcagcccagtgcagctcatcagggtctgggcctgcttcagcttctgccagtgaggacctggacacttgtcttgctgagatgggacatggcaactgggctgggcttggggtcccctggggcatgctgccaccatcacagccgcaggtgcaccatggccctcttccacggcattgctgcaggcttgcagctcagtggtgtagtccaccctgccagcccacac

SEQ ID NO: 670319 - DNA, 1296 bp, Homo sapiens
  misc_feature (1296)..(1296): n is a, c, g, or t
tggtgaaaaagcttttaagtagctaaatatggccgccatgtttcccaagggcaatataaattccagttatgcaaaacatcctgacgggctgaggtaaaacgcacgtgctctccgtgcctctcagcgttcaccatgtgaggggaaacccacattatgtgtcttttaaaaaacattcgtggctttataaaaaaacattccccttaaaagaggccctccaaagaaggggcgtggtgaggcttcaccctctccggcgggggcccaggagaagagatcccggcgggcctcagccagtgggcgccctcccatgtgtgggaggcccatgtgggggtggcggccttcccccctatatgggcctgtgccacagggggcctctgtgttccagggtgtgtgctctctaaagatggggtgtgtacagaaagaaatagtccgggagggttacacaagagaatgtgggctcctgttcacaggtctataccacctatttggcgtaagaagcgcccgagagatatgtgccacgccccacgccaacgtgtcctcttgggggtcatataggggctccacatctttctccacaccctgttctctcccagggacaccatctctttctctccccccaagtctactctgtgggggggacaaactctgggtatggacaggtttgtggggtatcccccctatccgcagtgtttttcccccccgcgggtgggctcccagggggcccacttgtggtcccccgtgtgccactcaagatctttgtctgggcgcgaaaatatgagggaagttatagagagagcacaagagtgagagcgcccggaggcccccctcttcttgaggtagtggcgtccccccgaaaatattgttgcagacaaggagataaaaacgaggcccccccaatatgatcacgccgcggccactatctaaggacctacaaaatcaactgcagattttaccccccaattaaccgggaggggactcaccctccataggatgacacaacagcaagcaccttaaactacaaggggcccccacagtgtatggatgaccccgacaacaaccccccatcggagtgccccaaaagaacatcgctctttgagcaacgagacaccaactctctcgcgcagcgaacataacgtctcgtaggaagagcggccccccacataaatagtgcgccccccagcaacgaaacagttgatagacgacccaagtgtgagcccccaactgagtacgttcaaaaagagagcgccgagggggcaaactcacgagcactcactatccttgcgtgccgacacaccgccn

SEQ ID NO: 670320 - DNA, 304 bp, Homo sapiens
taggctggagtgagtggtgcgatgtctgctcacttcactctggctccttggttcatgtgattgtccggcctcagccttgtgagtagctgggactacaggcatgtgccaccaggtcgggctgattttgtattttaatgaatagtaggatggggttataacatgttggtcaggctggtctcgaactcctgacctcaagtgatccgtccacctcgccctcccaaagagttgggattacaggcatgagccaccgccctggccctcaaaaaaacgctttcatctgaccttgatataggcgatcaagctt

SEQ ID NO: 670321 - DNA, 197 bp, Homo sapiens
gagaggcacatcatcacggtcgaaatagaagcccagagtagaggtaggtgtatgatgtctgcggttacgaattgatcaggctgttgatagatagctccacgttggtggaataattctgacgaatctgggagctcatggttgagttggccgaaggatctagtcacataaccggaacgtggcaatgggtaccgagctcg

SEQ ID NO: 670322 - DNA, 104 bp, Homo sapiens
acatggacagaccctaacaatatagtacaaaaatctaaacatgtaaataaaaaatacaaaacaaataacctataaaaaagtactatataggaaaaaacagcagg

SEQ ID NO: 670323 - DNA, 315 bp, Homo sapiens
gttcctcccaccacgactcatggaccagtcattacaatagcctgccaaaccaacccacctttcaaaaccccactccagggcccctgcttcaggactcgcagatctactctccctgctcagatatcctgcagtttcccaccaatcatggcactcccaagccgttacgggcaatgcacacagcagctgagaaagatccagtacagtgtccacagccgctggcctcagtgaacatggcaaaactgaggctccgaagagtggggagctggcctaaggtcttgaagccagagacagccagagcttggggactcaagccaa

SEQ ID NO: 670324 - DNA, 758 bp, Homo sapiens
tactttgttaaatttggggagtagtgtgattgagggtggagtaaattaggcgtaggtaaaattagaggttaaggagggtgatggtggctatgatggtggggatgatgaggctattgttttttggtgaattcttcgataatgcgcccattggggcaaaaacgccggttagctggggcgcaggcccttcctagggagaggagcgtgtggatggaattaagggtgttagtcatgttacgcttgtttcaggtgcgagatagtagtagggtcgaggtgctggagttataagttgagtagtaggaatgcggaagtagttaggatatatataaatagttaacttaagaatggtctatgttagggttgtacggtaacaactgctattattcattcctatgtgggtaattgaggcagtatgctcaagaatttggcgtagcctgggttcgggttctaatcccacctcaactgcctgctatgatggataagatctgagcagacgtgaggaaaaaggctaacgtccagtgacgggagagatggcgatatgacttgacatggggcgctagttctgtgtcttgtgagaaatgcacgcctgcccggattgtccaggtgtgccttgggtcactctctgggactccaacggttcacagggctattcccagttaatgctatagcctttgatttttcccgtgacgctcgctggggactggattggacatccgcgttttgttcaggtccctacggtatgtccggttagaattatggtc

SEQ ID NO: 670325 - DNA, 178 bp, Homo sapiens
tgtcttgatgtcacttcattcaatcctcgataatcaacaaccatccttaatgacatccttcttttctactagaagcactggcgatccccaaggtgaagaacttgggcaaatatagcctttatccagtaactccttaatctgtttcttaatttcttccaaagcttttgcgggcatcctg

SEQ ID NO: 670326 - DNA, 1036 bp, Homo sapiens
gtagatataatcatcagattgatcacactactagaagcggacttcttcagtaaaagtgaaagccaatgttctacaggtgcacatatcatgatgtgagtagcgagtaaggtagacgtgtagaaagaaatagcagctaaacacgcgatagaccaaagaaaatcccatcagtagtatggacatagcttgatgtgtcattgacagttatcgtggtactcaagatcaaggctagattgtcacaaggttcctgctgaaaaaatgggatgatgtaagaaaagtccatcgtgagatttaaagagctggaaataggtttgaatagaacatatggagggatgaaatcggaaggcctcctcaagatgatataagtacaggcatataagacactgttctatcataattgagtttcataagatagaaatcaaatatcgcaggaaggttgagtactggaggatagggagtaagagtgacgatggtaaaagggactagacatataacgtagaagatcaacctaaattttgaagattaaggaaccaagtaatcaaggatgaatgatagtggagagtaatatgaaaaagaattgagtaaaggtgagatggaaggttgggtgaacgcgtgatattgtaatgaaaataaagtagaaaaaaagtgtggaaaagtgttgtgtgattcaagataaagtgattaaatgcacaaagatgaattgggaatcaggcaaaaagaatcatgaaaaaacaaacacgtgtttggcattgatataaaacaggtgtttgaggataggtgaataaatagagtatggcaaaagaacaagttacaacaatgaagtaactacgaataaatgatggaaaaaggaataagaaaagacaaatacaagttgaaaaaacataaaaatagaaatgcataagagaaaaaaaaagaggtaaaaaataaaaaaggaggatgaagaaaatgagacaataaaaagtaagataaaaataataagaaacaaaagagaagaaaagaagataaagaaaaaatggaaaataaaaaagtagatatatta

SEQ ID NO: 670327 - DNA, 1255 bp, Homo sapiens
gtatgttgtttttgtttttttatgtatgttgtgttgttttatttgtttttatttattatctggtgttttgttttttctttgtatgaagagaaagaaaaatgaaaaaaaaaaactaaaacgagacgttagaggagagaggaggcggggggtggtgctgctgaggatgtcttgacttgaggtatggttgctgtcctatcttgatatttgccgggtgtcgtccgcgtggctgtgtgttttgtcatgtcgttagcagagtgtggtggaccgacgactgggggcaccacatatggcgctcgtgctgggtggttcgcttgtctgctcctgcgcaggtggtgtcttccgcggtgctccctccgccggtttttgttccgcccgtgtgtgccccccctgggtggtggggttgcgcgcgcgcggtcaccatgtagtcgttaattgttgctggtgtcgttgagagaaaaacagcctgtgtggtgcgccccccgcttcttgtggtgggagactttgtgggtgtgccccccccccggattttctctaggtgtggctgttcgtggcgggccgcccctcgttgtgtgtttttatgcgtctcctgtgccgaggaccccccgggtggggctagggctctttttctgtgtcgggctcccgctcctgtgggggggtgccgcatgctttcgtttggtgaacctttgcacccacgccggcgtactcggtcaggggctacgcagcaagatgcagccggggagcaaaaaagacgcggtcagtgcaggttgtctcagatggaccctccctcatgtggtccctcggggacattccacatagatggtttccacatgagttgttttacccgcttttgccggagtcccccccctctgttagataataccgcatggtggagaagacagcgtttatccgaatacccgtgtgttcattcacaatggcgcgcacttctagggcattatgtggtataggaagaaccgggttggacgagtggtgcacacaaggcgtccgtttctacacactttctctacaagtgaataacgagaatatattcttatgtgcggccgccacttgagtgagtattcatgtattgggtccgaggttaggtcgcctgttatctatggttcagtatctactttgatacccacgaccgacttattgattgagtaccgagtctggcgccccataacattctctcgcgcagaattatggggtacccctctacagacaaatgtaaacagggaaacattagtcagagaaa

SEQ ID NO: 670328 - DNA, 386 bp, Homo sapiens
attgtgggcactccagcctgggtgacagggtgagactgtttcaagaaaaaaaaaaaaaaaaaaaaaaaaaaaaaaaaaaaaaaaaagacacaaggctgggtgcagtggcccatgcctgtaatcccagcatttgggaggccaaggcaggaggatctcttgagccagcttgagcaacatagggagaccctatctctacaaaaaaaattaaaaaatttgccaagaatggtggcatgtggaggcaaatggaggctgaggcagtaggatcacttgagcctggaaggccaaggctgcagtgagccctgattgtgccattgtcctccagcctgggtgacagagtgcatactgtttctaaaaagaaaaaagaaaggaaatatataatcagagga

SEQ ID NO: 670329 - DNA, 599 bp, Homo sapiens
  misc_feature (7)..(7): n is a, c, g, or t
tcccccnacggtggcatttgtaggcccatggttgagaaatgatatttcccattaaggagtgtaacagctgaggtctcttaagggagcttagccaatgtgggagcagcggtttggggagcagagacactaacgacttcagggcagggctctgatattccatgaatgtatcaggaaatatatatgtgtgtgtatgtttgcacacttgtgtgtgggctgtgagtgtaagtgtgagtaaaagctggtgtctgattgttaagtttaaatatttccttaaactgtgtggactgtgatgccacccagagtggtctttttggaaaggttataggtcactcctggggcctcttgggtcccccacgtgacagggcctgggaatgtattattttgcagcatgacctgtgaccagcactgtttcagtttcactttcacatagatggcccctttttggccagttatcccttccttttagcctagttcatccaatcccccctggggggggtgagggcccctcctggaccctgaaaatttatatttccccatttttatttatatttttggaattttaaataaaaggggtccataaaatgtgatttttttgatga

SEQ ID NO: 670330 - DNA, 246 bp, Homo sapiens
ctaggggataaggactgaatgacgaacggcgtaggacaacgcaggacaacagtagtcttaataattttcactacactttacccggcactagtgatcgataaactcttctgaccctcaccatcaccgtgtgagatggggagggtggtaatctacccaggtcccacaggcgaggcaacagatgctcagagaacttaaagacttggccggggtgcagtggatcatgcctgataatcgcaagtctgggag

SEQ ID NO: 670331 - DNA, 171 bp, Homo sapiens
gctgtgctattctgtttgcgcgactttctgtttgcggcctatgccttcatcgcgacatctcttctttgatccttcgacttcccgtctcttcctatcgatttgacgcactcttcatccccgtcttaggattgttcaccctcctactactgtgagacgtatatgcctgtgtta

SEQ ID NO: 670332 - DNA, 194 bp, Homo sapiens
tagagtatctgagcattgtgtcgaggtcgtcacactgaagatccagctggagtgatctgggcatgtgtgtctgaggcatagtctccactggaacggccagccggtcttttgctttgacgtgagcacgcaatgtgccgtccttcacgccttttcccgttttctatttcagaaccaatccctgacagagatagact

SEQ ID NO: 670333 - DNA, 277 bp, Homo sapiens
ctagggccttgtggtgtgtgcccgtagtcccagccactcgtgaggccgaggcggaaggatcgcctgggcccagaagcttgagactgcagagagccgagattgtgccactgcactccctcctaagcaactgaacaagaccctttaaaaaaaaaaaaaaaggcaaaaaaggaaaaggccaccttttcagtcccccaaaaggttaaacattgatctcgtacattacattggcccagaaatattcggaccctaggtttatcctccaaagacctgaaagcag

SEQ ID NO: 670334 - DNA, 298 bp, Homo sapiens
aaggatcccatgccataacctcctacatacgtgactgatacagcgctatcgcgggcaagcccgctcccacatttattggttcgtgttgattcagtcccagctcaacgcgccgccggtctgatactcgatcacacgggtctcgaagaagttcttctctttcttcaagtccatgatctcgctcatccacgggaacgggttagtcgtgcctgggtactcttccttcaagccgatctgcgacaggcgacggttagcgatgaacttgaggtaatcctccatcatcgccggaggttattggcat

SEQ ID NO: 670335 - DNA, 175 bp, Homo sapiens
gaggatcttcagcatgatcaggaaacacttcagtgttatgtgatggctgctcagtgcactggcctgccacctgtctggctcttctcatttggtgacccttgtggtgacaggttcgagagagacacccgggtctcgctcttcgagggcccttgtgcacatgcatgcacccagtggt

SEQ ID NO: 670336 - DNA, 360 bp, Homo sapiens
gatgtaacgcagtgcacatctcgtcatcatatggtctcctcaatcgggggaggtttgggttgtaatctttgtgtggcaaacagcatccatttctggcaggttggtgttgtgcacagcagtcagccatttaacaataggtttccagaagagttgctaaggtgcatactttgtctccattaagggaatatacggttgcatcatcggttagggtcacaggttcttcaatgggactttgctgaagagcctgagctaagacagctcagctccggggctatgaaattctcttctcccaaatctctaataggatgagaaacctcgctgttgtgggcatcgtgaagacaccctcccgtagaatgagct

SEQ ID NO: 670337 - DNA, 522 bp, Homo sapiens
cgcggtggctcacgcctgtaatcccagctctcagggaggctaagaggcgggaggatagcttgagcccaggagttcgagacctgcctgggcaatatagcgagaaccccgttctccagaaaaacggaacaaaaaaaaaccaaaggttcaaaaaaaaaaaaaaaaaaaaaaaaaaaaaactgtgtggggggcgcgccggggcccgggaaaaggctttataaaaccatgcgggtgggggcgcgggggcccagatagggccagcgtggaaccgtgggcccaagagcgggttcccaagagggaaaccggggccagggaacagagggccggggattccccaccaatatataaaaaacgcgccgggggggaacccgcgaggcggtttcgtgagagacaaattctcacgaatggggggagattccaggagggcgacataacacgggggggactctttcacaccacgggggggcccaaggcggagaggccgcggatatttcaatattaacgcccagaaaccggggggggaag

SEQ ID NO: 670338 - DNA, 223 bp, Homo sapiens
agaagctagaggatccccgaacgagcttctttgactcaaaaggaattggaactagaaacacctttagcatctaagtgagggggggctattacctaccgtcaacgcatgggtcataaatgctaaagcagcaatgttacacgtggggaaccgcgtaaaaaagaattggaataactggaactttaactacaccttgaagaaagagacatagctgaattacagaaca

SEQ ID NO: 670339 - DNA, 358 bp, Homo sapiens
  misc_feature (165)..(165): n is a, c, g, or t
  misc_feature (245)..(245): n is a, c, g, or t
gtgtctcgtgctgtcacccaggctggagtacagtagcgcaatctcaaatcactgcaacctccgcctcccgggttcaagcaattctcctgcctcagcctcccgagtagctggaattataggcgtataccaccatgtccggctaatttttcaccatgtttgccaggntggtctcgaactcctgacctcaagtgatccacccaccctgccctcccaaagtgttgggactataggcatgagcaccatgnccagccaacattaataaggttttagaaggctgattgttaaccctcatggatgactttgaggggttcaagacttcagtggaggagtaactgcagatgtggtagaaatagcaaga

SEQ ID NO: 670340 - DNA, 103 bp, Homo sapiens
cctgcgcagccaggtaggaggctctcttgtgccacataatcgtgtctgtgtcacaaataatcattaaattagctattttcatgctaaaaaaaaaaataacaca

SEQ ID NO: 670341 - DNA, 336 bp, Homo sapiens
  misc_feature (38)..(39): n is a, c, g, or t
  misc_feature (246)..(246): n is a, c, g, or t
caagagactcttggtacccaggattttaaagtaacatnncctggttaagggtagcggccggccgtggtggctcacacctataatctcagcactttgggaggccgaggtgggcagataacttgaggtcaagagtttgagatcagcctggccaacgtggtgaagccctgtctctactaaaaatacaaaaattagccaggcatggtggtgcacacctgtattcccagctgcttgggaggctgaggcatnagaatcgcttgagccctggaggtggaggttgtggtgagccgagattgtgccactgcactccagcctgggtgacagagcgagactccatct

SEQ ID NO: 670342 - DNA, 378 bp, Homo sapiens
tcagcggaaacgggagtaccggcgctgacagtaaagcgatgagcattaaagtaggtttgaatagaggcctttaaagtatgctagagcacgtgtaccctagggaacctatgtcaaaacaattttggtcttactccaaacagaaaaaatggtacacactttagacaaaagcaaaacttcattgtaagatctgtactgtacagctacttgctatagcccatatattcaggtttgttcaacaatctcactcatgacagaaaaagtcagcaaataagacttgggacaaaattatttactatcagtctccacatggaaagaccacagctttaatgaattatacaactccttaagattcactccttggtcagtgccggtttcccg

SEQ ID NO: 670343 - DNA, 282 bp, Homo sapiens
accgccagattctcccttaaggaattgacttcaccaggggtggcggctcccagacccagggcagtgtggtgggagggctctcccaaagagaaggcctggtcagcagagctgccccgcgtccccccagctgctcgaggcacactcgagggccgaatcctttctagtcagcccccgcccctctgttccgccgcaaaggtgcacactcatcgcggccagcatcggccctctgagcaactgtgcagcaccccctcacccccaatctaaacccagaaccactaaaaa

SEQ ID NO: 670344 - DNA, 143 bp, Homo sapiens
tgaagtcttagcatgtacgctcggaggttagggttctagcatccgaggtcgccccaaccgacattttttaatgcagagtttggtcgtttcggacctgtgggtttgttcggtactagtatgcatataatacattaccagctcca

SEQ ID NO: 670345 - DNA, 782 bp, Homo sapiens
aagaggctatttttgctgtcgcgtatgataaatagtgtgtgtggtggagcacacaaaacatttcttgccccctccgtggtgggttttaaagacacgacaagaaatcaaactccgtgtgggggccaaccctcccccctaacacacaatatttttttctcctttcttaaagaggcgtctttagatacactactcgtgcgctcaccactcaccaaacatttccaccacggggcccctctttttggtggaaaatataaggggcgctctctatctttctttctttcacaagagggtgttgaaaacaacacatgggcgccagatatgtgggtcggctggttgaaaacacatattatgtgagcgcccgcgtggagagagagttaaatttctcacacatgtaggagaccgcgtctctccacacaaaagtggtctccccccctaaattttctataggcgcttctcccctattctttatgtcgcgcccctactatgggggctcacacatgtggagagtacaccaaaatttccacaggtccacatagggggttgtggagaagatgggaatttttggggcccgtggcctataggctccccattggtagtggccacaaagaagtttataacattttttttcccacattttttctccctttccaccttttttattggatttagtgcggcacacgaccctttttaaagggattcctctcccggcctcttccaacacccctttcccccaccattttgtggaacttcaagggactttataaaaatggtgtttttattga

SEQ ID NO: 670346 - DNA, 771 bp, Homo sapiens
  misc_feature (23)..(23): n is a, c, g, or t
  misc_feature (78)..(78): n is a, c, g, or t
  misc_feature (116)..(116): n is a, c, g, or t
  misc_feature (124)..(124): n is a, c, g, or t
  misc_feature (134)..(136): n is a, c, g, or t
  misc_feature (140)..(140): n is a, c, g, or t
  misc_feature (142)..(142): n is a, c, g, or t
  misc_feature (155)..(155): n is a, c, g, or t
  misc_feature (163)..(163): n is a, c, g, or t
  misc_feature (174)..(179): n is a, c, g, or t
  misc_feature (189)..(189): n is a, c, g, or t
  misc_feature (200)..(200): n is a, c, g, or t
  misc_feature (203)..(204): n is a, c, g, or t
  misc_feature (206)..(206): n is a, c, g, or t
  misc_feature (211)..(211): n is a, c, g, or t
  misc_feature (214)..(214): n is a, c, g, or t
  misc_feature (219)..(219): n is a, c, g, or t
  misc_feature (221)..(221): n is a, c, g, or t
  misc_feature (224)..(224): n is a, c, g, or t
  misc_feature (232)..(232): n is a, c, g, or t
  misc_feature (235)..(238): n is a, c, g, or t
  misc_feature (255)..(255): n is a, c, g, or t
  misc_feature (257)..(258): n is a, c, g, or t
  misc_feature (262)..(262): n is a, c, g, or t
  misc_feature (266)..(266): n is a, c, g, or t
  misc_feature (270)..(270): n is a, c, g, or t
  misc_feature (280)..(280): n is a, c, g, or t
  misc_feature (282)..(282): n is a, c, g, or t
  misc_feature (287)..(287): n is a, c, g, or t
  misc_feature (291)..(291): n is a, c, g, or t
  misc_feature (293)..(294): n is a, c, g, or t
  misc_feature (310)..(310): n is a, c, g, or t
  misc_feature (313)..(313): n is a, c, g, or t
  misc_feature (328)..(328): n is a, c, g, or t
  misc_feature (330)..(330): n is a, c, g, or t
  misc_feature (338)..(338): n is a, c, g, or t
  misc_feature (345)..(345): n is a, c, g, or t
  misc_feature (347)..(347): n is a, c, g, or t
  misc_feature (353)..(353): n is a, c, g, or t
  misc_feature (356)..(356): n is a, c, g, or t
  misc_feature (358)..(359): n is a, c, g, or t
  misc_feature (383)..(383): n is a, c, g, or t
  misc_feature (387)..(387): n is a, c, g, or t
  misc_feature (389)..(389): n is a, c, g, or t
  misc_feature (400)..(400): n is a, c, g, or t
  misc_feature (407)..(408): n is a, c, g, or t
  misc_feature (422)..(422): n is a, c, g, or t
  misc_feature (437)..(437): n is a, c, g, or t
  misc_feature (439)..(439): n is a, c, g, or t
  misc_feature (461)..(461): n is a, c, g, or t
  misc_feature (463)..(463): n is a, c, g, or t
  misc_feature (472)..(472): n is a, c, g, or t
  misc_feature (477)..(477): n is a, c, g, or t
  misc_feature (485)..(485): n is a, c, g, or t
  misc_feature (488)..(488): n is a, c, g, or t
  misc_feature (491)..(491): n is a, c, g, or t
  misc_feature (493)..(493): n is a, c, g, or t
  misc_feature (499)..(499): n is a, c, g, or t
  misc_feature (518)..(518): n is a, c, g, or t
  misc_feature (522)..(523): n is a, c, g, or t
  misc_feature (525)..(525): n is a, c, g, or t
  misc_feature (541)..(541): n is a, c, g, or t
  misc_feature (556)..(556): n is a, c, g, or t
  misc_feature (574)..(574): n is a, c, g, or t
  misc_feature (593)..(593): n is a, c, g, or t
  misc_feature (649)..(649): n is a, c, g, or t
  misc_feature (660)..(660): n is a, c, g, or t
  misc_feature (666)..(667): n is a, c, g, or t
  misc_feature (729)..(729): n is a, c, g, or t
gggtggagatgtaaaaaaggaangggtgcaccacgctacaaaccactgtcgaaatgaggttgctaagagtcaccttgnggagggagagctgcaggtcccatctcatccagagctgntttgatcngaggtggggnnngggngnggaacgaaagggngggggggngggcgggggannnnnnccccacaaanccaccagggcncanngncaganccngggcntnccnttccacancannnngagggacggaggccagngnngcangagncagngaccaggcangnggccngacngnngggggcaggggggganggngcaagcggacagggngnggggccanggacccngngcaggnaancnngggggaaggggagaggagagaagngggngngggaaagggangagaatnngagaaagccagggnaccaacagggaaccncngagcaggccaggcagggaggancngggaacaancgagnggaagagnggngangnggatcnggaggccagcggggcgganccgnngngccaaggtgaagtgantgcgcaggaactggngcagaagagggaaggtcnttggacagggctgacatcntaggtggggagattgaagccaccctgggaaaatagtacttcaaacccacccctgtntcttcaatacntctttnntcgctgttatcaagactggattgaggccccagaaaaaatccagttacacctgggtgagaganactgtgaaccttatcagctaataatccccgaagtgaagttta

SEQ ID NO: 670347 - DNA, 283 bp, Homo sapiens
tttaattgttgcacgatctgatatctcagagtgtcaaagtctcatcgtagttgatatccgggtgctcagagcagcaccattgcagtccgagaatggcacctaaattttctcgaaggagccaagcaagtacagaatccctgtagggaataaaatctgttgtcttcttctttttactcacctcggccaaggctgagatgactttgcccacagttgtgagagacttattaatatttgctccttcctttaatcgagtccctttggcaccagttgaatcagctcgttc

SEQ ID NO: 670348 - DNA, 191 bp, Homo sapiens
atgtagctagtcaacgagatattccgccaagccagattcgggcgctccacatctagcgcaagtaggtcacgtggtcacccaattctttgatggctattcaactgcatacattcaggtaatgtgtctcaatgaggtcacacaaatgggggtcattttcgtcagtggccagtatagtgcagattccagtagtg

SEQ ID NO: 670349 - DNA, 341 bp, Homo sapiens
ttgcatatggcaaggccaagaggatggatcacttgaggccaggagttcgagaccagcctggccaacatggtgaaacctcatctctattaaagatacaaaaattagctgggtgtagtggtgcgtgcctgtgatcccagccacttgggaggctgaggcggaagaatcgcttggacccagggggcagaggttgcagtgagccgatttcatactactgcactccagtttgggtagcagagcaagactgcgtctcaaaaatatatatatgtgtgtgtgtgcgtgcatacacacacacacacacaatacacatatacgtacgtacaccttggccttgccatatgcaa

SEQ ID NO: 670350 - DNA, 132 bp, Homo sapiens
gatccagaggattacactgtcaggcggattgcacccgttcattgtcagcggattgaaccgtcactgtcaagcggattgcaccgctcactgtcaagcggattgcacgcgtcactgtcaagcggattgaaccgt

SEQ ID NO: 670351 - DNA, 101 bp, Homo sapiens
tgtttggaaatttaaagaaaaaatttatgggaagatctgaaaaacaattcctaaaagatggacttttccagaaatacacccacaataaaaacctgaaaacc

SEQ ID NO: 670352 - DNA, 322 bp, Homo sapiens
tgctgctctgaggacccctcgcgaggtatatcctgagatttgcaattaaaaaaatgaagaatcaaactatattttcttttctgtttttttgaaacagagtctccactctgtcatccaggctggagtacagtggtgtgatctcagctcaacatagcctcaacctcttgggttcaaggaatctcgtgcctcagcctcccaagtagctgggattacaggcatgcaccaccgtgctcggctaattttttcgtatttttagtggagatggggtttcaccatgttggctaggctggtcttgaactcctgaccgcaagtgatccgccca

SEQ ID NO: 670353 - DNA, 1297 bp, Homo sapiens
ggatgacgttcagaccgcgtttctgctggctcgattaacgaagtagtgccgtctcgcgtctgtggtctctcagtgccgcgcgactcgtcgcgccgaggtcgtccgcgaggaccatctcttcagcttccacgcatgacgcctggacagtccaggtgtgaggagcatgatgcggacgactagatgggccgatgttcctccctctgctccagcagtggcaagtggtcaggctggaccgactgtggccttcacggaagcacggatgcaaggatcatcatctctgctacttcgagttcaagcctgacactgggagatctcaacctgcgcaagcaatgagcttgggcgactgtcaggcggtgcagttgcgatgctcctgggtcctgcaggagccgcccgtcctgtaagactccacgtaatgctgatgacctccagactcgtgctgctctgaccgggggctcggctgtccggggatccctgttcaccagcgacaactaacggctagctcctaggcctcgactccgtggcaaggaatcgtggcaaccatccattcggacaagaccatcatttgggagaggaattgcagagggtccttgacagggtggctccttgccagcaaaagggatcatcctggtgaccacccaagatggcacagaccttgggacaagatgcgtgcaaacatgaaaggtatttgacatgccttctcggagcttgccagagaatggcgatgccctcacttaggaccttcgctgtgcttccagtggccaacgccgggaacttcccaggacgcttcaccggctataggcaaacaagacagacaattccaacttgaggtggcctgacacgttccgctgttgcttggtagccaatggcgctggaatggacattcccccattgccaggctggatgggcgcctcaaagcctggcagaaggctgacggtcttgaccatcaagtagaattgcgggaaccctgtgtccgacaattgagtggcgccttcccaatgtgccatcagacgttagcggggaaacattgaggccttgggggcaagcgacgaaacctgggttggaactctggacacggagagagccggtgggtcccacagagaatgaatccaaccccagaaccagaggaatgaagaaaccccgaggcgacccggggaaggatgaacacagtacacgggcaggagggaacaagcgacaaggaaaccagacaaccagcgagacggaagaagcaccaaaggacagaagaaggggagaagaaagaccacgggggtgaaacacagagaaagaagacacagaggag

SEQ ID NO: 670354 - DNA, 452 bp, Homo sapiens
taatttttggtattttttagtagagacggggtttcgccatgttggccaggctggtctcaaaactcctgggctcaagtgatccgcccacctcagcctcccaacatgttgggattataggcataagccaccatgcccagccagttttcatttctttggtctgcatgtaaaggactaaagaatgatatgtagctactacactgcagcaaacaacatttttccagtgtacaaatcagtggagagtaagcaatgtattactctgatgtcggtgaaacacctcaaattataaataatgccaggaacatgtgaaaactccacatgtttaataaatgccagctttcagaaaaagcagagattataggtattcaacaagttaagcaataatctggtagattagtaataatttaacacatgtgtatcttgtatttaaagttaactgaaaattatgtaaaaaa

SEQ ID NO: 670355 - DNA, 518 bp, Homo sapiens
gaatcaggacgctgctttgagatacgacctgacagctgctgccggcatgatggcggcgtgtgagtcgcggatgctcacgggcgcactcagtgcttcacacgggccacaccgcacagactatggtcatgccagcgaagtaacgtgcactgttgctaagactatgttgagtgtcaattactaataagagtattcagagaagattacactgtagttgcataatacaatcaaaaagtaacgtgctgcatagaagagatactgaaatagcgcagcacggaggagaggaaaggctaggatgagaaataggggatgctagggaataatataggaatagggaagagtagagaagaaggaaagaagagtggaagaaaattttccagaggttatacctccaagtcgtctgtgtgtgaaaaacagtataaacctcagaaatgtttgttgggtcttactgatatgcaacctagaaataatttttggtcattacttctgtatggttcacgtcagaatttcggtgcccattt

SEQ ID NO: 670356 - DNA, 167 bp, Homo sapiens
tctagaggatcccatgaaatcccatctttactaaaaacacaaaaaaacatccagggtgtgatggttcatgcctgtagtgccaggctacttgggaggtctgtgacaggagaaatcacctgaacccgggaggcggaggttgcagtgagccaagactgcgccactgcact

SEQ ID NO: 670357 - DNA, 321 bp, Homo sapiens
aggctggtagaaagctccaacacatattctcacataagtagggaataaccccagtatgaattatattatgtgtagtacgggtcgatgactggttaaaggctaagacacataactaacacatacgtaggacgtaactacttttaaaatagaatactactcatgtctacataaggtagtagaggtctggttcaaggcttaagccacaatactatctacatttgtaaggtaacctctccagtatagaatacacaaaagtaaaataaggggttgaagcccagttaaaggctacttccatatgcttacccatctgctagaactaca

SEQ ID NO: 670358 - DNA, 592 bp, Homo sapiens
aatatacagctgaaatacgcctgctttatgggctgaccataatatataaactttgctgaacgagtttgcactaatgtggacccatattggacagggtagaaggaatcttggtttactgaaagctatgcctcacatgttcaatcaaaaacttaactgtcacaaagctcccacatgaacgctatcctgagcactatgcgttcaaactaatggataaatgtcctgattctgacacactatgtgagggcttcgtttaatgttgacaataaccctctgggaaacagttcttttttatacaaagctgcccgaagtaaataggctcgtgcggactatgccatagagcgaactctccagggatcatggagagcactccttccattcaacatttgacacatttgcgtggatcacagtatcttactgaggagagaattccccaatgtgtaatgtgagtggagtcactgatcacatgactgcttattctggacaacgtgttagccgggacaaaaggaagaaattcgcctaataaagtgcatacattgactgcacgcctaaggaaactgtccaatgatgaactatacagttaacacagagactg

SEQ ID NO: 670359 - DNA, 197 bp, Homo sapiens
tttttattaaaaatccaaaaaattttagttgggcatggtggcccccgcctgtatttccagctccttgggaggctggggcatgagaattgcttgaccccagcagccaggggttgcggtgggcctagatggtccccctgccctccagcctgggggtcagggcaagactgtttcaaaaccacccccccccccccccctta

SEQ ID NO: 670360 - DNA, 287 bp, Homo sapiens
gtcttcatatactaccctacctacccttcctgggtactccctgcctctttcgttttgctttcgttttttttttttccagacagagttttactctatcacccatgctgaagtgcagtggtgtgatctcggtcactgcaacctccacctcccgggttcaagtgattctcctgcctcactctactaagtagctaggattacaggcgcccaccaacacgcctggctaattttggaatttttagtagagacggggttccaccatgttggccaggtaggtctaatgaaggacg

SEQ ID NO: 670361 - DNA, 479 bp, Homo sapiens
tcgacaagtctgagcgcgggtctgacggagtccgaaagagatccttgacaactctggcgtgacggcgttgactggtcacatgccattggagccgacgacatggtcggcacgtcatgagggtcagcaaggctggtggttctcacctgatggtcccagcgccgcaccgtaggagagccgatgaggtttcgtaccgctgtcaccctggcactgtttggagcactcattggcggtgctccaggcgcagtcgcagcccccaccgcttctgccacgaccaccacgacctatgtcgattgttcggctcccacgcccggcagggggaccgaaacgagcccgttgaactccctaacccagctcaaaagtgcttttggcccaggcaggaaagtgctgtagcgtcgtgataagtacctgcgttggcactgtcggtcatcaatgcctccggacgcgccggtgccgacattctgctaggttgctacggtgcg

SEQ ID NO: 670362 - DNA, 524 bp, Homo sapiens
  misc_feature (155)..(155): n is a, c, g, or t
  misc_feature (160)..(160): n is a, c, g, or t
  misc_feature (182)..(182): n is a, c, g, or t
  misc_feature (195)..(195): n is a, c, g, or t
caggtctgatttgactagcctgggtcagagtcaggcccatctatatattttaaggctccctaggcgatattaatgtgcccacccaggtttgaaaagccactgtttcagatcatcccagaaaggaagaagagttcaagtaactgaagaggatttancatantagaaactattttagttctgantacatccctgggntaaacagttctcaacttctctgaatttatcatatcactgcgattagtggatggtcttaggattagcaggagcagagaagcaaagatggatcctttatggggaagtaattattgaactagaagaaggaagggtctggtctatcagtaatagactataagttttactggcagtatttctggaggaatattcaaacttcagcaggaatgtcatgagtcaaaagtattatatgcaaataaggccataggggaaaaatatggaagaactccaagtatatttgaaatgaatcaacctctagctgtgctccaggaaaccttttaacatgtttattt

SEQ ID NO: 670363 - DNA, 114 bp, Homo sapiens
ccagctcgcaggaactgcatcaaattgagatcgcgatcttccatgccaggtccgggtgcaacagcgtcgatcaactcgtttacgcgatgcgttttcatctcaatatcgtccaat

SEQ ID NO: 670364 - DNA, 149 bp, Homo sapiens
  misc_feature (75)..(75): n is a, c, g, or t
  misc_feature (127)..(127): n is a, c, g, or t
  misc_feature (144)..(144): n is a, c, g, or t
gatctgtgttagtccctgggatggctccaagggcctgctctaggaaggcagcatgctcagtgggacacagcaagnttcagaatttaaagtagttgcttcatggctctgtggcactcccttttttttncctcggagccttccctnaagct

SEQ ID NO: 670365 - DNA, 107 bp, Homo sapiens
tggaaaccatccttggcctcacaggggcgacgatggggagcctcatctgcttcatctgcccagctctgatctataagaaagcccacaagaacgccccctcagcccag

SEQ ID NO: 670366 - DNA, 288 bp, Homo sapiens
acgtgtctaaaagtcatttcttcagagaagcatccctaatggattggtgtgcctttgttcttcacaatgatcttcctttgtagcagtaatggtaactaattattttataattattattattttattttgagacagagtctcactctgttgctcaggttggagtgcagctcactgcaagctctgtctctggggttcaagagattctcctgcctcaccctcccaagtagccgggactacaggtgtgtgccaccacacccaactaactattttttttttttttttttttag

SEQ ID NO: 670367 - DNA, 113 bp, Homo sapiens
agacaacagtgcctgagacaactacacaagcttcttgtgcttcaaagaagctcttgagtgtgcctgcatctgccagacaccgattgccacgaggatgagtggtctgcagaagt

SEQ ID NO: 670368 - DNA, 676 bp, Homo sapiens
  misc_feature (400)..(400): n is a, c, g, or t
aacaaaatggcaaaaaaaaggctccccccccagggtatcccagggccacagtaaccaaaaatagccaggttgaaggtttggctttccgacccaagaaaaagaaaggtagatgaggcaatattcctcttttaaggaagttataaaagttcttcatttaaaaaaaggtcaggtgcttccaaatgtcaataagaaaaatatttaaagcaagaatcaaatttaaaatgtagagagttctttataaacgtgaacttcaggccaggcccggtggctcatacgtgcaatcccagcattttgggaggcctaggtggcctgatcacgaggtcaggggatcaagaccatcctggcccacatggtgaaaccccgtatctactaaaatacaaaaaatcagccaggagtggtnacgtgtgcctgtagtcccagctactcaggaggctgaggcaggagaatcgcctgaacccaggaggcagaggttgcagtgagccgagatagcgctactgcactccagtctggtgacagagcaagactccatctcaaaaaaaaaaaacaactttttttcatgctgagaagatataatcatcaacacattcttgagcacaactatgcacacaggcacttccgcattcacaagccatgctgtgtgcacacactgatgcccctagattccttttttgaagag

SEQ ID NO: 670369 - DNA, 305 bp, Homo sapiens
gttttatttaaaatccttaatttcaacaggattactcaagaaaaataacgttattggtattaaataatgttgatgtattccctttaattgttgattatttaaaatgtcagtaaaatagtaaatggcactgtacaatgtagtttcatgaagcattctttatagttttcataaaattgatagtctccatggaatattttaagactgaggaagttccatatatcatttgattgtactttcactttattacttgcttgcatgtcataactgatggaaataaaactatgtatatttacaaatatgaaaaa

SEQ ID NO: 670370 - DNA, 984 bp, Homo sapiens
gattcctccgcgcgctgggacaggctgccttcattccgacagaaccgaagcaggtttgcttgctggtcccagactggctgcacccgcatcatcacctgttctgcccatgcgccaggaggtcatgcattcatcggagggaacgtggctcctcaaggttttgaggccaataccactcggtcgggccgcatccgtttcgcacggactcttcgtgggagacatcagtggaggcattcgtctttcgtccccacacgctcggggacgtttactccccatatgtgcgtcgctactaggagacattgtgcaagagcctgcaaaagcatgggcgagcctagaagatttagccatagagggaagtgttaacgttgcgatgggccgcgttctgcaaatagacctaggtgttggaggggacccagtactttgcacgtgcgtaggccaaagggcagtgactcacagtggcgttagcgagaatgttggtgaacaggaggacgctcgagcaagggacagaatgtttgaaccgttgtgttccccgagttcgatcggatgggcataggggaagttccgcgtgacgcttttgcccaatctcctagatttcgcgggccaatagcatggcggattcccaggccaaggcatgaaacgcgactcgaacaagacggggcatattgccctttgatagaacaaggcttccggtgcgtgggatgcggtatcacggatacatattggatccccttggattacaagacaacgcctcgacaggactgggtccgtcattccgcgtcattaaccccccaaagagcttatcacactgtgggcaagggggaaaaccttttttcggattggacagaatttccgtcaaaggggtttacaggtcacttcttgcttcactaccccaggcctggagcacgaccactgaaaacaaaaaggcgtttgcgcgaaccccccaggttgcattcggaaagggattcgggggactagtcggtggatagg

SEQ ID NO: 670371 - DNA, 155 bp, Homo sapiens
ttgaaagactgacccgagctggtaacacttactacaatttgaacccatttgaggttaaacagatagatactgaagttacgatgaagaaataaaaaagaggtatcgcgttatccatctaggtgctcctgacaaaatcagatgatgctgacgagcac

SEQ ID NO: 670372 - DNA, 233 bp, Homo sapiens
cgagccctccgacgcctgcttcaccaccttcttgagtcatcatatttggcaggtttctctagacggcaggtcacggtccaccactgacacgttgtgcagtggggacactggaaggccatgccggtgatcttcccgttcagtctcagggatgaccattgcccacatgccttggtggtcgccagttagaggcagggagttctcctcattgtcgtcggtggatcctcttagtagtc

SEQ ID NO: 670373 - DNA, 658 bp, Homo sapiens
  misc_feature (597)..(597): n is a, c, g, or t
  misc_feature (612)..(612): n is a, c, g, or t
  misc_feature (633)..(633): n is a, c, g, or t
gcctgtgatgccacccaaatgtcatccatgggcgcaggaccatgggctggttgtgagtgggctttagtattgaacagctggatctcaaacctgattcttcctgagccactgattagctggatggttatgaacgagtcatttaacctctatcagcttcaatgtgctcttccctaagacagggataataagagaagttaattcacaggactgttgggaggattaagtgagcttagtactgagcatggcggttggcaaatagcaagtgctcgatgagtattaaccagttaagcactcagcaggtagtagctgtcgctgctgctgctgctgctgttatttgcaagtgggttttgccttctaattcttgccgaattatcttcccgctgcgccacatcaatggcacgatgggtcagggcagccaccttcagtgccccgtaggctcagattcactaacagttagaagcacctgttcctagatgtacccattaatggacaggagagtctgcggcccacccattagggacagagttcccacagccatcctgtcttcccagtcatagcagcaccccttccccagaagcaccctccctcagcagcctnacacctgcctgctangaggtcgtgtggctcatgagncgccccagtctggggccggggttct

SEQ ID NO: 670374 - DNA, 380 bp, Homo sapiens
  misc_feature (370)..(370): n is a, c, g, or t
agaccacatatacccaaatgtatatgtggtatatagctgaatttcttgtttatgatgatgctggtataaacaaactcacgctgactttttttttttgagacggagtctcgctctgttgcccaggctggagtgcagtggcgctatctctgctcactgcaagctccacctcccaggttcatgccattctcctgcctcagccccccaagtagctgggattacaggtgcccgccaccacgcccggctttttgtttttttgtattttcagtagagacggggtttcaccgtgttagccaggatggtctcgatctcatgatctcgtgatctgcctgcctcagcctcccgtgctgggattacaggcatgagccaccgngcccagcctg

SEQ ID NO: 670375 - DNA, 289 bp, Homo sapiens
accaccagtaccagttcttagacggatgcagtgaggaaccagccgcaagctcctgtgctcactggtgaagctgccttgttggacaaacatgcaacattgcagaagagcaccacggaggttcgcagctcactccgccaggtgtctgacgtacagaagcgtgtgcaagtggcatgtccagcatggcatcctgcagcatccattgcacggcagctgcaatcaagcggggcctgtgttgctggtccactgcatgcccagcaaggttgcacttgtggggcccaggtggcagggg

SEQ ID NO: 670376 - DNA, 636 bp, Homo sapiens
  misc_feature (10)..(10): n is a, c, g, or t
cggtcgctgnggcagcggtggcagaatgttggcttccagagcgctgacctgattggcaagagagccatttctacttcggtgtgccttcgagcacatgggagtgttgtgaagagtgaagactatgctttccccacttacgctgatcggcgtgactaccccttgcctgatgtggccccatgtcacgatgctgtctgccagccagaagcgcttgaaggagaaggagaaggccgactggagcagcctttccagggatgagaaagttcagttgtaccgcatccagtttaacgagagcttcgccgagatgaacaggggcaccaatgaatggaagacagttgtgggcatggccatgttcttcattggcttcactgcgctcgttctgatttgggagaagagctatgtgtatggccccatccctcatactttcgatcgtgactgggtggccatgcagaccaagcgaatgctggacatgaaggccaaccccattcagggcttctccgccaagtgggactatgacaagaatgagtggaagaagtgagagccctgctctgccggctccctgcctccctcactccctcggcatgctggaagctgccgtatccaatggtccatgctaataaaagaccagtttacgtggaa

SEQ ID NO: 670377 - DNA, 259 bp, Homo sapiens
gccggaccaggcaatcgaggacaggagaacacctgagctcaggcatcagactctaggataagaaactagttcagcaggaagtgtgcctgtcagcctctttaggcttcatttgctcaaggtgtccaatcccatcgcacattttaatacctcaaatgtcacttgatgcgttgaagactctctagggaactctgagaacagtacccagctgtagtggaaggctcaccttagagcaccttttagttctttctctatccttctt

SEQ ID NO: 670378 - DNA, 357 bp, Homo sapiens
tgatgcacccctgtagttcccagcctactccggaaggctgagtgcaggggcaacttgttcgaccccgggaggtggaaattgcagtgacactgaaaccgcgccactgcactccagccgggtgacagagtgagactctgtctcaaaaaaaacaaaaaagagtttggtgtactaagccattgggggattcaaagattaatagtatatgatctctggacttttaaagaacttagtagagtatacaactaattgtacttggggtggggcaaaaactctgactagaggtgtgtaaacaaagcctgtgtccagaggagggcttattcaatcctgctcaggaaatactgcgttaaagaacggcta

SEQ ID NO: 670379 - DNA, 119 bp, Homo sapiens
gaggaggaatgcgagaggcaggaaggcagttgccgtggcaaggtttctggtcctggcccttcctgctcctgaggccccttcctcatgggtgccagcggaacttctttctagaggtggcc

SEQ ID NO: 670380 - DNA, 310 bp, Homo sapiens
  misc_feature (161)..(161): n is a, c, g, or t
  misc_feature (181)..(181): n is a, c, g, or t
  misc_feature (210)..(210): n is a, c, g, or t
  misc_feature (221)..(221): n is a, c, g, or t
  misc_feature (236)..(237): n is a, c, g, or t
tctgtattgagaagggtcatatttgctttcaaggaggaatgttgtattccctggtagatttgaggagcaggaagctcatgggggcttctgtagcccctctccgaaggagtctttattctgaggatttgaagctgaaacctcgttaaatcttcagaatgatnttaatgaagagggccccaancccccaatggaaaactgtttttagaaaanatgatgatttntgattgcttttgtanntaattctacaggtgttcgagtcttagggaaattaagatttatgacaggaccccacgggggagtaaaaaaaaaa

SEQ ID NO: 670381 - DNA, 302 bp, Homo sapiens
ctcgcaagatatgatggtcacatggataggaagaatgatgagagaaaaggtcatcaggaggtgctcagagcctgcgctgcataggactgagcagaaccactcctccagcttgggtggacctgcacactcctggttccaagtctctcctttcctggcaggtcttaagggaagattgtacccctcagcctttacatacccagaatcatcagtatgtcacttcctaatttctatcagtgtatctcattatttcatactgttttactaatcctgagtctaaacagatttgctcaaaaggagaccat

SEQ ID NO: 670382 - DNA, 238 bp, Homo sapiens
tgagttgtaatgtcgggcggagtagttatgatgggcagtgaggggcgaatatgcatctaggctataatattcggagtatagtagccggtaatgttacaacggtacctctagaatatagtagcatgcgcaatttaaagcgtgatatcgatcgcgcgagatctgtcatgatgatcattgcaatgggatccatatatagggccggggttataattacctcaggtcgacgtcccatggccat

SEQ ID NO: 670383 - DNA, 280 bp, Homo sapiens
tccagaggatcccctgtgtagacaaaagctttttctctgctaactatatgaaaggataaggactgttataattcatgtgcaccccaatgggcaaaagcaaaagactagcttcccctcaagaagaaaaatttcagacctatgaaaagggcaacaatactaataaaaaaaattgtatttacttagaagcattcagaatgtcaacaaaacagctgcaacttttttttttttttcaattacagagtggtattcagttaacagaacaacaattatttcgtataag

SEQ ID NO: 670384 - DNA, 174 bp, Homo sapiens
gacgggggtagggtagaaaatgattggaaagagagaaagaaatttctggggtgatagcaagtgtctgtatctgtggtaaaggtttctgggcacttaggcatatgcatatatcaaaactcatccaacagtgtgccttagattggtgcatttggttatatatagataagcatacac

SEQ ID NO: 670385 - DNA, 787 bp, Homo sapiens
taggacaaaaggtttcactttggggtaaatacattcttcataccaggaccagaggaaacctcagaaaaagtagaaaagggaagtctagtggtgatcaagaaaatcgatagcattgggagtatagagggtgcagataagtgacagaggaatatctagtacttactttaacaaaaaaggatctggacaaagcaaataaagacaaagccaacggatacttttctccaaatttaagggtcagttaaattaaacatttggggggggtggtggactgggtatgctatgtgaggggggttaaattctaggagtacagctgatgaaaaactggctgtgacaagttttaaacttagtgtattatttcgaagcagggtttacgtagcagtaacattgaaagtttctaataaatatacccaatggtacacagggtcaaaaaagcggcattttccctttcctaaattcttgggggttggctgaaatctgggggcaaaggtgcgggagggggctaaatgcacggggatatgaagtaggaatgggagaggaacagaactagatgggaactcagcattggggaatgatccatttggaatgtttaacggttccactcgtgttggcttccaattaattctaaatcccttcaagagggattctttaaaatagacttgatgggtgtcccttctgtgtacactttataagagaccttgtggatattgtaccagtgccctaaaggggcccgtatatttagcaaggggttactcctaaatagatattcacttctccaagattctgggaa

SEQ ID NO: 670386 - DNA, 378 bp, Homo sapiens
tgtcgtggaaggggcggggataggacatggacggggagcgattcggatgcgcatgggcttgaatattagtcatcgtcataactggtgtgagctgtcggcagtcggtgtggcagctgttgtgcgcatagtcccaggtgtggtgaaccggacactctcagtaggattttctgtttgttgggttgatggagcctcgggtgcagtagttgtggctgtgaagtctaccacctctagcacctcaagagctgtagtgaaaacggcatggctaagttcaatcgaagagcgggtggagcggctgctcgagggtgtggtaacgtcacacttaaactcttcgtcgagtagggaaccaagtgggcggagaagtagagggtacggattacg

SEQ ID NO: 670387 - DNA, 406 bp, Homo sapiens
cgttatggcgtgtgtctctgagcgagtcccagtgactattgttgatggacacacttcacttcccagttgcctaggggctcacaccggggagcagtaaagctcacgctcataaacgagtgttagagtcgtgagagtgatacacgcgctgtattagttcttaacgtgttcattctcttcagtccccaattatcactcattactgagtacagactattgttgtgggctcagttgtgtcctccccacattgatcttggacatcccaagcctctgggactgtgagaaaacacatttctgtgtctaagccacccagtttatggtattttgtcatggcagccggggctgaccaagacaactatgtggcaggtactatctaccgtatggccctaaaatgttttaacttcacacg

SEQ ID NO: 670388 - DNA, 637 bp, Homo sapiens
  misc_feature (76)..(76): n is a, c, g, or t
agcgatggcgagcgccgggatttgttgcgcgaggagactgcgagcctcttctctcagtctgccttactaccatgcncgatgctacgagcgcctggggtagtcggcgggcgcagacagacaatgctggtggctactgctgaatcggacacctggggcaggaggcccttttagcgcacaggtgatgcggagtctgcgtgacatgaatacgtgtgctctcagagcattgtattaatgctctatgtgtgactcagcagagagacgctggcgcatgccttaggacactgaccacgagaatctgtacaatggtagtcatgtatcgagatgctagacagaatcttattctcttctctacctatttagaggacatactatccaaacgattacctataattctgaagagtccctcatatccgaggatgaaattcaccccaatgaatggatcctcgggcccgggacgacttatggctggaggtgtaatgcctggaaatttccggtggataatttccacctcgatcaccaatgtcttcaatcctatcgatggaacggaaggaaccaccaatccagctctggggattcggtgtactagaatgattcaggagggataccgatctactcgtagctttgatctaagattatc

SEQ ID NO: 670389 - DNA, 237 bp, Homo sapiens
gtttgacgtggctttctacctatttctttttgaaagaatatttgcaaagtctagctcttggtttcattgtcacagacttagttcagactactcatcatttagttcagaccctcatttctcatactaagtagtaaaactaggtcctaactaggtcttctcaccctagaactcttcctagttttatatacatcctactgcccagatgatttactctaatacccaacatattgatcatgt

SEQ ID NO: 670390 - DNA, 259 bp, Homo sapiens
tcttcccgccagccacgttcagctggcgtcaataagcatctttggggatgtcctgcctcctccaagaccagccatgagtggctcttatgggcaaaggcggtactgcaggccaagcaaacggctctgggctggaatagccctacctgaatgccctgtttgacttcgccactatctgccatgtgagttgggcaaattggtgaccacctctgagccttgaaaaagtaagaaggtactttgttagagcaaaataataaaattt

SEQ ID NO: 670391 - DNA, 335 bp, Homo sapiens
acctaaagcaaacgccgacagtcatgagttgggcctaaatgggtccactgtggagggaggagctatgcctgttgaggctgctggcaggcaggcagaaatttggcctggggcagcgtgccatgatgcaagagctgggcctggaaaaagcccctgggaggcaagagcagggcctgcagagtgctgttctcatgtcatagctgttcctgggcatgccactgggaagcagaaggtgggcctggagagtttgacttgaggaagttttgggcctacattggccgccatgagctggacaggaactgggccaaaaaggctgttgtgaggcagcagttgtgcct

SEQ ID NO: 670392 - DNA, 363 bp, Homo sapiens
  misc_feature (179)..(179): n is a, c, g, or t
  misc_feature (207)..(207): n is a, c, g, or t
  misc_feature (242)..(242): n is a, c, g, or t
  misc_feature (255)..(255): n is a, c, g, or t
  misc_feature (271)..(271): n is a, c, g, or t
  misc_feature (277)..(277): n is a, c, g, or t
  misc_feature (327)..(327): n is a, c, g, or t
  misc_feature (331)..(331): n is a, c, g, or t
  misc_feature (334)..(334): n is a, c, g, or t
  misc_feature (341)..(341): n is a, c, g, or t
caaaatactccaaagatgacttcccctgcctcctactccagtatgacaaaggaggatgtaaggccttagccatgatttgcaggggtttgggagtcaggcccggccaattgcttgggtttctttctatttaaaaatttaagttcacagggttttttattcccccctaagcttttaaaggntcatggccctgtagttaggcctggctcnttttgcccctttccagggaggtggaaggaccctgngccctccttcccnattttttttttcaggntcgccnaggcctaggacctatgttgtaattttactttttatttttaaagttgtagngaanctntcccccntaataaaggttgtgaatgttca

SEQ ID NO: 670393 - DNA, 116 bp, Homo sapiens
  misc_feature (17)..(18): n is a, c, g, or t
  misc_feature (112)..(112): n is a, c, g, or t
gtttaacgtccggcccnnacactatcccgagtctcgacgatcacgggatgggacggttcgccgagagcgcggtaggcggccgcgccttctccgcggcgacctctgccacgtngagg

SEQ ID NO: 670394 - DNA, 111 bp, Homo sapiens
agaaggataagatcagaagagaaagacaaagccttagaacaaaaggatacatgccctgtgaacagaaggacaatgaccctgtgaaccaaaagataaagacttgtgaacaaa

SEQ ID NO: 670395 - DNA, 211 bp, Homo sapiens
ccggtccgcttccgctccacgttccgcgactgggcgggagacttcactgacttcccgcgcgagctgatcgaggccgccctggcccacaccatcggcaatgccgtcgagcgcgcctatcgtcgttccgacgccttcgccaagcgccaaacgctcatgcaggcatgggccggtttctgcctgaagaccgccgccccgctgaagccagcggcgg

SEQ ID NO: 670396 - DNA, 244 bp, Homo sapiens
ccctgtactgcgctgggatatagtaccgtaagggaaagatgacaaattatcacctaagcataattataccatcggactaaccccgtgtaccttctgcataatgaattgaactagaaataactttgcaaggagagcctgcagcaaagtacccccgtataaccacgacgacgctacttatagaacagtctataatgagcacacccgttctactttcgcatacatatgtgcgaagcatttatagtgc

SEQ ID NO: 670397 - DNA, 748 bp, Homo sapiens
ttcgatcagcagcagctcgctaatttctgccggattctggctgtcaccatttcagagactggatacagggaatgatgacaagcacacgcttcttgccaaaaatgctcaagcagcaagaagagcttgagtttggtggccttctgcagcgtgaagaatcaatccaagactgggccctatcgtcagcgagttcctggtcctttgttgaggcggcgtttgcaaactggcgactcgcaataggtgtcaggatgtcaacgggcagcagcccagacttccttcaggcacgttggataggagtgggtacacatggctagacaatgcttgtgggtgctagactgcccctgaatgcagaggtggaccaagtgatgcgtagtcatgcagtcaacaagtcgaagcctctcacttgtgtctccgctcctccagggagctgtctgaggagaatggcctggcctcacacgtcagccagaacccagctgccccagttcaattgaacgattatgcagtgaggatcatgtacatagactagtgcaagtgctcgtatgtcctctgccgtgactgctgatggggcgtcagccgaaaccagtgttcacagaactgattgtcagagttcaggctgtatccctggacttgaataatgtgtgtgacaaacgtgatttggagggcagctattcagcatctggccttgtactccatggtcgacaacagaagtgtgactgtagcccggacatgaccttggagatcacagatgtga

SEQ ID NO: 670398 - DNA, 129 bp, Homo sapiens
tggggatacccgtatcggacatgagtgaatggatgtgccttccatataaaagcacgataattatgtgttctgagtggaggcatgacctccgctgattatactctctctctcagtctcggctggggactc

SEQ ID NO: 670399 - DNA, 474 bp, Homo sapiens
ggtcggggtttcctggcttcaacagtgcttggacggaacccggtgctcgttccccagcccgtgcgggacggccatagccagccctccgtcagctcttcaccgtgtgcctcggactgccgatgggcaaaccgaccgtctcaggctccaggcggccgatgcagtcacaaactgcgcgcgcggacgccgcaccgtactcctatagctcggccagcgcatgacgaccgcgatccacctcgtcaggatgctccagaactacgaccagaactcagagtgccgtcatcaacccgccagaatcaacctctggagcatcttacgctctccttacgattctacacgtgttccagtggtcgtaacgtaacttggaccagcagatgatgatggccttatgaaaggaacgttgtgcgcacagtagcgtatggtcatctcacacgcaagtcagtcgagtagacgggaagggagggacagccaatttga

SEQ ID NO: 670400 - DNA, 482 bp, Homo sapiens
cacagagcacatgtaatcaagaaggagggagtgtaaatggattcagtgctgcatgagctgtcaagaaagaatgaagcttgaccagggactgatgaattaggcagtgagctgtccagtcactagtggcccctaggggagcagattccgaatttgttgctttgaatatagaggctggagttgtaaagagttaagcgaggaagagatggtgggaaggaggaaggctgacagcatgtcgtaaccactttaatgaatttggcacctctactttgagtgttcaatattctttttgaagttagtggtagaatatatattgacctgggtcagcacagatataattaagctgggtcaaaacaatacaaaattagacacatctgtccttaggtattcctgttgcatagatctgatttaaattctcatctgacctttacagtgcattctatatacttctgtattcacatttctctacaaacacttaacatctt

SEQ ID NO: 670401 - DNA, 349 bp, Homo sapiens
ggtcgacctggaagagaaatgaccaatcaaaaacctgaaaactaggagtaagtacagattttaaaaagtcaggccaggtacggtagttcacacctataatccaagcactttgggaggctaaggcaggagcattgcttgagttcaggagtttgagactagcctgggcaacagagtgagactctgtgtctacaaaagaatttaaaaaataatcgggcatggtggcgcacgcggtggtcccagctacttgggaggctgaagtgggaggatcacttgatcccaggagggtgaggctgcagtgagctatgatcatgccactgcactccagcttgggtaacagagatgccatctc

SEQ ID NO: 670402 - DNA, 223 bp, Homo sapiens
gatctactgacagctgcagtctcatcggatttgagcttctgtgcccagctggcccgatcgaagggactaggatagtatctcgtatgactgcgtggtagcttgggcataggggctccacgtcagtgatgcctcaggagacaggaggaggaacttgggtggagtccacaccggcgggcagcgtgtattatcgcgtgaagcaccgggagatgtaggcatgctcgtc

SEQ ID NO: 670403 - DNA, 934 bp, Homo sapiens
ggttacaagatctggcaaaagcgagctggcagaaccaattgccattcgtcctactagtgaaacagtaatgtatcctgcatatgcaaaatgggtacaatcacacagagacctgcccatcaagctcaattcagtggtgcaatgtggtgcgttgggaattcaagcatcctcagccttgcctacgtactcgtgtaatttctttggcaggaagggcgacagtgctttgtgctaccgatggaagaggcagtcggaagaggtcttgcagatacttgatcttatatgctcaggtatatgaagaatcgtcctggcaattgctgtagtaaaaggaagaaagagggaaaaggaaaaatgtgcgtggaggagactatacaaactacaatagaagctaatgtatatctgctagtggaaggagctatccaggtaggaacatcacatcatttgagggcagaattgttccaaaatgtctgaaatcgtttctgaagatccaagagataccaggagagaagcaagtttgcctatcaaaatcgtcctggggcctgacaacgtcgaactattggtgtcatgaccatggttcatggggacaagcatgggtttagtattaccaccccgtgttgcatgtgttcaggtggtgaacttagttccttgtggcgattagcgcaatgcactttctggaagaagacaggaaagcgtgatgccaaatgcgatgattatcgaagcgagtactcaagtgtgaccatccgcgtagagctgattacgagataattattctccggtgtggagtccacctggggcccgggggtcccgttacttgtattggccgtgtttgagacaccggtgtgtgtgcgtcacaaagatattggggaaacgaaggtcgcaaagggacccaatatccatttggggaacagcacacttacaggagaaaaaacacaatcagtgc

SEQ ID NO: 670404 - DNA, 919 bp, Homo sapiens
gctctctcaatggcaccctaatactgtgcccatcattcaccctaggcaaactccttatttacgccctcccaatttgaacacctttccctcttgaaacccctctaaccctgtggaatcccctccccccgactttccataataaatgctgctccctctacaaccccgcatttttgtaaccacaagctttcccccccattactgttacacaattctccacgcaacgctttcctgtcatatacccaagccttcctctgtcatcttcatatctacccttggcagtccccctcttcagtgtccctcttttccagtgcccgtcgcccccccgtgtgctctcttccaattctgccgccgcagtgggtccgtccatctttgtccctccccgtgggcagtcccccctgctctgctggttccccgcccaatgctcggcacgttcttgccacctctcctcgtaggtgtccacctctcgccgcgagccgcctgctgtcattgctgttgtccccccagaaagggttcccccccgtgtgttcagtcccccccttctttagggggggagtttctctccaagccaaccccatggtcaaaattggggcaaccccaaaatactgtcataccactccatgacacatgatcattcgccctgttccacaacatgtaaatatatctccgcgtcacgtcgacccccactaacatggctttccaaagtgtcattcctcccctaatctctctcgaaccccacccaccagaccgtccacctctttctcctgtccgtcgtccacgtcgaccaccacccctttctctatccttccgaagtcttaagaaacaaaaaccatgctccccataaaagtttacttcactggcaccttcccctccccgccggaaaatagaccccatttttaagagggggcaacccacataacaa

SEQ ID NO: 670405 - DNA, 156 bp, Homo sapiens
tctagaggatccctgatgttatcgcccaacagcatgtcggctaattttttatatttttagtagagacagggtttcaccatgttggccaggatggtctcgatctcttgacctcgtgatctgcccgcctggcctcctaaagtgttggggataacatca

SEQ ID NO: 670406 - DNA, 152 bp, Homo sapiens
actctctgggcagacggtgctctaatactggtgatgctagaggtgatgttttcggtaaacaggacggggataacgtattatgacgagattccgttttacttgtttttaatggggatgcgtctagcagtctgacctggatggctagtgctagg

SEQ ID NO: 670407 - DNA, 299 bp, Homo sapiens
cctgctgctgtgggctttctgagggcgcatgggaagtctagttctgagagctgaaggaagctgaagactgggaacaaccgtttctcctcggaaagggccaatgctacgggttctagtaggcaggagtaggagatagcaatggagcaagtccgcttctttgtgtcacctattacgttctagtcttacctctaggtgtgttccctggctggtggagaatgaatggcgaagccgcctgacaaggagaacatgaagtggtgcagcaatctgtaggcccacaatcataaggtttggccgccaaa

SEQ ID NO: 670408 - DNA, 314 bp, Homo sapiens
gaaatataacaattgcatgggaagtcaacattgggaaagctcagatgcttaaaaaatgtaacgcgtaaaaatgtcttctgtctaccctcatgcttgattgataatggggttacatgaagacttggttgaaaatcatttttcttcagacttctgaagattatgctcctttgctttgagctccccagtgttgtctccgaggagtccaatgtccttcctgatttcagatcttgtatatgatacctatggctccacccaagaaactttcatcttcgcttggttcccagtattctgacatatgtcaatgccatccttta

SEQ ID NO: 670409 - DNA, 373 bp, Homo sapiens
ctcctgagagaacgtcatgggattgtccccagggcaaagcctcttttcatccacgtaaataaacttgactttatttctctgcttctcatttagataaccagcgctgttccagagttaggcttcataaagctgcatgaggatattcttgagccagtctctcatccgtagaggaaactgaatcacttcaaagtccgtacaagtaggaatagatttgcaggctccaaaataataccagctggagttagatgccccttataatggtcccctccagtctgcatttagtagcgaatagataacaggaactagcataggtctgattgtcagtgccacaaaaacccttaatcaagttagtggcactgacaatcagaccttg

SEQ ID NO: 670410 - DNA, 1074 bp, Homo sapiens
gatcatggcgtcaatgcagaaaacgactactagaaagaacttgtcggtccttagctaaatctgacctcacctgtcctgggaatgacctttaactgagtaagagtgttcaatatattcaatagttacagcatgtggattgtagcacatggtaagggtgcgaacaggttacctttatatgtacacggggaatagaaattttcaatctatctatattgaatagtatatagctagctcgagtatgcgcgttcttgaaaccgtcatccgtgcaggttacgatgtttctacgtggatgaagagactagttcactggtttcattccatcgactgttataatacgccaagtggctcaatatcctggtattaatcccaatttcttagaccatgaacgactttggtctcgctcagcagctcctcaatggtcgcgaatcacggttatgatcttaggctacttaaatctaggccatgcctattccacgcgtgcataaggaatacaggagactgagccatccgggattacacttctttttctacttgtgcgaaaccggttgtataacacaggaacattccaatacgcaaccaacgaaacactggtgggatactcactgacggggcaaacccaattttttggccgctaatatggcgctagaggcgtggggttcttatggaatacttccctggtgctcactaaagtcgagttcacattcacagctcctcaaaggccatccccccacagaatgcgtgggcagatctaccaggtgctatgaagcccacatcttcgacgagtagcccaaggaaaatcatttattgcactactttgttaggcttggccaagctggttatattcatcgctaccgtagccaggaaagcatagtgtccctatcatggacgaaacaaagttggagcaacctcttaggattccagtatccaagctcctttttggaacgctttttaatcactcttggacttggcgaaatgtggaccctaatatgggcaacgtgacatgaacttacctttccttttttaacttggaatatttaacctccggtggtgacaatatccgggggcaccaatgtg

SEQ ID NO: 670411 - DNA, 465 bp, Homo sapiens
  misc_feature (38)..(39): n is a, c, g, or t
gatccccccgctctgcacccaccccaaggatgcctatnncaatgtgaccctggatgtggagctggctggcgtcgaactgcggacctcaggtgatctgcctgcttcagccttccaaagtgctgggattacaggtgtgaaccaccacacccagcttcactgagctttttaaatgtcattactttgaattctatttctggaatttagtaaatttctttgtcattggaatctgttgctggtgaattgttttgcttcttccaagtttttgaatttgcttttatagacagtgactttttctcaaagatgtacctatgatattggttgggttggcatgttggcattgattcttggcacttgtagtattgtagtctctgtataattcctttggctataaacagtatcactgggctctgatttcctcagtgacttaggatatgggtgttgttggagactggggatcctggcagt

SEQ ID NO: 670412 - DNA, 932 bp, Homo sapiens
  misc_feature (399)..(399): n is a, c, g, or t
  misc_feature (536)..(536): n is a, c, g, or t
  misc_feature (541)..(541): n is a, c, g, or t
  misc_feature (568)..(568): n is a, c, g, or t
  misc_feature (689)..(689): n is a, c, g, or t
tatttccagcagcgagtcctttgccacaacctgacagtcaactttttctcactgttactgatatcgccaaacctccaggggaactacacctgtttagccttgaatcagctcagcaagagacatcgaaaggtgaccaccgagctcctggtctactatccccctccatcagctccccagtgctgggcacagatggcatcaggatcgttcatgttgcagcttacctgtcgctgggatgggggataccctgaccctgacttcctgtggatagaagagccaggaggtgtaatcgtggggaagtcaaagctgggggtggaaatgctgagcgagtcccagctgtcggatggcaagaagttcaagtgtgttacaagccacatagttgggccagagtcgggcgccagntgcatggtgcagatcaggggtccctcccttctctctgagcccatgaagacttgcttcactgggggcaatgtgacgcttacatgccaggtgtctggggcctacccccctgccaagatcctgtggctgaggaaccttanccagnccgaggtgatcatccagcctagcagcngcatctcattacccaggatggcagaactccaacctcactatccacaagtgctcccaggacctggatgagggctactacatctgccgagctgacagccctgtaggggtgagggagatggaantctggctgagtgtgaaagaacctttaaatatcggggggatagtgggaaccattgtgagcctccttctgctgggactggccattatctcaggggcttctgttgcattatagccctgtgttctgctggaaaggtaggaaacacttccagggtgacaaaacatggatgatgtcatggtttcggtggattcagaagaggaagaggaggaggaggaggaggaggaggaagatgctgcagtaggggaac

SEQ ID NO: 670413 - DNA, 355 bp, Homo sapiens
  misc_feature (62)..(62): n is a, c, g, or t
  misc_feature (64)..(64): n is a, c, g, or t
  misc_feature (75)..(75): n is a, c, g, or t
  misc_feature (94)..(94): n is a, c, g, or t
  misc_feature (129)..(130): n is a, c, g, or t
  misc_feature (134)..(134): n is a, c, g, or t
  misc_feature (136)..(136): n is a, c, g, or t
  misc_feature (175)..(175): n is a, c, g, or t
  misc_feature (184)..(185): n is a, c, g, or t
  misc_feature (187)..(187): n is a, c, g, or t
  misc_feature (223)..(223): n is a, c, g, or t
  misc_feature (322)..(322): n is a, c, g, or t
  misc_feature (347)..(347): n is a, c, g, or t
caaagcgcgtcggttaccggctgcatgggttaaggtgtacaaggttatattaaaataaaagngngacgtgcgcgnataagggcggtattagtgnctaagcgacgtatcgtaacagtaccggccacggtnngagntnttcacggtcgttatcgttttcatcatgcaggtcgagttngcacgaccnnanttggcgtgcgtccaacgtttccgagtgtaaatactncgtccttagtcataatgagtaatacagcaatgctaattaatatcaatatcggcagtacagccacgcgacgctcgccaaatatcttcgcaagttagaaangaacgtcagcggccgtggcgggcgnaccagggt

SEQ ID NO: 670414 - DNA, 553 bp, Homo sapiens
aggatccccagatgaattgttagaaaaagtatcagagaattaacttaatctgcttatgagattttggcttgaatctggggtaagaactgttagccctgttgtacagatgaggctgctggtgcctggcaggttcccgcagccagcaaacccttttatcttttttttttttttctagacagagtctcgctctgtcgctcaggctggagtgcaggggcatgatcatagctcactgcagcctcacactccggggcccagcggattctcctgtctcagcctccccgagtagctggaactacaggctcatgccaccatgctcagccaatttaaaaaattatttaagagatgtggtctcactttgttccccaggctggtcttgatctccaaggctcaagcgatccttctgccctggccccccaaagtgctgggattagggcatgagtcaccacccacagccttcacttccaatttttatgttcaataatctatttgttggagatggagtctccctctgtagcccagtctagagtgcagtggcccaatctcagctcactga

SEQ ID NO: 670415 - DNA, 488 bp, Homo sapiens
  misc_feature (391)..(391): n is a, c, g, or t
caacaaaaaagacatgaggcatagagactaaagcagaaaagaaatccttctctcctgctttctttcaaagggggaacaagtaacagggaggctacctcaatttttacctctccagaaaaagacaggaagcaggacacaggctactgtaagtcagggcataattcattgctctgatggttctccaagtgccatccctgagccagcagcattcacatcccccaggagcttgttagaaactcaaattctcgccaggcgcagtggctcacacctgcaatcccagcaccccgggaggccaaggcagacggatcacctaaggtcaggagctcgaggccagcctggccaacacggtgaaaccccgtctctaccaaaaatacaaaaatcagccacgcgntggtggcagacgcctgcaatcccagctaattgggaggctgaggcaggagaatttcctgagcccgggagacaaatgttgcagtgaaccgagatcgtgc

SEQ ID NO: 670416 - DNA, 869 bp, Homo sapiens
ccgcgcttatggttccacgaatccacacttctagggaatgccccagtggggggtcccagaagctccaataggtgcatcggcatatggcgtcataagcctttattagacctgggttagtagtaaagggttaaggtgggccaaggatgggtgtaagtgctctgttccgcttagttagtttcttcaatgcatggtatgttatcatacaatgtagagagttagagttgtaagattaaggtgtagagggaaacttattagaagtagcacagggcggatggtgttgagacgcgtgcggggttgcaggcagaagaggcccaggatatgttgatacgtactttctggagagttctaaggtgcgtctggttagttgtgtgtgtgtgtacactgtgacatctttgtagcagtgcttgtgttgttcaagttcctcgtagtcagtttttgggcttgctctggtattgttgtttgtagtaggtctaggttgttgtaaagaatggcataagtactgcgctagtagtcgtgaatagacggaaagcacgggctgtgttaaggtcagctgagcttagtgagaaaggcaagagcagctggtagcaggttagtgttaagcaggcatacatcaagcaggtgaaaatgataagtccatttagatcgtttaatgctcttggaaatgcgtgtaagcagtagctgcaagtaatcagcagctgctgggaaagaagcaagcgaaactttcccttgtggagaggagggattgttccgtgctcgtagtagtaaggcaagcagtagtttgttagagcattaaaatatatataagttgttgcaggtaagttgttgacttttttaactatagttaagtgttaacctcacaagctgtcaac

SEQ ID NO: 670417 - DNA, 907 bp, Homo sapiens
  misc_feature (374)..(374): n is a, c, g, or t
  misc_feature (511)..(511): n is a, c, g, or t
  misc_feature (516)..(516): n is a, c, g, or t
  misc_feature (543)..(543): n is a, c, g, or t
  misc_feature (664)..(664): n is a, c, g, or t
tatttccagcagcgagtcctttgccacaacctgacagtcaactttttctcactgttactgatatcgccaaacctccaggggaactacacctgtttagccttgaatcagctcagcaagagacatcgaaagatccccctccatcagctccccagtgctgggcacagatggcatcaggatcgttcatgttgcagcttacctgtcgctgggatgggggataccctgaccctgacttcctgtggatagaagagccaggaggtgtaatcgtggggaagtcaaagctgggggtggaaatgctgagcgagtcccagctgtcggatggcaagaagttcaagtgtgttacaagccacatagttgggccagagtcgggcgccagntgcatggtgcagatcaggggtccctcccttctctctgagcccatgaagacttgcttcactgggggcaatgtgacgcttacatgccaggtgtctggggcctacccccctgccaagatcctgtggctgaggaaccttanccagnccgaggtgatcatccagcctagcagcngcatctcattacccaggatggcagaactccaacctcactatccacaagtgctcccaggacctggatgagggctactacatctgccgagctgacagccctgtaggggtgagggagatggaantctggctgagtgtgaaagaacctttaaatatcggggggatagtgggaaccattgtgagcctccttctgctgggactggccattatctcaggggcttctgttgcattatagccctgtgttctgctggaaaggtaggaaacacttccagggtgacaaaacatggatgatgtcatggtttcggtggattcagaagaggaagaggaggaggaggaggaggaggaggaagatgctgcagtaggggaac

SEQ ID NO: 670418 - DNA, 672 bp, Homo sapiens
  misc_feature (207)..(207): n is a, c, g, or t
acgccgcccgcacggactgggacccgcgctcgcaggcagcgctgtcactgcgccacctgccccgtgtgcgcaccacctacggcttctgcgcgctgctcgagagcccgcacacgcgccgcaaggagtcgctcctgctcgggggcccgcccgcgcaccggccccgggcccacagctgcggcggcggcggaggcccggacgcccccctgnggaccctgtgcggcccgcgaggtccgggcccggccacccccgcggcccccggcggtccccgcctgccccaggacgcgctcgctgcggggccccgccgctgccgcctcctgcgcgtccccgacgggctgctgagtcgcgcgctgcgggctggaaggagtcgccgcctggcccgcgtccgctccgtctccagcgggaacgaggacgaggagcgccgcgcgggatccgagtccccggcccgggccccctcctcgagcccgctgtcatccagggccccgcttcctgagcgcctggaggccaagggcaccgtggctctgggccgcgccggcgacgccctgcgcctggctgctgagtactgtccgggaacccggcgtctccgcctccggctgctccgcgcggagagcctggtcggaggcgcccccgggccccgcgccgtccgctgccgcctcagcctcgtcctgcggccgc

SEQ ID NO: 670419 - DNA, 317 bp, Homo sapiens
tagaaggagtcaccccatgggctgcgtccggtgcgttgccagagtcattaaggcagatgagcgccgcgcgggatccgagtccccggcccgggccccctcctcgagcccgctgtcatccagggccccgcttcctgagcgcctggaggccaagggcaccgtggctctgggccgcgccggcgacgccctgcgcctggctgctgagtactgtccgggaacccggcgtctccgcctccggctgctccgcgcggagagcctggtcggaggcgcccccgggccccgcgccgtccgctgccgcctcagcctcgtcctgcggccgc

SEQ ID NO: 670420 - DNA, 205 bp, Homo sapiens
cggcacgagggggaccgccgggggccgcgggggtggccgggcccggacctcgcgggccgcgccggcgacgccctgcgcctggctgctgagtactgtccgggaacccggcgtctccgcctccggctgctccgcgcggagagcctggtcggaggcgcccccgggccccgcgccgtccgctgccgcctcagcctcgtcctgcggccgc

SEQ ID NO: 670421 - DNA, 363 bp, Homo sapiens
atgcgtcatcaactcataaagtctaccatatcctttagcaatactagcaagggcgatgcagcctctgtcatacatctaacacctacattgatacagtacttttgggcattccagatcgtacagcacttcacaatcacagacgttactagctattatcaattcattagtgcagagattctctctgccactcatgagggaagggttctgttttataccctgctgtatccccagcatttagcagagtacctggcatgaggccgggcacggtggctgacacctgtaatcctagcacttagggaagctgaggcaagtgaactgactgagctcaggagttcaagcacagcctgggcacacattatggag

SEQ ID NO: 670422 - DNA, 770 bp, Homo sapiens
agcggctggagtgcagtggcgccatctcagctcactacagcctcggctggccttccgggttcaagcgattctccagtctcagtctcccgagtagctcggattataggcatatgccaccacgccgagctaattttggtatttttagtagaaacagggtttcgccgtgttggcccggctggtcttgaacttctggcctcaggtgatccaccggccttggtctcccaaagtgctgggactacaggcgtgagccaccgcgcccggctgtaatccagattttatatttgtttttgcttttgttttaagtatttagtatttgagacggagtctcgctttgttgcccaggctggagtgcagtggcgcagtcttggctcactgcaacctctgcctcccaagttcaggcaattctcctgcctcagcctcccgagtagctgggattacaggctcatgccaccacaaccggctaattctttgtatttttagtagagagggggtttcaccatgttagccaggatggtctcaatttcctgacctcgtgatccatcctgctcagcctcccaaagtgctgcaactacaggcgtgagccaccgtgcccgggcctagtcttcatattctaagttttctgctttcaggtttgtcctcatggtactaaacatattagaatgaccaccttatacattagcaactttgtttacatatataactatttcccaaggttaaatcctatacattgtattatcagtcacaggatatgaatgtttacaaggcttgtg

SEQ ID NO: 670423 - DNA, 105 bp, Homo sapiens
ttcaagcaggatacccccctcgaaacccagttcactactttcctttccccatatagagtctctatactgttgaagtgaatatactagatttgttatcataagtta

SEQ ID NO: 670424 - DNA, 838 bp, Homo sapiens
  misc_feature (51)..(51): n is a, c, g, or t
  misc_feature (67)..(67): n is a, c, g, or t
  misc_feature (74)..(74): n is a, c, g, or t
  misc_feature (118)..(118): n is a, c, g, or t
  misc_feature (138)..(138): n is a, c, g, or t
  misc_feature (150)..(150): n is a, c, g, or t
  misc_feature (154)..(154): n is a, c, g, or t
  misc_feature (156)..(157): n is a, c, g, or t
  misc_feature (159)..(159): n is a, c, g, or t
  misc_feature (164)..(166): n is a, c, g, or t
  misc_feature (168)..(171): n is a, c, g, or t
  misc_feature (180)..(180): n is a, c, g, or t
  misc_feature (186)..(186): n is a, c, g, or t
  misc_feature (191)..(192): n is a, c, g, or t
  misc_feature (203)..(204): n is a, c, g, or t
  misc_feature (207)..(207): n is a, c, g, or t
  misc_feature (217)..(217): n is a, c, g, or t
  misc_feature (220)..(220): n is a, c, g, or t
  misc_feature (222)..(224): n is a, c, g, or t
  misc_feature (227)..(230): n is a, c, g, or t
  misc_feature (232)..(232): n is a, c, g, or t
  misc_feature (240)..(240): n is a, c, g, or t
  misc_feature (243)..(244): n is a, c, g, or t
  misc_feature (247)..(247): n is a, c, g, or t
  misc_feature (255)..(256): n is a, c, g, or t
  misc_feature (265)..(265): n is a, c, g, or t
  misc_feature (268)..(268): n is a, c, g, or t
  misc_feature (276)..(276): n is a, c, g, or t
  misc_feature (285)..(285): n is a, c, g, or t
  misc_feature (291)..(291): n is a, c, g, or t
  misc_feature (296)..(296): n is a, c, g, or t
  misc_feature (299)..(299): n is a, c, g, or t
  misc_feature (311)..(311): n is a, c, g, or t
  misc_feature (336)..(336): n is a, c, g, or t
  misc_feature (338)..(338): n is a, c, g, or t
  misc_feature (359)..(359): n is a, c, g, or t
  misc_feature (392)..(392): n is a, c, g, or t
  misc_feature (402)..(402): n is a, c, g, or t
  misc_feature (411)..(411): n is a, c, g, or t
  misc_feature (429)..(429): n is a, c, g, or t
  misc_feature (550)..(550): n is a, c, g, or t
  misc_feature (554)..(554): n is a, c, g, or t
  misc_feature (824)..(824): n is a, c, g, or t
cgggtgagggcgctggggccctgggcaacgcgggctcgatgtgtgtcaacnaaatagctggtcccantggagcnggagaaaaaaaaaacgcaaaaaaaaaaagatgtctctctcaaantggcacctggcggtgaagcnggctgaccaacnaatnanncnaaaannnannnntcggttgcnaaaaanaaaanngggagaataanngcnaaggggctanaanannncannnntnaagaaacntanngcnggcaaaanncaaaaatangtnccaaaaantaaactgantaaaanaaaanaanatagtcggaaanaaaaaaagaaaaacacttgaattcnanagcattaaaaatgggtccaangtccatgttctgcaaaaatactggcctgaaccnaataaaaaanaggaacacngtggacaaaatggctgcnatgagagagttccgggtgttgcacactgccctgcacagcagctcctcttacagggaggcggtctttaagatgctcagcaataaggagtctctggatcagatcattgtggccaccccaggcnttancagtgaccctattgctcttggggttctccaggacaaggacctcttctctgtcttcgctgatcccaatatgcttgatacgttggtgcctgctcacccagccctcgtcaatgccattgtcctggttctgcactccgtagcaggcagtgccccaatgcctgggactgactcctcttcccggagcatgccctccagctcataccgggatatgccaggtggcttcctgtttgaagggctctcagatgatgaggatgactttcacccaaacaccangtccacaccctcta

SEQ ID NO: 670425 - DNA, 221 bp, Homo sapiens
aggtgcagacaaacatgcaccgggtaatttttgtatatatagtagagacggggttacaacatgtaggtcaggctggtctcgaactcctgacctcatgatccgctcgcctcgagcctcccaaagtgctgagattacaggcatgagccactgcgcctggccagagatctttgtatattggattgttttaaggcaaaccatgatgagaaaccgtcgaattcgag

SEQ ID NO: 670426 - DNA, 135 bp, Homo sapiens
  misc_feature (68)..(68): n is a, c, g, or t
cagcactccccaaaggtgcctgccaaaccccaggcctggcccgcccagtcccgcagtacatcccctgntcctcaacccgcccttcccgccccgctcggtcgccgctccgcgcacgcctggcgccgccgccgccgc

SEQ ID NO: 670427 - DNA, 710 bp, Homo sapiens
tgtggaggctcatgtctgtaatcctagcactttgggaggccgaattgggcagatcacctgaggtcaggagttcgagaacagcccggccaacatggtgaagccccatctctactaaaaatacaaaaattagccgagtatggtggcaagcacctgcaatcccagccactcgagaggctaaggcacaagaatcgcttggacccgggaggcagaggttgcagtgagattagatagcaccactgcactccagcctggaaacagaatgagactccatctatgctagaacaaaggcataagccaggtatggaggaaggagaggaggtttcaaatcaaaatacttgagagtaaatgaactgctcttggtactttactatgtcaattacaaagcttttcacacaagccacacgacatatttaagaatgcatgtgttgggccaggtgcgagggctcacgcctgtaatcccagcactttgggaggccgaggccgctggaaggcaggagatcgagaccatcctgactaacacggcgaacccccgtctgtactaaacctacacacacattagccggccgctgtgccaggcgcctgtagtccaagtactcccagtttttcccttgagctccaattacccggacgcctgcggcaggattgccgtcaccctggcacgcatgactttctcgtgccctgatatacgccaactgcatttcccggttgcg

SEQ ID NO: 670428 - DNA, 478 bp, Homo sapiens
  misc_feature (17)..(17): n is a, c, g, or t
  misc_feature (51)..(51): n is a, c, g, or t
  misc_feature (64)..(64): n is a, c, g, or t
  misc_feature (84)..(84): n is a, c, g, or t
  misc_feature (255)..(255): n is a, c, g, or t
caaccctcccacctttnaaggcacaatggccccaacctctgcttcccatcnattacattactgnacttctctcctcccattgancctccctacgtccctccttaagtatctttgcaattacactgggctcatttgggtaatcctaagataatcctaacatcctcaagatctgtagctcaacccacacactagcagagtcccttttggcatgtaaagtaacacattcataggttctggggatgagggtgtggatanctttgagggatcattattcagcctaccacagatatgttcttgcataccctatctctggaagaaaaaaactgctgagggtagttgcctctggagataggaagctgggggctgacggacaagggtaagacaaaaacgtatgctttactgaatgcccctttgtattttttgagtttgtgtctctgtattctgtcacaaagtgaaatatgctcattgtggatatttt

SEQ ID NO: 670429 - DNA, 1379 bp, Homo sapiens
ggagagaactagctcgagtttttcttaggttcttttctctatacacctattttttaaccagtaacaaggcctacataattcttttatctgtctgtggacccacccagcgggtgcggctcacacgtggcggcctaggtggctcatggaggaggagttcgggacgcctcgagtatacgaagatgcgcccaagaagagtgtgcaagcgatcctctcgtagtggggcccgaaaattacttatatagagcttgtcgtccgagaggtcctatctacggacagtcttgtgatgcgatccgaaagaccatttgagtaatagcgagaccgtgagtcgtgaatactttttaacccgacttcgctattaatcaacatccatctcgtgggaatcgtgttcaccacgagaaatacccacgattcgtgcggacatctcgtgaggatactgtggagcgtgttgagaaaatctcgtcgaaataatacaacgtggggtggacctcaaagaaacggtattcccaacgacatccaattccgctcaagtcgcgaagattttcacttcccgcgagcccccatctttgtgcgtatggaagcgtctaaacacgtgggttctgtaggggtttaatctccctcaaaagtagaactccaacgatgtgtaggaccgacataattctatgtacgggagcaccaaaacaaacccggcctatcatagtagtgacaggcgaagaattgtgcacaaaaggcggcgatattaatttcccccgcacggcgccgcccacactactaggtgtgtgtgtgcgcgtggctggtaaagaacggacacaccctccgaacaaaaaaagatatctggcgcagggaaatcctttttcaacagggggtatctcccccttacaaaagacaaacgatgtgtgactcttggagagaccacaaaatcgcacgaggggagcagattgataggggccctccacgtacctgaggaaaggcattgccaattccaaaaggaacgccccctccggagaggaaataaaaactactcgccacagccacagggggccccagatccaagagaaaacaatccctctggccccgcgggggaacacacccttgggggaacactccacagggtgggacacaaaacccaccacacgggaagagagaagaggtggaaacccgggacacaagcgcgggccccaaaggtgctcgcagaaaatactcgagagccacaaagacagtgcctgcccccaacgagtggcgagagcaaatccaccaacgggggggaaacactacacacaaagaaggactcaacctggaggacaacaccataacgacgaaacaacggtggacaaaaccaacaggcggcgcggctatcccccaggtgggaggcaacaatgctg

SEQ ID NO: 670430 - DNA, 269 bp, Homo sapiens
cgactctagcagcatccccaggcgttgtagtgggacagagtacacttctaacagagtgaccctgccatagcacaactataaccatggacagagtatggaaaacagctccctgaggccctggagcgtggcagatttgggagggaagttttgacttggacgaagcaaccagcacagtttcctgtttttgcatctttgccctgagggcagacacagtccccacatgatagtgtggggtgcctaacgcactgacaacgggggtaccgagctcg

SEQ ID NO: 670431 - DNA, 512 bp, Homo sapiens
  misc_feature (2)..(2): n is a, c, g, or t
  misc_feature (100)..(100): n is a, c, g, or t
  misc_feature (195)..(195): n is a, c, g, or t
  misc_feature (263)..(263): n is a, c, g, or t
  misc_feature (267)..(267): n is a, c, g, or t
  misc_feature (273)..(273): n is a, c, g, or t
  misc_feature (289)..(289): n is a, c, g, or t
  misc_feature (297)..(297): n is a, c, g, or t
  misc_feature (351)..(351): n is a, c, g, or t
  misc_feature (423)..(423): n is a, c, g, or t
  misc_feature (484)..(484): n is a, c, g, or t
  misc_feature (499)..(499): n is a, c, g, or t
tncttttttgttttgcttttttcccccccctttttgaaattatgtgctgctgtttaaaacaacaaacaaaaaaaacaacaaaaacacagcaactgcggantttgtccccggctggagcccagcgccccgcctggaatggatgagcctctccatgagagatccggtcattcctgggacaagcatggcctaccatcngttcctacctcaccgggcgccggacttcgccatgagcgcggtgctgggtcaccagccgccgttcttcncccngctgangctgcctcccagacgngcgtgcgngtctcgctgccgggcgccctgccaagccgatcatggatcaattggtgggggcgncgagaccggcatcccgttctcctccctgggccccaggcgcatctgaggcctctgaacaccatgcgcccgcgntgcgctacagcccctactccatcccggtgccggtcccggacggcagcagtctgctcgaccnacgccctgccctccnatgcggcggtcgc

SEQ ID NO: 670432 - DNA, 443 bp, Homo sapiens
aatggggggcattgaggatgatatcttttcacatgtgtttggtttctgattcaagtgacacgcacaacctgacaaacaacaaacaaaaaaagcaaccctcactttcagggcacctattgctctaaatgcataatataacctgctgccagaaccagatgtgtttcaacaagccaataaaaccaccttttctatagccattaaagcaaactttactgttctaacaaatttgtattttattttgcattgccacacatctgcttatctccaaactacatccctttggtagtaatgtttcaggacaagtcggtattacagcttgatgtttgtgtgttctaattctaagagttctctattccagatcatatcgagtagttaagacaactgtaacagcattttttgcaatacattgtaaaataataaaaggtaacataattaaaatcgaa

SEQ ID NO: 670433 - DNA, 158 bp, Homo sapiens
tatcacagatgaataagacgaactggaaacttaagtacaatcaacgtaggcctcacctcaatcgcaaacttaccaaagttaaacaaacttaagaagcttgaactaagcgataacagagtctcagtgtggcctgtgaagtaatggcagcgaaagtgtcc

SEQ ID NO: 670434 - DNA, 468 bp, Homo sapiens
  misc_feature (406)..(406): n is a, c, g, or t
ggccctgctttttgtggcaaggctgttctgattaataaaggatcgtgaaaaagtagggccttggtggtttcctccgtgggtcccagccctccctcacctccctgggggcagaggcagtggggtgaaggggatgggggccccggggctgagcctcccctcagtgtgtcacctttgggatttgacttcactggtgaccaggcccttcccgagtgtccagccatcctcagatctctatagaatatgatcccactggcttcccagaaagcagagaggcagctacatctcccagatcaggcctgacacaaggctttttggggagtagagtcctctctaggctttcaggggtgccctccagggttcacccaggccttgacgttccccttccctcagtttcccagagggacantttgccaccttccaagggcagttcagaacaaaccaaaggggggacgttccagtttttcccac

SEQ ID NO: 670435 - DNA, 913 bp, Homo sapiens
atccaccagtccttggccaccacttgctaagcagaagatcctgcagacccttatctggaggaggaagagaagcaggagagagaaagccacagccagcctgccataggatccaactggacaacgtgtgggatggacctggaaacaagcacctccccaaacacatcaccactccctagggcggggcctgtgcatgctctcccatgacatctccatgctggtttctccatagcataaatgaaaaaaaaaaaaaaaaggttaaacggggcaggtggtggtgctttttctttttcttccccccttcaacttatttttaaggaactccttagttttcacccttttctccatcccattcatcccaccttattctggtggtgtgcttcccaagaaccttccttcccaagaatagacattctccttacccagggcccttggtgttgaccccaggactcaagtctcagacgtggtgaacagatgtggccatgcccagaagacgccagcctggccaaaagggcatgcctcagtttactatttcatctctccgggatccctccctgaattgccccgggtgtcatcttctcccactcggggtaccagggattctaccaaattaggctttccaaaagccccatttctaagtccccttctctcagggaagcccttaaagaacaggtcccaaaagctttcacaggtggtttaaactctaatacagtgaggtaaggaaactggatagggccagctagtgggggtaagcacttgtttttgcgaccgagccaagaaggtgctatgtgccaccaagaggtgcttcagggccaacaaggcatacagaagagaaggaggcccaaatacctacaaaaagcgactggggcccatgtggacaacctttaacactaaactaaggacgtatatcggacat

SEQ ID NO: 670436 - DNA, 955 bp, Homo sapiens
  misc_feature (284)..(284): n is a, c, g, or t
  misc_feature (949)..(949): n is a, c, g, or t
gtccctggtgtgattccgtcctgcgcggtagttctctggagcgatcgttcttttatctccgtccgccttctctcctacctaaggtgctgtgccgccacccgatggaagattcgatgagactatggacagtgatgcgctcgcacttgaggctcccatgagacatatgctttgtgcggttgtgaagctaataggggcgaacaaagagttcatcacttatagaggtgggataactgatgtaaaagtgatgacatcaggttatactttagagaacggtgcagtttagngggactggtgcaacaggatgagttgcacgatgttgagggcagaaggcaagtgaattacgaaggggagtccaagttagacgtaaatgtggcaactttagtagattgagtgtctgtacagccaaaggtttccgcttgagggctttgaaataactccaccaggggtccttaacggtctgacgtgtggtttcacgggcctcgtgccatattaagtggacagcacgttagtacgctgttgggaggaagatgcttcgagtcagagagaatgactgacgggctcgacggatgtgaacctctctatgtatatctggtaagcggtctgcccctgtgaggtggtcagtaaggttcctcagaagccgagtagaatttgttgctgatgatgatgattggcgctggtgctggagaggggatgatgagaatgtggcggatagatgatgtggatgcgagaagaactgagtgacagggctgtgagaaattttagggatgttcgggcaatgggggggtcatttcgatggtagaatcgaacatggttgcctgtaaagggcaacgtttgaacgggaggtctgtaaccagggtttgtggaagttgtcaggcctacaggtgatgtgttgttaacaagggagagggagttggtgagagaataatgaggagagaagggggggatgagntaggaa

SEQ ID NO: 670437 - DNA, 295 bp, Homo sapiens
catgatttcgtacctcagtggaaaggagtcaagagaaatagattgctgaggaaatgagtggaggagagtggagaggaatgttgtggagttgacaggaaaggaatgtaatggaattgaatggaaaggcatggaatagacaggaaaggaatgaagcggaatggagtggaatggaatgcactggaaaggaataaaatggactggagaggaatggaatggagtggaatggaatggagtggactggagaggagtagagaggagtggagtcgaatggagtgtactgaaatggaagggagtg

SEQ ID NO: 670438 - DNA, 1153 bp, Homo sapiens
ccggcgcggaccccggaggcggcgccggcctccgccgcctcgtgccccgggccccgcgcccccggtctcggctcccgccgcgctgcccttccagcaccgccgcggagaacaaggaccagaccccgcggggacagcaggggggacctggggcatggagcagcatgctggcgggcatcgggacccattggcagagagcgaggaccggggagccagcatgagcggcgatgagaggctggctaccgagtgtcaggcgaggtggcagcggctgcccccggcagggggccatatctaacggggtttaacggtaactgccgagccgcaggcaaacggagacacgtgacagcccgatggatgtccagcaaggcacttagagtgagcaccatctacatagatgcagacttgcgacagattacagcgcacttacgaatcccacgattgcagatgaactgggtataatagctgacacctgtgctaggcctaagaacgccctcagaacccaagcgataatgcagggctcatcctcctaaagctgccccagaacattcatacctcagataatagccaatgaatgccgctaaagcgagctgctacattgacagggcacaggcatccggccaggttcccgagagcacgaagcacgggacgagaaggtaccactctaaccataggagcgactttggaccgtgaccctccctcgagtataggcatcaaagtgaacaaaccccggacacaatcgattcgacattggggccagcgagacccttcaactcgtacaataatttaggacccaatgggtcccaacagcgaggccgtgtgtggcggacataccacggtaattggtacacggcgaaacaacacgaacggctcggacgcaaggagagagggcagacacgccgaggcctggcgagacgccttgttggttactcctgactaggtctatagccgagcggaagatctgttgccgctgtaactgtgcgagagtggggagccggtggcgatcgtcatgaagccccgcagaggcgcgagtcgtaggaaaagagaggggcgcggccgagcgtagggagatctggagtgagaaggacggcagcttggcgtcgcggttgcaggtaggacggagcgggtgcgggagcatacaatgatgggtcaggtgggt

SEQ ID NO: 670439 - DNA, 114 bp, Homo sapiens
tctagaggatcttaaaagatgcgggtttatatacggattttactatgggggatttataatgacggatctttataatggccggtattttataatgatcggatcttactactgagc

SEQ ID NO: 670440 - DNA, 204 bp, Homo sapiens
  misc_feature (156)..(156): n is a, c, g, or t
ggggcgggggcgggaacggaatcttgctccgttgcccaggcgggatggagtacaatggtgcaatctcgactcgcggcaaactccacctcccaggttcaagcgattctctcagtagctgagattacaggcggtgcgccaccacgcccagctaatttncgtattttcagaaaagaggaggttcaccacgttggtcagcctggtctt

SEQ ID NO: 670441 - DNA, 504 bp, Homo sapiens
aaataatgaactaatatagataaatcattactaactcaatgccatactttattcagataacattagtcctaatgttcctttactgctccaggattccatccaggacatcatactacatttagtcatctctctcaggcttcttttagttgtgacagttactcaaacaccgtatttctctcactctggactcatgagtatttattttatactttgatttacattcagatacttcattgttattcccacactgaaaggctttggaatgctttgggcatcggaagcttttcacttggttcctgtatccctttgctatgctcacatcgtgtgtgtgtgtataatagcactttttttttcttttggagacagggtctagcactgtcgcccaggcatgcgtgcactggtgcaatccttggttccatgcaccctctgcctcttgggatcaagtgattctcccacctcagcctcccgagtagctggggctacaggaatgcgccaacatgccca

SEQ ID NO: 670442 - DNA, 831 bp, Homo sapiens
tcgcaccactgcactccagcctgggcaacagagtgagattctgtctcaaaaaaaaaaaaggtccctgtggaataactccgtgaagggggaacccggggggaaatctaagttctggcatataaacattatgtgggaccactacttttatgattggatccagtacggtggacagtagggtctaaacatatgctttctggaaaataagaaaagggtccggtggggatccagaagatatacgttaatagtcaggtttaatataataggtggtccttcttccagtcaaagtgggtctaaaatattgggatacaggagcaggttgccctttcaaatttttattttagcaaatagggattaagagcggatcaggctgggggtcgtgaaagaagatcttttccaggaagacattacaatggaatttctacatgccaataatcctagaggctaatttatgaacattatatttacggattcatcagaagtcttcttctgcaagaagaggaatgggttggagaccagtctcaggattgatattgatgacttactctgtctaccacaggatgggttttagctttccgcacaggatcaatcgttacacttagcttaatacgatgttaacctttcctcatataatattctaaatatggtcctccaaggatatccacctcttctaggtcccctggtaccttactcatgcaggtgagtacaatgctccctatctatctaattaccacttcatggaagggaaggccctgggctgggggccaaaaatagccccgacgttggggggggcggggaccacgagagtgttcaggcacaccaaagaggttctga

SEQ ID NO: 670443 - DNA, 171 bp, Homo sapiens
ctagtctgactctagagttatccccttgtgacagaacctacggctggacagtcgatatggatgcggatcatgaaagcccatgcacttcgggacaactccatccatgggtctatactatggcgcacaaaagcaccttgagatcgacccttatcagcccatcgtgcagacgct

SEQ ID NO: 670444 - DNA, 367 bp, Homo sapiens
ttctcctgaacgctgcctgctgagagataatgttcatcttaccttatgaggagaaacctttaatgacctcctgatcatcagccaggacagagggatgaacaaggagcccccatggcccatttcatccttgttaagcagccatttattgggcccttccccaggagccaagcacctgttgtgtctggttcgtctcatttatctcaatgggaaatacggctgcggaaaacttaaatcccaagaggttacattacttgatcaaagtcatgtagaccagcatcagcacaaagatcaaaaccctcacctgagtcccaagcccctagtccagaatcctgtggcagcatctggccagatattaactgatttgcca

SEQ ID NO: 670445 - DNA, 667 bp, Homo sapiens
ggagagagacagtactactctcgtagtcctccgacccctaatcaatccccctcctactactaactacctgactcggtacccctcacaatcatggctagccaggcgccacttatgcagtgaaccactatcacgaaaaggatctctacgctctctatactaatcatacggctagcggacctctccgttaacttagtagacatggcaccaggtcacaggagagctaaagtcatagttcttagtatctgtcgttcgaaaccacaactttagtccccacctttggcctaatcagtcacccgactgagggtaaccagccagaacgcctgagagcgcaggtcgtgggataccttccctagttctagcacccgtagttagtgctcccatatcccccgtagcgtcagtcagctagcttagcgctctcacacatcatcagagccagccgcataagtgcgtctatctgtcgcgaccctttgcgtaaagtacatccagctcatcagcctcgccccgagagagaaactaattcgaaacctcccattgagccccaagcagagagcgttaacatagttgagcgataagcatttaaccagccaaactacggcttttcttactaagttacacacggattaccgttcttttagcgggggaactcccactttaagtgacgttcccg

SEQ ID NO: 670446 - DNA, 611 bp, Homo sapiens
agcgacgtgatatatcggctatgaccgcaatagcacaggcaacaaatgcagaaatagacaaatgggattacattaaactaaaaagcttatgctcatcaaaggaaataattaacagaggtaagagacaatctacagaatgggagaaattatttgcaaagtatatatatgataaggggtgaatctccaagatatataaggaactcaaacaactcaatatcaagaaaacaaataacctaattaaaaattgggcaaaggatctgaaaacacatttttcaaaagaagacatacaagtggccaacaggtatatgaaaatgtgttcaatgtcactaaccatgagggaaacgcaaattaaaaccacaatgagctatcacctcatgactgttagaatggctattaccataaagacaaaagttataacaaatgttggtgagaacatggaaaaaagggaatggttgataactactgataagaatgtaaattagaaaagttgttaggaaaaacagtttggaaattcctaaaaacattaaaaatagaactaatatatgattcagcaatcccactactgggtgtatatcaaaggaaatgacatcaggatgttgatgggtacgagc

SEQ ID NO: 670447 - DNA, 106 bp, Homo sapiens
gaactacatgcagggctctgatagaacccacaaaattcacttcccctccattcttgtggcttcatgctgacagcagcttggtttcatgatagccagatggctacag

SEQ ID NO: 670448 - DNA, 258 bp, Homo sapiens
actccggggttttttgggggttttttcccccaaccctttcaacttttttttggattttcggttttgcatgccccccccggcctttttcccctgccagttccctgggggcagtttcccgctttcctgaatgggtttccggccccctccccccccccccccctccctttccatccgtttgaaaccctttgggtccttttttggcagaaccgtccccggccttgttaagtttttttggtccataaaggcaggggctttcca

SEQ ID NO: 670449 - DNA, 121 bp, Homo sapiens
caactagaacaactggtcaccctagtgcttctatgcgccctatcagtccacagaactgagtacttctgcaatagtaactcttcttgtcttacttggataggcgctctaaaaccactaggtg

SEQ ID NO: 670450 - DNA, 187 bp, Homo sapiens
atgactcgggaatgatcgactgtctaggcgtgcggcgggccgtagtgaaaaacagatataaaaacacagtcactgcagatgtggccagtggaagagcttgcagagctgtgtcgttacagaacacactccttcaacctagcataggtgctcttccagtagctcttaacgcatgatttccacgttgtag

SEQ ID NO: 670451 - DNA, 383 bp, Homo sapiens
caaggggtgttttgcaagggcaggttcattttttttagccccctttgtgaacccccttgggcttttttttggggttttatgcaagttggctcctaatgactaatgggaccaataatgaaggccttgttgcggcattagggtaatgggggggggttttgcccttaaaaaggggatttatatgctttagtgggaaaggttcatgaaaatccccttcttttacaaggggaacgggttttagggtttccccaggggttttacatttgcagggttttggggggtggggtgccctttgaggggatttgaaattggttcaaattggggtcctaaattttatattccctatattccctaagggaacccttaataaattttttttggtcaga

SEQ ID NO: 670452 - DNA, 101 bp, Homo sapiens
gtcctgcgacactgtgtctcgtctccatttggataaaggaaccaatcaacaaacaatgccatcactggaatttcccaccgaccatcttgagcctagtctga

SEQ ID NO: 670453 - DNA, 175 bp, Homo sapiens
ccattacgcgtgttcctggaagcctcctatttcagtttctcaacatgaaagtcatcaagctttctcccatcttccaactggacaacctctctgcggagatatgcctccagattcacacataaaccacaatgcaaaccccggtacttcaaaacagaatccttccagtcctcttcag

SEQ ID NO: 670454 - DNA, 1722 bp, Homo sapiens
gtcgtttgtctgcacgtcttgagtgtaatctgtgatgactgtgtggacgtataatctatatgtttagatccgtcaacatggtctcggttagcactcatacaagggggtgtgtctgtctgacttatgtaagacatgctttttggtggcgccgccacgatgtatgcgctctgtgtcgtcataattagttgtggtgtgttgccttgtatcaagaggataatctatcaatgcttctcttgtgtgagttagtgcgggcactactactagatcattcggttgataggttgtgttcttactgacacagtgcgtgcgctgtgtgcttatgagaggggctacagcgaaatttggtggcctgcatttttgtctctgtacacttcactcgtgggccctcataatacggaggtggttttgaccgcagactcggtcggtctcttctctgtgaagaaaacctcgttggtgtgacgagcatgatcggtatcacctctgtagatggggagggagattatttttctcgtccagtatggggaacaacatttagcgatcataaccgctggttctagggctatcctgtgatgggatctggtgaaatagtcctcctttcagcgtggtgtggttgacattttgggctagcgggcctattttcgggttttgttgacaacaatactcggtatcggttgtgtttggtggggcacaataaaatagcggagttgtgccccacaattgggggggcgcaatatgtgtccttgtaatataaagttcggcggaatatctttcgcggtgcaatatcggatagtgggctaataggccccaatatatttttggggataggacgctcgcggtgtgaataataatgtcgtggcagtagcaaattcgtaggtcttctcttgcggaggagaattttgtgcctctcactgcttattgccacgatcgtgctttcgtgaaaaatgcttttggggtcacttcgcccaattgtataaggggggtaaagtctcatattatgtattttgtatgggccacacaaaaagactgtctgatgtggcccgctcttatatcggtccgttgtatgagggagagcccccctaaatacaacacttctctcgcgcttatatcaccgccactagtgttatactctcatgatgtgatagggctcttacttgatgccgggtgttttctctaatctctagactctagctctaggtgagacattttttttggcactagaatgcgcgcgagaaatagatattgtctttaacatatttaaggggagtcgaccctataggcgctctctagcaagaggagacagagagagtggactctctagatagaaagaggtcacccatgggaaatgtcttaccagggtttaccatactacgatgtttcgttgtaacattctatgtcgccacagctgctctctcgctgggtggccaagaggcgctatatgcctgctgtcacacaatgaatgacacatagtttttataggccaaaatacctctagatggtgtaaagggccaaacaaactcgaaggacccgctaatttgttgaactaagattgttatacaccacgcggttactttctagctctctcctggttctcgtggaaaagtgtaaagacacttcccgaccaaggggcttttaaatgtagatttttttttttgcaccccatgctgttgattgctaaatgtatacagttctgatcctgacagctgaataaatgtctttttttta

SEQ ID NO: 670455 - DNA, 235 bp, Homo sapiens
caaatagcttctttctagtttttttctgacaatattcagtttttgcacgtagccctcaatgggcccccaaatgtccctttgcagattctccaaaaagagcattttcaaccttctgaatcaaaagacaggtttaactctgtgagatgactccacatcacaaagcagtttcacccatagctactttctagtttctacctagggatattcagtttttcccaatgagcctcagtgggcc

SEQ ID NO: 670456 - DNA, 472 bp, Homo sapiens
ggttttattagctatacaggaacaggctagcatacgctctgcactatatgcctgacgcccgcccaggcatgatataacggagggcacatggcaagcgagtctcccaagcacaaggaaacaccgtatactacacaagagagcggacaacactatgctacttgagcatgagaaactagagcgggttcatgcagaaggggccgactcataatgctctcgctggctcacgccggctgggctcactgtgaacgacacttgtgcacactcccgagttggtcaaactggaatacttctaagctcccattgcactcttggactacatgcctggaaggagaggtgagatcatgttaaatcgtgacacaacagtgggaagaggacaagttgatgcacggccccgaaacgcagggcttgggctagttctaaaccatatgagaggctgtgctacctagctcgtaaaatacagcataaaagctgc

SEQ ID NO: 670457 - DNA, 369 bp, Homo sapiens
acgtacacccaccacacaattggacacacacagctaaacattcgtgaccccacccatacccactcaccatagtccactcctgtgctcacaggccttgtccagccgtatcttccagaggtgaccttgtcactccgactttcgtatagaagcaattctcctgcagggtggcggtggagacagggtctaagtcccactccttatctggggcctactgaccatgtttgtggacagcccatgagagactaccccccttggtataccctgggtatgggtactgggggtccctgaccctgggatagacgaactgggtcagtgtggcttgctcagacccacctgttcccggctccagggaactcacccttagcgtgc

SEQ ID NO: 670458 - DNA, 298 bp, Homo sapiens
  misc_feature (35)..(35): n is a, c, g, or t
  misc_feature (87)..(87): n is a, c, g, or t
  misc_feature (114)..(114): n is a, c, g, or t
  misc_feature (150)..(150): n is a, c, g, or t
  misc_feature (162)..(163): n is a, c, g, or t
  misc_feature (212)..(212): n is a, c, g, or t
accccccccccccaaaaaaaatgagggactttttnaaatttaaatgtttttccccccccatgacccccccgggtttttatatttccnacccagaaaaagtaaaaatcttttttntaaaagtgttgtttttctaaaatttaataacctccnaggggttatttnntgtgccaagcccacctttccccccttctccagattgcaggacagaatantatgtgttaatgaaaatgaatggctgtacatatttttttctttcttcagagtactctgtacaataaatgcagtttataaaagtgtt

SEQ ID NO: 670459 - DNA, 240 bp, Homo sapiens
ggggggggggggtccagtgcgggagcccagggcgttccccctaaccgtcaccgaccggctaacccccatctcataacccgaaacgagacagaactataacgtaaagaggagacccatagataattagagcttcaagagaacaactacactggagacttctgagtagttgagaactgtagtggagcctttgaacacgtccttacttgacttatttcagaattacctacagagtgcatatcc

SEQ ID NO: 670460 - DNA, 183 bp, Homo sapiens
tatgtggaggccggtggcagcttctggggcttatggtgcccaggagtgaagcccagtgcccttactctgcattttccttggaaaggtgtgggtagtgactctgtattcagaacaggtgcagcgtaagaggcagcgacttacggaaggaggaatggatggatactatgtaagcatcgtatcgaa

SEQ ID NO: 670461 - DNA, 276 bp, Homo sapiens
aggatccccgacgagttgtccgagttataatgttacttcatgaatcaatttgtttattgaaagccttgaaatcttgtggatggtttgctgaccataccaaaaagatccgttggttcgtcaatgtgaatgaaatttgtggatatagatattaagcctacacggatcctaggcctaaagggaacctcgatagaatatggggccggttactcaggctgtaactggaagatggcaaagatataagtgaactccttgcacccaattggaccagtctatgaa

SEQ ID NO: 670462 - DNA, 245 bp, Homo sapiens
ccagacgtgctgggcgcaagcgcgcgtggcgctgaagtctcgagctggaattcacggaggtgcgctcgccgataacgggcagggtttccgaccgccgtgtcgaccccggcaacctggtcatgagtggagaagcgggaaacggcacccgcctgaccaccatcaatgcgctggacccgatctatttcacattcgacgcatccgaagccttgtacctgaaagccatgcgtgccggggaaccgagcgcg

SEQ ID NO: 670463 - DNA, 110 bp, Homo sapiens
ttcacaagatgcacagccaagaattttatctttattattgtaacacgttggtgtgttcccccacttttaggtaagatataataacagatgtgttattaaagtccaaagaa

SEQ ID NO: 670464 - DNA, 263 bp, Homo sapiens
tttatttattttaaatacctgaaacctcgtactttatattttgaagtaaggtgggattgtgtgaaaatgtggatggtttttcttcagtgttggttagaactactttttttaagtggagggtaacttggtagtattattataattagtcttttatatttattatatacatatacccattttatattttgcctgttttatctttgtattatttaattgatctgttcttttacttcgttaattgagttcataggtttttaatggtt

SEQ ID NO: 670465 - DNA, 202 bp, Homo sapiens
tacgaaagcgttcaagctcagcacccactacctaaaaaatcccaaaatataactgaactcctcacacccaatgtgtaccaatctatcaccctatagaagaactaatgtaagtataatgtaaccatgaaaaccatttctcctaccgcaataagccctgcgtccagacttaaaaacacttgacactgacaatttaaccagccaa

SEQ ID NO: 670466 - DNA, 387 bp, Homo sapiens
agacactgcgcccggccacagcactcaagtattaaactttagaggaactcaggtcctgtgtaacattgcttgataatcattatctcataaaaatcataagcaccattttttttctggaccagtgggtccgttttttgaggaatatgggtacttttgaaaacctgatgaaagctgtggaccctcttcccatagaaaaagatatagcacatatacacagaatactacacagtttcagaggactggcagattctgttaagtccactcatggactccaagtagaactgctgcaattgatctggaacatattttaaccaaattcttcagggaggattctcatccagattcatgggccaaaactatttatacccaggattaggagtgggagtt

SEQ ID NO: 670467 - DNA, 454 bp, Homo sapiens
  misc_feature (16)..(16): n is a, c, g, or t
  misc_feature (23)..(24): n is a, c, g, or t
  misc_feature (32)..(34): n is a, c, g, or t
  misc_feature (41)..(41): n is a, c, g, or t
  misc_feature (47)..(47): n is a, c, g, or t
  misc_feature (51)..(52): n is a, c, g, or t
  misc_feature (79)..(79): n is a, c, g, or t
  misc_feature (227)..(227): n is a, c, g, or t
  misc_feature (245)..(245): n is a, c, g, or t
  misc_feature (289)..(289): n is a, c, g, or t
  misc_feature (306)..(306): n is a, c, g, or t
  misc_feature (341)..(341): n is a, c, g, or t
  misc_feature (343)..(343): n is a, c, g, or t
  misc_feature (350)..(350): n is a, c, g, or t
  misc_feature (359)..(359): n is a, c, g, or t
  misc_feature (372)..(372): n is a, c, g, or t
  misc_feature (380)..(380): n is a, c, g, or t
ccgggggaacctcccnccccttnntgtcgggnnntgtgtgnaagtgnaaannttggggataaaggaggaagctcctcgnggcccttccaaggtgaggcaaaggcatttggacttgttccagcccagccccccgggtgacatcaccgggcagggaggggtgctggtggtggttcatacggagtaaactgctctgcctgtgtgagtggctcctgggccctaaacaggcncctttaggccatgggtcnctccccgtgagccatcaatgtgctttggtttgacatggtttctntctgttttttagtctanacctagtttttttgttttgttccccccgtatggananagtaaanattgttgtntgtgaaatttttnttttgtanattttgagttttcccttgtagggtaaaaaatgatccctttttgtaacaataacaagacccctttttaagattta

SEQ ID NO: 670468 - DNA, 394 bp, Homo sapiens
caccagatattaagccctataagattaaaagccctattgttaatttagagatttatttgaaaaatggacctcctgtgcctttgaaaattatgtggccattcccttggcctgggttgccagtggcctcattccctgtaatccccagcactttgggaggcccgagacgggcggatcaccctgaggtcgggagttcgagacccagcctgacccaacatggagaaaccctgactctactaaaaatacaaaattagccgggagtggtggtgcatgcctataatcccagcgactcaggaggctgaggtaggagaatcacttgaacccgggaggtggagattgcagtgagctgagattgctccattgcactccagcctgagcaacaagaccggaactccgt

SEQ ID NO: 670469 - DNA, 220 bp, Homo sapiens
ggtgttagagttgtatatctctatggaagtgatgatgttatctagtgtaaacagattgagtggcatggagtaagtcacagtgtaacaagctacagaagcaccatacccatctatcaataaacaaggaggtgtcggccaggcgcagtggcgcactgcctggaatcccagcacttatgagcaggctgatgcggagcggaccacgaggtcaggagatgagacc

SEQ ID NO: 670470 - DNA, 192 bp, Homo sapiens
gacgacctcgtcctgcacgccggccgtcagggcccaacggatcaggcgatgggcggcgttggtgttgggcgtgagagcgatggcctcgaagttgaacgcgatgccttcctcggcgccgccttccaccagagcggtgtggacagccttcagcttgtccgggtccttgaacttctgggccatgtaggccttccg

SEQ ID NO: 670471 - DNA, 111 bp, Homo sapiens
gcgctacctaagcagtagccatcttgggtccttcaaaatccaaatgatcttgccccagcactagctgtggaaccacctggcttatgacccctatggatgaggctgtaggga

SEQ ID NO: 670472 - DNA, 373 bp, Homo sapiens
ccggattgcttttttaaacccaattggagaagtttttggcctggaaaaaggccccgccttaggtgcaggagcctcagcccgcagcccctgggaccccaggtgggttttcccaagtcatgggcagggccctgggcttaagggcccccaccccccccccccgggatggtggtgggggctgggcccgtccttctttaaaaaaagcccttttctcaggggatttcctgctactttatgtggaaaaacacgcccctgtcccccttcgggcccctttggggggctggaaatttttccgtggggggcaggcccccgggtgggcctgccctgtcccccgcccgggggggccaaagtggaccattaatccttttcaaaatga

SEQ ID NO: 670473 - DNA, 577 bp, Homo sapiens
tgggggggggagatttgggtctccggatttttggggggcctggggcccccctcgctttttggggccttgggcaattccccctcttttttaaccccccaaggagttggtcggggggggtcccttttttttccgcccccgtggcccctttgggaaccccctctgggcctccgggtgtgggaggggtttttggggggttttcccgcctttttttccccccggggctttcccccctttgtttggggggggcacccctcccctttttttccaaagggttaaaaagggggggggggtgggccccctgggttcagggggttttcctccccccccggattaaaggggggggggggggtttcccccccggtttttcaaaggggggggtggggccccggcgcccccccttttccccgggattccccgggggggtggggggggggtcccccctttttcccggcttgggggaaaattttcccccccccccccgggttttttttaagggggttttttttgggggggggcccttttccttttttttaaacaaacccccccccctaaggggttttggtttttcccggcccca

SEQ ID NO: 670474 - DNA, 830 bp, Homo sapiens
gggaacttaaaacatcgatcttttatccaaaaatttcaaagggcaatataggaaagtattacaaatttacataaaaagaagatgaaacagtgagaaaaaacacaagtttattctcccgtgcaaagcagatcaaataggtgagacaaggaacttgtgacttctagctccctttaagcaggacgtaacgtgctagcacacagctcgtgaagtgctctagatatatttactactaaacttacagaggattcaaaaaagaggaattgaagggctaaatcacaaaataactctttgtgtgtaacacaatctcttagaattatacccaagtgcagaaagtgttataagtgaagccagtgtgagtctcacaggcctcatataagctcaacaaaacgcattatttattaaccctcaaagctcagaattatgtggtaattctcgtgtgtggccagaaatattattctcggtgggaatctattaagagcgtgccatagtgccaaagctcagggagtagacacatctcagataacacgctttagacccaaccagtgatatcaggtggtgcgattgctcttctggggcttggtgtggccctgtggatttacattcgtggtgtgcaagttacagaaaaacctttcctcgtgacttcgtgctgcgtgggccccggccgactgtacaaaggggcatctatggagggatatccttaagctaacaggttgggggataggtttgaatgaaagggatgcatgctaggacagaactatcgggacgtccgtaacgaatgctacgggccgtaaacaccctggcaatgtggccaggaaatataatctgtaaaa

SEQ ID NO: 670475 - DNA, 438 bp, Homo sapiens
  misc_feature (16)..(16): n is a, c, g, or t
  misc_feature (46)..(46): n is a, c, g, or t
  misc_feature (90)..(90): n is a, c, g, or t
  misc_feature (186)..(186): n is a, c, g, or t
  misc_feature (378)..(378): n is a, c, g, or t
agtgcctccccttccnggaaactcctttataaagacgggtctgaanggttaacaattcccctcagcatttgccttgtcctgagaaatganccctgtttccttccttccccttataaagattagttttgcccagatatgaaattctgggttggaatttctttcctttaagaatgttgagctcggtancaggtgtcacgcctgtaatcccagcactttgggaagccaaggggggcagatcacctgaggtcagtagttcaagaccagcctgaccaacatggagaaaccctgtctctactaaaaatacaaaattagccgagtgtggtagcacatgcctgtattccaagctactcgggaggctgaagcaggagaatcacttgnacccaggaggcggagcttgtggtgagctgagattgcatgtgattgcactccagcctgggc

SEQ ID NO: 670476 - DNA, 1047 bp, Homo sapiens
ggtgagattgcaacagattctgatacgccctgccctgtggacctgcagcggcccgggccccgccgcgccaggatgacaagccccgaaccgcttgggtcccccgcctgtatgggcctctgtcggcgggtgtccttcgtggaccctgtgacgtgtggaagccagggactccacagccctgagccacccacaagcggaggggagaagccgggcccaccatggggctgagatgcaacatgttcccccgactccctccaggcggggagctccagagacgggcttggcccacaggcaatcctttccgactcggacagtgcccccgcaaagggaaaacagacagcatgcgagcaccccggctcgcccatgcttgccggggacgtgatcagtctaagaggagtcaagaggctgttgacagaagaagcgaggcaatgagaatggattgtagagggagtggaaccgttgggaaaagaaagagattgggcgaatagtcggatcagatcagagacaagatgctcagaatagtagaaaagcacgaagctggaggaataagaggacagcaggacgtcgataggcatgactatacaagaggccttatataatcaacctaaagcagaatagtacctcaccaatgagaaaggggtacgtagaacaagggcgaaacagcaacatgccgcgcgaccaaagacaggcgtagagagagcacggactggacacgagagaatacagcaaacacagtagcactatatcaacacagacacgacagagcacagacagcaggcacgacgcagcagccggcagctacgacacgacgcggaaagacacagaggagaacggacgaaccagcagcagagcagtcaagcgaggagagactaggacaagtggtacacaccgactaggtagccatcagagaagacagcccagagccgcacaagaacacccacagcaccgcgtcacggaacaccgaggcgcaacagcccccaagaactacagacctctaacgaccaaccaccccgagaaggccagaccagcgcgctcaccggctagttcttt

SEQ ID NO: 670477 - DNA, 158 bp, Homo sapiens
tgtcctgccccagcttggctgactacactgactgtggtgtggtctctctctcctgagatgctagtgttgttgctcctgagtggtgccacggggctgccttgctgtcccccgcccccagctgggcgactacgccggacgtgtgcgttggccccacgggt

SEQ ID NO: 670478 - DNA, 125 bp, Homo sapiens
tacaagaaaatgcattagaccaggtagcttataaataacagaactttgttcctacacagtcctggcggctgagaagtgcaacgatcataggtgccggcagatcttggagtctaggggaaggcctg

SEQ ID NO: 670479 - DNA, 356 bp, Homo sapiens
aggtactctagaggatcgtaacgcatctcaccgcatacatagaatatattatttaacagagtgtgtcttaagagtatacttggaacctcggagtcaccatggacagaacaggtggccatggacttacagccaaagggtcccactgtggggctgctttggggagagactcacagctggacttctctatacgaacatgcaatgttagccaggaccaatttacccacaatggtttgcccgtaagagatagaaataatgtgtctcacaggaagaaacagtattgataaacatacacaggctaacagaggcccggccccgtaattaccattgagacagaagcctaccgattgcggtgttat

SEQ ID NO: 670480 - DNA, 429 bp, Homo sapiens
tttaatttttaaaataccggtggttccaagctttcaaataggttatgccccaaaaattttatttgtaagttaatttttttacaagtcaaaccattttggaagtggtatttaggttttaaatcggtccccgaaaattagcccctatgtatatcttgaatagtataggggggggttttcctaaagtccctatgtggttttaactaagtgaaatttttgacaagggaaataattgtaaaatcgtcttaaaggaaaatttaatttttacccctgtttttgggacattcgttttattaactgtcagacacaatttctgttttcatttgggagcccgttttcctttatttctacatttaaaataagaacctattttacccttttatttaatacagaattttcttaaactttaataaattcgcattttaaaggtga

SEQ ID NO: 670481 - DNA, 456 bp, Homo sapiens
tggcgctggatgcacagatgatcagcctgggcgtgtcggccgatgattttgaagagttggtgtggcgcggtgcacgcctgctgcgccaggccgactgtgtgagcaatggctttgccgccgtattgcagcaggtcgacgcgctgcccctgggcgatggcctgtggtggttgcacagcgagcagacggtcaagcgtccgggcctggcctttgtgacgccggacaaacccatgcgttacctcggccagcctttgcacggcctgttctgcctggcgagcctcggtgaagcgcaccagaccctgcttgaacgcctgtgtgccttgctgatcgaagggcgcggccaggagttggggcgcgccaccagcagccgcgcggtgctggaagtgctgggtggtgaactgccgccggactggccgagcgctcgcattgccctggccaacgcccacgggctgcatgctc

SEQ ID NO: 670482 - DNA, 134 bp, Homo sapiens
agagtccagcctgcagacgtctcacactcctcacactgtatacaggaaagaggctgatttgcaaacgcacgacacacaagtgtagtggaatgggtggttcataggcccaccaaggtgctgagtgggcataattt

SEQ ID NO: 670483 - DNA, 125 bp, Homo sapiens
tgttagtagtatagtgaccagcagctaggactgggagagataggagaagtaggactgccttgtctaagggtttttcgtggggtgtttatctaccagtgctgggtcccgttctgtataccactcag

SEQ ID NO: 670484 - DNA, 335 bp, Homo sapiens
  misc_feature (133)..(133): n is a, c, g, or t
  misc_feature (138)..(138): n is a, c, g, or t
  misc_feature (142)..(142): n is a, c, g, or t
  misc_feature (163)..(163): n is a, c, g, or t
  misc_feature (165)..(165): n is a, c, g, or t
  misc_feature (179)..(179): n is a, c, g, or t
  misc_feature (198)..(198): n is a, c, g, or t
tgtgctggcatgtggaacaaacacccttccctccaggcatctcttgaggtagtctataaagtgaattgccctcgttgaaccagaagctggattgtctcccttgtggttgtcctccacagggatgctcttgtantggtngtgnccctcaaaatggttgggacantnggctgagacgttgntcaaggcagttatgcccanggcatccagcatgtccttgcgggaagcgtgatacgcactgcgcaggtacagaaagggcaggatttccaccgggccacccttgatcgtagagtggggtcctgcaaggaactgcacccagactccgcgctgatcaggga

SEQ ID NO: 670485 - DNA, 116 bp, Homo sapiens
  misc_feature (77)..(77): n is a, c, g, or t
ctgtcgtgggtggccccaagatctcttgtaatttatatgtaaaagtttgaagctgaaagccccgtaatatttaattntattttgttaaacatgaaagtgcatcctttccctccaga

SEQ ID NO: 670486 - DNA, 319 bp, Homo sapiens
ggaagcttccctttttgtgtcaaaaatgaatcctgatttttatgggaatctctgttattaagatatttcaagatgaggccaccctgaagatcaaattgtgtttaggatccctatcttctctcctcggttctctcttactcctcatcctcccagaattttcccgtttatggtaaaaagatggggcccctatttgaatgggttttttttttccctgatgtcccattttgttgtgggaaaggatttggataaaatttttgtttaaattttggtagatttttatctatcccaatttaaataaaattatgttttgtaagctgta

SEQ ID NO: 670487 - DNA, 896 bp, Homo sapiens
  misc_feature (214)..(214): n is a, c, g, or t
gttttttctctgaagagacaaaagtaaaaatcgaagaaaagaagagaggcgaacagaaggaaaggtgttgtgtgaccacgtttatgagattgtatcatttatggtgactacctgcttgttagcaactatgcatttttgggttatatgcgaccccgttgttaataggccgacgcttttagttaggtgcgggaccgatattttgcgtgctgtccgncctatcccgatgtgtacagtcattaggaatccaaggttccaaacagtaaggataaagctaggaaactggaaccgcggctaattttggcattaggaatctttggccaagttttccaaggaaaaaaaaatagtactgagggttatgttacacaaagaatactgtcttttagagaaacattctgcaatatctataataatatgatatgttttggatttccttttaaataatctggcatgaggataaacaatatacccagcttaccagcattgataatccttaactagcgtgataatacatgcagttcattgaactctttatgataaactgttaacacaagctcatgtcctcttaaaagacccccgcaattgtaaaacttatcactgcgatattaaacattgcttgccaagcccgtggctcacccctgtaatcccagcactttgggaggccaagcgtggcggatcactgacggtcaggagatcaagacccatcctggccaacactgtgaaacctcatcgtctactttagaatatctacaaattagccgggccatggtggcacagcaccagtcagttccagctatttgggaggctgagtcacggagaattacttgcaaccctgggaggacaaaggttcatgagccaaggtcgcacccctgtactccggcctgggtgacagacaagac

SEQ ID NO: 670488 - DNA, 941 bp, Homo sapiens
  misc_feature (47)..(47): n is a, c, g, or t
  misc_feature (71)..(71): n is a, c, g, or t
  misc_feature (73)..(73): n is a, c, g, or t
  misc_feature (232)..(232): n is a, c, g, or t
  misc_feature (238)..(238): n is a, c, g, or t
  misc_feature (242)..(242): n is a, c, g, or t
  misc_feature (246)..(246): n is a, c, g, or t
  misc_feature (313)..(313): n is a, c, g, or t
  misc_feature (317)..(317): n is a, c, g, or t
  misc_feature (321)..(321): n is a, c, g, or t
  misc_feature (334)..(334): n is a, c, g, or t
  misc_feature (349)..(349): n is a, c, g, or t
  misc_feature (381)..(381): n is a, c, g, or t
  misc_feature (418)..(418): n is a, c, g, or t
  misc_feature (430)..(431): n is a, c, g, or t
  misc_feature (461)..(461): n is a, c, g, or t
  misc_feature (473)..(473): n is a, c, g, or t
  misc_feature (507)..(507): n is a, c, g, or t
  misc_feature (533)..(533): n is a, c, g, or t
  misc_feature (560)..(560): n is a, c, g, or t
  misc_feature (562)..(562): n is a, c, g, or t
  misc_feature (566)..(566): n is a, c, g, or t
  misc_feature (572)..(572): n is a, c, g, or t
  misc_feature (574)..(574): n is a, c, g, or t
  misc_feature (586)..(586): n is a, c, g, or t
  misc_feature (674)..(674): n is a, c, g, or t
  misc_feature (834)..(834): n is a, c, g, or t
  misc_feature (841)..(841): n is a, c, g, or t
  misc_feature (844)..(844): n is a, c, g, or t
  misc_feature (847)..(848): n is a, c, g, or t
  misc_feature (855)..(855): n is a, c, g, or t
  misc_feature (858)..(858): n is a, c, g, or t
  misc_feature (864)..(864): n is a, c, g, or t
  misc_feature (866)..(866): n is a, c, g, or t
  misc_feature (873)..(873): n is a, c, g, or t
  misc_feature (893)..(893): n is a, c, g, or t
tagctgtaatttaatctgacagtaaaacacaagaagcaatattagantaggtttagtatattatatatttnanctttgaaagccatagaaatcagttatcccagtttttttcctataaaagacccatttttccaaagcattatgcacaattttaattagaatataatgacagatgatattccataattttttaaatataaaatgaagtcaatgactcaaaaaagttatctgntgcggngggnttgnggggacatttcataatcagtatcattacagatataaagtataatggttcaactttttagtgcttganaggnaggntcatgataaaaanatcaatatgaaatcntttgactatagtagcaatatctaacatttganatgcatccatgctcttttgtataatcatattagagtnaagtatattttnncatctgttataactgctattgcgaaggggnaatactattgtnttattttccaagaggtatacacagggcaattttnttctccaggggacttgtgccaaccantataagatctagattcttcacataatntntcanaccggngnagcctcttcagnttttttatttttgaagtctgggatgctggcactttccaattaggcaacagttcttcattcctgtaatctggctcagagctgctgctgnctatgggcctagagcagcagacatgatttctttttaggcttcttcttttccactggtgttttcctatttatctgtctgaccaggtcataaaatatctcacagcagcagatggttcagtgatgagggcaagttcgaactataatatttggttagaaatgcngaaaggnccnagnntaggttnttnctcatntntctgaantatagaaatatataattaanattgatatttgaatttgaagaagattataaaaaggaaaagttaaaaaa

SEQ ID NO: 670489 - DNA, 930 bp, Homo sapiens
gtgatatctgggatctgtctgcgagacgtatagcagttgccgcactcccactcctccgtcatccgcaacctgacagggcactccctgtcacacaccctatttagggcgctcgccgagctgtgtcccaaaggcgtgggcctcgaggatggcctttcgcacgaatcgccttccatgtgttcgtcgataggggttctccgcaggccagtgtcttcattgagcagggggtgcgccgcgtcttgacccccgttttgcccgagacgcctgcattccctcaaaaggatgatgcatcatggccgaccgttgcccttagcggttccgtgcttcgcatgtgaaggaccgcgtgggataatacagtgtggtagcgcttgcttggaacgcgtttagggaacccctcccattaggaaacgaggcgggaaccgttcccccactctggcgggctcggtatcacacgcgtgggcgcttaggtgcgaagcatgtggacatttccgggcctatgtggttctttccccccggagttcgtcgcccactgcttagtttgcgcaggaagcccccggccggggttggtggcctttaaggcgctggttctttcaggcccgttctcaatttccgtcgtgcttgtatgaccccggtgcttgagggagataacacgggtgacttccgcttgcattgctctggccacctgcccgtggacgcgtttggcgcatactgttcctcaggggcgtccatcccagggtggtggtggcttggctattttcgtcggtggaggcctcctgggactcctttgttcttagccgtgtatgaattgtcgagttcctaaaaggcttgtttggtccaccaacggcataattgtgacgcgtttgatttcccctctgttgaggcccaccggtgttacagactacccgtataacccctgcgtaggatcgtacttga

SEQ ID NO: 670490 - DNA, 639 bp, Homo sapiens
  misc_feature (605)..(605): n is a, c, g, or t
gctcgacaccggtcgggatccgggggggaatatgagcggagtgaggagggagatgagccacagtaccgggatcttccaagcacagccacttcggtgaacatcccgtgaccggcttccgggctgaaaatacatggtaaatgtctatcagatatctgaggatggggagcagagttggatccggtctacttcacaaacaacagcgccggatgcccctccggacccgacggtggaccaagtggatgacacctcaatggtggttcgcgggagcagaccccaggctcccatcacagggtacagaatagtctattcgccatcagtagaaggtagcagcacagaactcaaccttcctgaaacggcaaactccgtcaccctcagggactggcaaccgggggttcagtataacatcactatctatgcggtggaagaaaatcaagaaagtacaccggtggtcattcaacaagaaagcacgggcaccccaggctcagatacaggtgcctctcccagggacctgcagtttgtggaagtgaccgacgtgaacggtcccatcatggtggacccggctgagaatggagtgaccgctaccgtgtggatgtgatccccgtaanctggctggcgagcacgggcagaggctgccatcag

SEQ ID NO: 670491 - DNA, 283 bp, Homo sapiens
ccgaaggagacgacatcatcattgtggcctgtgaagggagccgcatatcgtgccacgtcacactctgatgcttactggtggaggactctactgtaaggtcagagcagcgagagtacctccacctccctctaacctcatcgctctccacagctgcctgcttccctcttcagttacctgcttgtgaacagaagtaatctacagttagggctcctagtcaacacaacacatgctgtcgccgttcaggagtccaatccctgcgtgattttggggtgaagatactccg

SEQ ID NO: 670492 - DNA, 207 bp, Homo sapiens
  misc_feature (103)..(103): n is a, c, g, or t
gaacacaaatgccaaggtcacaagttaactgacccagaatcatcagagagttatggcagagagagagagagagagagagagagagcgacgagagagacttgtncgagtgtctagaggggggtgcccagttgatctctggaatcatggaattccatgattttgagaacgctcttagacgctgaacttaaactcgcgcaggggtctcta

SEQ ID NO: 670493 - DNA, 977 bp, Homo sapiens
  misc_feature (673)..(673): n is a, c, g, or t
  misc_feature (702)..(702): n is a, c, g, or t
  misc_feature (716)..(716): n is a, c, g, or t
  misc_feature (731)..(731): n is a, c, g, or t
  misc_feature (750)..(750): n is a, c, g, or t
  misc_feature (766)..(766): n is a, c, g, or t
  misc_feature (772)..(773): n is a, c, g, or t
catgacgttaagcatctgtgtatgaggcccctttgcaccacgtcatgcactaaaagactttgaggggttcggtataatttagtgttgtcttgtgaaccaagggctaagctgttggcagcaaggcctgtcttctgtgcaagtggttttggctttcacattcccaacaggacacagaaccccaagaggcaactggaggagcagtggagggtggtagctaagatcatggactctgggccagactgcctgggttcacatcactgcaccactcaccaactctgtgactttcggcaggtttcttaatctttctgtgcccagttcctcatctgtcaaatgggggttatatagtatctaccttctaagattgtgctgaggatcaaatgtgtggtatatggaaaacatttgcagccatgcttagacctagtaagcattttacattttagctatcatataccctgactgcattaacccatgtgtcttaaaatttttcttccgggaaccaggatgttctaggtaggcacacgtgatttttctaaagacgtgtttaaattgtcaagtgttcacactgagaaaagctctgtaaagcaaaaaaaaaggttttaattaaatttccaaataatagcaagttaactgaattgtaaacctaccttggaacctcagatcttcaacataaggntgataatcagatcttccttcccaggattntggttataacaatngaactaatattactnctttgatctgaactttaanagagtgaaaccaatantgtgtnnaggcacttgattttaaaaatgaatcataataatataggattcttttatttcataagtgtaaaaattatcaacccacttcaggatatagctgtatttagtgtaacacaagttgtaaggtatgaggctgagaattatttcttttttttttagacatcgataagcaatatcatctcaattgaaactcctaatacagccctatcaagt

SEQ ID NO: 670494 - DNA, 144 bp, Homo sapiens
tgccggtggccatcaggacaaaaattcacaacaggaagtgtgactggatacggctgttgaacgtgttgcctccgtgcagatcttgtcatgggcggctttacgtgggatgtgctttaatcaccagctaacctaggtagcttcatc

SEQ ID NO: 670495 - DNA, 126 bp, Homo sapiens
ggctggaccctacagattatgtgaaattttgataagaagtctacgcaatgacagtatggtacataaattttatgcagaaaagtattccaggtagataaaagagtagtgttattactctcaggttta

SEQ ID NO: 670496 - DNA, 104 bp, Homo sapiens
ttcagaaaaaaatcataaacacaagaaacaatttcaccaagcggatagtaattgttgttgttactagttatacatttagaatataaaggaggcatcagaaaaca

SEQ ID NO: 670497 - DNA, 210 bp, Homo sapiens
  misc_feature (15)..(16): n is a, c, g, or t
  misc_feature (28)..(28): n is a, c, g, or t
  misc_feature (51)..(51): n is a, c, g, or t
  misc_feature (88)..(88): n is a, c, g, or t
  misc_feature (134)..(134): n is a, c, g, or t
  misc_feature (148)..(148): n is a, c, g, or t
  misc_feature (173)..(173): n is a, c, g, or t
  misc_feature (179)..(179): n is a, c, g, or t
  misc_feature (181)..(181): n is a, c, g, or t
  misc_feature (184)..(184): n is a, c, g, or t
  misc_feature (196)..(196): n is a, c, g, or t
cgcgcactcacgcannctcaacatcctnccgggcaccagcacgggcaaggnggtgtgctaaaggctgccctccacacccgcgccccgnggcgccccccgaaaggtcacctcactcagcaccactcacgaccaanatggagacagaggnccagcacactcccgagacggcactnagagancncancgccttcacagnagtctggatgcggg

SEQ ID NO: 670498 - DNA, 1149 bp, Homo sapiens
ggcggcctccttgccgcttgcgttaccagagtccacccggtcctcgtgctttctccgggcgcccgtagctggcgccggcatccacaaaaatatgatcagacagaggatgaagtaatagaggaagctcctaggctgtgaatgcgtctagtccttgctcccctcagaagctgggacatgttggaccaaggtggtaaggatacgtgacgtttcccatgaacgctgtgaccaagtccagcgagcggcgccttccaataaaacggggaactccagagacgctatgagaaaacgaggaacagatcatctgcaatagactttctgcaacttccttcttcaaacaacgaccattcggcattgctttctcaggaagccactgccagcctattggtgatagcttgacactgagttcctgagaattctctaattaggatcccagatcggagggtcagccagtggcttagcatataatggacacaaaactgattttactggaagactgagggtgggcactcaccatggttctaagcattcattactcagaagatccataaaaacattacatgttctgtagtgtacgacgtcaggaacatactgagaatcctgacgaaaatcccaacctaaaaaacagtgtcaacctttgtaaagtaggcattggggcacggcggacgatgcctttggtgccagtgtcatcacaagctagctggactatgtgcgcacttttaaccaactaacgcaccccggtggcggactcgggaggaggactctaactagaacccgcgagtaagaccgatttcctggggcacacaatgggttacccaatgcctggcccgacgcccggatacagtgctaacggaaggacctaaaaagttcacaggaaggtgtgaaccacacctgcaacacaacgtgttaccccaacaagtggaaacagaggatgagctagcagcacactgttgcgaggcaggagtcatcgccggatagaaaaacaacacagctaagagaagaggacctacaagacacataggaaaacactgatgcaccacaaacaaacagatagacaaagatcggcacataagagcacccacaagtggatagcacaaatacgatgcatgcgaaaaccaaataaaagaaacaagaaaaagagacagcaccaca

SEQ ID NO: 670499 - DNA, 112 bp, Homo sapiens
gaggaaaccccgtctcaaaaaaaaaaaggaaaggaaaggaaatttattggggctggggggcaaaacctgtggccctggttcctgggcacttttcggggggggacccggcctc

SEQ ID NO: 670500 - DNA, 297 bp, Homo sapiens
  misc_feature (46)..(46): n is a, c, g, or t
  misc_feature (64)..(64): n is a, c, g, or t
  misc_feature (106)..(106): n is a, c, g, or t
  misc_feature (182)..(182): n is a, c, g, or t
attgcaggcatttgccaccatacccagctaatgtttattgtatttnaagtagagatggtttttnaccatgttggccgggctggtctcaaactcctgatctcaaatnatctgcacaccttggtctcccaaagtgctgggattacaggcatgagccatcgcgcccagcccagccattgattatnaaacatgttacttagaaagtagaattaggacaggagcactggctcaggcctgtaataccagcactttgggaggccgaggcaggcagatgacttgaggtcaggagttcgagaccat

SEQ ID NO: 670501 - DNA, 491 bp, Homo sapiens
tggcttctttagagagtagtaagcatggctgcctatgcttggagtcataagtgttatttggactataccctgagataagctgatagatcaagtttggctcccttgaaaagcatttctctcatgtgcgccctcagggcttccagcaggattgagtcaccctgacgatgactggggccaaccagtgtgatcttcactattttcagctgcaggacagagtccagggcgtgagtgcctagggtctcatggggcgtaggcagccagccagtgcaggtcgctggcctgtagcagccaacaagttgagatgcagcccaggagccagacatgcccgttggagttgacctgctctcggtccacttttgccgttccacgggtaaaaaggaagaaaggtgtgtatttcatacacacacgaggacctggattaagaatccgaaaagtgagtgttgtacacgattgagttcaaagtcagccatagataattcaagatttgtatt

SEQ ID NO: 670502 - DNA, 241 bp, Homo sapiens
agtgagcgagatcgtagcactgtaccccatctgggggacaagagcgagacttcatctcaaaaaaaaaaaaaaatcagttgggcttggtggtgcacttctatagtcccagctatgtgggaggctgaaacaggaagattgtttaaccccaggagtacaaagtaacaggaagtaaggatcacacaactgcactccagcctgggtgacagattgagacactgtctctaaaaaaacaaaaaaggtc

SEQ ID NO: 670503 - DNA, 123 bp, Homo sapiens
tctcaaacctgggccaagagatcacccaccttggcttccgagagtgctgggattataggtgtgagccaccaggctgcctgtccgggctgctcttgaactcctgagcacaaatgatcctcccac

SEQ ID NO: 670504 - DNA, 439 bp, Homo sapiens
attgtttagtcctttgcgaatttttttgatttgtgggcccagttatgaagtttccccccatgtgaagacagggacaaaatagcagagcccagcagacagtgggtttatttttcattaggtcagtgacttgtcccccctcgttttagcacttacgtttcaaaagcttgtccccaacccttggggtcattccccgataatagaactggaaatgataaatcccccaatgcccagggtctagtgtgtttttagtgggtaactggggaagtggggggaaatttaggggctgctctgctgctttggaagggtgaagggtcctgggccattttcatggggtggttgaagagctcctattttggactcctgggtagaatgctgtgggacaaaaacaaagtgaaaaaagttttttgtagatttttgaagggcatattcattgatgcca

SEQ ID NO: 670505 - DNA, 947 bp, Homo sapiens
caatgcctcctgcaccaccaactgctatagcaaccctgtgccaaggtcatccatagacaactattggtatcgtggaaggactcatgaccacagtccatgccatcactgccacccagaagactgtaggatggcccctacctgggaaactgtgtgcgtgatgtgcctgcggggctactaccagaacatcataccctagcctactaactaggctgctgccaagtgctagtatggcaacggtcataccctagagctagaacgggaagactcactggcatggactatccgtagtccccactagccaactgtagtacagtaggtagtgcacctagacactagcacgtactaagcaaacaacctaggcccaaactcatagatcgacattcacagaacggtcggtgacatgccagcgcgtcaccggagctgtgcacccacctacaaatgcggccatacctagtgagctaaccactagaggcaccacgtgtaggatcctcccttctagacctatccaaaccacgccgcacaccgcactacctacacacactatatcgcagcgctcgtgcggtcttgggaccaattagtccacatctaagctgaagccatactaattgatactaatgcctccattcttcccctgggtaacttgaccaaaggcgaacatattctgggccctaccatgaccaaacacacgcgcctggggatggggacccctatccacatgggcccccaaccagttggggccttccccacacaaggcgaaccgttccaatgaagtccccgcttagaggcacgccccaacacatgtcagcccagaacgccacaccgtagcctcacacactgaagtggcacatccacgatcgcagcacgaccctcaaaacttggcctacgggctgaattatccccttgcccaaccaacttcatagatcccctccaacaattctctggaacaa

SEQ ID NO: 670506 - DNA, 915 bp, Homo sapiens
gtgagactctgtctcaaaaaaaaaaaaaaaagaaaagaaaagaaaaaagaaaaaaataattggggcttggggatgcacccctgtggtcccagttacccaggaggctgaggcaggaggatttctggcacctaatgaggtcaaggctggcttgcagttgagctgtgattggtgccactatactccagccctggggtgatagagggagatcctggtctcaaccacaacacaatataaacacgagtttttgaagaaattgatgactggaaaacttaactaatttgggtgaaagacagaaacctacagcttcaagaagctgaatgaaccccaacggttatccccatgagactctggggggctgagatatatacaaaacacaacttccttgacacaaatacaatttctgcggaagacttttctgtgaacgcagtacagagactgaccacattaccctttagaggattcccatttccaattgaacagccgatttctccataaatgggagatgagaaggaattgccacaatattttccagtccggaagacttttcccctgacattctatgtctggaaaactatacttcccagaagtgaaaagagaaattaaaacatttctcagattgaaggaaacgtacatgaattggtggaaggcagcactatccttaacgatggtaaggaagttcttaaccgacggaaacatcacagatgaacctctaggcgtggaggacaaacaactttgcagactttggggcatcaacaagggtcttccgggagtgtaacagtggtgtaccaaagaagaagaaaaaagttgtgggccgcgcgagaattaacatgggcggccaagaaacagacagtccagacggggagggacacaacgggcggtgaacaggtggtacgtacagccacacgggcgcgaaag

SEQ ID NO: 670507 - DNA, 351 bp, Homo sapiens
gcctgtgccggtggacacccgcggctgctctggtggaggcccgtcgcggtcctgacgtgcgtcctcgaccgtccgtgctgtgtataggggcgaaccactcttcgtatcatctcgtaacaggttccctccgatgtttccctcaggatagctggagctctcgctagaccctacgcacccccgtcacgcagtttaatcaggtaagagcgaatgattagaggtcttggggccgatacgatctcaactctattctcaaactttaaatgggttatacgcccggctcgctggcgtgaaaccgggggtggaatgcgattgcctagtgggtcacttgcgattagcagaagtggcgctgcg

SEQ ID NO: 670508 - DNA, 299 bp, Homo sapiens
gagaatggcgtgaacccaggaggttgagcttgctggcgcggcagtgcgctcccgcgtggctccggggcgatacctcgtgggaggtggccggcaaagggtgccccgtggtcctcataggttagggggctctgccgcggcttgcccagctcaggctcaatgactggggcgccgcgcgcaatgaagccccccgagctgctggcagatcccctggccggctcttcacgctctcctcgtagcaggcacgtcccagtgcccgggcgtcggccatcacatccagcgggtgcacggttcggaacgtc

SEQ ID NO: 670509 - DNA, 176 bp, Homo sapiens
agagttattctcccaccgttaagcctccgaagcagcttctcggtactacagcaccagcaccatggcctggcttattttttatttagattattattcttttgtatgattgcagtgcctctatcactgcatactgcagccatggcttcccaagctcatgccattccttctacctcatt

SEQ ID NO: 670510 - DNA, 377 bp, Homo sapiens
acgcgtgggttgaattcctggcctcaagtgatccacctgccttggcctcccaaagtgctgggattacagctgaccactgcccccagcctgtacttctttttagtagagatggcattttgccatgttggccaggctgatcttgaactcctgacctcaagatgatctgcctaccttggccttcctaggtgctgggattacaagaatgagtcaccatgcctggcccaacttttctgctttgtgttttctttttttattttctaatattccttttttgcctacaaaccaatttttacgtttttaaattctgtatacatactgtgtggccttgggcaagttacttaattgcattgcaacttaagttttcccttttgtacaaa

SEQ ID NO: 670511 - DNA, 1623 bp, Homo sapiens
gcattaccatctcgacttctaccgaatactattatatcgctcacacctccatatcctccctagtatgcctagaaggaataatactatcagcatgtgcacttatatgctactgcctcgataacccttacaatcacccagtccctcttagactcagatacttgtagccgctacttgcacattacgtagatctttgccgcgctagcgaacgttacgcggctgggtctagcgccgtactagatctcgaagtgctccagagcagcatatggcctagtactacgtacgataagcctagagctactccaagtgctagaattaatcgtgccaacgattatattagtaccactgagatgaatttccaaagagaagcacgataagtttgaaatcaaacgacaaggcacgcccacatgactagattcattatggcgatcatcgcgccgcttacttatttttctataagcccaatagtcaactaatcagagccttagtcttcagactcgttttccacacaaccctttattctcctacccggactcgcccttgataggaaaacccgcgcctcacttacactactatacatacgcgtgagcgtacctttaacgcacgctcactacactcgattgggcaaggggccagggcagccagcatttaatcccagatgataccaacggtatctaacgtagacaccaaaagaacgtcgtaccacgtcctcctaagtatcgtcaggtcatccgcctattaaaattcatcctctaagattattacagcggtatctaccaagccccacacaggaaacattaccttcgattattgtgcataatacgtgtgcttgaagggaagagccaacggacttatttcccccagacacttgaggtgtactgcacttggaaaccgaactgtagaggtcaacccctgtgcacatttgaaacagccgccttgcaaacggcagttgccatcactacgtgtccgcgtatttcttaaccatcccctaaagtaggggctccccctttcccaccgtaaatttcaaatcggcgggagtaagattctaagagacttttagaatgtgaggccccgtttgtgcgattctaccagttaaaaaccatttgctaacgtacgttccacatcaatcaatgttggcccgcaagagaaacttatttaagagagtcccttgtaaaagccacacaagaatgtgagtaactgggggtagagcataacaacgacaagaagccgtctcgatgacgtgaaaagagtataaccacctgtataggggacaactacaacatagatatagtgttaccgctaaaagaaccacttttcgaagaagcccccatagaacgggcagacaaacaaacatgcgaccgaagaaccataaaaaccaagtcgcggcgaagacgataaatatcgagccagagcgagtactcacagcgcgcacacaaaaaaaaagcagacagacgcacgcagaggaaaacaaccagcaagagagagaagaagaagcacatcggtagagcaagaaagagcgaaatacacaactgagaagtcacatagaaaacgacgcagagacgaagctcagaaaccagacaaacaacggagagagactaaaaaagcgagacgaacaagacaacgggg

SEQ ID NO: 670512 - DNA, 248 bp, Homo sapiens
cttgaatgtgttggggcaaagaaatcttgatatgatcaaatcccgtgcaacagccgcatcaaattggctcatccccaagcttatggccagatggggccagtggtatggacatgcacaacaaattggcacagtatatgcctaatggttggcaagttcctgcatatggaatgtctggccaggcatggaaccagcaaggatcaaatcagacaccgtcttctgcaccatagctgggcacacattatggagtg

SEQ ID NO: 670513 - DNA, 732 bp, Homo sapiens
  misc_feature (55)..(55): n is a, c, g, or t
ttctcctcttcctgccccccttggcatgggtgagacctgaccagtcagatggtanttgagggtgacttttcctgctgcctggcctttataattttactcactcactctgatttatgttttgatcaaatttgaacttcattttggggggtattttggtactgtgatggggtcatcaaattattaatctgaaaatagcaacccagaatgtaaaaaagaaaaaactggggggaaaaagaccaggtctacagtgatagagcaaagcatcaaagaatctttaagggaggtttaaaaaaaaaaaaaaaaaaaaagatgggttgcctctgccttggtgatcctgagttccagaaagggtacacaagggtgattttatgggtgatgtcactcaccttagaacaaccagaggctgggcattggaggctaacctccaacacagtgcatctcagatgcctcagtaggcatcagtatgtcactctgggtccctttaaagagcaatcctgggaaaaagcaggagggagggtgggcttggctgttgtggggacatggcaatctagaccgggcagcagcgctcgctgacagcttgggaggaaacctgagatctgtgttttttaaatgatcgtcttcatgggggtaagaaaagctggtctggagttgctgaatgttggcattaattggtgctgttggcttgtagttgaataaaattagaaacctgattgaacacacaccaaacacagg

SEQ ID NO: 670514 - DNA, 754 bp, Homo sapiens
  misc_feature (55)..(55): n is a, c, g, or t
ttctcctcttcctgccccccttggcatgggtgagacctgaccagtcagatggtanttgagggtgacttttcctgctgcctggcctttataattttactcactcactctgatttatgttttgatcaaatttgaacttcattttggggggtattttggtactgtgatggggtcatcaaattattaatctgaaaatagcaacccagaatgtaaaaaagaaaaaactggggggaaaaagaccaggtctacagtgatagagcaaagcatcaaagaatctttaaacctcccttaaagattctttaagggaggtttaaaaaaaaaaaaaaaaaaaaagatgggttgcctctgccttggtgatcctgagttccagaaagggtacacaagggtgattttatgggtgatgtcactcaccttagaacaaccagaggctgggcattggaggctaacctccaacacagtgcatctcagatgcctcagtaggcatcagtatgtcactctgggtccctttaaagagcaatcctgggaaaaagcaggagggagggtgggcttggctgttgtggggacatggcaatctagaccgggcagcagcgctcgctgacagcttgggaggaaacctgagatctgtgttttttaaatgatcgtcttcatgggggtaagaaaagctggtctggagttgctgaatgttggcattaattggtgctgttggcttgtagttgaataaaattagaaacctgattgaacacacaccaaacacagg

SEQ ID NO: 670515 - DNA, 136 bp, Homo sapiens
gcggccgcctactactactactgctcgaattcaagcttctaacgatgtacggggacatgtttgtgacaccaaaaagtttatcacagaaattcaggacagccaactgctattaaaatgttctggtttcaccaaaaaa

SEQ ID NO: 670516 - DNA, 799 bp, Homo sapiens
  misc_feature (55)..(55): n is a, c, g, or t
ttctcctcttcctgccccccttggcatgggtgagacctgaccagtcagatggtanttgagggtgacttttcctgctgcctggcctttataattttactcactcactctgatttatgttttgatcaaatttgaacttcattttggggggtattttggtactgtgatggggtcatcaaattattaatctgaaaatagcaacccagaatgtaaaaaagaaaaaactggggggaaaaagaccaggtctacagtgatagagcaaagcatcaaagaatctttaagggaggtttaaaaaaaaaaaaaaaaaaaaagatgggttgcctctgccttggtgatcctgagttccagaaagggtacacaagggtgattttatgggtgatgtcactcaccttagaacaaccagaggctgggcattggaggctaacctccaacacagtgcatctcagatgcctcagtaggcatcagtatgtcactctgggtccctttaaagagcaatcctgggaaaaagcaggagggagggtgggcttggctgttgtggggacatggcaatctagaccgggcagcagcgctcgctgacagcttgggaggaaacctgagatctgtgttttttaaattgatcgttcttcatgggggtaagaaaaaaaaaaaatgttggagcggccgccaactttttttttttttgatcgtcttcatgggggtaagaaaagctggtctggagttgctgaatgttggcattaattggtgctgttggcttgtagttgaataaaattagaaacctgattgaacacacaccaaacacagg

SEQ ID NO: 670517 - DNA, 355 bp, Homo sapiens
  misc_feature (117)..(117): n is a, c, g, or t
  misc_feature (150)..(150): n is a, c, g, or t
  misc_feature (152)..(152): n is a, c, g, or t
  misc_feature (236)..(236): n is a, c, g, or t
  misc_feature (254)..(254): n is a, c, g, or t
ccagctactcgggaggctgaggtgggaggatcgcttgagcccaggctggtcttgaactcttgggctcaagcaagtccacccacctcagctccaaaagtgttaggattacaggcgtgnaccggcgtctggccctgctcatttctctacctnancttgaggaagcgtagttttttgacagacaaaaaataaatacaggagtgagaaccagaaactaattagttacctacaggcacctnagcctcccaaagtgttanggttacagggcgtgccaccgggcggtcttggccctgccttaatttctctacctaaccttgaggaagcgtagttttttaacaggaccaaaaattaattccag

SEQ ID NO: 670518 - DNA, 739 bp, Homo sapiens
  misc_feature (55)..(55): n is a, c, g, or t
ttctcctcttcctgccccccttggcatgggtgagacctgaccagtcagatggtanttgagggtgacttttcctgctgcctggcctttataattttactcactcactctgatttatgttttgatcaaatttgaacttcattttggggggtattttggtactgtgatggggtcatcaaattattaatctgaaaatagcaacccagaatgtaaaaaagaaaaaactggggggaaaaagaccaggtctacagtgatagagcaaagcatcaaagaatctttaagggaggtttaaaaaaaaaaaaaaaaaaaaagatgggttgcctctgccttggtgatcctgagttccagaaagggtacacaagggtgattttatgggtgatgtcactcaccttagaacaaccagaggctgggcattggaggctaacctccaacacagtgcatctcagatgcctcagtaggcatcagtatgtcactctgggtccctttaaagagcaatcctgggaaaaagcaggagggagggtgggcttggctgttgtggggacatggcaatctagaccgggcagcagcgctcgctgacagcttgggaggaaacctgagatctgtgttttttaaattgatcgttcttcatgggggtaagaaaagctggtctggagttgctgaatgttgcatcaagttgtcctcgtctcgctcgctagtagaatcaaatagccaacctcactgtactcgtcatgtatcctccgat

SEQ ID NO: 670519 - DNA, 413 bp, Homo sapiens; identical to SEQ ID NO: 545663

SEQ ID NO: 670520 - DNA, 871 bp, Homo sapiens
cagaagttttatctcctactgtgaagggcaaactgtcactggaattaaatctccacggtcatatactcccaaaccaatcctgtgattcgggaagaggacaaagatcccagtctcacttgtactttgcaaagtcatgcatgcacttgtgcctcgcagttctgaggtcatattgcagcgcaacaaaaagcaaggaccagagcacaacccatcttcctcctcctcccccatctcccatccatttccagccagcccaacttcatgtcattctagccctgcagcaacccatcaatcaatgccaaaggaacctgatttctgcaacagccagccttaaaacaactccaccgtgttgcacttggcaggcatgcattctgcatcaacattcacaagcaaacgcagctggcaagtcttcctgcccatgacaggcagcaatccctctttctcactctctttcatcatgccatcagcaggtccaaccctggttgggtccccacccacaacctgcattggcagcatccatctccagcaacttggccaaacttgtgcgcaggcacgactcgcgcaacacaggattttggagccatcattattccgcagacaccattccattaggccacacatgtcgacacatacacttaaggtggcgcagccttccactcatatgcagtcaggcttctccagcgacaagcagccgggcgtgagatagaaaccctcactggtatattcactccttcgctgttgacacattctcttattggcccatcaatcgttccagcaccacgacaatgacactcggcctgagcacaatcctggactttacgcagacgaccccggacacgttccccatggacccctcttggccacaaatctgcgg

SEQ ID NO: 670521 - DNA, 616 bp, Homo sapiens
  misc_feature (55)..(55): n is a, c, g, or t
ttctcctcttcctgccccccttggcatgggtgagacctgaccagtcagatggtanttgagggtgacttttcctgctgcctggcctttataattttactcactcactctgatttatgttttgatcaaatttgaacttcattttggggggtattttggtactgtgatggggtcatcaaattattaatctgaaaatagcaacccagaatgtaaaaaagaaaaaactggggggaaaaagaccaggtctacagtgatagagcaaagcatcaaagaatctttaaaaaaaaaaaaaaaaaaaaaaaaaaaacatgttgcgggcccgccttgggccctgagaaaaaggtttaaacaacaatccggtgggaggccggcgccgccccaagcaagcggaaggacaaacatggggccactagggggggtcccaaaggaaagaccgtggcgccagggagccaaggtgcgggagtttttccacccatataaaaaaacgcgccgggggggacacaggatcggtctcgagaccaacacaaaagatgggaggtcacagagggccatacgggggtccttaacacaaggggaggcccaaagagacgccaatatcaaattacgcccgggtgtgggt

SEQ ID NO: 670522 - DNA, 828 bp, Homo sapiens
atacaggaaaagaaacatgtcatccacttgagttaatagttctgatttagatcagctttctgattcatgctgtctgttaacatcaaaactgatctaaagtcagaattacttaccatgtgaggagctttccttaatacaggaaacagacaacatgtcatccacttgagcttaatagttttcctacgctcgatgacagccctcatgagtagcatccacattttctaaaatttcaaattggtttttctactagctagattgtgctttctagcagaacagatgcaacggcataggtgattgtttaggattttcctctagccttttgccattacctattttgggcgatgaggttcacagctagactttgagtgaccgatcccaccgtgcaagtgaattctctgcagctggtggtgtggtgctggcaaggcaaggttatttttggagccactctctccccttccggatatttcccaagggcctgcttcaacttcttagatgacctctagcaggctgacaaactatccacatggagcatgatgccagaatactccaattcaggagccctttgcgagtatatctgacgcactcacttgctcacggaaaccctgtatccgcactagcactactgcgctgtctggaactctgtccctgatctgagtgggactagactggcttcctcgctgcctggccaaccggcacttcttgacattcctggcccctggcacctctgtcgcctgtcaccaactgcctgcccttgaccggttacttaatccccccctgcttaccggtcatacctccgccacgtctccctcccccccctctccccaccta

SEQ ID NO: 670523 - DNA, 123 bp, Homo sapiens
taagccccccaggaggttgccagtctttcagcttcggtttctcggctgtattatctgagctacaggaagttgttcagcatatttcagaggttccattagtttctcatccatctggtcttcctt

SEQ ID NO: 670524 - DNA, 306 bp, Homo sapiens
gactcatagaggctcccccatgtctgacgacaggcaaagaatgaagctttgtataacacgacccatgtatatatttggcatgagaaactaacagtccatacactctatcttcagacctatcaggatcacagttaaaaggaagacttggttaagtcgaatatgacaataaaatctgtgtgtatcagcatactatagaagcattcatcagcagcctcaaacagtatacattgtccatttactagattcaatcgtctctaagtatatagggctgatgttagcaagaccctaaaaatgtccattgaaccc

SEQ ID NO: 670525 - DNA, 101 bp, Homo sapiens
gctctactccacctgctatcccacacctataagacatgttgaatgcccccatcgctttggtcaatagtacttgcctgcagtactcttaaaactaggcggct

SEQ ID NO: 670526 - DNA, 195 bp, Homo sapiens
gggctgtatctagaggaccccgaccgccatactcggtagctaacaccctaatcaactggcttcaatctacttctcccgccgcaggaaaaaaaaggcgggagaagtcccggcagaattgaagctgcttctattgaattatgcaattcaagcatgacattcaccacgtgaactggcacaaagcagggcttaacctcg

SEQ ID NO: 670527 - DNA, 806 bp, Homo sapiens
acaatttcggaaaatcaatggctttcctaatgcttgctggggttggggtggagaagatgacgacctctggaacagagtacagaatgcaggctattctgtgagccggccagagggtgacacaggaaagtacaagtccattcctcatcaccatcgaggagaagtccagtttcttggaaggtatgctctgctgaggaagtcaaaagaacggcaagggctggcatggcctcaacaacctgaactactttgcaaacatcacatacaacgccttgtataacaaacataactgtcaacctgacacccgagctggctcaggtgaacgagtactgagaggacgagaatgtacgtttgcgtttacccaccgtcaccaagaacagcagtccgatgagacccccccccaggcaggggggcacgggtctacacacgcacagcagaacagaacctactgtgtctcactgaccggactcacagacgctccagggggaaacatgctgacagcaccacgcaccaaacgccttcactggatcagccgctggaactgagcggagtgagctcggcggacttccttcgtcagcaactggctttctgtctacacaagacacgacgtctgtcccgctgctctctcaccatctcctacccgacatcctgtcttagccgctagtctccagaacccatgattgacactgtgaatctgcacgcggaacctgcacgtgactcctagccgctggaagacctgtcccataacacatgacctttgagagcctcttggaccttcaaagcagcaggccaacccaaacaaaggacagcac

SEQ ID NO: 670528 - DNA, 106 bp, Homo sapiens
ctattagctcttagtaagattacacatgcaagcatcccccgttccagtttgaggttcaccccttaaataaccccggtccaaaggggcaaagccctaagcgcggcgc

SEQ ID NO: 670529 - DNA, 393 bp, Homo sapiens
cgtactttgcgtagattcatgagcactggccacgaggtgataaacagtcatttagacctctctgtcatttaatatcacatatagtcacatatgctcagcattactctggactatatatggctggctctatcaaattggactaacacaaagatggtatcatacattcgtgacagaaatggtacgagacattaaatgaattactggatggaagatactttacaaagcgctttaaggactataagccatgaggtggctcttattaatggtcaatctgagagactaaatttaaagggtcaggcgtttgaaacacaagtgcttattgatatctaggggaattggaaattcttgactaaaggcctataacaaccagatgagcgggtgcacatgtgacct

SEQ ID NO: 670530 - DNA, 687 bp, Homo sapiens
ctttttcccaaacaagtcaaccccctttttccctccctggtgtgaaacacgagggttatcagggggtttctccggggggaaaaatgttctaagaaggatactctctattctccccctcgtgtgggaccctccgccggtttgggaaggggggaccaagagggtctctccaccgaggccgcaagaggggcgcaccccccagggccaccagatggtgagaggtggggagaggccccagaccacaccacacgcggggggacttttccaagaaggggggccacgggcccaagaaccgcggcgcccgcgaaaggagatctgagggagccacacagaaagggacaaaggagaaccctgaggccacggagccacacaagtggggccgcccggagaggtgccccacacttcacacagggggagagagccacaccccctgtcaacccctccccctctcctcgagagacacagggagttcacaagaaatatgccacaaagagttcccccaagcctctatgccacggggggcgccgttaataataaggggccaactaggcacaataagggaggggacagttttttaatttttttatgcgccccctcctcccccaccctgtttggggcaggggggaaagatgatttttgagatataagcccaggctcccctccaaataaagtttgtaaagtgccccccca

SEQ ID NO: 670531 - DNA, 1071 bp, Homo sapiens
cccccaaccccttaacaccaaacacaaaacccccctcagggcaaacccagtgctcctgtttctaagatcgatcccgaacacccgacagaattgcttactactcctcagcagctcacccaccaggcgttcagccacagaagtcaccatatacaggagctcacactcaagcaggtcaaattgaaggtcagatgaccaacagtaccagctacaggccggctatggagcacagtagccgcaagctccacctcagtagccttaacagaattggcctgtccctattacagcccgcttatctgtcaccacgactgcgacctgaccacctctcaacaatttccagtgatatcggccaacgaccaactactcaaagcaccagactcctgacttcccatggccacaccacccgaactcgcctcgtcctaatacgccacagtaaacaccatggcgagaaactaacaactgtaaaaaagttatctcctcgacataagcttgtcatccgctactaatttactcctactgccacctctgcactctaaatctctgcaattgtgcttctcacaccattcttgatgacctcatatactacgaaactaggatattacattatattctgctccaaattcaccacttatactccgtagaccatccgtgccatcacgcctctactcctcggagatcacgaactgaccttgagaataaggtcgatttcgacatgtcaggtctcaaggatgtccaatgtaggaagctcatcgcaccgacaactaaatggaataatcataatcactatcatgaagcccagagactatcttatcaatgctccaattaacacaagacaaacaccaaatttcataacctgttatagccacatccatcatgaggacaagtatgactatgcacacccagttcatgagagccaccaacgatagagcaatctctactccaccacccacccacatcatgctcgctctacggccaggagacctactgcacccacgcgaacttcgactaacgtatatataacccataacaaatacaacaagtcaacatcagcaaactctaccagaacgtaattgt

SEQ ID NO: 670532 - DNA, 969 bp, Homo sapiens
gcatcgtgtaagcattgatccagagtgaacacatgatctatgcatgtgtattccttcagttctttcctttgattcttagaccatcttctggcgtcatctgtctcccgtcctttggttctccagttcaacattcattgtcccccgtacccgcgatcttctgagtaggtgcgggtctgacacgtgtggtcctatcatatataaggatccacacacgtaggacttttacccgtgctgtacgcgagaaaaaaacaatacactacggttcaagaatggagccggcgtggcatgctgcatcagtaggcgaagccgctcaaattatcttcacaatcaacattagtgtcaaaaattatcatctcgtttacgaaggctctccattatggcatcgttgaatttatatgtaatgtccctaaagcacagtctctctactcctatctctcaatcctgcaaggcatcctcagaaatatttgaaccatgacagttgacagtccgtagttactggacaaaatctttgcttgataagtataagaccagtatttggaccttgctgccagtatttcttaagaagctcctggttgactttcgtttccgtgttgatattgcgggggggcacgggcacccctgtgttgactgtctgcatatgcagtctgtgaacctccggtggtgggacactacaagagttgtagactgttgcaggctgatgtgatgttgaagagtgcctaggatattcttgagcagtcgctctgttcgttgcctgaagcatgtttattaagctggtgactaatacaacaagcatttgcgcgttaggccaagaaatttaaacgttagtgggaggcccagtatatagatgatccggtcagaacagtaaggggggtacaaaaaccgggcacggaaaccagggggcaggttaagcgtgcacaggaggagagaatagataaaagtaagaatataaatatatcttacattttacga

SEQ ID NO: 670533 - DNA, 685 bp, Homo sapiens
  misc_feature (31)..(31): n is a, c, g, or t
gaattctgcacgaggttatatcatttatttncgtttcctctcttctctttgttgagatatttttcttaaataaaatccctctcctgttatagtcatctcaacattatattttttttaactgcagctggcttcaccggaacccattttctgtccacaacatacacagattatgaaattatgtttcatgtttctaccatgctgccatccacacccaacaacagacaacagctcctgcgggagcggcacattggtaacgagatcgaacaattgctttccaagagccctgagcacagccattcaacccaaaaaacattcgttcccactttcagcacgctttcgtgatcgtcagggtgcacaatcccgcgctctgacagaggcttgttatagtgtggcttgttccaggtccagagatcggccctcctttggacctcccattcctaaagggggcactttccctaagataaatgtgcttagggccttccctttgtggaaggggctattgcgcaaatagctgcccacaaaacgtcacggttcccccccctcgaccctttctcgcccgggatacctgccgtacctgcccaacagaattgctccaacccttatttcccttctgggtttcgatcactcctctggcttcccggagcccgcgccctattcgcattcagggtccccctcttcgcccgtc

SEQ ID NO: 670534 - DNA, 223 bp, Homo sapiens
tgtattggtggtgctctctatatagcacataacagggaagaacaataacagaagcagatcatgccaattgctctctctttgggatatgattatttcccttgtgaatgaagtatttaacaacatatgatatggaaaagaacgattctttttgtatactccctaaacacacagagtttactgggtcagatctaaccgtgagcatttatatgcctacttccaggct

SEQ ID NO: 670535 - DNA, 106 bp, Homo sapiens
ggtgagagtatcttgccagtgcagtgttctaagaaatagtatgctatctaaggctcgcgattctgggtggtgcttccttagttgttgagctgcagtgtctctctgt

SEQ ID NO: 670536 - DNA, 741 bp, Homo sapiens
tgtagtactatccgattagtcgctcgtgagccagataagctgtgtgagtgtcttcttaggagcttgcctaggagacttagtcttgtgactaacttgctgtgtagtgttcaccttctatcaccctgcgcagtatgttgctactgatgccgcttcatgatcacgaactccagtattgaagatatctgaccgcatcacaaaggtggtagtactactcggtgaatggagatcaaatgctgttgcttcgtatctactcacgtcgttaccttcaccgcgtagctgacaattagttgacactgaatcataattacacccagtacgctcaatcatacacttttactcatcactgtacttctattagcattgagtaacaagctctgatttgcaacaatgatcctgacgaacaaggccactcagcaaagacagttttaattgtcccactgtttgtgcgttccaagagcagcatgaagaagaatgaaaagccacggagttcaaataccttttcacctgtttgcctccctgggttataacaaagccagtcagagtatctattgcctctcagatgattagccttgtgacgtgagaccagacatgttgattttaccctgactgaaggaaagacttcatagctgggaaattcgtagggctgcccaaagtcattctctatggtcctactatacttgaaaattttctccttttggtgggcggtttctttccgtattttctaaggtacaacataccaga

SEQ ID NO: 670537 - DNA, 672 bp, Homo sapiens
  misc_feature (52)..(52): n is a, c, g, or t
ttagcaacctcctgattagattctgttttctcctcttcacaggggaattagnagtaggggtggtttctggtttgacagtccgccgtcttacatcgatctgctcctgcttttaactctgctcttgtttcctaccactggcctgggagccagccttttcagttctctcactgacaaactttcagttcttatttatccatctgttttccagctttcaaaatgttgtagctttgtctcttgggtttttctcttacttatggattttattgaaaagaatctttgttttatttttaatggaatatagggagagaacgaagttagatgcttctgttctgtcttgataccttgacccagaggtcatttttcattctcttagagatgtctttaataaattttttttttgaagaaaagtaaagcaaacttctttgttttaatacagtcagatatttattagagtcaccatattttttatcgtgttgaaaaaattctttcctactgtgatgtcataaagattctctgatactgccttacatagttgcctggctgtcacattcaggcacaggaggccatcttttctctgctgatgggtagtgccagtgtcaggtcaccagaggctctttcagagttctccactctggacgtgtctgacgttattgagcagctttagagtagttc

SEQ ID NO: 670538 - DNA, 609 bp, Homo sapiens
tcacagcacttggagcggagtctgcgagcacacgcaatggttgaaaaccagatactcgtatgtgatgacagtacaaagatagtacggatgtagtgaagaagaaacaggagtcattaaggcatatcaggaggagagatatgtgagaacgaaaagggtattaaagcaaaatttacgtatgagagaatgaagtaaggtgagagagtggagagggagggagtgaatatagagatgttagccatggaagagtttagcaagtggcagttggaaatgaaattgtacattataaaatgtgtaaggagaagcagaggatagaatgagacgatgtgatgagacaaatttaggaagagacgaaagaaaagatagatgatacatggggggaataggaagtatagagaagaacacgaaaagggaaagaaagaaagaattaagaggagacataagagagaaaataaaattgaagaggaagaataataaagagcattaaatggtagaatgagagatgttattagacaaagaatagataggtctgtttagatagtgaatttactgcattagtagagaatatttttcaaagggagatggtcatagacaagaagctcaatagacgat

SEQ ID NO: 670539 - DNA, 911 bp, Homo sapiens
acagaatccctggggtgctggacgtggccctccagagggtaagccatgtccggagtctcgggcccaaggaacgatttggagggtgcttgttagggcctcccgtgttgggtagaaatttggtggatctgttggctgaaaagacggacttgcttgcctctcctacagcatggagaggctgaccccatggctctgccaccgttggggcagggttagcagatggcagcccttctctgttggcttgacagggtcacctgagttgattaagcatggtgggtcccggtgagtgtaggagatggcacagataccagggcgagctcttgaaaacggctcgggagacgggagctgcgagcaggtgggcagatgagggccctatgcgcactcaggggtgaagggcgtcacgctggcacactctgcagggtgccccatgaaggattccaggacacctcccgtattgtccttgaggactgctggctgtaaccagggtacatcaacacaactcaagacaagcacacacagcccctatgtcagcttagagggggagccccagtccatgaagagcttgatcatctgtagtcaggaccagaacaccaggacaacaaagctggattcatgctcccatgagcaccttacaccaaccatggataccttcaccctgggagcatccagaggagaccttagcaccccttgaagggtaagactactccatctcaacggtgaggtagatccttatcacggttggcttgcaggacacaccaaattgggatctagatataatgggaaattctgggatttaagcagagatgtgacagatattcttgaaaacacatagcaaattggggttgatttaagaagcaaatggatcaatttgtacataagggtaaaataattggtgcaaacacttgagtaggtga

SEQ ID NO: 670540 - DNA, 413 bp, Homo sapiens
  misc_feature (14)..(14): n is a, c, g, or t
  misc_feature (23)..(23): n is a, c, g, or t
  misc_feature (160)..(160): n is a, c, g, or t
atactggtcgggtnaccttatanacccactcctcaacttggatgttttatccttatggtttagacctggagttatggcttttgggaaagaagaccgtggagatataatgcccattcctcatcacatcagatcaagagtacatattgttggctggtgtggntgtcacgccctataatcccagcactttgggaggtcaaggcaggtggatcattcgaggcccaggagttcaagaccagcctggccaacatagagaaaccctgtctttactaaaaaatacaaaaattagctaggtgtggtgacacaggcctgtaatcccagctacccaggaggctgaggcacaagaatcagttgagccagggaggcagaggttgcagtgagccaagattgcaccactgccctccagcctgggcaac

SEQ ID NO: 670541 - DNA, 103 bp, Homo sapiens
acggtgctcaagccagaggctgtgttcatttgtgtaacgacgaataaactggtacgagtctgtgtgcaacgaaatggggatcctgctagatgtcgaccgtgca

SEQ ID NO: 670542 - DNA, 222 bp, Homo sapiens
ctccgagcagtgttattgtcattcctaccagtagtatctatgttctccaccatcatcaccaacacgtgttattgttttctccagcatcatcaccagcacgttagtgggtctaaagtggtatcttgtgatttttttttttttttttttttggaacgggattctttttttttccacccgggttggattgcagtgtcgcattctcggttccattggacctcccac

SEQ ID NO: 670543 - DNA, 176 bp, Homo sapiens
ctgcacgatcagtgcacggtactcatgattcggcgctgagagcaggttacggcaattcaagttgccgctaacagctgtatacctactctcaagcggcagacgtgctagctacatgtgggcccttaacagcccatatgagtgacgataatcttaactcaggccgacgaaaatcttag

SEQ ID NO: 670544 - DNA, 141 bp, Homo sapiens
aaaaaaaaagttttttgggccgggggtggtgggtcccccccgttatcccagccccttgggagggtgagggggggggatcattttaggcccggggttttagccccgcctggggaacaaaaagaaacttcctttccaggggga

SEQ ID NO: 670545 - DNA, 370 bp, Homo sapiens
aaggcagtggttatcctctttcccaacgccaccgcgtcccccccaacctccggctctcgtcctcgtggtgggtcctcggcaccgcccccctacctcctggtggagtaagaagaggaacaacaccacaacaccactgttgtggtcgacgccccgcccccacaccatgaattacacaagaaggaccgagtctccttccccacgagagaggagtctgttgtgatgacgttgagaagagacaacactacagtcgggcgtcttctctgctgtgaactctctttttcttgcctgtaaacccccctcccctgttttcatacacacacactgtctctcccacacatagaaaaacactctggacccctctctgtgaaaa

SEQ ID NO: 670546 - DNA, 153 bp, Homo sapiens
tgtacatgcgcacagtacgagcgtgggcgtgtccgtgcttgcgtgtgaatgcaggtgtgggcgtgtgctctgcctgcatatgtgtgtgcatgagcgtgtgtatgtgcgtgtgtgtgaccttgcgggtgtgggctgtgctgtgtagtgggaagt

SEQ ID NO: 670547 - DNA, 512 bp, Homo sapiens
  misc_feature (47)..(47): n is a, c, g, or t
  misc_feature (62)..(63): n is a, c, g, or t
  misc_feature (108)..(108): n is a, c, g, or t
  misc_feature (117)..(117): n is a, c, g, or t
  misc_feature (152)..(152): n is a, c, g, or t
  misc_feature (169)..(169): n is a, c, g, or t
  misc_feature (178)..(179): n is a, c, g, or t
  misc_feature (192)..(192): n is a, c, g, or t
  misc_feature (219)..(219): n is a, c, g, or t
  misc_feature (231)..(231): n is a, c, g, or t
  misc_feature (236)..(237): n is a, c, g, or t
  misc_feature (241)..(241): n is a, c, g, or t
  misc_feature (278)..(278): n is a, c, g, or t
  misc_feature (297)..(297): n is a, c, g, or t
  misc_feature (305)..(305): n is a, c, g, or t
  misc_feature (307)..(307): n is a, c, g, or t
  misc_feature (310)..(310): n is a, c, g, or t
  misc_feature (312)..(312): n is a, c, g, or t
  misc_feature (340)..(340): n is a, c, g, or t
  misc_feature (342)..(342): n is a, c, g, or t
  misc_feature (409)..(409): n is a, c, g, or t
  misc_feature (419)..(419): n is a, c, g, or t
  misc_feature (431)..(431): n is a, c, g, or t
  misc_feature (477)..(477): n is a, c, g, or t
cttcaaatggagtgtccaaaaacactctgtcttggctttccaggggntcagtctctaaattnnccccagaatcttcatttctgtcttggagccggggtacacttaaangggggactngggggatgggggctcttacttcgtccacaaagtcnggggtgttctttttganccccagggnnagaacacattttnagccaggggggggggggattctctcantggggggggggncctgnngggnggggacacttctgcgggggcctaactgaatcaagtgnggggtgatcatggcgggcntgactgantnacncnccagaactaacaggggttccctcctttngngggcgcgggtaacttcgttagcgccaatggccagccgccccccggcgcgggcgggcgtccaccctgncactgggtgnttagcatctgtnttcttctccttcagattctcactaatatcaacagcaatgctgcatntctctctgctttcttttttcagaaaaggtgttttg

SEQ ID NO: 670548 - DNA, 132 bp, Homo sapiens
catagagaaggctcctggtgcatcttccaaatgagtccttaaagaacatactgagtacttgaagtagaagaacactagatgtatttctgactaaaacaaataggtctttcacatgtgctttattagactctg

SEQ ID NO: 670549 - DNA, 182 bp, Homo sapiens
agccggccccgatttaccggaagcatctctacatactccaacgatggacaccttgcaggacattatgctaagggaaatatggcagttacctgaggacaaatattgtatgattctacttatatatggtaattacggtagtccacttcaaagacagaaagtagaatagtggtttcgctaggggc

SEQ ID NO: 670550 - DNA, 99 bp, Homo sapiens
ccgttctctctgacagcactcgcggaggggttcgcgtggtcgcgcgtgacagatcctcaaatattttctgttactaattgccttcatgtaaactgtttc

SEQ ID NO: 670551 - DNA, 126 bp, Homo sapiens
agtatgactgtgctatcatctcataatcaatcttatattagattactggttcttatcacatttacacaaatatagataacacatagaagtatattaacccacttataagtggttctgacacattag

SEQ ID NO: 670552 - DNA, 576 bp, Homo sapiens
gccggggagctccagggtacccagtgcgccgtcgcttcggcggagcctgggttgaccagccaggacagcggggtaaacccgaacaattctgcgcgaggtacggaggccatggcgtcctggcagctaactggctctccggggtgaatgtcgtgctggtgatggcctacgggagcctggtgtttgtactgctatttatttttgtgaagagcgcatcatcactgcgctttgcaatgaaatctcgaaggggacctcatggtccctgttgggacacaatgcccccaagggacttgaaagaggagattgatattcgatctctccagggttcatggatattcaagttatgagccccagtctccttgcggattgatgatgctagaactacgtacagactgtgaaagccctagcggaaagtcaaaacgttgctaacagagctattctgctatagagatgaaatgctctggcatgccgattctgtagcctctggaggaatcccatttcgattcgtgcaagtgccggtcatcccccggttcctttaatgcggcaagaatttccgctcctacctggctggatctgcga

SEQ ID NO: 670553 - DNA, 187 bp, Homo sapiens
gctctgagatccgtgatacaccagtggctgagctagggtgagaaatagagcatctaggtcaagctgcagtctctgtgaataagtcaaggctagatgaggatcagtaacaggcccaggaacacggtctcaggctgctggtgtgagaggggttatgatgagctttgcccagtggatgcccactgggtta

SEQ ID NO: 670554 - DNA, 171 bp, Homo sapiens
agtgactccttattaaaaactctttacccagttatgaattagtgttattcctttttatacacttatatgtatagaaaacaaatgggtcaggtttcttagcataaaaaaagtattggaaaacaacactcattctttttttttttttttaattttttaataaggcgggtcccg

SEQ ID NO: 670555 - DNA, 294 bp, Homo sapiens
gggccggggcagggacgccttccaagatgccaggctgcgcagtgggacagcgcagccccagaagccagcacagggcaaggtagacagactagaagaggaaaggagagccagccgcatctctacactcgcgtcctgcgagccagcaggcgctcttctggtttgctggtgaagccagactgggtccaccgttgtggacatgaagagtcctcgggcgagcggggtccaacagcagaaattggggtgttatgtgttgaccctcagggtggaggtggcccccgctcgcccgaggactct

SEQ ID NO: 670556 - DNA, 162 bp, Homo sapiens
gtgtcaaggttgtgctggtccaggtcttggtgaggcagcagaccgtggtacggtcccagggttgcgtggtcccaggttgtagctgctgaggaccctgaaacaccgttgtttaaagacttcacacagaaggctctgaacaagagccactggggaagggaagtt

SEQ ID NO: 670557 - DNA, 1988 bp, Homo sapiens
ggcggctcggctgtaaggaggtggcagggacaaccacaaccacaacggccgggggagtcgcggtggctcagggcggttgccctggcactcgaggaggcgaggctacacgttcgaggccaaccgtggtcaacatagactaaaaaaaaaaaaaaaaaaaaaaaaaaaaaatatgggcggcgccgcgccccgggcccccgaaaaagctttctaagacaccacatccggttggggcgcgcgcgcgggcgcccaagtagtgtaggggaacacattgggccacaaacggggttccctaagagagaacccgggggccaaggaaaataggtgggctggggattctctctacccaaataataaaaaaggcgcccgggtgggcacgccggaggcggttctggaaaaaatctccacgaggaggaggcttcgaggagggctcactaccggggagctcctattcaacagagggaggctccaaggcggagccaccggaatattaaaattaaccgccccggccccgtgggatgcaagagaccagagaggacaacaagaaacaaccggaaagcaaccagagacgatgaacagccaaagaaaaaaaagacgagaacgaaggggcgcacgcaccagaggacagaaccaccgacacacaagcacaacgggacacaacagaagccgaagagagcaacaataatagaggcagaagacagaacgagagacgaccacacctaacacagagagacagtagcaacgacaacaaacagacgaaccggcacaaaaacacgcgcacacaaccgctgacgcgcagacagacacgagaaagagagacgacgaagaacgaagaaagcagacaaaaacggaaacagcagcaagcgaaccagctgacaaggaaaaacaagaaagagcacacggggtcaccacgacagcgggcacacgccacgacatgtagcatacgcgacatactacgcagatgaatagcgacgacagagaaaagcaacacacacacagcgagcatacaaggaaaacagaacagaaaccaaatacagcagacgaacagacaaagcacaccagcgcagggcaacacaagacaaggagaggagaagggaagaggcagagagaggagggaggaaagggagaggagagcagagagagcgcggaggagagcgaggagggagggacaggtaagtagggtaagagaggaaggaagaggagggagagcaaggcgggaggagaagagagagaaggaggggcgagaggaaagagagaggggagagagagagggcgggagccagaagaggacaacacgggcagagaacgagaggaggagaagcgaacagacgggcagagagggagggagagagggaggcgcgagagagagacgacgagagggggggaggaggcaggagacacagagacgagcgagggaagagagagaggggaggcaagacagagaagaacagagggcgaggaagcgaagagagagaaggaaggagaagagacaggcgtaagagggagagagaggagaagcgcaggagagggggagaggaagagcagaggagtggagaagaggcggaagaagggacgagaaggggaagagaggagagaagagccagcagacggaagggagggagacagggagacaggacaagacagggcagagagaacgaaggcgagaggagagcgagaggagcaggagacgagagagaagcaagggaggaggaaggaggaacaggaggagagcggaaggaagagcggggaggtgcggcacagaggagaggaagagccaaaggagaggcgggagcgagcaggagaggacggcgcggggggcgcggacgagaggagcacggagggggggcagaggaggaggggggccgagaggggggcgggaggcagcaaggaggcgacgcggcggaggcagaggtgaccgtgaggaggagcgggcagagaggggcaggggagaagggaggcagggagagagaggagggaggggagaggcgagg

SEQ ID NO: 670558 - DNA, 121 bp, Homo sapiens
ctagaggatcccgctgcgctatactacctagtgttccctgttcctgccatatcactggaggtgtctgtgagggtgttgaaaaggagattaacatttgagttagtggactgggagaggcaga

SEQ ID NO: 670559 - DNA, 1784 bp, Homo sapiens
  misc_feature (506)..(506): n is a, c, g, or t
  misc_feature (531)..(531): n is a, c, g, or t
  misc_feature (533)..(533): n is a, c, g, or t
  misc_feature (605)..(605): n is a, c, g, or t
  misc_feature (1127)..(1127): n is a, c, g, or t
  misc_feature (1645)..(1645): n is a, c, g, or t
aatttatggtcgtgcatggtgggtgcatcgagcatcataggaggcgactattatatgagcaggaaaccagctataatagtaaagataatcaagattttcagaatggaaatatctgcaagcaagtgacatgactgctaagtcgcgtagtgtcacgacctccatgagcatcgtatgatgtcgacatccttccttgtgggctcgctatgatccacgaaagacatcacatgggcagtattaccggagcggtgggcatgagattgggatcacgtatgcgataggctcatggatgtaagagtagtacgcatataactttacgcatttaagcgtacgcatacccattactcagtctcatggtatcgtctagggggcttatatcgatcttctctctagaaagcatcacacaaatacaacaatgacgttacatttcgccagccataagcccttgttgcaccaggcgcttcaataaatataagcttatgagtctccacaggctagaagaccaatantcctcagtgctcatcgatacaaggntntatcgcgtcgatcgagtaccttgataaccgccgagcgaacgatcgttaatacacgccatagctaaaggagcngtctattacgagtggaacagcgtagatattggagggccctcgtgctacgctcgatgaagatttcgtaggtagcaattgcgtacgcagatcatatgggacgcccgacggggagatttagccctcaatcatttcgcaaaacccccaaggacaaattccttcagttggaattttctctcacgttccacgaattacccatttgcgcacaaccaaggaggcgaagcccctttcgggtaaaattaaccaatttgttccaaaggttttaccccgtgtatttcaacccaagaccgtcctcccattacgaattggtttccggggaaagcttaaccctttataggtcaacgtcccccccagttatgcgtttatagttgtacaaggctacaactgtgcctttccccaggaaatgtgtagcagcctagcgcaagaagtctctttcggctggggacggacccaataaaggggcctctcttctgacacaacagtctgtgcctgacatttatagaaccgtgttccgccgcacaaaanaaatgggtgcggcccccaaacaaagtcgcccccaatgtcgcacaaggctttgtaccacaagcgcccaacgattaaacggctagtgggacactttaaaataccctctttggggaagagcgccgtaacaaaagagtgttacatccccttttcacgttgtcccccccttctttgcgcttaaacgggcactagtctaacacgttcccgcaggggtcgcacaagcccccatggatcgcccctgtgcgacaatctgcggacaggtggacactaggtgagaaccaaaggatgtagtcaacaacagagtgaccacatagtgggccgccgttgttaacacagtggtgcttctggagagcggcgacatccacccatgtagcgaggagccaccccatcaactcactgtggtgcggttagaacaccattaacgcagaaggactcagcgtcagatagcataccactgtactacataggacggacagctgcgtaatcacgaacaagctacgtataactgagctgacagtccnagcacagtgcataaggcgactagataccaaccatacgaactatgatgctcccgtgcgtaggcagaagcatcgagtgacatgctccgcatctcactgtctcatgttctcctcacctcatctctcttattggtgggggggc

SEQ ID NO: 670560 - DNA, 147 bp, Homo sapiens
tcacgacctgcaacagtaactaccacctacctctcaccaaagcccataaaataaaaattaaacaaaccctgcaaaccagtaacgctgcaaaccagtaacgctgcaaaccagtaccgctgcaaaccagtaaccgctgcaaaccagtaa

SEQ ID NO: 670561 - DNA, 207 bp, Homo sapiens
gctatagatgtggaacactgagtctataacatagggatagatttatctgggccagcacaaatgacagggagttcgctatatccatcctccccctctggccctcaccgttctgcaggcctgggcttccatgttctcactccctgatgggctgaactctgtggactgtagccggctcagggtggtcctgccatcggacccgaaaggcga

SEQ ID NO: 670562 - DNA, 221 bp, Homo sapiens
atatttggagcaatgaggctctgctgagtgtgagcgattacattcgaacacaaatcatagaagaaaattaacacaaatttttccaggaagaaaatacagagaaattaaagttgaagtactataattaaatgatccagctggatcaacatgagggatcctattggtctatttgtaagcactacattgcaatatatgatactccctgtattacaggcagaaag

SEQ ID NO: 670563 - DNA, 1024 bp, Homo sapiens
tgaaaaattcatggaggccatgggttttggtttgaaaccagcttgggggggttcgattccttcctttttggtctagaatttaatgtatacgggtttctcccgaagtgtgtggttaggggtggggggcactccatatagttcacctccaggttatatggagggtcctctctactatataggaactttctcgctctcgaaagccgaaggcgttctcaaatcagtgaaaatttattataattattataccgtgcgtgttctagcaagaacatgtgaatgtgacccctaccaacagtgtactagcgacgtgtttcacacgtgtgtggcgtgtatgtgcatctcggaggaatagtctccagagaataaacgttcgagggcacattccccgggaaatagtgcccgaagaaaccagggtgctgtgcgtgggaagagacacagagtctttagacactttttacgcgcccccgcattgacactactgtttggacactgaagtgtgccacaacagtctggcaatttctggcggcaccgcaaacgcagtcacagtggaggggactcaccataaagcgaggcagtgcatccaccccgtcgttgccaaaccacaaatcaagcggcgggaacaaaacactacccgcgacgaaacacttagcgagcagcgccacctccgcactgaagatcgagcaatagcgagagcgacaacaacattatccaccgacagactcaccacctacaacttgctggaaaaaatgcaggcgaccaccaccaataacggtggaggcgaacacaatcgatgagcagagcactcctaaaaccaaacaacgacggtaccaagcgacgcggacagccacacgcgaggcacacacaaacgacgacaaagtggaatccactgcaagcgtaggcacacgagagagcatacatcgaaacacccacaaaacacaagcacccaaaggcccaccgaccagacagacaagaagcacgccaccagcccccagaaccaacgcgagagcgaacacaaacaacatgaaca

SEQ ID NO: 670564 - DNA, 442 bp, Homo sapiens
ttatagccaacactaaactagagtactgcatactatagcagctggtgacagacatcgtgttagtggcacaggatggaatctctagagagtgtcccacttatatgattgctctggtgaaccaggggaaaatccgacccatgtgcaaaaggtttctattttcccacttaattagcatcctgctacagggccacacctgccatcttggtgggtgagtttagataccatacacttctccaggaggagtttgacaacatggtcacacagttgcaaagtgcacaaagctcaaggcacagagtagaagacagttgtgaactgatgggggaaagttctagcaaaagcagagttaccattttcctttaacaagactttctaatgctaaacaaagaccaactcttttaaaaggggtcgtatcggtgtcggggactcacatcacgggtaccga

SEQ ID NO: 670565 - DNA, 601 bp, Homo sapiens
caaagaatactacaagttcaaacatactgctagattactagaatcccattcagtcattagtaattagtccagttcattatcatgtcgtatgaatatgtctcccagggagagaccactcaagtttgcaggcttcctttcagtcttgtcagattccagaagcaggagcagtctccgcaaacatacaacttttaccttttgagcatctcttataactgagttcaagacagtgtcatctcatgctctgagcttctttaaatgtgttaatgtaatgttggatttccctcaatgaataacccatttattcctgtctttaccctcagctgctattcctcctctccagtagttcccaaacttttcctcctttggaaggcacattaagaattgccactgtgctggtttagattgcagacaacaactctagtctagcaagtacctcctcctcagtccaatcccctttagatagggtacttacatgggtgcagaaccagtgagctgtttctcatggccggaaacgtagtagttgcgttcactcttaggcccaattttgggaaatcgagtgacggtacacaccaacccattatggcccttggaatttggccca

SEQ ID NO: 670566 - DNA, 352 bp, Homo sapiens
agagttataagctcaagtatctaggaatagcagtgttgatggaagttttcttattgctcttgataacatgtgtacatgtgtacatttatttagcttatctacagatttatttacttatttatttttactgtttgaaccaagacagaagttgtaagttgtgaattagaaggcaccctggcctgggagctgggtgatgggggttcaaggctcagtgggttgaatatgagtccaacagtagtgttctggggtggaaagcagaggcagggggccagtccaaggagccacctccatgacgttgtccttgggagaagataactggagggagaaaaccaaaaagaaggcagatctgaaa

SEQ ID NO: 670567 - DNA, 549 bp, Homo sapiens
agcagacaacagcgtgtactggtaccaaaacagacatatagaccaagtggcacagaacagaggctcagaaataacaccgccatctacaatcatctgatcttgacaaatctgacaaaaacaagcaatggggaaatgattccctatttaataaatggtgcttggaaaactggctagccatatgcagaaaagagaatctggaccccttccttacaccttatacaaaaattaactcaagatgcactaaagatgtaaatgtaagacctaaaaccataaaaaccctagaagaaaacaggaaatgccattctagacattgcatttgggaaataatttataattaagtcctcaaaagcaattgcgacacaacaaaaattggaaagtgggacctaatttaaataagagcctctgcacagcaaaagaaatatcaacagaataaacagatgacctatggaatgggagaaactattcacatactacacatccaacaaaggtctaatacctagaatctataaggaacataaacatttgagcaagtgaaatacaaataacccc

SEQ ID NO: 670568 - DNA, 130 bp, Homo sapiens
aggtggtgcaggcatgccccctctaggacgcgtccattcatcgcctgcgtccattcaacgcctgcgagcgttcaacgcctccggtcattcaacgcctacgggccattcaacgcctgcggtccattcaacg

SEQ ID NO: 670569 - DNA, 103 bp, Homo sapiens
catgggtccggtcgggtggagggggggtgtctaagtttccccttttagggtttcaacaaatttcataggcactttcctttcaataaagtggtggcatacccag

SEQ ID NO: 670570 - DNA, 707 bp, Homo sapiens
ccgcggactgcaggaatactgtacgaggcctgtatcccctttggattggccaatttctccaatttgcaacaactgaatttacccagagtctgtacccccattatatgtaggaagtaactaacttgtttttgattttacaggttcataggcagacatgacttgccttgtctgagatgagactttggactgtggactttggagtaaatgctgaaacgagttaacactttgggggactgttgtgaaggcatgactggattggaaatgtgaggacatgagatttgcaaggggccagagtggaatgatctggtttggctgtgtccccacccaaatgtgatgttgaattcccacgtgttatcgtaggaacctggagtgacgtaatagaatcatggggttagaacttttccatgctgaaattatgatagtgagccagcttaacaagatctgatggatttaaaatatggaggttgccttgacaagctctattctcttgcttgctgtcatttgagacatgccttatgcctattaccatgagtgaaatggcatgtggcactgttagcctaataaacgttatattttgtaaaaaaactattttttaaccaatggccgaatcgggtccctttaaacaacgcatgggccgccttgcgaaattgtcctcagttggacatgatctctttgcgaacgtgcaccagtagtgccccgttttcgct

SEQ ID NO: 670571 - DNA, 565 bp, Homo sapiens
agatgctatattgactgtcacttgcccagatctgcttctcacgcaaggaagagattctttgcttaagacgagctatacagggtcgcccaatggagctggataggaggtaatacagcgcacaggtcatgggatgtagcgtgcagtcttagtcaacgagccatgttcgacgagcgtgctgtcattcacaggaaatcgattcaaggttcccgtgtgcgtcgatcatacacccagtgatgttccgtcagtatccatcatctctaaatggtctgaccaagctttctggacttcagtttgtgtcctgagcaagctgggatggagctagatccccaaggggaaatacattccgtgctgctcgtccatcaacgagatacgaactggaagcagagaagtctgacgttatggacaactggaagacccatatgttacagactgcgtggaagatggacgatcgcaagattgggagagggttcatctgatacgtggccaggatggtatatgacgagtagagtcctggtgaatgtggcagcattatcaggaattgtggaatatggtccagcaagtccga

SEQ ID NO: 670572 - DNA, 545 bp, Homo sapiens
  misc_feature (319)..(319): n is a, c, g, or t
atgcaaagtttttcgaagattacggcctgttcatgcgggagggcattgtgaccgccaccgagcaggaggtcaaggaggacatagcaaagctgctgcgctacgagtcctcggcgctgccctccgggcagtataagccagcctctcagaatacgccagctcgcatgcgggtccggcacccgcaacatctactatcctgtgacgcccccaagccgtcacctggcagagcactcaccctactatgaggccatgaagaagaaagacacagaggttctcttgctgcttgtgagcagttttgatgagctcaccctgctgcaccctntccggtgaagttttggaccaaggaaaagaaaagctgagtcctctgtgcgaggacggggaccataagtcggtgggattcacgtacaagggcggagacagtttgaggacaggtccccagccgcggagtgcctatcagagaaggagacggaggagctcatggcctggatgagaaatgtgctggggtcgcgtgtcaccaacgtgaaggtgaccctccgactggacaccca

SEQ ID NO: 670573 - DNA, 129 bp, Homo sapiens
tcttggcagctgctgcatgcgcaggatggcgggcagccccatctccagcacggtgaccatggcctggatgagaaatgtgctggggtcgcgtgtcaccaacgtgaaggtgaccctccgactggacaccca

SEQ ID NO: 670574 - DNA, 302 bp, Homo sapiens
tcgctgggggcgaactgtggtgctggccttgtgatctgcacctggacctggatgggttgctcagtaggctggtgaactggtgagttgtgggaagagctgagcctgagacctgttgcggagactgctgtacctgcacctggacctgaacctgctgcggctgctgaacctggatctgctgttcttgctgggtttgtggctgaacactggtggtgactggacaggcaagttcaagcaaagacccagccacttcagtgctgtctgtgtatatgcagttctgcccgcagcgaggggtaccgagctcg

SEQ ID NO: 670575 - DNA, 347 bp, Homo sapiens
taccagtctgttctaccatgttggtcaggctggtctcgaactctgacatcaggtgatccacccaccttggctcccaaagtgctgggattacaaccatgcaccaccacaccggctaattttgtgtatttttagtagagacggggttttgccatgttggtcaggctggtctcgaactcgctgacctcaggtgatctgcctgcctcggcctcccaaagtgctgggattacaggcgtgagtcaccacacactgcagattggttacatttttttttttttttttttttgggccctaacttggttttcctgggtggtgggccaacagattgtgaccggcttgttaccggttag

SEQ ID NO: 670576 - DNA, 443 bp, Homo sapiens
gtcactgcaaactcactgtgtgagcctcataccccagacccttagcccatcagtgggcaggggaaagggagacccttcccaagaaactctagttcctttttgtttctctacccaattccctttggattttcatatttaaatgtttggtttctgtattttgtttttttttgctgcgagtatattgatttctgatgggaagggaatggccacataaaagcaagcctctttctccctctataggagaatgttgccttgtggcctaggtgagcagccattcctccttccatgttcagagggcaggaaaacagtgtgggggtggtggacgcgcaaagggattactgcctgcccgatcttcaaacttttttttatatatataaatatatataaaaatgccacggtcctgctctggtcaataaaggatcctttgaagataaaaaaaaaaa

SEQ ID NO: 670577 - DNA, 159 bp, Homo sapiens
ttggggggaaaacccccccccccaaaaaagggaaccccccgggcccttattttaaaggcccccggggttttttatttggggcccggaaccccaattggaattaaaccccggcggggaatgggttttttaaattttttaaaaaaaacatttggcccggga

SEQ ID NO: 670578 - DNA, 342 bp, Homo sapiens
  misc_feature (2)..(2): n is a, c, g, or t
cngcgcatttcatatacatgcagtcatattacattgggcttttatgttcattttccatagttgtttctatatagcatgtatcagtgcttcattctttttaatgggtagataatattccatggtatgaatatatcactttggtttcttccattcaactgatggatgttggggttgcttccacttgggggctattatgaatgctgctataaatagtcatgaacaagttttggtgtagacatgtattttcaattctcttgggtgtatacctagtagtaaaatggctgggtcacatgtaaactctatgtttaactttttggggaactgtgaaactattcttaaaat

SEQ ID NO: 670579 - DNA, 724 bp, Homo sapiens
gtgaaggaagcaaggactcgggagtggacaagataccaggtctccaggaatgaaggtatcatctaagttgtgttatcaactggaggcgatctaccccccacacaggagacagttggcaatgtctggaggatagggactcaggacctaccgaatggcagaaataaaagagctataacataaacagggctgaaacgtgccctgtgctcaccaccctgtgggtgaagagaaggagagaagagatgcagccactcagggagcccagacctgggagctccccgagcccaggctgtgactccctctttgaggtcctgtggtttctggtgtttgctgagctcctgaacaccaccacattccctggtgccagctggggaagctggttgccatgcacatggtcaagccacagcctcacagagagccagtgtctgttccagcacctggagctgcccgccccactgcagcagcctgcatgcctgactgtgtgcagtggccggaccccatggttggtcgttcacacaccccctgccactccccacctggttcacccgtggcaggtgtgggatccaggctggtagtgtgaaccaagcacagcctgccaggccaggtgagcagaacgaggtgagcaggcctgagcaaaagtcaggcaaaggcaccactggccacagagttttatggccagaaaagcaacaccccaaagatcccatgaaaataaaaggagactgagcca

SEQ ID NO: 670580 - DNA, 872 bp, Homo sapiens
gggatgggtggaacggcgtcgcgcgagcttgtggtgccgcgctgctcctaggtggccgtggcgctgagtgcctggcggaggcggtgtcgagcccacgacgtggcgtttgacgtgctgtgccgtgtggcgtcgtgcattccttctcccataacgtgggcccggtggggacaaatatactgtgtattgttcacttactgcctctcaaaggagtggaccacaatgagcaattggcagatgagtctggtgtgaccagccgaagaccaccagcacttcacctgcaccatcttggatggccccatggtgaagtcctatctgtacttcacacagttcaaggcagagtgtgctgggtgcgcctgcgattgaggtacgccatggcctactctaaagccgcatttgacagggaaatgtgatgtccctctgaaaactgaggacatttgaagtgaccaaaaacagcagtggctcacaggccctggggcattcaaagctgagctgtccaagctggtgattgtggccaaggcatcgggcacttgagctgtgaccagcagcctgtttgcgggtggaccttctcatctccggtgaagctcgaatgggcctgtggccctgaaggtgtccagcaccatcacctggttttctagcgagcggactcttacgttttctaccctgggcttgctgttgccttggtcccggatgtgtgtcttgcagtggtggttaaagcccttggggcatgagaccagagggtcccgggccctcctgttcccaaaagttctcagtccacttctgctggagtcttctggctcaggatcgcaatctgggccccaacgaggttgcgaccatgggcgtatgccgggaaagtcttgtccccgactcacgaa

SEQ ID NO: 670581 - DNA, 376 bp, Homo sapiens
  misc_feature (371)..(371): n is a, c, g, or t
atgcagtgggcacacagttggcactacataaatgctagaatataagaggatgctgttgatgatgtacactccaatgctatgatcctatagcttactcagtcctttcctatattgtgttaattttattattgtgatataatacttataccctaaaattcacccttttaaagtatacaattcagtggtttttagtatactcacaaagttctgcaaccatcactactccataattccagaacattttcatcagccccaaaagaaactctatccctattagcagtcactccccattctcccctccccatagctcctggcacccaccaatctgctttccaactctatggatttgcctgttctggacatttcatatnaatgg

SEQ ID NO: 670582 - DNA, 644 bp, Homo sapiens
gcctaaatactattgtttgcactcttcattctcttctctcgaagtgctaccaccaccactaactaatctactcacaagaacattagcatagggacaatccttattgcacaaagttagtttcgctaaatgttactgatgaccaggttaactagatctagaagctctggattactagttattctcctttctgtaaggtaaatcgtactgtaaaaccagcaatgcacgtttgatctttctgtacctataatccctgtatttgtcgcatttgctctgcgtagactttctcattccatgggtgtccttcaaggaaggccatagaacacatcataagacgcaacacaggggtacttcgaccaatccaggggagtcacatgtttactggtaggcaattcaaactttctcaagttggtctaacagtatacagaaatcaccataaatcccaaatacaaatctcactggtacttcacagaaagtttgatcatagcccacacctttgtggcttcacaaatacacagagatcactgggagcagggaactctaggtccctctctgccggtttggcatatggaacatcctgtcaggcaacatcagcaatgggtaattgggtcatagggaaggggaccttgagtgtgatccttggcacc

SEQ ID NO: 670583 - DNA, 159 bp, Homo sapiens
agagtttcccgctgttgtaccgtgtgccattattcaccacagagtctcatgaattatgaaagtgtcttcacttaagctcccaggccctaatgcactatcgcgttcggcgggatgaaaagcggggttgaacgcgcagtcattattcaacgtgcggctgga

SEQ ID NO: 670584 - DNA, 889 bp, Homo sapiens
aaagccccagtggatgatgcacaggaaatgctgacactccggattgccaccatgcctaaagatacgttgacagtgaacgtggaggcagtcaggccgcgttgtcctcgctttcgaaaagtcaagccttcacggactcataataatatgtatgcctgggggcaggaggtctcggggcgaacctattcttacatgcactgatgtcagtcttacaggtgttcatgggatcactggaggatagctatgcagtgtccagtgctgcttgaatgtgctaataaagtcaaggacacttcagaagatgcagtaagattccacaatttcacttatttcttccttgtgtaccatttcatgctcgtggaaaccaacagatgatgctactatatgctgtgtataacgatggtgggagacaagatatggaaaatgtacacatttgtagattaagctggaattatgatgagagcaataggaactaatttatattcgctaaccacagggtgatggctgcttctagaaatttgaagtcttgatgagcttaatgaggtttataaagatagagtgtgccgcgtccgtactgatgtggctcattgtgtattgccagacaagagccaaagaggcactggaatcgtcattggtacctttgaaaagttgttgccttattttagcagagagtgacaaaaggagttatgtaacgtgggctttggtattcacgagaaattcttgcattcagcggtatgtacaactgccggggctaccaaggagaggggatatatgccgatgggggaaagtgcgcggaaggaacacaacggatgtggcgatgggaaagaaaaagaggggaccgcgaaagagcaaacattgaacagataagagaaagagtgggtacagcgaaaaaagg

SEQ ID NO: 670585 - DNA, 1233 bp, Homo sapiens
gctgagccatgtgagggatccccggcgggctatcacttgctgcactcgacggtggtctgctgacatcgcatccggcgtttcctcgtcccgtagggcgagcggatgagcgcacggtgggcctcagtgacacgttgtcagccagtgtggtatgtctgcctcgaatcgcagtgcgagcgtagatcatttggccgtctctcaggaacagattcccactggttggaccggttggatcatcttctcatgcttccaaaagaggtcgtctctctatgagactaggtgctgtacccagaatgcgctggagttccaacctgggggtacatcttactgagaaggccactatcgagagctggccgggtagcaaatcgactaagacctcgcgtctatactaggtggtaagagaggtgtgcgaaccaaacaggctctcatgaatccctagcattccaagttagagtagaagtacttgcaaggctggttgggcctgggcatatgatgccaagggacaagctgggaagcgctacaagagcaaacaacgtagaagatcgggagcaacgtctggatgatcggatgatggagtggaaaacagcagagaataaaatctatagtagtggcagcgaaacggccaatctacgtcgcgtgggtgatcacccttgtccagacgatagacacaaagactaggtgcctgattgacgaagtgggggtaccccactttggaacaagccaacatcgacgtgacttttgctgaaggtaagctctgtagagtcattacttggacacaaccccaggtcgtaaaatcgtcatccacaggggacgtttcactagggtaggcaacaaagtgggggcatgacagagcgtatcatggatccctcccaatcctgtgcatcgatacttcagggtagcccatgccgcattgcgagctgtatcgtggaacgcagcttacgtgccaggaaatagtcactagcggatagaaaaatgagcgaaagaatgatcacccagcgtacagatgatgattggagagtagatgagcacataacctggggcaacgctgcacaactgggataggagcacctgagaaacggcaactcgggggcaccgattaagcgagaggggtcccggtccggcaccacactggtatatcaagattatctgatggaggcaccacacacacatctcacattcacacatgacatcatgtataatcgagccactgtagaacacacgagaaggatagaacaa

SEQ ID NO: 670586 - DNA, 392 bp, Homo sapiens
agcaatgacatatgaaggagaaagcttgaatagactgtgttcatgaagagtcatctacaacttctattgcttcagtgccttaagacgactttttgaacaacaaacataaaatctgatgatgatcattgaaaaaattagcatattgtgactaacaaagatcgctggtgtaccgggcacggtggctcatgcctgtgatcccaggacttcgggaggccgaggcggacggagtcatgagtgtcaggagatcgagaccagcctggccacaatggtgaaacgacgatctctaataaaaattacaaaatactaaacataagaaaatagcctcatgtataacacaaaacaccaaaatataatgtaacccatgtcttacggaatcacgtggtcggggatcc

SEQ ID NO: 670587 - DNA, 172 bp, Homo sapiens
cccccccgctcatgtctgacgtctggcctattaaatttattattcatttattaattattatatcctccaattacaattttttctactgtacagcatggtaacccaattacacatacatatacacattcttttttctcacattatcattttccatcgtaagacattaccgctg

SEQ ID NO: 670588 - DNA, 1307 bp, Homo sapiens
  misc_feature (429)..(429): n is a, c, g, or t
  misc_feature (1032)..(1032): n is a, c, g, or t
agcgggccggctcagtcatatgaccggcagccggcggctccggcgccgagcagagttactcagtcgcagcggaccccgcgctcccgcaaggctgggcggccggccgccgcgacgggacccggagaaccagcagagaccagcgcaacacaacacgagaagaagagaagaagaggacagcggagaagtaatacagggcgacaatgcagcgacgagaagagagaaagcagaaagacggcgaaacacacgcaagaagcatacagaaaagaacgcgagagaccaggaaagaaaaaacgacgaccacgagaggagcagcagagggcgccagcgcatgatagcaacgagtcgcgaaacatgcagtgagaggccgtcctcgggcgtgattactgacggagatctataaagcagaaaaaaacaaacaggcgagcgagncacgcacacacgcatcgcgcgaagcccgaagcagggaaccgagagagaggaaacacggccggaagaagaatgaacagctaaaaaggaagagaccgcagaagctcagtgcacgaaaacagtactagcacagtcacgacgacagaaagatcagaggtgagaagatgcaaaggcagtcagagacgaacccacaccgcgggaccggatcagaacagacaggcagggcaaagcagcgtgagacaaaaggagggaaacaggagacggaggagagagcaagggagggagacacaggacagaggcagctacacacaaacgctcaacagacgcagacaaggagagagacgaaaaaggcaagaaaaagacgagatgagaacagagcagccaaagaaaagagagcacgagaatcgcgaacagaaagaacagcagaaaaagagaagagagaagaacaacagagtaacaagcaacacgaaagaaacagggagacacagcgaacgaggactacgaacaccgacgagagacagcacagagactagtaaacggaccaagggacagacgtacgagacagagagcagacgacagacagaaacgtgcagcagagaaaaagcnaacagacagcaagacgaagagcaacagatcgagacgccaaccagcggacgaaaagagcagacacgaactgagagaacgcagcagcgctacatacgaacagcacactcgcaccgacagacacgagatacacgacgaccactaccacacgagagcacaagagcgcagctcgcgaagcatagccgcgacaccagagcgcaggctgccgagcacgcaaagcagtacagaggaccacggaacgaagagacagcgcgagagaaccacaaccagccaggcac

SEQ ID NO: 670589 - DNA, 979 bp, Homo sapiens
  misc_feature (22)..(22): n is a, c, g, or t
  misc_feature (50)..(50): n is a, c, g, or t
  misc_feature (478)..(478): n is a, c, g, or t
  misc_feature (979)..(979): n is a, c, g, or t
ccaccttcttgagaaggtgttngggggggtgctgagagtctaactcctgnagaatgttaagcccctctccagcctcactccactgattgctgcagctgaggaggcaacaaagaacaataactacaaccacactaaccccagcctccttgtgccaagccttctgtgagacaactgcccactccagaaaggacacctgctgaagccctatctacctgtgctagcttattctgctttgctgcagcagtcctcctgaggattttgattttttttataacaagcaaccgcaaaacaaacacacctcgccatcccaagatctaacacatgtcgaatctcataacccccccgcattcaacaattcccttctcgacccacagcaccgctgtgataacgtaccatcaggagattatgtcctgccctctcagaaatcgagactggtcacagatatattgatacgtcctagtagtcagccccagtaatncctcaagatattccccgctcacactctctcctccgtatagtaacacatcacgaagacgttatctcacaagcatcatagctagcgtctcgcgagttttttcagctagccagacaccacaccacctcaccatataacgtatatcacactaacctcaaacccccgcttcgcgtacatttgcaggctcctaccccaccttcctatagactcgggctctacagcgctagtgtctaccgatcgctagcgtcacgagcattcaatattcaccatcattccgatttctattcaccatgtcactaataatacgctcaccgtttcaacatcgccgccatctaaacaacattgtccgccactttcgccacatatttatcggacagtcgcatataacgcgccatcgctacgagatgtgggattgcagtcgagcgggttccctgtcgataatgcgtctgcattatatagacccacctaatatgccgcccgcccccccaccagcaccaccgagcn

SEQ ID NO: 670590 - DNA, 184 bp, Homo sapiens
tttatggctgcatagtattccgtggtgtatatgtaccacattttcttaatccattctatcattgttggacatttgggttggttccaagtctttgctattgtgaataatgccgcaataaacatacatgtgcatggaagtcaaaggaaatcccttttcttggtgacgacttaaatctgggttccct

SEQ ID NO: 670591 - DNA, 567 bp, Homo sapiens
ttaaatgtccctgtctgacagctttgaagagagcagtggttcttccagtacacagctggagatctgagaacgggcagactgcctcctcaagtgggtccctgacccctgacccccgagcagcctaactgggaggcaccctccagcaggggcacactgacacctcacacggcagggtactccaacagacctgcagctgagggtcctgtctgttagaaggaaaactaacaaacagaaaggacatccacaccaaaaacccatctgaacatcaccatcatcaaagaccaaaagtagataaaaccacaaagatggggaaaaaacagagcagaaaaactggaaactaaaaatcagagtgcctctcctcctccaaaggaatgcagctcctcaccagcaacggaacaaagctggatggagaatgactttgatgagcttgaggaagaggcttcaaacgatcaaattactctgagctaccgggaggacgtcaacccaaggcgcaagaagttgaaactttgaaaaaaatttagaaagatgttaacttgaataacccattcccccagagtgctttaaaga

SEQ ID NO: 670592 - DNA, 685 bp, Homo sapiens
  misc_feature (632)..(632): n is a, c, g, or t
tggtagagacggggtctcgctatgttgcccaggctcaaactcctagggtcaactgatcctcccactttgccctcccaaagtgctgggattacaggtgtgagccacaacacccagacaaaacaatcacttttttagacctctacccttcaacattacatagactttctgtttaggaccatataattttgggggaggaggggaggaggtatttggtgtagtcttagaaaagagcaaagcttgttgagatgcaagggcaggtgaccagatagtttcactcactgcttaaataaatggctcctaataaatatttatgcctcagcaaataaataagttatgtcaggaactttggaagtcaatcctaaaagcagaaattgaatgtaaaggtcttctgttcataacagttgacatcagcagcacataaactgtctctttctaaggaaactacgtgggcaaatattggtcttttattggaataaaagaccctcatacacctatgcttctgcactgacaatacatttttgatactgaatttcagcttctaaaagaacaatttaaagaataaaatctgatttaaaaaaaaaagcagactacctttcctttgcagtaatgtgcccaccaagtaaaattgcacntgaggttcacacatgatgcaggccatctgtctaggaacagtgaacatgctaag

SEQ ID NO: 670593 - DNA, 1292 bp, Homo sapiens
ctgcagagggatcctgtggctggaagcgaggaggctccacgatcggccgtatgcagcgtacctgcagaccgaggatctgggacatccgagggcacggccatgacccctccgagggctcttctggtgtgtggctgctgggttgcggtgaaccctagaggcgtgtaagcgatggtgacttgcggctgtgcctgcactgggtggctgccaccagagccagggccgtcgtggagactcttctacagcaggccacgtggggcactgtgtgtgagaacctgtgggcacgctgagctgagtgccagcgtcggtctgcctgggcgcctggcgcttcgcagaacgccagcccaggcgtctgggcaggagcgtgccttcgtggcaagggatctaggcctccatcagtgctcggtacgtagcagttccccatctggcagcgtgggagacgcgagtgggcgtcacatgtggcctgaccatgctaattcccgctgggggcatggtcgtagatacgcaggcgaagcgtggcagcgcaacgtagacgcagacggctggatagtgggtcgtgcgccagattgacgaccacggagcatcccacagctcctgggacctcttccagggtgggctctctggagggcccgttggccgggacttcttgggacccgccaggccggggcttgcgagcttgtcccgtcacgcggtgacatgtgcatggggccggcacggtacgccgcgtgggcttctgttggccacgctggtcagtccgtgcacctggcaatcgctggaggcccggggccctgtggcagggagcggggcatgcagtggtccccatgcagtgtggctgctggttgtcgttgccccatggtcaggggacccttcctacagcgtagtaactacttccccgaacggagttgacattaagcgctgaactacagcgcagctgcttcacaaagctggcatatgcctaatgggcccgggcactcaacgacaatagggcaagcctttacggatggatcactacaccaggaccctggcccagaagcccgggcacccgttcgcccatgtgccagggacaagaggacacccggcagtgaaacaaccgcagacacaaccggcgcaggcaacatgaggcgaggacaaagaggacaggcccgggtccaccgacagtaacgagcagaccccgacgacagagggccaccaagaccacaacgacaagcgaccatgcggaaagagcccacacgagggagtgaacgaaaggagaacgacggcagaaacgagcagactaaaagagaaaagcacaagca

SEQ ID NO: 670594 - DNA, 158 bp, Homo sapiens
ggcccatgtcatggttaaagcatttagatttttatcttaaatgattgtcaggtatcaggttcgtccgctaatgagggatcaacagtccatctaggaacgtgaagagaaacgttgcgtcgcctcacgactatatgaggaacggacagggcgcagtggct

SEQ ID NO: 670595 - DNA, 149 bp, Homo sapiens
tagacctaactatccggcaatcccaaccaaagtcatgtacatgccgttgtgctagtctggacaatcatctgtcactcatccaacacagttatgtacagaatgcgcagtccctgcaacagtgtagattacagcaggcgttctctacctgg

SEQ ID NO: 670596 - DNA, 491 bp, Homo sapiens
gtgctgctccataatttatcgccatgtgcaacagctgcgttttctagcattatgaaatgatgtgtagatttcaatctaataacagctcacatattcgaatccctccagggctgaggaaatttctgcacctatatggaacccacatgcaaagaacccatctagcatgtaataaataatcgctagccatactcaataagacacggaaaaattattgcttacataacagaaaaacatctacttgacccccttttatgactacatcaatctattaggagtgtatccatagtctacattcacaaaatgtcatcttgacttatttgccattgatttaaggcagaataaatagtccccctttccccagtcttaacaacaaaaaacaaaaaaccagcctggagatctacattgtgatgctttttaataacttgactcctttcttggccagctgaaactcgtcgcacaggccggaaaataaaccagctctccacaagagt

SEQ ID NO: 670597 - DNA, 119 bp, Homo sapiens
tcagcggcagtgagcttctgtgtagctctggccccctgccaagcattactgtgtgagctccaccccctgccagagcattactgtgtgagctccgcccccttgtccagagcattacgtgt

SEQ ID NO: 670598 - DNA, 200 bp, Homo sapiens
gaacctctgcgccatgagagccaagtggaggaaggaggcgaattgccaggcttgaaggcgcaaaagaaggaaagatgaggcaggaggtccaggtaaaccgttagcttttttgcaccttgggaggccacaggaggcaggaaacatgggattgccagacgttggggatgctggaacaagtttttggggactgcaagctactt

SEQ ID NO: 670599 - DNA, 288 bp, Homo sapiens
atcccctgactacatacttatagaacttagtgagcacactgtgttatacctgctcaaatctacagtagccaccaaaaccatggcttaatattttgagccctataagaaggagcagagctgcaaacactagcttgaaattagtaacactgaccaatacagctctgcaattctggaccatattaactaaaatactatgccttatcatatcgggaatttctaattctaatgttcagtgcaatgctagacatttatttgcacactaatactagcaaagctgttagatattct

SEQ ID NO: 670600 - DNA, 395 bp, Homo sapiens
acaactcttcctaaccagtaactaataaataatcatcatcacaatagcttcaataaaacaaccccattcaatataaaggtgcaatacttattgttaacctagacagccaccgaacttgtgtagctaggtccatatcccttttcattcttagctgatatcctgaacacaatggcaggcctggatgtataatcaatatgtgcataaaagcaagtagcccagcagttactatacatgatgtcttaagcaccacaataaatcctcatgaacacaagttgactatgagattgaatcttgtatctgtgctgtgcggctagccaagtacggctgaatatcccaaatatctttccaagaaggtaaggatggaggttcccaggaaaggatgaataccttcaaaa

SEQ ID NO: 670601 - DNA, 440 bp, Homo sapiens
aggtttgtcctcacttaaggcattttgttgtggggtttttgggtttgtttttgggggtatttgcctcattccacccctgagctttcaggtaaacaaacgtgattcaaaactttgttttaaggtgtttattgtagtggagtaatgggtttgcagtgataagtcatacttttcccccgaaagggagggcttgggaatccctgaaattagctaaagttaagttgttggaaaaatcccttgatttggaaatggaccctttgggttttgttgctttgtttcctgaaaataactgggggaggttcctggtttgtccattaacggctttgattccttggatcccccccattttttcactttaaaaaaaaacaaaaaattgttgcaaaggtttttgtattttgcagcggcccttttgtaaaaagcacttttcccaaataaaccaatta

SEQ ID NO: 670602 - DNA, 565 bp, Homo sapiens
  misc_feature (423)..(423): n is a, c, g, or t
  misc_feature (432)..(432): n is a, c, g, or t
  misc_feature (438)..(438): n is a, c, g, or t
  misc_feature (451)..(451): n is a, c, g, or t
  misc_feature (482)..(482): n is a, c, g, or t
  misc_feature (558)..(558): n is a, c, g, or t
gcggcctaggaaatccagctagtcctgtctctcagtaggaaggcataataggaattatgagggtaaatctaaaaacaacaaaaaagtgctgggattacaagtgtgagccaccgctcccagccctggccagttcttttcttgagacagtcttgctctgtcatctaccctggagtgtggtggcgcaatctgggttccctgcaactcccacctcctgggttcaagcaattctcccacctcagcctcccgagtagctgggactacaggtgtgtgcctccatgcccagctaatttttgtatttttagtggagacagggtttcgccatgttggccaggctggtctcaaactcttgacctcaagtgatggcatccattttgggcctcccaaagttgctggggatttacaggtgttgagccaccgtgcttnggccctggnaatttnttttttaaaaggntattattttgggcatcatcgaattttaaagntattggtctatgattaccagacaagaaggttttttgggaggagggttattccagaatttagatttttaatcgttgnattgaat

SEQ ID NO: 670603 - DNA, 433 bp, Homo sapiens
agaatgcttctcaggccattttcaggagccatccataggataaggtgagctgatcacctcccagggacaacactatccaaccagagtgctggggtgcaggagtggccgccaatttggatgaacctcgtgtccccctaacaaagtgaaagtggttcactggtggagaaaatgggccgatacagcggcaagtgcagcaaggaagagtttgttggcagaatggtaagagtggcttgccaccccaactgggagtgtgtgggtgtgtgcggacctacccaggacaccagagaggttcgtttcctctgatgaagagtcctggggtagaagtggtgtgtgtatgtgtgtgaatgtgggaatctaactaggctcacccgggacacgagagagggttgttttgtccgatgaggagtcctgaggcaagggaggtgtgtgaaag

SEQ ID NO: 670604 - DNA, 308 bp, Homo sapiens
  misc_feature (32)..(32): n is a, c, g, or t
  misc_feature (76)..(76): n is a, c, g, or t
  misc_feature (78)..(78): n is a, c, g, or t
  misc_feature (134)..(134): n is a, c, g, or t
  misc_feature (166)..(166): n is a, c, g, or t
  misc_feature (203)..(203): n is a, c, g, or t
  misc_feature (266)..(266): n is a, c, g, or t
ataatcagtcccttgctccttcctccaccctnaaggatccacatcacaaagtgtgctacatatacactgatatggntnggctgtgtccccaccctcgcctcttgaattgtactcccataattcccgcgtgttgngggagggagataatttgaatcatgggggcagnttcccccatactattggtgtggtagtgaataagtctnacaagatctgatggttttatcagggatttctgcttttgcatcttcctcaatttctcttgccgncaccatgtaaggtgccttttacctctgcatgattctgggcct

SEQ ID NO: 670605 - DNA, 172 bp, Homo sapiens
ttatgaaatcatatcatacgatatctttcactttgtgactgcgcttattccccttagcatttagcatgtttgcaaggtttactccaggttgtagcatgttcagtacttattatgttaataattatgataaaatacatctaacataaaatttgccacttcagttaatttcttt

SEQ ID NO: 670606 - DNA, 1112 bp, Homo sapiens
atgctatctgcggggccattcgtatgtattgcgtctcgcagtccagtatgcattccattctccgtattgcgtcaaaggccgatggcatcgtctcaacagaacttttgcactgcgcagagcaataacagatgtgcgcaattatttgtccataacatccatataattggaaaacctcagaacaaacactgaaaaataaatatactataatccataaccatggtctgcgggaactaagtctccccaataataagtattcttaaataacctcctgtgattatggaggacgaacccgagtccgggaatagccatagggttaatggtcgtgacgcatactgagtattcccataggggacattccctaggggcgcttttatcaggtggtgaaggcaacattcccaatcactactttttaaaaagataacgcggacactcggggcggtaacgaacgaacaagcgattgctataatataacaactcctcgcggcgtaagccactaaagtcgagtcagcttatccgccggcgacctgttcagtcagagaggtactcccaagcggagaactcggtctattaacatcctatctggacccgccgagtctttgtttgagaactttgaattccttgccttggacacggtgggcttccttgtaagacccccctaacgggaactttccaaatcctattcgtttttctccacccggatacgaggtggggccatgaaacttgggcaatttgttattttagcgcaaaaccttcaattcaacttaggaacaattcgggtacttaacaacgaaacaacggtaactaacagtttggtaggcatcaacttttcccaccttaattgttccctaactccaacataagcgaagccttggataattttcggccaattcaattagggacagggcttttcaattttcaacttgaacttttccccccttaattttcttcgagggcttaacaaccgccttaggaaacagaagacacttaacggcccaaagaattcccaattttccaacctcaatccattaattccatccgggagttcaaattcttaacctttttctttcccaacagacaagttatactcgggccttattccgggaaaatgtccc

SEQ ID NO: 670607 - DNA, 404 bp, Homo sapiens
tcgagaaatatgctggtaatctattagaatgtcatatcacatttaatgagtgatactctcctactgctttccagattctatgtgacttccgaaaatctgattataatgtgccttgcgtctacgtctctttaaattgatcttagtaggagtcctttgagcttcttgaattagtatgtacatttctctcctcagatttgggaaattttcaaccattatttcttcaaataggttctctgccactttaactctctcctgggacttccataatgcatatgttatatcactttatggtatcccatgtgtcccttaggctctcttcatttttcttcattctttattattctgctcctctgcctcagtaatttcaaaagtttgccttcaagtttactgatcctttcttctgc

SEQ ID NO: 670608 - DNA, 370 bp, Homo sapiens
  misc_feature (370)..(370): n is a, c, g, or t
tacaagccacgatatattttaaaaagatcgtgtttacaataagtaaattatgtagtgaagaaacatcaccatgaagttgagtaaaaaggcacatttgaaaagttgaagagtacaaagagtcccattgtttgttctactagcacaggaggaaagggaaacagatatattacaattaccgttctcagggggaggtttctgtcagtggaagtgattaacactggcttcttttctccccgctctggggcaagtcttttagttcttcggcttcggagagacaagtcaatcttctgccatgtagaggcgatacatcagagctacagccagggctgagatggctgggatcacccagttggtccaccaactggaattn

SEQ ID NO: 670609 - DNA, 343 bp, Homo sapiens
gtacggcacgctgggctcagccatgatgctgggatcagccatgatgctgggatggccaggcctctctctctccatgtggctgctccacatggtctatccagaagtgtagctgacttcttagatggtggctcagggctctccaatgtgcaaaagcaaaatctcccaggtcttcctaaagcttatacctggaactggcccagtatgacttctgcaccttctattcattaaagcagtcacagggccaggccagaatcgaggggaggagaaaaactccacctcttgactgggagtgtgacaacaaatttgcctcccaccttaatccaccagagagctgagttcagag

SEQ ID NO: 670610 - DNA, 265 bp, Homo sapiens
accatatgaaaaaccatttcctgggctcaagggatcctcttgcctcagcctcctgagtagctgggattacaggcacccaccaccacacccagctaatttttatattttgggggtttctccatatgggaccaacctggtctcaaactcctgtcctcaagtgatctgcccaccttagcctcccaaaatgctgggattacagatgtgagccactgcacccagcctgtttctggcatcttatatttacttctatttactttcttttctg

SEQ ID NO: 670611 - DNA, 524 bp, Homo sapiens
ggcgtgaagactcagagatgagaaaactggaccatgtttgcctgtgagggcagggtgtaagctagcgcccccaggttgcaaggtgcctcaggcagagcgtggtgagcggtggattctagagggagagagtgtatcatgtacatctccatttagtaactaacagggtgactgctggtggatgatggggcgtcgcgtgacagaatttataacagaggcaagatgcaaccagatttcagggtgtaaagaggccactggggctacatgtgtacttggaagagggaacctggctggcaaaggtccttcaggagggaggactacttgtcacttatggccactgggaatactagagtaggagacgtcagtagccgagggccaggaccagcaatgcaagcatggagcattccaagaggaaccctacaggctcctggcaagccaggatgaagccagcgccaagattgcagggttaggcaaaaggccatgcggggagccccatcccaaggaacatgaacttagtcttgtaatag

SEQ ID NO: 670612 - DNA, 1106 bp, Homo sapiens
  misc_feature (647)..(647): n is a, c, g, or t
  misc_feature (706)..(706): n is a, c, g, or t
  misc_feature (729)..(729): n is a, c, g, or t
cctgtatggcatgccatggctgcccagcctggaatggcatggtcttgaagcccctacttccacaatggacttggcagctggctgctgtggccactgtgtgttcaaccatgcctggccctggaatgatcctgcatgactgtaatgtgccctgtgcaatgccaatggctgctgcctgcaattctgcttcctgctgcccctgctgtctgtgtgtacccatccgtggcccattctgtgctgcttgcccctactgtgttctgtgtaccactactgaatgtgtgctgctgcctgtgcctgctggctttcatgccctggatgtgagctcacggcgtggcctgtgcatttcacaacgacaggttggccccgtgacccatctgcgcatttacttgtgtgcatcctgacgtgagtgctgcgaactaatgttccactgtgagtaccccttgcatgtgcccaacctgtggcagtgctgtgtctcgacacgtgcatgttaccgagctcgcagaaccttcaattccatactttaccacccagtgaaagtgcccatccgtgcacctcccatatgcacacggcgcacgacatgcttccttgcttgcaacgcaaccgtgacacaccctgtgcccagccccatgtcttgaccctgtagacctggntcagttgcccggatccctggaaaccggtcgtactacactgacaccggaccgacaatgcntccgacgctcgattcagctcgangcgacacgcacgcacacgacatttctcagacatggccctatccgaataacgcttctacccgctagtagcgccaccgatgaccccaagtggccccgtggcatctatcggtgccataccgtgcgcaacacacatgacgcccaaagggcaacgccggctatgacacacggcactggtctggacccacgcgaaccccacacttcaacaggccccttacccttgtggatgcaccctttgcgcacattacaagttacagcggccggctcaaactacacaacaccatcagaaacacacatcacaaactaacccatccatatgacccacacatacagcagccgcacaccacacatcacagacagactacccctcacaagacgtcc

SEQ ID NO: 670613 - DNA, 185 bp, Homo sapiens
ccccgctagccgacggtgctgtcaggctgccgtgcttcacctgtgagcttctcgatggctcgggctcccgtggctgcgtgcgggggaggcatgaatgcactggtctgcggcctgtgcgcccctgggctcgcacgtagttggggtccaggtcgtcgccgccctgcaggttgtcgggctagtcgggg

SEQ ID NO: 670614 - DNA, 200 bp, Homo sapiens
tttgagacggaggtcgcaggtgagctgagatcatgccactgcactccagcctgggcaacagagccagactctgtctctacaaaaaaaaaacccaaagaaacaaaaagaataccttcctagttttgttgaccattgaattgttcatgaccaagtggctcatgggtgacctttgaattggtcgccacacttcacagggacaa

SEQ ID NO: 670615 - DNA, 668 bp, Homo sapiens
  misc_feature (203)..(203): n is a, c, g, or t
  misc_feature (373)..(373): n is a, c, g, or t
  misc_feature (396)..(396): n is a, c, g, or t
gtggtttctagagggggggggttttgggaggtttgggtattcacctctacaaagagctttggggggttgcctaacccaaagggagaacccaccccccccggtctttcctgtatcattaccgtggtacatgttcccccaagtgttaatgggtgtcaaaatctaatgcttttttgtatgttgcccattaatgcaagggcctttcncttttggttcacaatcttatcccaagtgcttgaaacaaagttggcctagagtagctgcttatatgtgttgaatgagtgaggggcttgagggtaataagcagatgggatgtatacatacgaggtatttacaatacagatgccgagtgctcagaatgtgaaagaaggaaganccccttgtgattggagtcaatanagaagactccatggatgagcgagcaggatcagtcttagatggatggaaagaaaagaaggaaagacatagtgtgactgggtgaggtttggcacagagttcttgggaatggtctttgttgtgctaaagtttatcatccattgctgaggggtgagtgtgtcgtcccctctaggacctttagccagcccagctggtggctgacattggagggctgtgctgtgaaaagtgacactgggtttagagcaggagtccgaaacttatagggctccagaagc

SEQ ID NO: 670616 - DNA, 445 bp, Homo sapiens
aggaccgctatgattagcagtatgaatagtattcttgggtaagcaaatagccctagtgaatggataagctcttttaaaacactctggctaatcgagatcgcaccacatcagcgctgggcaacagagcgagactccatctcacaaaaaaaaaaacattctgggataataaatacagaaggattaccagggggcccattttcagggcctaagaaattcagtaatccaggcacggggtcatccatagatggtaaaaccactcaggtgaaagaagggggtgaaccgtcagtgcgtaataccgcacggaacttaccggagctgtcaagctcccaaacacctgagctggtgaggggctgcctggtgtgtggtgcagtctcggctaggcggtatgagcttgggctgaggggcctgggccccccaggaaagacctgatgggaccctggcttcc

SEQ ID NO: 670617 - DNA, 813 bp, Homo sapiens
gagaagcagcatcgaaggaggtcgccagatgatcaagctccccctttgctgtcatctgtgaagtgagacttcgccagcgtggtgggcacctgggagccatgcggaggtgtggtgctttgatgtttaagactccaggtactttgtggtctaaggaaatcgcctagctccaggctgtgttaggacagtattagcatgaaggctgtgctgagcagtcatgcctgctgatccttgaggcaggcctggtccagaaaactctggtgtcagtgactgcgcagggccatgccgctaccaggacggccctgaaacaggacacatctgtattttccgtcccttcaaccactggggggtccagggggcccggcggttcatgcaaagtccagcgggtcgctccgttcctcgcccaggtcctgtacgtctgaagcgcaggggcttgaatggttagtcccaactctggccgaagatagctttttctccagagagcgagaggcctgtgtaggccagtgaggggagcccccgtcgggggcaggcggcggcgaactgcgcacgatgcccctttcccagccgtgtccttgctgggttcccggccccttgtttcccagtactttgggacgtcttacactttggtgacctttggagccccgtgtgtccccccatgtacttgaggggcaaggccagaactttttgtggttggttccttcctgggggggggtcaccgagggcacacccaatttttgtggcggggggcccagggtttctcaacctcgctggggggttaaccacccaagtatgaggcttgtggggagccacgacact

SEQ ID NO: 670618 - DNA, 973 bp, Homo sapiens
  misc_feature (680)..(680): n is a, c, g, or t
catggcgcgcgagctgcgggcgctgctgctgtgggtgccgccgcctgcggcctttgctgcgggcgccggtcgctggggccgtgccggtgaggaaaaccaattctgtgtcctcggagtgaccacagcccagttggggccccagggaaaccagcctggagcttgcaggaggacgatgttcagcaggcagaccggcgaggacaagggagtgaacccctgcactcgattatccagcagcacagagagcgtgcagggtccaacttccaaacatgagttccaggccgagacaaagaagctttgtggacattgttgcccggtcccgtgtactcagaaaaagaggtgttatacgggagctgattctccaatgccagcgatgccttggaaaaaactgcggtcacaaacgtgttgtctgacgggccatgccactgccatgaaattgccagattcatttgcagaccaattgccgacgaaaggcccaatcacccatccaggatacgtgggtatcgggattgaccccggaagcagcttggtgtccaaccgtgggaccgattgccaagatccggggtcaaagggcttccgtggatgctcttgcagaaacaggctgaatggccacgcacgcagaatcatcggccagtttgcattggttgctacctcagcttcactggtggtggcgacgtggaagntcaatccccggtccgaaaccccgagggagcctgcgtcccgttggcttcccaatgttctgacggttaaaacgcgagccctttggagttaacgggccaaatatcttccccgtgaatcgctgcacaggtcccgggcgggcgcgacgtagtgcaccaccacccctcgatcccctcaatagggggaccctcgccgcttgttgacaccactagtttgtcatatattcatctggtactcaaagcctctatatgtacctatcacgtatcatttgtggtagctcccacacatgctctgtata

SEQ ID NO: 670619 - DNA, 114 bp, Homo sapiens
ccatgtgagaatccacagcaatatgggtcattgttgcagaatatcacaaaggtctgttgtgtatactccttttcaccaggaaacaaaaacagtccgaagtgattgttccccgct

SEQ ID NO: 670620 - DNA, 180 bp, Homo sapiens
cgcactctccctgtcgagcgtccttctcccccgcagggcacaggcctggcacctccctgccttgtgtctgagccatagtgacgttcctcatcccagtgacgtcctcatcccagtgacgtacctcatcccagtgacgttcctcatcccagtgacgttcctcatcccagtgacgtgcctcat

SEQ ID NO: 670621 - DNA, 925 bp, Homo sapiens
aagggagtgaggcgccgagcacgggggggtgaaggccccccctggatggtccagggccccgcgcgggaaagactatcgcgcccccctccgaggacttcgccggggcccaagaggtcaaaaaatgcgggggtacacaaaaagtcccttcgccgccccgtaggacgacaaacgggtggcggcccacgtggtctgggccaggcaaggcgcttccgttagaaaccgcgtgcgcccaaccaagcggcccgggtcaacccaacctggttggcagcgccccccccccgccgggccagaaacaataaggccggggtgtccagcccacccgacctcagagtgcctgtaccccaaatttaggctgccgcttcctaccgtatgatttagtaaaacggtctccacccttgtggacaattcgtggtgcgtaaatctaaggccaagtttaaaccatagggctctttggagcgagcaatgcgcaaaaaaaaattttatgtgcctgagcggagtatatatactaggaaaataactgattacaatggctactatgctgcgactacacaacaaatcattttcttcaccgcaccgctccaccgccaaggggcatacacgacaaccgcaactgatagaaacagaggaagcgaaccattttacgcacacaaaagactgcgtacaccacggggataggaaccaccatacgccaaccaagggagtgctgggaccaccgctagtaggcaaccgcaggctgcgtggtggcgcacacccagaagaccccccagaaccttgtagatatagatagaataacccggaaggcgtcaatcaacaacgataggaaaagtatcatcagctctgataatactggatagacagaacgtgacctcgggtgaaagaacaggggacaaagaggagtaaacaaaacaaagagccccacataaca

SEQ ID NO: 670622 - DNA, 575 bp, Homo sapiens
tatatctgcggccatgtaatcagcaattcccccttccctcttccctccaggtgtctgagacgagccacattgtactctgccaactctgtgaattcgactaccctatcccccttccctcctcccaccaggccctggcaacccacattctactttctgtctctatgaatctgactactctaggcacctcatctaagtggaatcatacagcatttgtcctttagcaactggcttatttcacttagcataatatccttcaaggttcattaatgatgcagcatgtgtcagaatttcccttcttttgaaggctgaataatattctgttgtatgcagataccacatttggttagtctagtcatctgtcactgcctatttgtgttgtttttaccttctggctatcgtgaataatgctgctatgaacatgggtgtacacatatctcttagggtctctgcttacagtcctttagcacagaaacccaggagtggagctgttggctcatacgggaactccctgtttacattctgatgaactgccacagttttcacaggggccgtaccatttatattcccagcagcat

SEQ ID NO: 670623 - DNA, 107 bp, Homo sapiens
gtcaggaccgcaaaggacctcactctgtgcatgtcaaatctacctctgtgctgtccccatcctctgtgctgtccatctcctctgtgctcctcctctgtgctgtccag

SEQ ID NO: 670624 - DNA, 128 bp, Homo sapiens
  misc_feature (63)..(63): n is a, c, g, or t
  misc_feature (71)..(71): n is a, c, g, or t
gaagatacagaaccatccgtgaaaatcatttagcactggagaccttctttgtattacttcctngttactangacctctaattcaatggggccctgctggtttgtcgatgaattgagcaactgagaacg

SEQ ID NO: 670625 - DNA, 158 bp, Homo sapiens
ctgcaggttcggcacgacgatatatatatagatagagagagagagagagagagagagatagagacctttttcctgatttcccctttctcccactttcgttctacttctttttcctcctctcttgctcctttctcttagttccttcttccttttctccc

SEQ ID NO: 670626 - DNA, 649 bp, Homo sapiens
tccatgctgtggaagatttgttctttcactcttcacaataattctgtgctgcttgcttcaacttccttgggggtcgcactacctttatgagctggtaacaacttcaacgtggcgaaggggtcgtgcagcttcacctccctacaagtcaggttggcagcaccaacttaacctcaccagagggacagaaacaacgtccaggactattgcccacctttttaacacgcacggctgggtaaaccaacctctgggcaaaacgcgggggtcctgggccgagactttttcaactcttcccctgtgaaaaccgtttcacatggcggaaggacccccattggacaccccacaactcaaggacagggggcacacaggaaacacttccccaaggaaccgcacagattctgttggaaaacaaacaattttttcttttgggacaatactgggcgcgcacaatgtccaagtaaaacatacgcattcccaccccggggggaaacaccccaaaccgcatcaccaccgagacccacttcttttccaaacaccaccaacctgtggttaacccacctttcaaccctcgggtgaagggggttcccttccaggtcttcccaatttcttgtgaaaggtccacaggccaaagaacccaaagttaaaagccccc

SEQ ID NO: 670627 - DNA, 116 bp, Homo sapiens
tccgagtaggagggtcaagttcgtgaagatattctgaaatttaatcttgtaaactatgtgcctatgagggtgctctaaagtggctaaaatatgcatttaatatgtcgtctaattga

SEQ ID NO: 670628 - DNA, 410 bp, Homo sapiens
ccatgatagcagccaatcgttcgcggttgtctacaactggggtcattgtcgagaatgtcatataagatggagtcatatagcatgtaatctttgaaattatctttcttccaccagcataatcccttgggatgcctctaagggaattcatgcaggggaatcatcagacatctaggctgctgagtgtgtcaatagtgtgtccttgttattgctgagtgctgtagtgtggcatggatgtagccacagttaatgtgtaaatgacaacatagtgttcatttgcatgtcggcatgttcatggccagtatatacaaattgaagtgatcttggggactggatttggtatccctgaccttgctaaattcacatactagttctgggagtttggtcagttggttcgttggcttgttccgctg

SEQ ID NO: 670629 - DNA, 127 bp, Homo sapiens
atactgcatcatcattcgccatcagtttctcggtcatcatgccatatggtcccaatcatccaacagggcaatgcatcagccattgcaaggcactcggggcatggggcaatcctctcaggcagtcgca

SEQ ID NO: 670630 - DNA, 457 bp, Homo sapiens
  misc_feature (16)..(16): n is a, c, g, or t
  misc_feature (258)..(258): n is a, c, g, or t
  misc_feature (276)..(276): n is a, c, g, or t
  misc_feature (283)..(283): n is a, c, g, or t
cagatactcaagtctntatacatggtgtaatatttgcataaaaattatgcacattctcccatatactttaaatcatctctacattacctctaatacctaacgcaaatgctatgtaatagttgttatactgtattttttaaattcgtatttgttttttgttttgttttttgaatactttcaatctagtgttggttaaatctatggataaagaggactgactgtattgtgggaaggaaccattgccatgaaaccaccaanaatatgtgcatgcaatgngtgtatntgtgtgtgtgttttgttttgttttgtttttaatttcccttctccagcattttattttgaaaattttcaaactacagaaaattttaaggattaatatggtaaatacctctatgtcacctacatttttaaaacattttggcacacatgggttgtgtcttctctttttttgagttgt

SEQ ID NO: 670631 - DNA, 165 bp, Homo sapiens
ggaatcactgctctggctcctagcaccatggagattagattattgctccccctgagcagtaaatactctggtctgaattggggcgtcagtcctggcgtcgtcgtgtcactttccagcaaagtgtggagtaggcaaggccaggaggtacgatgaggcagggcccag

SEQ ID NO: 670632 - DNA, 195 bp, Homo sapiens
cctcctctttgttgattttcactggtcatttagataataatatgtcagaatatgttatggctaatgcatttcccctactaaattattgtcataaattcacctataaaatcaaacacttcattgggattaaatttcatttaggattgtatttcatcaaggatgccaagatcctccgtcgacgcggccgcgaattta

SEQ ID NO: 670633 - DNA, 1298 bp, Homo sapiens
ttccttttgtttcggcctcgttctggtgcttttcgtgtcgtcgctggtcgttacgtctgtttatctgttgtcgtggtggtggttgggttcttgtttttcgatatcgctggtcggtgttcgtcttgtgttccctggtcgcctttgtgtttcttgtgtcttgtgttcgttcttcgtgcactctttaggtggttctgtaggtacctggtttcataattttctgcttgttacttgggtcaacccgtgttgtccctgttctgtcttctgtcgttctcccgggggttgatcaatgccttcttctgaagttgcctctactttcaaaccctgtaatgtcatttgattccctttcctgtggtaccttctttagtatgtttctttcctatttgtcaatgtgtctcactgccaatggcgtaaatatgtgacgttcgtcggcttcattttcttgcaagtgttcgtcatgaactcgctgttagagcattccgagtttgataattggtctacctgggggtggacttaggaccaggacacgcgactgttctccaggccctctgggcttataccagcggaaggtctactgtcaagtccctggattgtaagtggcccttatacttaggtagtctgcgtagaacttttctagattctgtttgctcacttgatccttttagaggctctgctatactgtggctacctgcttcaagtgaggtcgacccttgcctaattgtatgaacttattgggactgcaattctgagtctcacagaccgaaagagcagagtgtacagtgaagcgctgtctactggcctctcggtgatagcacggatctgtggcaagtcttgttgaatgaccagatgtcctctaactcatgacaggtccttggtgattcaacacgtctatctacccttgggaattagcacataacaggcattaagctctaagataggtgtttgtcctatctaccatcgagctacttcccataatagaccactttgcatccgacactcttcacccacctcccatacgcaaggggatgtggataacattggcccaaagtaactggtggtaggaatactatagaaacaagaccacttatactgtactgtcagaggcagaagataacagcagacatctctgaaccagcactctgccttaaaggaaatctttattaatcacgtgtggttcacagataattactttgttataaaaaaacccgaacctcctagagaagcactagctataagagtggcttcaagcatttgcatcaacgagtcattgtaattaaccacgcggatcaaagtggtacaca

SEQ ID NO: 670634 - DNA, 890 bp, Homo sapiens
aactgtgaagcaggcaagccctctgtagataaatcccagattgggagtgtggttctgaatcttgtgaagacagacataggtgatatccggacctgctgtctcaaagggaccacatctttaatactctactggtgtttggccacgaaatcatggacgtactggcaggcagagacagaattttagtacatgggtatcttccctccagtaacttcagctgcatcagacgtaatgttacgaagactagaaaatcccgaaatgagatgtgtgatgatttgattaagtgttagaatctgtgtgtcagcatactctgcatagtagtttgcaattaatgccatagacttcaaaagtatatcctactggaatactgtgatgtgagggtttgaatggcttgctgtgttcttattttgcatgcgggagtctatgaccaggggtatcagaatgtcttacggtttatttgagatgagataggtgttatcgtataatattgtatgctcatctagaattgttttatgatacaacaagtgaaagcctatattagtacgaatgtagggtgggcagttgtatgcaggtagctaagatacttcaagattttctaatcttcgaaactcttgcatgaagacggatgaatacttgcaccccaagccatatgactgaacgatcttgagagtaatgtgcttactcattgctagtaatcgcacgtaggtgtacgtccatctgcgtattcttttcatacgttgccttgtttcaacattttaacgtcgatgcccttttaagtcctctcaaaagtcgtgtcacaggttctctcgtgttaactcgagccctcacgggtttggactttatcaagaagacctttaaagagttccctttcaacaggataggaaaaaaaagaa

SEQ ID NO: 670635 - DNA, 461 bp, Homo sapiens
  misc_feature (459)..(459): n is a, c, g, or t
acgttgacacttcagacaatggaatattatttagcaataaaaaggaatgagctatcaacccttgaaaagtcatagaggcaccttcaatgcacattgctcggtgaaagaagcccatttgcaaaggctacatagcgtatgattccaacaatatgacactctgggaaaggcaaaaccatggagatggtaaaaggatcagtggttgctggggttgaagagagggatgaataggaagagcacagggtattttagggcagtggaagcactctgtatgatactgtgatggggacacatgtcttctttttttgtgttgagacagaatctcactctgttgcccaggctggagtgcagtggcgcgatcttggctcactgcaacctccgcctcccaggttcaagtaactctcctgcaactggtacaaccacgtctcctgaagtgtcaacgtggggatactctagagcggncc

SEQ ID NO: 670636 - DNA, 120 bp, Homo sapiens
  misc_feature (117)..(117): n is a, c, g, or t
tgggtggtctgcgagtgagctcaaggtgggctgggaggagtatagcaagggaccgcggcagatcgtgggacagattgtggtgaaggcatgaacaggtgtgagattggtgcctcatgncca

SEQ ID NO: 670637 - DNA, 282 bp, Homo sapiens
  misc_feature (39)..(39): n is a, c, g, or t
ggctgaccctagaggatcccgtgatgttatcccaacacnctaaaaatacaaaattagccaggcatggtggtgggcacctgtaataccagctacttgggagtgctgaggcaagagaatcgcttgaacttaggaggcggaggttgcagtgagccgagatcacaccactgcactccagcctgggagacagagtgagactctgtctcaaaaaataaacaaataaataaacaatatctttggggaatgttttagcctccaaattaagttcaaagaactgagtgtgca

SEQ ID NO: 670638 - DNA, 271 bp, Homo sapiens
atatatgtcaaggtcagacatggcatcatggctgtaaacagctttgtgaaggactgtgaaggatcctaatcctttgattcgagccttggaagtcagaaccatggggtgcatcctgggtagacaaacattacagacatactctctgtgagcctgctccgcgaagtcgcttgacaggatgcaggatcccgtatgttcgggaaaaccagcagcagtcttgcgttggcaaaactcccatgatatcacatgcccaacatggtggacagatcagggg

SEQ ID NO: 670639 - DNA, 227 bp, Homo sapiens
tctgtagtgtaacgacggccagtgcatggtcatagctgttagtgtaaaacgacggccagtgcatggtcatagctgttagtgtaaaacgacggccagtgcatggtcatagctgttagtgtaaaacgacggccagtgcatggtcatagctgtaagtgtaaaacgagggccagtgcttggtcatagctgtaagtgtaaaaggagggccagtgcatggtcatagctgtaag

SEQ ID NO: 670640 - DNA, 207 bp, Homo sapiens
ccggcgctggactagagttgcaccccctcccgacacctcaatacgcagctaatcgacgaacgggcctcaatgcctggcattcgccggtatcctgcacacgtctagcacgggcatctgcctgaatctttccgttactgctcctcgcttttcatggagtgaagcatgcttaaacgctgtattttcgtggtcagcatcctggtcgccagc

SEQ ID NO: 670641 - DNA, 348 bp, Homo sapiens
tgcagatagtcccaaaagccgtttaaccctgcagttcagaaaagaagactagatgtaaggggcaataaaaaaaaaaaaaaaaaaaaaaaaacctttagcaattttccccatgttgggccaaacttgtgtgtaaacccaactttcgggataaaaaggcctgggaaaactcaaccaggggtgccgccttgttcttatgaagggagataattccctatagagagtgagaaagtgatgcgaaacccatagaaaagagaagcctccctcctttcaaggccctcctgttgtgcacacctttttgtgtaagcagttcgcgcatccttaatacccacatttgaaaatttgcactct

SEQ ID NO: 670642 - DNA, 153 bp, Homo sapiens
cgcatgactggtgttgagcacaggtttctttaaggtggtaacaatgttctgaaattagaagtggtggtggttgccaattacatgaatatacttaaaatcactaaattgtacactttaaatgggtgcacattatgatatgtaaattatagctca

SEQ ID NO: 670643 - DNA, 300 bp, Homo sapiens
caagcgatatgcggggggactcacagaccatgctgctgcagagtggtggctgtgcgaggtcgccgtggggctggctgccatgcacaagctgcacttcctgcacagtgatttagccctgctggaattgttttctcacctcctgacttaaattgtgaaatgtgggagattactggaatagtgattcagcagtgtacaatggaggattatatatgaaacatgatgataacaaaagtttaccactgtgcgagtggacgtgctccatgaattatgtaagccatgctttcaatgacagcactgcta

SEQ ID NO: 670644 - DNA, 487 bp, Homo sapiens
cttacattgagaataagactgaaaatgggcactattaaaccatatgttgcttacggatatacatataaggtaaaattattgtaaaaaagtaacagtaggctggggtggtggctcatgcctgtaataccagaactttgggaggccgaagcaggcagatcacctgaggtcaggagttcaagaccagcctaggcaaatatgggaagatcgtatgtctatgaaaaagaaaacaaaaacggaaacaaaactttttaggcagttaaaacttttttccaaaactattcctttcatagagaatatctttgtagttttatcaggttggtttattcggccggacactttctttcctcattacatttagacaattttttcactttaatcgttaataggaagctttatattatattttgctgattttgtttctaaagaagttaaaaatgtagcagcagttctttacctgtgtgaaaatctatcacatctttaattcact

SEQ ID NO: 670645 - DNA, 295 bp, Homo sapiens
tgctcagaccacgcttttcgacggtgtctgactttcacgggagtcacatctgagagtaggggacagctggttcgagccaaggcgggtagtccttcactctacctgtcacaaactagctcagcaccttcctgcgacaagggttgaccacacactgatatgcgagcagccgtgcagtcaaagtgttcacacaacaatattcacacagcaacccatgcaggtgttgacaatactcacagcctgaacgcgctctcaatgtgacaagacttcctcccgctattcccgcggtgtccactga

SEQ ID NO: 670646 - DNA, 964 bp, Homo sapiens
tttgaagaacttggccaaatactttcttcaccaatctcatgacgagagggaacatgctgagaaagctgatgaagctgcagaacccacgaggtggccgcggccacctgtgaggatatcaagaaggacccagtgcaaggacggggagaccgcggctgacggcgaggggacgcgcgatatggacacgccggcacacaaccgctagcgcacgacccaggcacacgaactcggaagagtaggcacaaagcctagagcagacacggcaccgacacaggtgaacgaccacatagagcagcagcacgagcacacgagccacagccttagccagcaaggcacgacacggctgccaccaaccgaacccagaccatcagcgagtaccccacacgagtcgcaccaagaaggcagacacgccccacccgaatgcgcaggaccaggcaacacaggaaaaccatcccacgagaaataacagccacaggaagcacaagcagacacacgcgctaaacacagagacaacacaaagacggactatagcacccggcacacacagcggtgaaatcacacaccacgatagaagacacacaagctcgaaacaaacgcgaccagacgagaacctccaccagagaaccacagaacttcacaccccaggcgcgcaccagaaaacagacgactagacacgacaacacgagagcacagcgacccaccatagagcatacaggaccaaacgcgagcaccaacatacaaacagccagaaacctagcaagagcagcagcaaaacagacagaagaaagaacacaaaacagccacacaaccaaacagcgaccacaatacaaaaagcaccacataaagcagcacacatcacgcagaggacaggagaacaaccaaacaccagcaacacagacacaacaacaaacagcacacagcaaacccacaaaacacaggaaccaccaaccacacaccgacacaacac

SEQ ID NO: 670647 - DNA, 519 bp, Homo sapiens
  misc_feature (269)..(269): n is a, c, g, or t
tacttcggaattttgaggattcagtttcattttcatccctcgtatcatctcaaaactttcagagtctttcagaaagtgtgtcagatagtttttcaaaggaactgcatgacatctctggattttaactatcgttcttgggagagcctgtgagaaacgtggatacccaacaaatttgccagaagactctgctgctgagcaattcttctaaacatttcaattgggcagcattgggataaagaaacattttataaagcagcttctcgcaccanagtcatctggtgattctgcgtggagaccatcaattatgatatgatccccagcagatgtaaagttacgacgaatgtgttctggtaaaagatgcttctcaatcttggtgggaaaattggttcccataagaaatgtactactcaaatccaagattttaacattgaggtccactgctcttttacgcctttctttggctagatggattccactaatttcaaaatcaaacataaacagttcagccaatccccggtc

SEQ ID NO: 670648 - DNA, 168 bp, Homo sapiens
acatagcagcggaggtggcagcagcggggacgaggaagagtggtatcagggccttcctgctgtccctggtggcaccagtggcattgatggtggccaggtgggcagagcctgggacccagagaagttagcccaggaactgtcagcatcgctcaccaggacactggacct

SEQ ID NO: 670649 - DNA, 392 bp, Homo sapiens
  misc_feature (20)..(20): n is a, c, g, or t
  misc_feature (325)..(325): n is a, c, g, or t
cggcacgatggctgcgaaancgttgacaacgcaaacatttcgcatcgatgtgacacagccgcttcccgggggaccgtcatgaaccgaaagcagtaccgcattgcactcgcgacactgagcgtgttcatcgcgctggctcgctggccggcatcgtgcacggcatgctgttcgacgagcgggtgttcaggtactcgatcgtcacgctgatcctgagcatcctgtcattcgtcgtgctgttgaatctcgcgcccggcaccgtccgtaaacggaacacgggcaggacgatttgccttgcgcatgtcaagcgaggcttcactcgaaacgnccgtgcagccgcggttgggcagattcaagggagcgcgcgaaattggggcgagttcattagcggattc

SEQ ID NO: 670650 - DNA, 940 bp, Homo sapiens
ctttagcgtcgccaagcgagccacatcgctcagacaccatggggaaggtgaaggtcgtgagtcaacgtgattggtcgtattgggcgcctggtcaccagggctgcattttagctctgggtaaagtgagatattgtagccatcaatgaccccattcatagagcctcaactacatggttatacatgtgccaatatgattccagcccatggcagaattccatggcaccagtcgaaggctgagaacgggaagcttgtcatcaatggaaatcccaatcaccatcttccaggagcgagatcccatccaaaatcaagtggggcagatgctggcgctgagtacgtcagaaggagatccaatggacgtcaacaacacacatggaagaaggctgggagatcataagacagagggggaagccaaaagggacatcatcatctgacccacactgcatgatgcacacacatgatacgacacatgggtgatgaaccactgagaaagtaatgacaaacagacctacacagactcaatcagacaaaagaccatccatggacacacacaaactgacatagacaacaccatggacacaaaaggatcactccacaaaagaccacaccataaaggagtacatcgacggagaagggacatcaatgaacacacacgaaccaatgaacaatcacacaagcccaacaccaagaaaggacatggtaggaatggaacccaacacacgaggaaaaccaggacagacagactgaaaatgagacaagacaaggaaacaaacacagaacaaaacaaaaaataaaagtcaccaaagaccaccaaaacatgggacgccatgccaaaaagagcaagaaagagacaaaagagaaccacacacacaaggagaactaaaacaagaagaaacgacatcaacagtgacaaaaatagaacaaactacaagaagataacaaa

SEQ ID NO: 670651 - DNA, 133 bp, Homo sapiens
atcccccacccccatcctgctaccccgagtccgtgaaaaattgtcttccgtgaaaccggtccctggtaccagaaaggttggggaccactggcttaaaataccaataaatttttgaaccttaaacacttaaaaa

SEQ ID NO: 670652 - DNA, 176 bp, Homo sapiens
gcttatctatgggcagaaagagacagcacctactattctcagaatataatttgaagatcttagtgcctacatttcggagccttctataagtcagtttattgagcagtcacttagtcaacaaggtttgatgaacatcccttctgaatcgccccagcagtcccaaacatcatgtacct

SEQ ID NO: 670653 - DNA, 684 bp, Homo sapiens
tacctcgaattagggcacttggcttaatgaaaaggacaggtgccttccttttaagccagggttatgtaacctttctaacagaagaaaatattcttacatgaattcctgatgccctatggatggttcttgttcaagtggcagtggaggcaacagatattgaaggccttccgacacagcataatggcatggaatggaagtaaacgcaaaagggctttcaaacattgatattctcggggggctgaatatcaataatgaagtacagaagcttctaaagaagttgtcgttaaagctctcacgaatgttggcccggagtacataggttcttctaattcgtgaaaatgtgcatgcagcgtgtgccgctatggtagctgcgtaagttccagcaacatagatcaccgcgtctatgtgatagggcttcaaccatgaaggtaccagagcagttaggcctagtctaggtagtagatcttgctccaaaagctgagatgggtctggaagcttaagcccagcaagcacttgatgcacaggcatttggcaatgttgcatgagtggcactcctagatagaagtaaaggttcgttttgaccagaggacaaatgtataagagctcttgcatttaaagcgtatcatgtctagagtaaggcggcagacttttagtagtattataatatcccgtccataaacgcaa

SEQ ID NO: 670654 - DNA, 354 bp, Homo sapiens
accacgccgtatagacccactccaatttgcttaccgcccaaataggtccacagacgatgcaatctcaaccacactgccctaacccatctggacaagaggaatacctatgtgagaatgctgttcatcgactacagctcggcatttaacaccatagtgccctccaagctcgagaccctgggtctcgaccccgccctgtgcaactgggtactggacgtcctgacgggtcgcccccaggtggtgagggtaggcagcaacatctccaccccactgatcctcaacactggggccccacaagggtgcgttctgagccctctcctgtactccctgttcacccacgactgcgtgcccagaagg

SEQ ID NO: 670655 - DNA, 113 bp, Homo sapiens
taaataaaagtcatttaacggtagaatactttaaatttcactttcgtgtatttaaatttggttgaagggctgatggggattccagtgtcttattaaaaatctaacaaatctgt

SEQ ID NO: 670656 - DNA, 189 bp, Homo sapiens
catctgatggctatgatttccaaagagaatccaaaacaaagttaaatctaccaacgaaggcactgaactgctatgccttgcttaattagtagaccaccaaccttttatttgtaaactagtgaaaaggtgcatcagacgatgaactagaatccaatccacaaagattggaccccaaaaggcactgcacaa

SEQ ID NO: 670657 - DNA, 784 bp, Homo sapiens
aaaattgcgtatgagaacccaaagcagaggtacctaatcaggtcaaaaaaaaaaaaaaaattggagcaaattgtgcctaataacttggtattttcctgcatccatttgatgttctacctacttttcttcacttgtcccatttactaagggtcgacactttccattgcaggtggcattatgtttgtccccaggtatttactttcccgtgttgctgcccttaaccaaatttgtcacaccttttgcagcttaaaacaacacaaggtagcatcatgttacaattctggaaggagagaagttctaaaatcaaggttttcacagggccagattcttctgggaggctgcaggagaaaacctgtttccttgccttatttctggcttctagaaggcttcctgcattcttgcccttgtaagccttccttcctcccagcagtccagcctctgcttatggtcatcatatcattttactctctgacttgagcttcttgcctccctctttacttaaaccctagtgtctacaccgaacccaccaggatacttcaggataatcctcccaatctcaggacctttaccttaataatctctgcaaagcccctttcggcttgcaaggttaacttattaccaggttccagggatgaggcccatgcccatttgtggactgggggtaggttgtaggaaaacgcatcatgcaacctaccagtcttggtccacaggatttcccatctggatcttgtaagaattaatcctaattcattacctacacttgtgcaggcatatacacacaaat

SEQ ID NO: 670658 - DNA, 429 bp, Homo sapiens
atggagacgggggtctcaccatacccaaaaacttgcttggtatagcccaccagaagggacagagtcattggatgtggtcacaaaaggtgtgagttcacactaactgagcagttcagggagaaattggtggatcccggaaaccacaatagcgggattgatctctttaggacctatctttggcgtagccagttccttttcacttgggtgagtacaggtaggacgtgctgtggggcttggatcggactttgtgctggcattggccgaagtttatatcccagcagttgcacgggcatactccatctccttgcagataccaggctgtgaagtccaggccacatggaggtgtcctgtgtagatgctcgagttgaaatcccaagctaagctcccaatggacagccaacatcattgccagccatgtgtgggagccat

SEQ ID NO: 670659 - DNA, 142 bp, Homo sapiens
cttagagagatccccaatacagaactgagaagtgacaacataacatagtcccccatcattaacaagagctactcacatgtaagtgactctggttgggtggcactccagaaaatgccattcctgatatgcacgccctgctagt

SEQ ID NO: 670660 - DNA, 293 bp, Homo sapiens
tatgtataaagaaataacaaattatactggccacggccgtggtggcttacgtccatgtaatcccagcagctgttgggaagctgaggtgggcgagatcacaaggtcaggaattcgtgaccagcctgaccaacatggtgaaaccctgtctctacataaaacatacaataaattagccaggcatggttgcgcatgcctgtaatttcagctactcaggggtttgaggcaggagaatcactgacccgggaaattccgctgcatgaagcgaagtggatacgccagcctgcacatcacct

SEQ ID NO: 670661 - DNA, 255 bp, Homo sapiens
gcgatgacaggcgaggacagcgcagaagaagaacatgggcgagtatcacatgaagaaatacagccaagtcatctgtgggagagacggatgtctggaggatctgatgagctctcagacaacatcacccagcagcagactgctcccagagagatcaaggatcccaaatcagtggacatgtcaacatgtaacgcttgggagaggaacggagaccacggaccatttccattgatgcgcaagattcatatgccataccca

SEQ ID NO: 670662 - DNA, 156 bp, Homo sapiens
  misc_feature (65)..(65): n is a, c, g, or t
  misc_feature (98)..(98): n is a, c, g, or t
cgatgactcgagccggtacccctaatcggcgactttattatcaaactcaaccatttcgtttgacnggtggttcaacgcgcaggaatgagtttacctgnagtttaggcatatcttctggagcagcatagaacattttagctcttactaggcctgact

SEQ ID NO: 670663 - DNA, 167 bp, Homo sapiens
ggaggcagaggttggggtgagctgagatcgcgccaccgcactccagcctgggcaacagagcgagactccatctcaaacaaaaacaagaacaaaaacaaacataaagttggcacagaaaagggacctagtttaacacagggtttacaatgtatgagacttgcatcgtt

SEQ ID NO: 670664 - DNA, 431 bp, Homo sapiens
  misc_feature (12)..(12): n is a, c, g, or t
  misc_feature (39)..(39): n is a, c, g, or t
  misc_feature (66)..(66): n is a, c, g, or t
  misc_feature (72)..(72): n is a, c, g, or t
  misc_feature (74)..(74): n is a, c, g, or t
  misc_feature (94)..(94): n is a, c, g, or t
  misc_feature (109)..(109): n is a, c, g, or t
  misc_feature (129)..(130): n is a, c, g, or t
  misc_feature (142)..(142): n is a, c, g, or t
  misc_feature (149)..(149): n is a, c, g, or t
  misc_feature (152)..(152): n is a, c, g, or t
  misc_feature (159)..(159): n is a, c, g, or t
  misc_feature (197)..(197): n is a, c, g, or t
  misc_feature (212)..(212): n is a, c, g, or t
  misc_feature (215)..(216): n is a, c, g, or t
  misc_feature (220)..(221): n is a, c, g, or t
  misc_feature (242)..(242): n is a, c, g, or t
  misc_feature (245)..(245): n is a, c, g, or t
  misc_feature (248)..(248): n is a, c, g, or t
  misc_feature (254)..(254): n is a, c, g, or t
  misc_feature (257)..(257): n is a, c, g, or t
  misc_feature (274)..(274): n is a, c, g, or t
  misc_feature (283)..(283): n is a, c, g, or t
  misc_feature (301)..(301): n is a, c, g, or t
  misc_feature (303)..(303): n is a, c, g, or t
  misc_feature (321)..(321): n is a, c, g, or t
  misc_feature (324)..(324): n is a, c, g, or t
  misc_feature (361)..(361): n is a, c, g, or t
  misc_feature (371)..(371): n is a, c, g, or t
  misc_feature (392)..(392): n is a, c, g, or t
  misc_feature (406)..(406): n is a, c, g, or t
  misc_feature (414)..(414): n is a, c, g, or t
agcctcggagcnaacagggagctgggagctgggggaaangacgccaggaaagctatcgcgccaganagggcnangggggctcgggaagcctganagggcttttgcgcanagctgccggctggctgctanncgcccgcgccanccccganaangcgcgancaggcacccagtccggtcaccgcagcggagagctcgcngctcgctgcagcgangcnnggannggccccgcagacactccccanaangcntgggcngcncggatgtgcactaaaanggaaaagcncttctacaaagaagaatnanaaaaagataagggataangcngggcccctggtggcctctctctaaaagaataaaaaancatgaaaaanagaatggcggtcaaaatggangaaacctaaaggantttaaaanagcctggggctcgcgga

SEQ ID NO: 670665 - DNA, 168 bp, Homo sapiens
tctctccacacggacaggagcgtcctgagacaggagtcgagacagcctgagcaacatagcaagaccttctctctatttttaaaaaactaaaagtggatttaaataaagaatctgcatgaactttcttgtccacttattcttacatattattggccagtgtggagagag

SEQ ID NO: 670666 - DNA, 137 bp, Homo sapiens
gctcagttcacctttcttcacaattgaggctcccttgcttcagcttccttggggcttgcttaattgcttcttggggccttcttgggatcccaagttggggggattattttgttgattgacttcatgtcttcccactt

SEQ ID NO: 670667 - DNA, 494 bp, Homo sapiens
tggttgccagggaggaattggaactgactgccattaagcacaggtttctttctgggttgatgaagatgttacagaattagatatggtaatggttgcacaacatagtgaatatactaaaaatcactgaattttacactttaaaattgtgaattttagaggctgggcatgttggctcatgcctgtagtcccagcgttttgggaagccgaggcgggtggatggcttgggttcaggagttcgagaccagcttaggcaacgtggcaaaatcccatctccacaaaaaatacaaaaattggcctggcgtggtggtgcgtgcctgtggtcccggctgcttgggaggctgaggctggagaattgcttgagcctgggaggtcaaggctgcagtgagccgcaatcctgccactgctctccagctcaggagacagagcaagaccctgtctcaaaaaataaattaattttaaaaatggtgaattttatattatgtggattatagtgc

SEQ ID NO: 670668 - DNA, 690 bp, Homo sapiens
  misc_feature (5)..(6): n is a, c, g, or t
  misc_feature (39)..(39): n is a, c, g, or t
  misc_feature (196)..(196): n is a, c, g, or t
  misc_feature (248)..(249): n is a, c, g, or t
  misc_feature (284)..(284): n is a, c, g, or t
  misc_feature (518)..(518): n is a, c, g, or t
tttcnnccgcagctggggcggggggcactatctttatanccaaccttggaacgaaagtgaccgaggagctccttttcgagcttttccaccaggtctgggccatgtaattaaaggtgaatatttccaataagatcaaggcatggtaataccaaagcagtcttgccgtttgttttattgtggagggggggggtcctcntcttcctctatttcaattaaaaatacattaatgacaatcataacctttatannaagggcctactcaataattcatatttactatcatntatagaaactcattgcccccacatagatagtcaagttctgtcatatcgcccaaacatcatagttggagagttcaaagccctacctccaacatcgttctagggagcaaggttacaagagggtactatcggataagcatgccctccattcagcacaagataacttccaaagaatcgtttgtgctttattcacgttttccttttggcaacaaacattcttactaccgtcaaactttnggggttaatctcactggatcttttcaccaggcaggccccatttcactccattacaatagtgtctcaatatcgttctgcaagacctctcccccgcccatcctttggtttcatccctctttttcccgttgttacgcggcaaagtagaacatacataagtcacataacaacaaag

SEQ ID NO: 670669 - DNA, 221 bp, Homo sapiens
tgctgggattacaggcgtgagccactgcgctcggctgataaattatttgaatggcttctcctaatttttttggattaatatgtttggataacatggttcctatggtaatattatcaaaaaagttttctttcctgcctttaggtgtatcattaaggtgcctcggtgtggttgaatttatttaatcggaagatatttatggggcatgtgtcttttttaatcag

SEQ ID NO: 670670 - DNA, 570 bp, Homo sapiens
cactccttttttgggaagctgggccggccgtttcgggtgactgatgagcttgtgttcaaggtgccaagaagggcggatgctgttcggaaggcctataagtatctagctgctctgcccgagaactgcagccagctcatccagaccatcgaggacacaggcaccttcatgcgggaggtttgagccctcgaggagcagatcgagacagagctgggcaagaagaccctcagcaacctggagaagatccgggagggcttccgagccctcccccaggagaacgctggcctcctaggccgggtccgggaggccttaggaacccccggcaaaggtctttccccagcctcaggcagggatttggggttctggaggcagtgggccagacacatgccctagttacttcccccgctgtccagttcctcctggtggggccttgggcccagacccctgccccctggcccccacccttttatggggtgatagtcccgcatgtggggggcccggctcccgttttttgggggcggtactgtgggttgggggccttgggtccccaataaatgggtggttcctctgcca

SEQ ID NO: 670671 - DNA, 457 bp, Homo sapiens
gcctcatgtagtgccccacgatctgagggtcgggacactcgagtttcttgatgatttcaaagctctggttgagttgggagaaaacatccaccacggagcaggagaatagggcatgctctgaggtctgctggaacccatccttcttgtctcgctccagggcaccgtgcaggaaatcccgggacacctcctcattctcatccagccactggatgacgaagggttcaaaccatgcagggtactcaggcacgcggtccttgaaggcgggaagttccgtcacatactcattgtagagccatttcaccttgaagtggaggttcatgtagtcggcactcttgcatagacgatgcttgtcgtgctcctccatggcgtacttcatgtcttgggcaaacagattccacatcacttcagcgctgattttacccacattcagctcctggggaaactggttgaggcaggc

SEQ ID NO: 670672 - DNA, 109 bp, Homo sapiens
tgctgcaggtcgactgtgtatgcaccagggcggtgcatgcctcctgtgtacaagttccgtcgacacgtgagcaccgggctgacctccaaatatcgttaagctggagcct

SEQ ID NO: 670673 - DNA, 421 bp, Homo sapiens
  misc_feature (421)..(421): n is a, c, g, or t
ctatgatttacatcattttgatgcagagcatttccttgatcaaatgctgtagtggagtgtactgtacaatagaattctccacaattaaggaaatgttctgtatctcaagagattgtccttaatggtggccattagtcatgtgaccgttgagaatttgaaatgtggctagtgctactgaagactggccttgtaaattgcttacaatctaaattctgcctgtgctattatcggctgtgggttcgccaaaatttgtttttttaaagaggcaaagataacggactgttggctgctttattggacagcacagctagcatatagatgcagataggtagtataacttgtttgtagtttaatataaatgttgtatattgtaattaggccaaatttgagtttcatcatggtgactatgaaagacagtttn

SEQ ID NO: 670674 - DNA, 388 bp, Homo sapiens
  misc_feature (177)..(177): n is a, c, g, or t
gtctcatcaatcatgaaaaaagatttgttacaacctaagtcagaaaaggttttcatctagtcatatatgtgtggcaaatacggagaagccacagacggtgagccacagacaatgagagcagctgttggggtgggctccagggtgctgctttccctgagggccagctgggtctggcanggttcacttcccaccccggtgcccccggtactcgctgtctccagcctcaggttctgaaaggcagagactcctagcctcattgaaggatggttagagaggcaccgggagctatctagtggcaggcccacggtatatgtttgctgctttctacaaatacgagatcaaaggaaaataaagcaggggtggttcctgtcagtgtggagcgagaccc

SEQ ID NO: 670675 - DNA, 1117 bp, Homo sapiens
tctgtgtcacggttcctgtgtttggtcctacacttgggttgtgtctttgtgcttacatattcctggggggttatctatacagtatttgggcttgtccttgggttccccttatgccctgttagtgtccttgatgggtttggtcttgtgacgggtcttctggatttctcttcatgtggtcaacatctggcgcattccccaaccagggtctcttgtaggtttccttgtattagtttccttcggattcaattgattcttgtcccgtcaggcgtctctcttacccaactgtctacccctttcaactttggaagtcaatgcagcatagggttccagcctgcgtctttagtgtagtaccttagtagctgcctcattgagcagtcctcctagaagttctcttcttggcaggggtagactttggacctctcaggtatcccgctggtcgacacaggacgtgcaacacatcacacgctacctgagcagccatggtgctgtgcctggcggtgctggacctgagcttcacggggcctgagtgatgagctgctgcacctcctggctgcccagcctgtagggctgcttgccccgccgtctacccagctcctgctcaacggcaaccgactgacgcgggccactgcccgcatgctcactgatgccatcaaggacacctaccaagttccactgctttggcttgggtggacctgggcaacaacgtggatgtggcttccgtgccccagcccctgctggtcggcctgcgccggctgctgagccagcgcacctgcactccccagccatctacgagggcctggaccttagagcctgagggcagtagcggccggggccacacacccctgcctgccacactagggactccacagctggctgggctgggacgcgaagcccaaggcctgctgtgacacaggtgacccaccacccacattggctcattagctacggacttgtgaggctctcaagcacatgatagtgggcagatagaaggtcaaggagactcacaggcccggcagaaatccagtgtaaatgctcagcctgagattaaggggacagaagaatgacatcataggggccaggtggccagtcctggctagagaacagccgtgctcagtga

SEQ ID NO: 670676 - DNA, 332 bp, Homo sapiens
attgggagtgcgcaggtaggcaccaaatgacgagagtgctgttaccagtacactaagttacatcttaccttatttctcagccgttaacctagctgtgaactcactgttactaccgttcattaaagtggcaaaccacaggaaacagcctggaagagattcacacttgtaggccaaacaccggcagagcattgcacatagcgtcctcatggggcccaaggaagcatcccgaaaaggcacttcgacagcaggcaggaaggcaagcgcatcaggcgggaaccgggttgcccaggcatcctgctgcagaaccacatgcccggcagaaaaaaggctcg

SEQ ID NO: 670677 - DNA, 802 bp, Homo sapiens
ttgtatatgtgggaaggcccgcggtcttctgatgattataggaattgcagtccctctggtcctctcgttgtgttggattaagaatgtgctactatattatatagggtgtagaacacggcacgccactcccatgggtatgcgctctaggcgctccctaatatgatataattctgctcctccctccgccctactatcgttgctctatctcttctcagcacacattgtatactatagaagtggttgacctggacgtcttgctgtgtttcttggtaaggtatcctttgatggcggtgtgtgtggagttgagagagtgttgaggtgtgtctgggactgataccattatggtgtagtggtagtcaaaggatagatataaattaactacggtcacgccactccatgttctctacgtgtggatgtagtatccaaaatacatgttaggtggaacgcgcctgtctgtggttattgataggtgggcgactcacacaataggcatgtgagaacccaaatgatcttctctcacgagagatattttttatctctctcgcattggtccctcgccccgccacaggagtctcttcgacgcgtcgttgatagaagggaagaacaatcatagtgccccaaactattgtggtgggggcctcatgttcatctagctcttgtttgagatcctccctatttatgcgaagggccgctcgcgtatgctgctggtgcttgtcctaggaaaccgagttgactcggtgatcttacgatggcaacagcaaacaatacgacagtgaagaggcttccagatcaacaaaacaca

SEQ ID NO: 670678 - DNA, 244 bp, Homo sapiens
  misc_feature (104)..(104): n is a, c, g, or t
  misc_feature (187)..(187): n is a, c, g, or t
  misc_feature (190)..(190): n is a, c, g, or t
  misc_feature (217)..(217): n is a, c, g, or t
  misc_feature (242)..(242): n is a, c, g, or t
catctctatgtttgcccccaaggtagagatctttctgtttcccttgggaactcacattctgtgatggttaatactgagtgtcaacttgattggattgaaggatnttaggattgttcctgggtgtgtctgtgagggtgttgccaaagaagattaacatttgagttagtggactgggagaggcagaccnatnctcaatctgggtgggcaccatctgatnagctgccagcatgactaggaaaaanct

SEQ ID NO: 670679 - DNA, 481 bp, Homo sapiens
  misc_feature (62)..(62): n is a, c, g, or t
cggttaggcccaaccgaacacattgctttagattttccagcggggcaggttgttgcgttccnctttaacccccggttcaatgagaacccacggagggtccttgttttccatcccaagttggattatacctggggaagggaaaaaaaccagttggtttttccctttttaagtggggaacccttccaaaaacatggactggttgaacctgcccccttcaagggtgcagtgaattagggtcccctgttgccggccaatcttcggggtaaaaaactcaatgaaatcagccaactggggatttttgggggcaaagcccccccccgggttttatataccctgatataatttgaaaggggggggtttaaaaaaaaaaaagaattttacccttccatggggaaagggtttatgttccctgggagggaaaattttttcatttatccatatcccttttgtaagttatttacttaataaatatttccgtgga

SEQ ID NO: 670680 - DNA, 1503 bp, Homo sapiens
ggaaaccaacagtcggttcggccgaaagcaattgtgctcctggctaagagcctagaggataggtttctatgtaccgtaaagagtctcgagtccaaaaataactaggatgttggataggcgatagtgccgcctgtttcttccccctagactatccaagcagtggtgaagggaagagtgagaagatattccagctactaacggtataggaggagaagagcagtcctactggtggtactagttacctacattactgtgacattatttggtaagcaagtgggaagcagtacatctaacttcctgtgcactactgctccgtaactatgcgcagatactatgcagcgacaggcgcataggccatcagggactttcttctcaacagtagttcatttccagtgacacaatttcgactagttcggtgcaaacataaaggtccgtacaaggtattacatgttttacatggtgtttgtccccatttgtatgtaagccgccgaatacgtcaataacgaatttctggggcacgttcccatttaatccgaatgatagatgtcaatcttcacctagtcactaggctttgtgtctataaccaacaagtaatccatggacataatttccaacacaagtgctatccctggctgtctgttagcgcccaatgtggcccccagtgggcatagaggtcatggccaccacagtgggcagacacaacctctggatttcactttgcaatttgcgagctttctccggtggtgtgccagattggctcacctttggcatgtcgaaacacaattccggagactagaagtgtgggatgggggccttcccgcgtagattatggataccccatagggataccggggtccaggccttagttgcgcccagacaataccaaccttggttcgcagtaagttcgatggggcaagtgtcgtttcgcccctgacgctaccttgggagaatctccccggtttgcacaaaggtacttaaaccgggacgcagccttaccaaaagaccagcaaagaccctgggggtggcacccctggttgggacgcaaaggggacgtggtaagcaagaaactaacaatacccccgtccccaaagtggataacccaagagggccccaaaaaaccatgctgaccaacagggaaccacaacagaacaggacccacacaaggtgggcaccacatacagcagggggtacacaggcaagagcctttatcaaaccaatcaacgtgtcgcgcacaataggcccaggggtgatagcaacggcacagaaacaccactataccacgacgccacaacgtagaagccaaacactggaacccggggaagaacccaacagaacgtacggggaccaaccaccaggggcccatctcagagaacgagccacgccactacacaccaagcgctgcgaaacacggaatgagacgagagcgagacaataacaagaacaaacagacgaacacgacgcaacaaagaagaaccaagatgatccacgagcatcgatctcaca

SEQ ID NO: 670681 - DNA, 801 bp, Homo sapiens
gcctttgtccgctgcaggcccgagcccgagtgtcgccgccatggttcgccgagtctgccggcgctggtgtcggcgcaatgggtggggagggctggggccacgcggcgctggggcaagcctctgagcttgttggaacgcctccctgttaccttgccgaagctgggggggcggcgaccgccgcaggacggcagatttccgggagaggccgcacaaaatcccggggggcgccccggttttctttcggcctttccgcccaggttgcggcggacagcggacctttcggccctttagggaaccatttggtttggcccggggggcccgagccatttcccgggggagcacaccggcagggcccgctctggcttgtggggccgccgcccaccccacggttgcgtgttcatcattcgggacggcagggcagaccaggggccttataacttcgggcccccgtgcgcgtttttgagaggggatattgtccccggccgccttgtcggggacaccaggcgccggggtacactgtcgattgagtgtgggggcccccgccccattttgggttggccccaagaaacctctccgcgggaccgtgtccgggaatagacgccaccttttgtccccgcgcgaggtcccgggcccagggtaccgaccccagctttataatcaaggcacttgagcggcacattaagggagaaccctggaactcccgggcgactcccaagggggggggacccccgcgacccatgtgggaacgttccggcgcacctgatcccgaccccggaaagtgttttggaaccggccaattcc

SEQ ID NO: 670682 - DNA, 93 bp, Homo sapiens
cacatggtggctgggatctgtgctaagctttacaggggcaaaaataagtgacatgtagcaaagattttcaaacaaaatattttttcctttggt

SEQ ID NO: 670683 - DNA, 367 bp, Homo sapiens
  misc_feature (15)..(15): n is a, c, g, or t
ctcaggaggtgaggnaggagatcgctgtgagcccagcgagtgaggcggcagtcagcggagactgcgccactacattccagcctgggcaacagaactacactctgtctcaaaaaaaaaaaaaaacaccgaaatcacacccaaaacaacaacaacaaaaatgactagtttaaaactaaaaggttatagtaaaaaaacttatcatatatatatattggttggttttaaaaaggcagggtttggctgtaacccaggctgaaggagtgcagtgggtatgatcacagctcactggtaaccttgtactcctgggctccagcaatcctctgggtctcagcctcccaagcagctaggattacggatgtgcaccacc

SEQ ID NO: 670684 - DNA, 293 bp, Homo sapiens
ccacttaaatatcatgcacagaggcgtctagtcacactgctgaacatcacaatcttaaatatccatgcacagaggcgtcctagtcacactgctgaagatcgctgtcttaaaatccatgcacagaggcgtcctagtcacactgctaaagatcacagtcttaaaatccatgcacagaggcatcctagtcacactgctgaagatcaccatcttaaaatccatgcacagaggcgtcctggtcacactgataaagatcaccatcttaaaatccatgcacagaggcatcctggtcacac

SEQ ID NO: 670685 - DNA, 284 bp, Homo sapiens
gccactccacctggctgcacccaagccacccagagcaccaaggagggtggatctgtgggttgccccacgctccctccagggctgtgccccagcccacgaggggccttggaccctcagacgctggcgaccccacaccacacctaaggctcagcgcagcctctgaggggcttccgcagggcagaggcctgaaggctgaacgtgggacgagacctcggctgacgccccacaggctagcgttgctgctagagggactctcattgtacgaggccgactcggcatccaca

SEQ ID NO: 670686 - DNA, 426 bp, Homo sapiens
  misc_feature (7)..(7): n is a, c, g, or t
  misc_feature (134)..(134): n is a, c, g, or t
  misc_feature (139)..(139): n is a, c, g, or t
  misc_feature (178)..(178): n is a, c, g, or t
  misc_feature (201)..(201): n is a, c, g, or t
  misc_feature (224)..(224): n is a, c, g, or t
  misc_feature (249)..(249): n is a, c, g, or t
  misc_feature (260)..(260): n is a, c, g, or t
  misc_feature (285)..(285): n is a, c, g, or t
  misc_feature (287)..(287): n is a, c, g, or t
  misc_feature (289)..(289): n is a, c, g, or t
  misc_feature (300)..(300): n is a, c, g, or t
  misc_feature (346)..(346): n is a, c, g, or t
  misc_feature (374)..(374): n is a, c, g, or t
ccgtccnccgggatgggggtgacaccctcaatccgcccgaccttcagacccgagcgggccagggctctgagggccgactgggccccaggcccaggggtctgggtcctatttcctcctgtggcccggagtttgangtgtngggcggtgatacccagctccttgcacctttgggccacancctgggcagctaacatagcagcntagggggaggattcaccttggtntgcctttaccttcaccccaccagtnacacggcaganggtttccttgccagatagatcagtnananggacaaaagtnttattgaaggatgcgaagatatggcagaaaccaaaaacattctctncttcagccacctgaggtccgaggctgangaactgttcttccttcttttccttcccctttcgaggggccactcctgcccgt

SEQ ID NO: 670687 - DNA, 267 bp, Homo sapiens
gggggcccccccccttttggggttttttccgggtttataagagttggggggccggggggaaccttttcccccccaattttttgcccccccccccccacccgggggggggtttaaattttggggggtttttttttttccccggtttggggggggcccccccggggttttttttttttggggcccggccccctttcccgggcccaaaaccggggtttttttttttttttgggtttttttttaaaaaggggtcccccttttttggtttta

SEQ ID NO: 670688 - DNA, 422 bp, Homo sapiens
cacacctgagttagcaaacacttttaaaacacttctacactcttcggagctccatgcctgcttctggactggagtgccatctgcaggtcggtccctgatcccccaccatttggtgcctctctgagatgtgattgtcccatgccctaccccaccccgggctcttgttctccagcgcagatgccagtgtcctcaagaggcagtacccaggtccatttgctcgcgtggccactcccccaagagcacacttccagcctgcacagggattgggcgggtaggttgcagaagctggagtgcagtgagggccagcgtggcccctggtcagaaagtcgggctctggagtttgagccccagtcctgccaacaattttgccgcatgaacttgagcacgtgtacctccagtctaccttggctggtgatcatgag

SEQ ID NO: 670689 - DNA, 202 bp, Homo sapiens
  misc_feature (152)..(152): n is a, c, g, or t
  misc_feature (177)..(177): n is a, c, g, or t
tacgtggtgtaccgtatgttcatctggtatccgctacttgctgaatatgtgatcagttcaagcagtttctgggtgagtccttagggttttctatatccagtatcatgtctttgtaggcatacggtgacagctttaccctcttctcttcctangttggatgcctgtttatttctattngttagatctggttgcatgtggctag

SEQ ID NO: 670690 - DNA, 236 bp, Homo sapiens
catcagtagactctgctacaattatttgttttttcttcaagtgacagaatgggtgggatccaaggaatcaaagcagtagtatggacaaaccagagagcatccccgatgttattttcatggaaactagagtcagcaataacacaaatggtacaactttccaactcacaggaattcttccacacaatcttaacttttagtcgtaatctcagggtatgcccatagcacctccctttctg

SEQ ID NO: 670691 - DNA, 442 bp, Homo sapiens
ctgtgcctggattcgggaaagtccgacggggatctgccgtgccatcgcgccttgccttccggccaccttggagttgtccaaggggggcttggcaatttgcttgccgtcttgcggcttttcttcccaagcaatcgtgacgctggccaccgtagcgccctaccttagcggggcgtggcccgtcagcatctaggcgcgaagtctagattaatctcggcaatggctgtgctggagaggggcgctggttcaggttcgagaaccgatccagttttccgtcttgcactcctagcacggcccgcagctcgcccacactgaacgttttgctggcgacgtgattgaggttcacaaggctggcgacgtgctggaacagcagaatccgaatacttggacgacaaggcaaacacagttggccgatccatgattgcccaatgacaggaaatctcgg

SEQ ID NO: 670692 - DNA, 102 bp, Homo sapiens
tacaatcgagctcggtaccgttgcagaacgaaatatagtctgcatgaacgttgttgatttggggttatcacctagggcccgcgcgaggctgcttgggtgtga

SEQ ID NO: 670693 - DNA, 406 bp, Homo sapiens
atgccacacatacacacaccacacatacaacacacatgccacacacaccatacacaacgcacaaaacacaacacatatgacacacatgacacacatacacacaccacactcacactcatactcacaaggacagatagtaatcctgaaacattctcttctaagcccataaggaagaactcagatggcagctgcctcttcctcttcagagtcaggttgagaaacactaaacttatagcctaaaacccaggttttgggctccacaggcagagaggcaaatacagtcaatcaccaagatctccaacacgaaaaggcccagtgctccaggaaggacgtgcttccagtctctagaaggtactgagtgatagcaatgcacccaagtcacgacagttttaaagttcttccatgt

SEQ ID NO: 670694 - DNA, 635 bp, Homo sapiens
aaactttaatgatatcatcttgtataggcattgcagaatttcataggccacattattaagcgcctaccccgccaaaataaagatggttttccagcagaatttagtgctaatcagtgctcctgaagtcgtacacagccgctggaaatgttgcattttctctgctaggcccacggctgggcggttaaatattgtttttttctccattagaatttgatgttatcaaagctcccatacccattcactttaagtttttaggagaacctcttcacagagttaatagcgcagatcttttagtaattagatcatttcagatgtgcctgaaatgagtaccacatgtggatgagtttgctttttccttcctttaagttcggtaaaaattttaaagagaggaatgccagttacctcttgcccaattttttaattaaataattttagcaatgacgtagaaaaataatttttaaacattgtcgtaaagaacttttctggacttggtgcctgttttaagacattggaagttcatgataagctgcatatcttccagtcccatattggtaaatctgcctctcaatgtcgaaaacaagagtcctggcccttattgaaaagagttcggccttaacccattctcttccctcgtg

SEQ ID NO: 670695 - DNA, 347 bp, Homo sapiens
ccccccccaaaccgggccctggaaaaccccccgtggggggtttaggccccccagggcccctaccccccttagggggccaaaacccccaggggttttaaccaggccccggccaagccttaggggaggattggccccccggtgggggccccggcccccaaaattttttaagggggccctaaaaaaaaaggggcccaaccggggcccccggggtttttcccccccccaggccccttgggggggccgggggaaattttggccccgccctttccggtcaagtgaccccggcccccccgggaaaaaatttcaagtggcccccccccccccgggaaaaaaagtttttgccggga

SEQ ID NO: 670696 - DNA, 216 bp, Homo sapiens
ttttgtttaaaaaaagggcccattttgagcctttggatagggacattcctgtttttgtgacaaaaaaaaaactttaaaattgtccccaacaaaaaaaaaatggctatcaaaagtatgttttgttttagtgtgagttcccgttcctgtatttgtttattgtaaagggggacatttagggttcagggcagttttcaataaaaagtaattaaaatttta

SEQ ID NO: 670697 - DNA, 160 bp, Homo sapiens
agccggaccgcgatactcagattaagctttttctccatctccctacacaaccatgtctcctttcatctgtcaatttctgggggttgaatttcccaacttcagtagaaatgatataaaaggcaaccgctggagtgtaccataaggagacacaagaagaaag

SEQ ID NO: 670698 - DNA, 937 bp, Homo sapiens
cttaaaaaaaaaaaaaaccaaaaaaaaacaacccggtaagcattggtcccttccccactggacaaacttatcaaatccagaaagcttgaaagttgcgtctctaattatttttctcctgaacaaaattacccaagtcaaaacaacaatgtatttttagaattacggcagcatacgacctgaatttggggagttcggtgggctttatcttaagatcaccatttccctaaaaatgggtttctttctccttagaaagggctggggggcaacttgatgaaacagccaaatgcaccagggcaggtcactttcccattgacaaacttatcaaatccagaagctttagagttccgtctctaataatttttctcctgaacaaaattacccaagtcaaaacacaaatgtattttagaattacggcagcatacgaccgtgaatttggggagtaacggggctttatcttaaatcaccatttccctaaaaagggtttgctttctccttagaaatgctgggtggcaccttgattgaacacagcaaatgccccagggcaggtcacttttccccattacagttgattccccatttaaaaagaggaggaacgagttcatggacatagacagggcaaagggcataaaggccccttttcaagaccattgggaggcagcattcattttacaatctgtacttaccggtgaaaggagttcgaagcccaagagcacggttaggggccggaaatgtgagggggtctaccagggctcgacaacggcgaactgtgacactctcacccggctaggtcaagatggcccgttaaacaggactgggcgcgggggttaagaaccaatcagccccaattgggggactttcaacaccgccagcattaacaggatatgctcaacacaagtgttctctacagaccataactacgccgggtcgacatcacaaa

SEQ ID NO: 670699 - DNA, 163 bp, Homo sapiens
gataaacagcataaactcttaaagcaaccaccaaaataacaaagagttataactaataattcagcaaaggagataaaatgaaattaggccaggtgaggtggctcacgcctgtaatcccagcactttgggaagctaaggcaggtggatcacttgaggtcaggag

SEQ ID NO: 670700 - DNA, 860 bp, Homo sapiens
  misc_feature (236)..(236): n is a, c, g, or t
  misc_feature (516)..(516): n is a, c, g, or t
  misc_feature (686)..(686): n is a, c, g, or t
  misc_feature (692)..(692): n is a, c, g, or t
  misc_feature (696)..(696): n is a, c, g, or t
  misc_feature (710)..(710): n is a, c, g, or t
  misc_feature (713)..(713): n is a, c, g, or t
gggcagacactgaccttcagcgcctcggctccagcgccatggcgccctccaggaagttcttcgttgggggaaactggaagatgaacgggcggaagcagagtctgggggagctcatcggcactctgaacgcggccaaggtgccggccgacaccgaggtggtttgtgctccccctagtgcctatatcgacttcgcccggcagaagctagatcccaagattgctgtggctgcgcagaanttgctaacaaagtgactaatggggctttactggggagatcagccctggcatgatcaaagactgcggagccacgtggtgtgttcctggggcactcagagagaaggcatgtcttgggggagtcagatgagctgatgtgggcaagaaagtggcccatgctctggcagagggactcggagtaatcgcctgcatgggggagaagctagatgaaagggaagctggcatcactgagaaggtgtgtttcgagcagaccaaggtcatcgcagataacgtgaaggactgnagcaaggtcgtcctgcctatgagcctgtgtgggccatgggtactggcaggagtgcaaaacccaaaaggcccaggaagtacacgagaagctccgaggatggctgaagtccaacgtctctgatgcggggctcagagccccgtatattatgggggcctgtgatgggcacctgnaagagntgcncgcagctgggtggntgntcctggggggggtcctcaagccatggggtttcatgcaaggggcccctttctcctctgcgcggtagcaccatgctccgttttgggtgcccgcgcccgttttgttccgggggggcccccctggggagccggggggggggcgggccagcc

SEQ ID NO: 670701 - DNA, 784 bp, Homo sapiens
tgggttgaccccggggtactttatggagggtacataacaagggggggtcccctaggcccctccccttttacagggggtctaactggaactggtgagggaggggagatccaggtggtgggtgggggactgaagtgtgtgccagggacctccccagaagttggagggtctctctcttcctctggttgcctctgcgtggggcgtggttggctccaggggctctaacctcctttggaagcgccatgttgggccatatgagggtccaccacccgtgtgtggcgtgtagcccaaatctcggtgggtacaattaccaggaaaaggaagcttgacaaagtgggctcgttagtgagggcaagtcccagccccaggcgtctcaaagggtggaggcagtggggtgctcgctgtagaagctacagaggaaaaccaccccgtgggagcatcaggtgataaacccaagaggatgcccttagaaggggagccccatacagaaagaccgagtcaatccacacacactctactagaaaggataccaacacaacatagaggaaaagagataataacactagaagcggcaggagctacaagtgctacacaccacaatgtagaaaaaagcgttagtgagaaacggggggaaaacacggggaaaaggacacacatgacaaagagtaaaaactatacccccggataaaaggaacacagggacacatacaccttgacccaacaaaagcctattgagaagacccccgaggaaaaacggcaaggacaaaaaaggctcacgaaaaaaaac

SEQ ID NO: 670702 - DNA, 275 bp, Homo sapiens
actggactggaacaaaggctgattacagagatccaagccatgaggagtacataggtgtggtgcctatagccaggtcggaaactttccagactaacctagatgctctactatgagggagtcaacgacctattgtatcaattagatcccagcctggtacacgggcttgactattgctgtttgtgggacacgtggctctgtgttgcaggccatgactgtgtggctgttgcctatgtggcctgttctcccctaagccctgaaccaaaggttccaggcgt

SEQ ID NO: 670703 - DNA, 565 bp, Homo sapiens
cccgtggcgcggactgggctcccggtgtaaaaagtgcgcttgtggctgctgctgtcttaactcctgtgcttggcggacagacaggcgagatggcggcggaggctgttgcctgaggtgcgaggtggcaagtatagtgcgggcgcccagacggggagccagtagagctgtacgtggtccagtatctccgaaggtgaagctacagagtccaggcaacatgcgcctttacctggttattgagaccaaggatttccacaaaaccccgggaggaggactctcaacgggactccgggcgagtgtgaacacgaaaaataggtcttctccatagtggtggagaaacacatcttttgggagcatcgtgggacgccctcctcaatagtgccaaccacttgtggtggccagggacacttgttgggggcacatttgttgaaccaagcaccctgctggccaacatgggaagtatatgatgctgacattgttcaaccatgccagccacctattttcagatgtatcagttgagagtgaactggctctagagagtcagaccaaaattacagagcaacagacg

SEQ ID NO: 670704 - DNA, 388 bp, Homo sapiens
  misc_feature (2)..(2): n is a, c, g, or t
  misc_feature (6)..(6): n is a, c, g, or t
  misc_feature (264)..(264): n is a, c, g, or t
  misc_feature (338)..(338): n is a, c, g, or t
  misc_feature (382)..(382): n is a, c, g, or t
cngagnctttctgggttccagtgttctaatacagaaaatgagaaagttgggctggaatcattgtgtcccaaaattggtacactttccgctagtggcatgtgacttgactctaggcggtacgtggatgaggatttttttgtaataggatgtttttgcaatctgtatttatatatgtacagccatggtttaaggtagtgatacaaaattttcttttacaatacttttttgattttaaaaagtcgagttaaaaaaattaactgtagncaaaaagttaatgtactctgtggaatatgggggaaaaaaaaaaccccatggaagttgggccaagtttagttacntggtgttttggggacccccctggggctttaggaaagtagggaantctgga

SEQ ID NO: 670705 - DNA, 175 bp, Homo sapiens
aagggaaatgcaaagtccgtccctgaggcacaagaggcagctccgcccctgtaagtgggaagccaaaatccacaacaggcaaggcccagtgagcacagcctatttcagtctaattccaggcaaaggtctatgaacagaggttcctattccagggagctggaaggaggcatagtat

SEQ ID NO: 670706 - DNA, 592 bp, Homo sapiens
  misc_feature (529)..(529): n is a, c, g, or t
gtcacgcccacagactcccaaagtgctgggattacaggcttaagtccactgtgcccagccttagcctggccatcttctaagtgcttacaatagctcactggatccacacatggtataaaaccctatgaggcaggtgctacagtctccattttacagatgaggaaactaagggttagatgtcaagtagctcctatgaggttatgtaaggggaaggggggcagtttggagattagacttggggcagtctggtttcccacttctgcttagtcccctgcttgccacaaagtcagtcctctgtgtgtgccacctttgtaatggctagtcaagggcctcggcttccctgaggaagtgactgttgagcggaaatcagagaggccacttgtcttcagtcatcccctcaccttgggggtgaaaagggtagagcagaggccagcttgcttcttggcagtgcctatggagaagggctgttttttgaaagtgccaggtcggggggagggcatcttgctatttggcttcttgacttcccaanttccaggagccagaggaaccctggctccagtcaaatccagataggctgagctgacaagttagt

SEQ ID NO: 670707 - DNA, 181 bp, Homo sapiens
tccagccccccagctaccccgtcccacagttatggaagcccctggctgctgtctcactgctgggccaagcgccaaatctcgctaagtccagcgcccaggagggaaccctgaacgcctgacaggagttaccggaggccacaacatccacgctgcagttgcgctctccagagacaggggtcca

SEQ ID NO: 670708 - DNA, 199 bp, Homo sapiens
  misc_feature (179)..(179): n is a, c, g, or t
gccatcgggatgtcctgattcaacactcgaggatcgtaaatccctacttgttgatatggacgtctagaataggcttgcgctgttatccctagtgtaacttgttccggtgggtctcgttattggatcaactgcgtatattagttcgctttgactggcgaagtcatagacatgcgtgaacnatctccggggtaccgagctc

SEQ ID NO: 670709 - DNA, 144 bp, Homo sapiens
ccaacattgcacgacgaaaagtgaactcagagaggcgtaccctatccacagcttttgtattctgctcttctttccttttctggtgagcttcatgggtggagttatcagtggtctgtactgatatgtctctgacttcctgctggg

SEQ ID NO: 670710 - DNA, 142 bp, Homo sapiens
agagtactactggggtgggacggaactgtgccccagagagccagtgtggctggggccgcgtagtggactgaacacagtgctggcgtctgctctctgggccccgcctcgcctgctgcagccttggaaggccctttgcccctcc

SEQ ID NO: 670711 - DNA, 416 bp, Homo sapiens
  misc_feature (19)..(19): n is a, c, g, or t
  misc_feature (23)..(23): n is a, c, g, or t
  misc_feature (64)..(64): n is a, c, g, or t
  misc_feature (74)..(74): n is a, c, g, or t
  misc_feature (95)..(95): n is a, c, g, or t
  misc_feature (139)..(139): n is a, c, g, or t
  misc_feature (162)..(162): n is a, c, g, or t
  misc_feature (268)..(268): n is a, c, g, or t
  misc_feature (271)..(271): n is a, c, g, or t
  misc_feature (274)..(274): n is a, c, g, or t
  misc_feature (278)..(278): n is a, c, g, or t
  misc_feature (280)..(280): n is a, c, g, or t
  misc_feature (282)..(282): n is a, c, g, or t
  misc_feature (286)..(286): n is a, c, g, or t
  misc_feature (292)..(293): n is a, c, g, or t
  misc_feature (296)..(296): n is a, c, g, or t
  misc_feature (302)..(303): n is a, c, g, or t
  misc_feature (311)..(311): n is a, c, g, or t
  misc_feature (314)..(314): n is a, c, g, or t
  misc_feature (322)..(324): n is a, c, g, or t
  misc_feature (343)..(343): n is a, c, g, or t
  misc_feature (353)..(353): n is a, c, g, or t
  misc_feature (355)..(356): n is a, c, g, or t
  misc_feature (374)..(374): n is a, c, g, or t
cactaagtagtaagatttnaatnaaacacgaccaggtccgaaatgcaggtcatgagtgtgaaantctcaaattnacataaaaagtagaagtatanacagtttaacatttggtattaaaggagaggaaattgtagcagcntttcacgtttcccagtccccatnagagggcttgagaccttgtacctgaacaacccattttgcactcagtgctttctgatgccttaggagaattgtttttttcacaaaagctgggaaggaagaagtccantcngcngctntnanatcnccctcnnagnaaaaannactaactnttntttttgtnnntggctttcatcagtttgtnagatttctcnannttttttaaatataatttnatttctttcaacaaatataaaataacaaccaactttggaaca

SEQ ID NO: 670712 - DNA, 227 bp, Homo sapiens
  misc_feature (1)..(1): n is a, c, g, or t
  misc_feature (5)..(5): n is a, c, g, or t
nctancttgaaacggagatcacaactagcctggggctggctggaattttctcccggcagccgtcagcctcccgtggaagggagcggcatctcagtgtgcgaagccctttgtatacttgcctgcaatgtggcttttatttctgaacaaaggaaatgttttacctgctggtgttcctttaacaaataaatacttggctacaacacatgtgacagaaagcccacaacagt

SEQ ID NO: 670713 - DNA, 305 bp, Homo sapiens
tgctgctggaacctgacgcttacggcgcaagggtatgcgatgagcggatccttcctggccctcgggttcgtggaaggctataactggaacctgacgctacggcgcaagggtatgcgagagcggaccttcctggccctcgggttcatggaatggcctaactggaaccaacgctaacggagcacgggtatgcgagagcggatcttcctatacaggacgtggaagatgtttcgtttggagtcctcgaagtcctcctccatgtaattggccaggtagcttaggacagaaatcaggtagcagctcagggg

SEQ ID NO: 670714 - DNA, 248 bp, Homo sapiens
  misc_feature (162)..(162): n is a, c, g, or t
  misc_feature (214)..(214): n is a, c, g, or t
accctgaccccaccctccggacagctcagggagtgttttcctgtgagggcctcccccatcagtggaccagagggagaaggcccgatggccccattcccgggctttcccgtaacggcacagggacacgtgtgcaattcataggaacgggcccagatcgccctnatgagtgccacctgggtacaggtaggttggcgcttacgttcctgcccaaatncagcccatcgggagttacagtcagtccccccggg

SEQ ID NO: 670715 - DNA, 234 bp, Homo sapiens
cagtcgacccggtacccacttgggaggcgaggaggcagatcaccctgagtcggagttcgggactagcctggccaacatagtgaagccttgtctttactaaaaatataaaaatcaggcgtggtggcaggtgcctatagtcccagctattccagaggctgaggcaggaagatggcttgaacccaggaggcggaggttgcatcgagccaagattgtgccactgcactccagtctggg

SEQ ID NO: 670716 - DNA, 175 bp, Homo sapiens
gatagaacaggctttggtcaatggacatgcaggacagtgaggagacaggccatgccatacaagtgcatgcagctcactgattacatcctcaagttaccgcacagatgcccaccaaaagtatgtccgacaagcctggcagaaggcagacatcaatactcatgtacagccagggagt

SEQ ID NO: 670717 - DNA, 474 bp, Homo sapiens
  misc_feature (83)..(83): n is a, c, g, or t
aattgagtaattatattacttttcttgaaaactcccaactagatcatcacttaatttaatttttctatcttgattatgtgttntcttcccctgttgtattctgctgagtaatggcatgattggaaagcaggtgcccacttaagttaaagcctggctacacaggtgtagccttgaagaagttgtgagccttatcgagcctcaagtttctaatgtctaaatggggccactgattcttcactctgggttgttttgaaataaaggagatgtttatgtatgtccacatacagaaacaaatggatatgaacgtacctcagtggagagttagtgccttccccttacccaactccatgaactctgaataatcattttgtttgaactgggaggcaggacaggcctctgctctcggggaggaaggcactgacccctctgcagtctatccaggcaagtagctctgaagagaactgaaatgagacc

SEQ ID NO: 670718 - DNA, 1002 bp, Homo sapiens
  misc_feature (385)..(385): n is a, c, g, or t
  misc_feature (643)..(643): n is a, c, g, or t
gatttctgttcggggcccatctagtcctggacacggcatgattgttcgtccgactacgacttgacgacggtgttcagaattttagcagagagtctaaattgtctataagaatagctttaacatacatgaagcgcaattcctcggcaaacgtgtaggtggatcgcagaaggcatttccgggaaagcagctgttaaatgaggcttcccgccggatgtgatttccatttccgatattgttgaaacacacgtttagacacatgaacccctattcatatatgtaccatggcgacgattgctgtgtgatactaaagacctagttgcactgcgagtgacagacgccagcttggaccatggataagttcagagaccagcaaagtcgacgcaangacctcaatatatctatatttaacgtagagacatgcattggaacgacaccaggtagaagtaggctatcagaaagaggtatcaccggagtagtcactgagcacatggtcagagtcagagaacattgcccattctataatttccagagacaccctcatttgcaggggctaataggggacaaccagtgtgtgggatagcatgcaagaaattggcttactaggccacgtttgagccaagtagagcaatgctggcacactcgngaacgtatcgcctcgcgtgtcaaacagattctcatggtgaacgccattctcgcatctgtctcattgttagccatccttagagatatggcgcgcttttcgagattacctctgtgcatactgtgctacatcatgtaagtcgtccgatttggctgaaccagtacacggctctagcgcttacctgttgacccaatgcgtatgtctacacagagacgatctgtttcccttggcatgtgaccagttctactcgtcaattatgcatgattacttaccggagtgtcacagacttttgcagtcctccaggtgtttcaaaatcttttccactgaattagactgtgacctctagaagtacaagtcactga

SEQ ID NO: 670719 - DNA, 104 bp, Homo sapiens
tccagcaggtactttgtgatccgcatcgaaaatggaaatgggcgacgggcgtttattggaattggcttcggggaccgaggtgatgcctttgacttcaatgttgc

SEQ ID NO: 670720 - DNA, 1133 bp, Homo sapiens
tgtgtgtgtgtgtgtttttttttttctctctctctgcagcagcgggggggggggggggagagagagggaggagaaaaagagagggtgggggaagagaaaaaaaaattgtgtgtgagagaaaaaagaagtatgtgggggtgttgtttttgtgtgagagagagagagagagaagagagagggagtataaatatagtgtgtgtgtgtgtttatttcacacacacacacacaagtagtggtgtcggcgcactctctctttctagaaagaagagagaggaggaggagggggggggagagaaaaaaagaggggcggcgggggggaagaaaaaaaaaaagagagagggggggcggacccacaaaaacaacacaccgcgcgggggggcgaaaaatagcggcggacccaccactacgtagtgaagaaagagagaggggacgcccacaagagaggagaggagagtattaacaacaaaaacagaaggagagagggcgggcgaactaacaacacgagcggtggaggagaggagaaaacaaaagaaagaaagaggaggagaaaaaaagaggagagaggagaagaacaacaaagagcaggggggaggaggaaaaaacacaggaaggagaaaacacaacacccgcacagaaagaacaaaacacccccccaagcgggaaaacaaaaaaaaacaaaaaaagaaacaaacaacgagtgggaaaacaacacacaacggaacaaagaagaaggagagaacgagcaaaagaagaaaagctggcgcacacaaagcggtgaatagctaaagaagaaaaaaaacaataaaacacgaggcggcggacaaacacgaaacgaacaccaaaccggaacgacaaccacgacgacagaaaaaaaaaacaagcaacccgaaaaaagaaagcaggagaagagacaacgaaagaagaagagaagaaggcaaaaaagacaaagacaaggagaaaaacaataaacgacaaagagaacaaggcaaaaagaacagccagaagaggacagagacagagaagacaggccaaaacagagagaaagggagagagaagcgaaaacaaagaaaaaccaagacagcacggaaaggaaagaaaaaaaagagaaacagaaaaacaaagggagcgacggg

SEQ ID NO: 670721 - DNA, 277 bp, Homo sapiens
gcttttatgcttgtggtcgtctctagcaggatcccccggagacacttacgagcagtacatgcctaagacttcaccagctcaatatgcgtactactatactctattgatccaattacttgaccaacggaacaagttacccttgggactacatgcgcaatcctattctatagtccatttcaacaatagggtttacgacctcgatgttggatcaggacatcccgattgtgcagccgctattaaaggttcgtttgttcaacgattaatgtcctacgtgatc

SEQ ID NO: 670722 - DNA, 221 bp, Homo sapiens
ggtatacttactttgagagaatgagatgtgtcactggcgacactccaagctatctgatggatcctcacactggacacatctgtatgatcacattctgaggctctagcaatgcccagtgcacagatactgtctatccatggctctgctcctaatctacatgactcatgagaatacgccaatgtgtgaccaacgcatcaattagctcacagtacttgcagcac

SEQ ID NO: 670723 - DNA, 150 bp, Homo sapiens
ctaactcgtgtggtgtaagcaatcgttatggtgtctgagagtctgaatcttactgggttggtgaagatccacatacaaatattagaggttatcctcattgatccattccataaagctatcagagcaccagcacgaattcaggactctcag

SEQ ID NO: 670724 - DNA, 491 bp, Homo sapiens
gagcatggttggggccaggtgtggtggctcatgcctgtaatcccagcactttgggaggccaaggtgggcagatcacgaggtcaggagatgaagaccatcctggctaacacagtgaaatcccgtctctactaaaaacacaaaaaattagccaggtgtggtgcagtacgcctgtaatcccagctactcgggaggctgaggcaggggaattgcttgaacctgggaggtggaggttgcagttagccgaaatcgcaccactacactccagcctgggtgacagagcgagactcttgtctcaaaaaaaaaaaaaaaaaaagaacagcatgattggaacatccaattgtgtctgcacctttagacccatgtccccattatcgtgtgtttctgcgtttggtttttctgatcccaaatgtggaacatccttctattctttctgtgcattttgtcacagcacttacagtccagcactacaatgtatgcaggtcattttaaat

SEQ ID NO: 670725 - DNA, 1133 bp, Homo sapiens
gaccaaactcttatccgaattatgcgcgtgatatcggccccccctggtgttccaggtccgccgtcctgcgcaaccacaaaaagggcgcccaagccgggggcaaaagggacaaccaagtgcgacccttggaggcccccacggacatagacccctggccccgcaaaccggcggcccctggttcccggggacacaggccaagcccctaacctggaagggagccccctaaagggaccaaggggccccgggaccccacagggcctgtaaatgggaggagaacctttcccgttggaaactgcctaactgccccagacccctagttgccccccctccacggattgaggattcacggaatataaaggagggaaaaggctcctccaacctttcgggaaaaacccaagacccgcgccaaaaggtaaagatagggcccctgaaccatgaagatttgccccccccacccaggaaactcgcttgaaaggccgaaggaaacccaggattttctctggccttcttccccaaactttttcccccccccggaaccctgagggggaaactaaattctggagtttcacctcccctctctcggttgaataacccacacccccaaagggagaccctcttctgagagtaaagaccgcgttgaaaactcaagagagagtggaccacaggtgtattccaccggaaactttctccacgcacttcccgcagtgagccctctggaataaaaaattggcaccaccacactccacagtggcacgccaaaatatgtatccccgccccaagagaatataaaaagagaatccacatattcttaaaagagaacacgcttttaaagtggcctctttctgccacactttttcaaggaggcgccacaagaataagagatcttggagaataaggagaataaaggctctataggtttcttatacacacaccgagcacttcctcaaccagagtttaagagaaaaaagtttacacaacactaattctagtgttacacagagaaaattcttgtgctaaaataactctttttaaaagttgattttgaataaccactctaaaactcgcttttttttttccagcacagtatcccacccacttggttctgcttcaataaaatctttgggaaaactcca

SEQ ID NO: 670726 - DNA, 339 bp, Homo sapiens
gtggcgcgaataacctagtatttctcaaagttgttcatgcatagatcacccagagggctttgaaaaaaggcagtttgggccaggcgccatggctcactgcctgttatcctagtactttgggaggccgatgcgggtggatcacctgaggtcaagagttcaagaccagcctggcaaacatggtgaaaccccatctctactaaaatacaaaaattagctgagcatgatggtgggtgcctgtaatctcagctactctgggcagctgaacgtgactctgtctcaaaaaaaaaaaattgtatttggtgggaccttattcaagaccaacacaatcaaaatctctag

SEQ ID NO: 670727 - DNA, 140 bp, Homo sapiens
  misc_feature (33)..(33): n is a, c, g, or t
  misc_feature (78)..(78): n is a, c, g, or t
  misc_feature (105)..(105): n is a, c, g, or t
  misc_feature (122)..(122): n is a, c, g, or t
cggtctagcgcggggctggacaaagtcatagtnctgtggacggcgaacacggagcgcttctgtgaggtgattccaggnctcaacgacacagccgagaacctgctncgcaccattggagctcngtctggaggtttcgccct

SEQ ID NO: 670728 - DNA, 115 bp, Homo sapiens
tattcatatttgtcaagccccgacacgagagctcagctctggacaaaacaatgccgtgcgcaatgtttagacttgactgacacctactgtgtgctccgcgctactgcccctcact

SEQ ID NO: 670729 - DNA, 848 bp, Homo sapiens
gccaaaatccatttcatctatacatattccatcgaacgtaaatctaactttcttcccacaacactttctcggcctatccggagatgccccgacagttacgtcggactaccccgatgcagtacacctacatgaaatcgatcctatcagtctgtaggctcattcatttctctaactagcagtaatattaagtaattttcatgatttgagaagccttcgcgttcgaacgcagacagaagtcctaatagtagacagaatccctccataaatcctgtgagtgactatatggatgccccccagcctagcacacattcgaagaacccgtatacagtataatctagacaaagaaaggacggaatcgaagccccccaatagctggtttcaagccaatccccagtggctctccagtgacgcaaagaatacacacaatcaatcaattcagcacgaaacccttgtgggcagtgcgcaagggtcctctcggaacatgcgtttgtgctggaacccatgcttctttggggcccgccgggctgcaccctgggaggttcaagtcgtaaccctggcgcccttgtgccgcgtgatgtcgcccagagagagagacactcgtgcgtcgacgtgttcactactgggtgctggggagtacctctctccacgcctatttctttacaattagtcgccccgcggggggggctacacgcggagacggtcttctttgtacgcccaaccctcccgagtgagggagggtcttctaggggggccccctatgaagcgaggagcctttttcgtacgcggcggggttcccccagagacgaaggctgcggctattctaggtattccgcccggcggcgggttga

SEQ ID NO: 670730 - DNA, 424 bp, Homo sapiens
ttgagggagaacatatcaatatggagaacagatctttgcttctcaaattcaagaaaaaccattaactaatctatcaatttttctccaatacagtgtgccagagtgctctgtgaagaatccttttccatccctaccacatgtctgggtgaagggaggggagggttggtaagctgccagtacactagcaggcactcctggtgatgctctgggctctgctccctttctgccgggagtagcaggcatcttttctagccgctgcagcagcttgatgttgtggggaggaaggggccacccaccaatcacctcttcttgaagctgcatttttttgtgttcatagaagaggtctgtcttaggagctccccaaattgacaatctttggggcagccatctctatccttctcctagatgggtgcactccttaaca

SEQ ID NO: 670731 - DNA, 690 bp, Homo sapiens
taatattaatgcaaatttgatgcgaaattatggtcaaataaagattttctcaggggtcaagaaaatcagcttgaatgtcattcagcattattgaagaaggatgacttcccttccacttattgcacaaactgttggtagcttgtgagacaaatacagtagcacagtccgttcgaagattggtccacaaaaattagtccatattttaggggctcagtgtcaagagttccctcccgtgtgcccccactgttgcttctgcagtgatacgaaggatgaatgcttaatttcttattagtcagaaaacttgaatgcaacagtggggcactcaagaaataattccagagaggtcataaccctatttagccactttgaggtggtggcctcgtgggtggtcgtgctaagaaaaaggtagctatggaaacaaacagctgagagctatgagtggtgggttcacgtcattctagaagccatttcaattttcctcccgaaaaccccccagttggctcaccgagccccggaccttaacccacaagcgtgccacgctcaaatggcgctgattcaaactcccaggtacgtccctggcacccgggagtcaggataagaaaacctccagaagtgaaactgatgaggaagtgacctttaatcactctcaaacggagaattcactggcaaggtctaaaccccagggccaag

SEQ ID NO: 670732 - DNA, 268 bp, Homo sapiens
caggtcttttcccctcaaaaagaaaaaaaaaaacacaacttactaggaatggtgaaatatacctgttagtcccagcttcctggagaggctgaggcgggggaaccccctgaacccaggaggtagaggttgcagtgagccgagatcacctccactgcactctagcctggacgacaggagcaaaactccgtctcaaagaacaaaaaaaggtgattattggattttagtaccctgaaagtccttggtgaattttggcgagagcagctttctt

SEQ ID NO: 670733 - DNA, 504 bp, Homo sapiens
tttttttcaagggttttccaattaagattttatttgaccaacaaaacatactcatatgaaaatataaataaggtaaaaggagcagtgtagtcattatgatctaaaacaatatttttcaaattgtaggttgccagtcattctttgctgggtcataaaataaatttttttggttgggactatactttaccaaataataataacaaaatcaacaggagagaaaaaggcaaatatcagtgtatattgcaggtaataaaatagatgttttcataaaatttttgcagaacaaatgtatgtatgcactacatgtcaatgtaaagtgtatggcttactacaagacagggctaaaaaatgtttgaaagacacaatacagatgattatagaagaaagttaatattaagttgaatgattaaggaaggtttttggaggctgaaagtacataaataaagcttaaaggggatgggatgcctttttagatgaaaagctgcataaaatagttctataatt

SEQ ID NO: 670734 - DNA, 598 bp, Homo sapiens
  misc_feature (363)..(363): n is a, c, g, or t
  misc_feature (422)..(422): n is a, c, g, or t
  misc_feature (426)..(426): n is a, c, g, or t
  misc_feature (447)..(447): n is a, c, g, or t
  misc_feature (450)..(450): n is a, c, g, or t
  misc_feature (453)..(453): n is a, c, g, or t
  misc_feature (465)..(465): n is a, c, g, or t
  misc_feature (493)..(493): n is a, c, g, or t
  misc_feature (507)..(507): n is a, c, g, or t
  misc_feature (512)..(512): n is a, c, g, or t
  misc_feature (526)..(526): n is a, c, g, or t
  misc_feature (539)..(539): n is a, c, g, or t
  misc_feature (572)..(572): n is a, c, g, or t
  misc_feature (575)..(575): n is a, c, g, or t
  misc_feature (580)..(580): n is a, c, g, or t
agacgttttacttggtgcgcgctggcatgtgctccttcctcctctggtcgcgtctcactcagtgtaccttctagtcccgccatggccgctctcacccgggacccccagttccagaagctgcagaatggtaccgcgagcaccgctccgagctgaacctgcgccgcctcttcgatagccaacaaaggaccgcttcaaccacttaaacatgaccctaaacacaaaccatgggcatatcctggtggattactcaaagaacctggtgacggaggacgtgatgcggatgctgaatggacatggacaagtccaagggcgtgagaggccgaccgggagcagatatacaatggtgagaagatcaactacacngagggtcgagccgtgctgaaagtagttctgcggaaccggtcaaacacacccatccttgnaganggcaaagatgtaatgccagangtnaanaaggttctgganaagatgaagtttttatgccagcagtgtncggagcggtgactngaaanggtacacaggcaanaacataacggacntaatcaacattagcattggcggctccgaactgnganccctnatggtgactgaagcactt

SEQ ID NO: 670735 - DNA, 1155 bp, Homo sapiens
gggtagtcacacagtttgtgtatacggcatctattccagctttactgtgcaagctggggggtcacgtcccacggatggagctccccaggcggactcatagcaggtgagtgctgaccgcctgtccggctcggacggagtgtcactggtctggctagggctgggataaggactcttgctgccaggcgatcgtcagattctcttcgtgcattttaaggtgttgagaggagacacaagaagttcctgcgcgcatggatggagagtggatccttagtgacccagtgagcagggaagaacgcagagttcctggtacccaaggaatctggttgccgtgtgtttactcagcgtgccttggtagagctgggttacgggcactggatgacaggaacgtgtaagtactttgggggcaagagaagggacgtctacacttgggaaaacctagtagggaaaccagggattgctttcaattggaaaattgggtgcgtctagtcctgtgtgacggaattgaaaggtcatatggtgactgggacgtttaccaacatggacacagggaacttgcatttttcggcaacaatcgagccacgtaggagtggaaagatcgtcagattggggcgcaagagttgattcagatggcaccgggtattggttcgtggcagtgcactcgaaaatcgccagaggatggttcggctaggggaggaaagacgaattggttagcgaagatgggccaaggaactggggggttaaaggcaatggacgttaaatgggggagacctattatacaccaagattgttgctaccgaagcgtattctgttcaacgaaggaaccccgggacgttcgggggagttaaaagccaaaggacgcttggtaactcgcggatacggtttcccaagaaaacgattcgcgcattcacaaagagaaagagtacacgccgggtatggtgggtctgggacaggaaaaaccggcgatttcacaaaactgaattatattgtgaagttgtaaattttacattgggaagcaaattggcggcatttaaagacatggagtttccaaaaacttttgggggggaaacaccaaaattggtcccagattcgagagatgagcctcggtggaaatgtatcgccgtttagagcaacgtgtggagcgttaattgggactac

SEQ ID NO: 670736 - DNA, 164 bp, Homo sapiens
atgactgaagatgctgtttctgcaaacatatcatacacaaacgccgagccctatctacttactctcatctgctacctccctgacaagctgcctatagcactcgaataattcttctcaccctaacagtgtcaacctcgcttccccacccttactaacattaacga

SEQ ID NO: 670737 - DNA, 291 bp, Homo sapiens
acggtaggggttgtagggtgtatattagtctggtgttggtaggggttgtaaggtgtatattagtctggtgttggtaggggttgtagggtgtatattagtctggtgttggtaggggttgtgtggtgtatattagtctggtgtttggtagcgtttatagtaggtgtttagtagggttatagtaggtgtttagtagggttatagtaggtgtttagtagggtttatagtaggtgtttagtagggttatgtcgacgcggccgcgaatttagtagtagtagtagtagtagtaggcgg

SEQ ID NO: 670738 - DNA, 208 bp, Homo sapiens
ggttgagtgagggggagcaggggatcccaacgcttgcgctgactttgcgcagagcccggcgggcggcccacgtcgcggccttgcttgggtaggagagggcggtccccagttcagttgggtgaactacccttgcacacttggagtttctggtgtctttgcttggaacttacctagttcgtggcaaggggactctgctagcggcccccaa

SEQ ID NO: 670739 - DNA, 380 bp, Homo sapiens
tctcaagatgctgggattataggtgtgagccatcatgcctgaccaagtgctttaaaaatatacgagtttgttgtcacctttgtgatgggtgatttcatacaaaggtccagatttctggccgggtgcagtgcctcacgcctgtaatcccagcacttttgggaggtgaaggcaggcagatcacctgaggtcaggagttcgagaccagcctggccaacatggtgaaaccccatctctactaaaaatacaaaaattagctgggcatggtgccactgccttccagcctggatgaaagagcgagactctgcctcagatctcacctgagatcgggagttcaagaccagcctggccagtatggtgaagcccgcctctactaaaaatag

SEQ ID NO: 670740 - DNA, 891 bp, Homo sapiens
ggcaatatccaggtggaggacattcggattcgagccatcctctcaagctaccgcaccgcgcaccccagttgactggagggctacgtggaggtgaaggaggggccatgacctggaatgcatgactctgtgagcaagcactggatggggcaatgatattcgccgcgtggtctgctggcattgttgtgggcttgccgctggcgtgagacggaccagtcacgaagtaccgacacaaggtgatacagaacagtgtgttgccgtcgacggcacggcaagcgagatgcgtgactggacccatgtctccgatggtacctgcgacgcggcacagtcagggacctaccatctaccaggctgcgaatggctgaggaccccacaagggtgtacacctcgcgacacccgatgaaacgaactgatcagccctggcgcagaacctggagcgtactcgggctgcgtggatcgaagtttgtggtgccatggagcaagggtccttcagaaccatgaccggtagccacagtcgaaaagaatatcccggaacgaagacgagtacaaacgtcgccagcaggacataactcccatgcgaatggctgcacactgcagtgagagtcgggatgaccggtaacaattcgagaggacagaggacgcgggcgtatgcgcaaggattggcataccgacacaaacatggggaacgcaagctgcgcccgtgcaaccgcgcacattgacgacacagagagacacaggacgggagacaacacgcagacccgaagtcagcgcccccaagcatgagtagggggcacaggcccactgagagcatgcaacgcagagactctcagcggccagacacgacgcaccacaggacacggccaagaacacagaaacgcgcacacccgcgaaccg

SEQ ID NO: 670741 - DNA, 280 bp, Homo sapiens
cgaggcagtgaatcgagctcggtgaccatctcgtgacggcgattatacatccagatggcctgaagcactgaagatccacaaaataagtgaaaagagccttaactgatgacattccaccattgtgatttgtttctgccccaccctagctgatcaatgtactttgcaatctcccccacccttaagaaggttctttgtcattctccccacccttgagaatgtactttgtgagatccatcccctgcccgcaaaacattgtccctaactccacctagcacttttg

SEQ ID NO: 670742 - DNA, 529 bp, Homo sapiens
attctaatttacttggcaattttctcaatgtagacattactgttgtttctgatttatctgagctgaaaaaaaatcaagctatagtaagcttgaatgattgatctttgttttaattctggctagttcttgaaggattgactctagaaggggaatcattgggtcagggtataaaaactttcctaagacccctcagcattgtccctagagtaggagagcatggttagggagctatctgtattctgacagtcactttagggtatggggtgaccagggtcagtagctttctttgccaaaggaaaaaactgcagttccagccacaggctgctttgttcaaatgtctttgtgctttatgaaccgtaacagtggatgagaaagggaagacgtatgaagaagtcctgatgagattgttatgtttatcgtaatggtgcaaaatgaatttgctcgtggaaaagagaggccttgtgactcttaactagaaattgatatatgttaatgtcctctggtgatatttataatttctagatattaa

SEQ ID NO: 670743 - DNA, 824 bp, Homo sapiens
gggcggacctctgtactattcccttccctggagggaatcatcagtagcctgaggccatcaaggattctcactttttttgctgccccactacgtgggttgtaaacatgagcatgacccagttttacgccagaaaaatgggagctttgttctgctgaccactggccgaggtttcccattcatggactatagttgatctcacatggcacttgggaccgacatttctctagccttcaagacacctgacctgaaattggctgcctcatatgctaggttcttgcaaccaaatgccttaatcttttagattatctgaacatcttgaggtttctgttcgctttgtgggttgggttgagaacagaattgacgctacgccagtatgaagggaacgaacagctttcgtgagagctccaactatctgtatctctgcaagtgactcagtccggatggcaaagactagctcttattctagtgtcaagctgcacttacttgactgcttcagctctcctaggaacagattgccagtctttgctcaggcctaatcttattggtctatatgtacagatctctcctgctgtaactcgaggtcaccccaagagcagctgggccatctgttgtgcatcatctactacctgtgctctgcggacacaaaccgtgaacttacacgctccccttgatttcccaggcaaggattacctgtactacttccccaaggctcccttgaagcgcagaaatactgaaacctccgctgggacccctgtaacgaactctctagcaagatcaagtcactcacgaagcggccgcacagaatcattgggtatgctctaccg

SEQ ID NO: 670744 - DNA, 624 bp, Homo sapiens
cccctgttgctttacatgcaacaatccccctcgtccgccttttccctttctcccacgaggggtgatctctccccccgcactattgacttctctgtgaaggctacctctcttacccaaagagggatgccccctcaaaaatccgtcccccccccgcgaaacaaatttctccaatacctcaaataggatccccccccgtctgtccattccccacatttttccccgaggcaggtcccatctttctcgctggggcacacacttctctgcgtgcaataaaaaaagtggcctccacaaggcgtgtatccactaatccctcgagatttgttcgaagaggtgtttctcaccgggcgcctccactgtaatgtaccggcggtttcccatatatgaaatgcctccacgaagggagtttcactccacggaatttcgataaaagcgttcctccccaggctcgcatgttaacgcacctgcctcaaacggctccccctctttccccaacatatctgtcgatcccctgttcacaagttacatctcccaccgctgtttgtgttacattaccccttctcgtgcgccgccattgtgcagatctttctaaaacaagaattgtgcccttctctacaatgaacaaaa

SEQ ID NO: 670745 - DNA, 461 bp, Homo sapiens
tgaaagatgtgctgctcttaataagcattaattctctctctcgggcagaaacctacgtgttcctcttccagagagctggtgaagccaaaggcattctcataatgatgcgctacaccgactgacatttaccaactgtgtcaaagctacaggagccaggtagacactgctggaactttaacgggaatcaaacaagtctataagaagcactgagctgtgccactacccaatcagtgttcttccagagcacacaaacgaaagtgggaggagccttccaatgagaactgttgtgtgattaatcaatgaggctgactaaagcacacacttataatcccaatactcagaaagacagaggaagaaggatatcagcgcaaggccaacaaggcttcaaagcaagtaccaacccagtatggaccatgagaccctatttcagaaacaaataataaaagcttgatgaagctgca

SEQ ID NO: 670746 - DNA, 289 bp, Homo sapiens
  misc_feature (211)..(211): n is a, c, g, or t
tactgtgcatactgtttagaaccacatttctaactctccaggatcacccctcgctgagtagctgtattttctttgaaatgtcattcctcgttaccctttctcactagggaaatccttctctatctcttactctaggaaaactgttgtcagtaggatctggtttatgggaggggttggtgaatcaagagctagtctcataaatctcaaaggnggtccatctgggcccagctttggggtacacatttcatagggcctgtctctctctctttcttatccagcagttgggaag

SEQ ID NO: 670747 - DNA, 1174 bp, Homo sapiens
cccagccccagccccttcccttataatcctagccacggtcatatgcttatccttctataacgtatctcatgtcccgtcagtcatcttcgattgctgggacagtgacggaggctggtgagtgtcagacagaaactggcttcgcagccgtcagcaacgactacgacgagactcaagtacgggatatgcatgagctccgtcgtttctaagaaacccaaggatacacatcaagagatcccagcatgctggtctctactctcccatgcaaaaagtgctcatgacatatcgagaagacctacttacaaagtgcgcatatatagcaatttattctagtctacccccgactaccctactctcactcactactcccctcccactacgcacacaacagtctggcaagcgacgtcttaccttcaacttgtaagcaagtgctcacgcggctggctggcccagcgtagtatggctgacattcatctgcatatatcataactgtctcgtattaactctctagttcatggtaatcttccctaacgtttctccgcctaccacactgcacagcactgcaacatctcacgtttggctcattaacaacaccatcagaggcagcacagagtaaaatttcaacatcctcttggagcgctacagccaaggaagccacaggacaccaatccaattcgtcgtgcactatggtcccttccaggcctacccaccattcctctcccacgaatgtctacaacttctcacaacagtcttggaagttccggagtgcctaccttggggcttggcctaccctagggttcggggcccccccactcaccgcctacacgctcggacttccccgcgcacacacccacccaccggacactaccctcaacggcgaaataaggccacactttgaatgggaaggggaaaggggcctatgcgctcgcgctcggaaagcgatacatcagactcgatcgcgcgccttggtcaagaactacattccaggtgcagcctacagcgggaaaaccctctcacacaccgtcaaaccccgaacagcagctttcaactcctcgggactaaacgctatcctatcttacccctctaaggaacacgggcgtctccagcatagagtgccccccgcgtgtgacgcaacttttcgccacacgagccctactttcgtcgaagcttcccgagg

SEQ ID NO: 670748 - DNA, 165 bp, Homo sapiens
tgagggatgagggccgtctggtggacttctggcgtcccggtgccccgggcttttccgtcagatccgttctttctcggtggtgtcctcctccttcccttcccagtctcccttttctctctccgggtgtctctgcccctctctgtgcctgcaaaccttatcctctat

SEQ ID NO: 670749 - DNA, 175 bp, Homo sapiens
  misc_feature (61)..(65): n is a, c, g, or t
cgagcggccgccaactccagcagagcgccggcgcgaccaagaccagggggaccggcggcannnnnggtgcagcgcgcgccgtgtgcatgcctagtcctcctgttgagagcgccgagagtcctggtgcttagtctatgctggtgccgctagccagggtgtcctgcctggcatatca

SEQ ID NO: 670750 - DNA, 326 bp, Homo sapiens
tggccagtcggatgtgcgggccatgtacggatgtggagatcgcctacctaccgcaacgctgctggagggcgaggagctgccggctgaatggcttcacggcgttggacacatgtcaaccatctctgtagtgcagtccaccgtctccagtgtctatggcggtgccagcggtgtcggcagtggcttaggcccgggtggagcgaagcagctactcctatggcagtggtctgggcgttaggagagcggctatcagttccagcaccgtgaagagtccctgcgggtggcctcagcctctcttggatgcggcagttctaccatcaagtacatca

SEQ ID NO: 670751 - DNA, 400 bp, Homo sapiens
  misc_feature (190)..(190): n is a, c, g, or t
  misc_feature (196)..(196): n is a, c, g, or t
  misc_feature (221)..(221): n is a, c, g, or t
  misc_feature (228)..(228): n is a, c, g, or t
  misc_feature (248)..(248): n is a, c, g, or t
  misc_feature (262)..(262): n is a, c, g, or t
  misc_feature (288)..(288): n is a, c, g, or t
  misc_feature (322)..(322): n is a, c, g, or t
  misc_feature (338)..(338): n is a, c, g, or t
  misc_feature (364)..(364): n is a, c, g, or t
  misc_feature (366)..(366): n is a, c, g, or t
aaactctctctttgtttttaaaggaaacatctattatggtaatacaaagaaaagttaaattgtgacagtaatgttatattaacctcttcctactttaaagtgtgaaatgtttcacctcagctgtacaaactccagcattgaggaatttgcctcactcattactcctgtggtggacagttatataaatagncaggcngctcacatctgttttggggcatagnaggaggnggcacctgccatcttctggnaaactccaaggggnaatttcaggtggacatagtggcactnaaacccattagggatacttggacccaatatttgnggcacggccaggctgnacagttctataccggatggggcggtngnaaggggtttttattttcccggccgggggggccga

SEQ ID NO: 670752 - DNA, 160 bp, Homo sapiens
accgtctgagcagctgggaacatgagagcagaaaggtgagcagagcagaaaagcccacctcccgatgcatagctgctgctgggggccaccggtgcttcccgctcctctggtgtccatgagatttcttttttttgagacaaggtcttgctcttgtcaccca

SEQ ID NO: 670753 - DNA, 675 bp, Homo sapiens
aataggatcagattcatgaatcatggtctgccaccttttatcaacaaatccgtgacgtcctataatgagctatacagtgtgaggcatatctcatagcaacgttggttgattgccacggagactctgccaccggttctggataagcacatgtctccctgtaccttggatgctaatagaagggcatacttacagtgcagggtccagagcatgatgctggggtcgtaaagcgcgtatacatctagtcctacgtaatagagatctgaggtggtcctcatagagactacgtgcagtagtgtccattcttcactggccgacgtactaaagttcaaatgataaaacttgaagttgtaggcttggaacagtatcagatcagtatatccttccttgcataaaatacaagggaaaggccaaggaataatcagcattaacctaccaggtccaagggtcttctatccctgacttcatctgagtcacaagatttctctaataagagaaactttgctactactgaggaaaattatcccttatgggagcccccagttcagaggtaagaacagttctttcacgtggaggtccaaaattctggacttctagaaacaagtgaagtgtgctaaagtctcctatttatcgtctctcttccagtattgtgcatcgattcttgcttaaattctggat

SEQ ID NO: 670754 - DNA, 195 bp, Homo sapiens
aagccatggaagtcgggtgtagggttggtcagcacaggtccaggccttttacggacgactgcgttgctggtgatgcggggagttcattggtgtagcggcatgacacttgttcgtccttgtagtcttgcagcgacaggcatgatcttcttgtcgtcatcaagctcatagccgaagcgaccttgcaggtcgtaggta

SEQ ID NO: 670755 - DNA, 345 bp, Homo sapiens
ggatgcaagtgtccattaggggactcaggggcacagggtgggtaccgtgcacactgtggcaaggcactggtgggtgctggcaggcctagctggacatggatagagtgagaatgacaactcacagatgtcctagcttctgctggcccagctgccagccactggccagtcatcctataagcccagcatgtgtgcatagtcacccaaaacatcttgaaacttgccattagagaggcattcaacaacagaagtaagctaagtgagtaggaaacagtgtttcctggaatataccgcactctgcctgaaataggaaaactatgtttgccgggaagcagcagcagcaggaaa

SEQ ID NO: 670756 - DNA, 226 bp, Homo sapiens
  misc_feature (219)..(219): n is a, c, g, or t
ccagctggagccttcctgtgcccctactgtactggcttgcattcctgctggaaactgtgagcttcctcctgagtccaatctacagatatatacctccctttaaccgccacttggtcacactgtcaggtagcacattcactttctcctacaagaaagctcagcgagatctgggctatgagccacttgtcagctgggaggaagccaagcagaaaacctcangaagttg

SEQ ID NO: 670757 - DNA, 140 bp, Homo sapiens
ataccggcgacgtgtacaagcacaggggagttactactgggtttcattaaccaaaccatgcggcatggttagggagccatgggactcgggtagcccagagtaggcacctgggtgatgggggaggtccccagtagaaaagt

SEQ ID NO: 670758 - DNA, 734 bp, Homo sapiens
ggcgtgcggcggcgtgctggcggtggcaggcggagaacaacaaatcccggagccggagccaggtgaggctggacgggacgggatgggcgacagcgggcgggactcccgaagcccagacagctcctccccaaagtccaccgttccccaaggcaggtccgcttcatcgcgtatctcactccgtgggccagctgcgtagcgcgtcgttcaagatgctcggatagtcgttgggaggctcaataagggatgaacacgccaagcagtacgagtaagagtgcacagaggcaagggaggagagtcggcgcaacgagggggacgcgcgctgggagtacatctacaggagccgacaagagccaaagtaccgccagtaaagcgaccaggccacaaccaacacggcaagagcggcgacaaagccccagacggatgacacaaagacggaaacaccatcagaaggcgcgcccccgcgaggacaaacacagagacaggcgcgagcgcctcgggagaaaacccccggagcggagggcggggcgagagaaagaggggacaaccgaagcaaaacagacagaaaacaagacgcacacgacaccccaacaaaaggccagacgaagcgaaaggaacagaacgaaggagaaccagcagccgagagcacaagcgagggaggacaccatagacacagcgagagcagaacgaagacgccacaggcgaggacaagcgacagacaaacccagacaggagcc

SEQ ID NO: 670759 - DNA, 328 bp, Homo sapiens
ctctctctctctctctctctctctctctgtgtgtctctgtctatatctcactctgtgtgcaaagcgatacttctattactaggatgcatatcaatggagacactggagacccataagaggacaagccaatataagttcatacatttggtcattactggaacatttatatcttagctggctgaacttgcacttgacaaaaatgcaaagctgaaaataaaaccacggagactaattaactgagagagttattaaaggcacactccgaggttcactacgatcacatcatggccatgctcaggccagatatgctgagtgcgctgtcggctct

SEQ ID NO: 670760 - DNA, 311 bp, Homo sapiens
tgcagtgtctcacacctgtaatcccagcactttgggaggccaaggtgaacagatcacgaggtcaggagtttgagaccagcctggccaacatagtgaaaccccatctctactaaaaatacaaaaattagccaggcatggtggcgcatggctgtagtcccagctactcgggaagctgaggcaggagaattgcttgaacccggcaggtggaggttgcggtgagccaagatcgcaccactgcactccagtttggtcaacagagcatggctccatctcatactggcctatgagtgactacacatgtcgaccgacta

SEQ ID NO: 670761 - DNA, 198 bp, Homo sapiens
caccagatgagatttgttatacgcgcatccttggatgatgcggctaaaaccgttggggtcgactttattggcggctattcagcgcttgtacaaaaggggtttgccaatggtgacctagctctgatcaaatcattaccccgtggcttgacggaaaccatgatttacgtcatatcaagtcgtcgaatattggctcatcca

SEQ ID NO: 670762 - DNA, 618 bp, Homo sapiens
atccagcctcgtggatgtgagaggctggctctgtctgtttgcatggagctgtggtgtacggcctttcccaggaatcctcccaaaggtggcttcccaagcattcagctgggatgggcctttcaggaatcaccccgagatggctcggggttttcccctgtgccctgaaagcgctcctggtatcagagctgtttcaagggcagacagcaggccgggtgtcttagggatcagtttttccaagactccagaagtgccaggttcttccccttgagctctgtccccatccccatcctccagactgggcaggagctgtgctgggagaaagggtgggcagcgggagcctcagagctgagcccggctggtgccctcccctccggcctctccactgctttcagacactaacaaggcttctcagggcagtgatttgtccaacactcctatggagacctcccagcagcccatggggtcgccatgggtagacacaggtttcttgtgaccctccctgggggcatgggagggtggagtgggactcggtgttcccctgaaactaccctgtataatctgtctaaataaacgggatttttcatgggcggccgcccacccgcattatcactgtgtgat

SEQ ID NO: 670763 - DNA, 462 bp, Homo sapiens
  misc_feature (360)..(360): n is a, c, g, or t
  misc_feature (366)..(366): n is a, c, g, or t
  misc_feature (373)..(373): n is a, c, g, or t
  misc_feature (380)..(380): n is a, c, g, or t
  misc_feature (383)..(383): n is a, c, g, or t
  misc_feature (388)..(388): n is a, c, g, or t
  misc_feature (394)..(394): n is a, c, g, or t
tggaatgctcggatagcacatgaacagcgtatacatccagcgtgcgcagtatctggacggacagaatcgccaagccttgctgctagacgctctggcaaacgccggcgccccgctcccacctgctgtgagttctagcctatgagccgccgcaacggacaactgggcgagcgcctgatcgagctgttcaacgccctgcaatgtcgggaaaccaccttcggccagatctacgccatgtccgcatcgtgcggcatcgacgcgcgcagggtgctcgcagaccactttcaaggtggtgtactccatggctaagactagtacttcgagtgcgccttgatggcgtcgcgttctacactgaacaccganacctcntcgcctngtaccgnacnccggnacaggnttcgcttgttcaagacagaaaactacgggcgcgacaaatccggctggattcaggtgtttgatcgagct

SEQ ID NO: 670764 - DNA, 639 bp, Homo sapiens
tcgagacagagtttcactcttgctgcccaggctggagtgcaatggcatgatgtcggctcactgcaacctccacctcccgggttcaagcaattctcctgcttcagcctcccgagtagctgggaatacaggcatgtgccaccacgcccggctaattttgtatttttagtagagatggggtttctccatgctggtcaggctggtctcgaactcccgaactcacgtgatccgcccacctcagcctctcaaagtgctgggattacaggaatgagccaccatgcccagcctagccgttcttaaaaatagtggatgtcacaaattttctatcatatatgaaatactaatttataattattcaggatagtgagggagattatgctttgggtatctcagaaaaaaaataaaatatgcattatgtaaacaaatgtataacatatttaacatatgtataatgaatcttggaatgattgaacatagcaggaaacactggaatttctgtataactaaaaatctcactagcaaaggcacgaaatacttttattgttctcacaataaaatgtctgaaatcaactctattgtcgtttaagactatgaacaatttgagaattagctacaaattttcataaagagtgccagcggccg

SEQ ID NO: 670765 - DNA, 733 bp, Homo sapiens
  misc_feature (313)..(313): n is a, c, g, or t
  misc_feature (442)..(443): n is a, c, g, or t
tggctaggtacgaggctgggtgttggagagaagcctgcttccccagtgtgtgcagaccagatgcggctctgcagaggctgggcgctgtgctggcgggctatggggtagagctgcgtcaggtgacccgctgagcagctctccacactccgtgaccctggctgcagctacgtgtcccaagggctggcaggcaagaatatcccgggcagggtgttcgtacaagtgctattggaagcgttggagtatctaacgtagacacatcgaagtgagcacgggcggcacgtggtgggacgggctagcagcacagccagtgagnagtcttcacactgccccgcatgcatcctctcctatgacttctggaacaatgcgccaatcgtgcccgatgccgcttatcgcgtctcacgctgaaagtgtccatggcagcggtggcctaagacgcgcatgnntcttcatcctgtagccgctccgcaataggctggccaggatcccgcctggatgacatccatgtgcctgctaggagagagcaagataggctcgcagattgggcgtccaaggagtccatgtcgcgcaactggtgagcataggaccgaggcacacgttcacgccgcgacccaagtcatgacacgagggaatgtatggcttagcacatcgatcgacatgtaaatcacgtacactgggtgtgatgggggatcccagggcccccgttcaacaacttctcccggccgacatccctgat

SEQ ID NO: 670766 - DNA, 236 bp, Homo sapiens
cagcccgttgcgggaaaaaggaaaaaaaagtgtgagggggggggtgtgttttttctattgaacccctgtagagggggggtgtgtgttttctattgaaccccaaaaaagagagggggtgtgttttctattgaacatctaaaaaaaaagagggggggagggggtgttttttattgaacccctattcaaagacctggactgaattttttgggtttgaaataaaagaggcagagctatct

SEQ ID NO: 670767 - DNA, 452 bp, Homo sapiens
cagaagtcctgtgggataaaccatccacattgcagtcaggttcccagtatctagctatcattaattttaagcaacgacataaacaagatttggccaggttataaaaatagagggctatcttgagaattacttatagtatccgagttgaatggcagagcgcacgtagacacatctgaaggtggatggctgtatctcccagtactggaccgggttgctgaaaagactcgcacccgaataagaagcctttatcggtgttgtgtccaggtgggcagaagtcacatgatccaactacagagatattgttgttatgaaggtagacaacctggatgtacttatgctctgccagcccaccaggtactctggtaagcttgttgttgtccaagtgaagctccctcagatgaggcgtgtaggccagagagccattgtcaacagcagagatgctgttgaaactc

SEQ ID NO: 670768 - DNA, 355 bp, Homo sapiens
ccgctgggcgagcaactcatctgaattatgctggtaaacttccctccgtgctaactgcctcctcggtaatccaggagtctgcactccttcagcgtgcacccagatagatcctatgatcatatggattagaccacctctttccccatccaagcatcccagcatctccaaaacagatgcccagcttttcaggcaaccacattacaggcctgaatcttgacccggcttcttgttcctatgagaaagaatagatgcctgtcgtacataggtcccagctcagtcacacctcaaagcatttgcacaaaatggtatgaattcctaaaatagctttctacacctgtttccattggttgccaga

SEQ ID NO: 670769 - DNA, 176 bp, Homo sapiens
  misc_feature (76)..(76): n is a, c, g, or t
  misc_feature (101)..(101): n is a, c, g, or t
gttacccactgccatgcaccaggactggctgtgtaaccttgggtgtgccctgctgtctctctgggctgcagagtcntgcccaaatgtgtgcatggcctctngaactgctcagctctggtccagtgcctgtggcaggacacacatggtgagcctagccctgggacatcaggagactg

SEQ ID NO: 670770 - DNA, 725 bp, Homo sapiens
gcccccagctctctttttcgtgtgtgcttcgtcctcgtgggtcctggtctgtctgctggcgttgctgctgctggttgtgttgtgtctatgtcctatctgggttcgtgtccccctcttccgtggggtgggatcccgcggtcttctagggggttgggggttcccccttcttatattggcctcccatttattcactttggagtttttgggggttttcttggtgttttggtttttctttccattctttctgcactcagattttagccttaccaagggaatagcctctggccgtcacacgttggacgcctgtaaggtcacctcgtggtgaggctgtacatgcctcacaccttgccaccgttgagagggtatccttagcagtaggactcccgagatgagtgtctggagcgcttcagttcagcttttaaggcccggacgggccacacgtggctggcggcctcgttcccgtggcggcacgtccttgggcgtctctaatgtctgcagctcaagggctggcacttttttcagtatacaaatgggtgttatttttatttttttttgtcaagtgatttttggtcttctgttgacattcggggtgatcctgttttgcgctgtgtacaatgtgagatcggtgcgttctcctgatgttttcctggcttggggattgtacacgggaccagctcacgtaaagcattgccagtaacaaagtaataaaagcctctttcttttta

SEQ ID NO: 670771 - DNA, 804 bp, Homo sapiens
taagcgtcaaaaaggtcagagagtcagcccccggggcccgcgatggcccccggacggggccccgccgagtgctcgcgccccccgcggctaatgcccccggctcccccccctgggggtgcccccacggtatcaacaatgcaagctcccggcgtcaaaaaagagggcccgccccctgggtataagcgggcggcggccgccagttctatgcagctcggcaaacccccactctatgtagaggcctccctgcaaagccacacaggggcagaacctgtcccggaaatatacgccccgcgaggggcccaggatccggtccctgaacagagaacccagcctgccggcaaggggttcgcacaaacccggcggacaaccaagcacgtgggacacgacgaaacatccccagacagaccaccactcagacaaagaggcccacagtaagtctacacgccagagccgccaccccccgccttcataggagcagggggaacagagcgtgacttcacgctgtttagctgttccacatgggagccaaatggtgatccagccatatccgagattggggttacaacaagtcacacacacctctgtctcaacccgctcaccagtaagcaagaagcccaactatttgttgggagaccacccgctggaggatttcatttcgccgaggggcccgtcatgtatggatcgagagttgttggtaggaccccagctctcttgtatacacgggcgaaaccacgccgtggccccccacattggcgtcgccaagccttgcgggcccccattccaaaaaacagaccaacatagaca

SEQ ID NO: 670772 - DNA, 833 bp, Homo sapiens
  misc_feature (41)..(41): n is a, c, g, or t
  misc_feature (67)..(67): n is a, c, g, or t
  misc_feature (69)..(69): n is a, c, g, or t
  misc_feature (71)..(71): n is a, c, g, or t
  misc_feature (77)..(77): n is a, c, g, or t
  misc_feature (94)..(94): n is a, c, g, or t
  misc_feature (132)..(132): n is a, c, g, or t
  misc_feature (143)..(143): n is a, c, g, or t
  misc_feature (181)..(181): n is a, c, g, or t
  misc_feature (183)..(183): n is a, c, g, or t
  misc_feature (185)..(185): n is a, c, g, or t
  misc_feature (191)..(191): n is a, c, g, or t
  misc_feature (193)..(193): n is a, c, g, or t
  misc_feature (202)..(202): n is a, c, g, or t
  misc_feature (204)..(204): n is a, c, g, or t
  misc_feature (207)..(207): n is a, c, g, or t
  misc_feature (209)..(209): n is a, c, g, or t
  misc_feature (253)..(253): n is a, c, g, or t
  misc_feature (266)..(266): n is a, c, g, or t
  misc_feature (268)..(269): n is a, c, g, or t
  misc_feature (296)..(296): n is a, c, g, or t
  misc_feature (351)..(351): n is a, c, g, or t
  misc_feature (383)..(383): n is a, c, g, or t
  misc_feature (386)..(386): n is a, c, g, or t
  misc_feature (432)..(432): n is a, c, g, or t
  misc_feature (436)..(436): n is a, c, g, or t
  misc_feature (512)..(514): n is a, c, g, or t
  misc_feature (553)..(553): n is a, c, g, or t
  misc_feature (568)..(568): n is a, c, g, or t
  misc_feature (636)..(637): n is a, c, g, or t
  misc_feature (675)..(675): n is a, c, g, or t
  misc_feature (694)..(694): n is a, c, g, or t
  misc_feature (705)..(705): n is a, c, g, or t
  misc_feature (806)..(806): n is a, c, g, or t
tttgattcacttcattttattattaacagcgaactagaaangcagcccagggtggggctccaacaantncncccaanatgcccagccctgcatnaattcctgggtgggtgaggtcatctggactgggccttngagctgtcctntatttataaaaccaaatgggtccaaatacttctgggtntntncgcgcncncgccgttgntnttntntatatatatatataaaacataggcttcctttccacaaggcgttngtaggtgggactntnnacgccatccctgggaaaaaagaaagtnggctttagcagggactggtcccagagtgagcctaggcactgcatcaatttgaatngctggttaacctggaccctgggcaggtatggngcngcccatcctgcccagccacaggaagctctaaaccacctggatttanaagncctcatcctcgtccaggtcactatttccatcctcagcctcctcggtgccaaaacaagcactgcggatcttcccaannnaaaaaacattcttctgctgccttcagaccttggcctgcnggtgctccagttgcncttgcaggttctcgctctgctccgtctcctcgtccagcgaccgctgcagcttacgtgcctggttgtcnncctcgtccagctcgtcctcagcctgggccagctccttnttgagctcctccacccgcngccgcagcttnttcacctcaccctcgtgctgctccccccgccggttggcatgtgccagctctgccaccttctcctggaactgcttcttcagcttgccatgcacatgcttcangtctgccagctccttgttcttctcgaa

SEQ ID NO: 670773 - DNA, 953 bp, Homo sapiens
ggtcactcttttcccgctgtgttctctgttcgttatttcccgagggccccccttgtacccgcgtttcgctgtggggttttctcttcttcaacccacgccgtgtgtgatggaccccctccgcccgtggtgttggtcaaccacacgaagcgccccgtcgggcaaataataattgggcggtcaccagatttcccaacggtgaattgatgctcccccaagggcgtgtctcccaccaggggtgagttccacagaagagcttacttgcgtgccacccgaaagccctcctgggggtatcaccacaggagccaccacgcttgtcgttgccccacccctacttctcaggaggtatagtgacccaaagacccctccgggggggagcaccaaaaaaccaccaggaggggtgaacgtccccccttccacataataaaagggtctcaaaacaggctccaattaaagtccctccacggcccccgcacataatgattgcatcaccaacgtctcaggtagaagttagtgtatgatagaagatataaaccaagccgcccggccgcaggaggagtccgaacaaaacagatcctagaccccccccacacgcattgggagcactgtatgtgcgaggagatattactactagagaccacactggagattagggactcccgcgccctgtccagacaacatattggagtaaccacccccgctcctggtctccccagaagaggagacaccccaaaaaacacacactccgcgcctagttgtgaggggaagctccaccacgagtaccccgcccacaactatatctcttaggcgagggcccaggggcgacccaaagacaaaatagcttgatagaagccacgcgggtagcaccaggggttccacgcagcgcgtcgagaggcacacccccccgcctgccccccaccgcccgggggaccgacaaggcccccgcccaaataaca

SEQ ID NO: 670774 - DNA, 788 bp, Homo sapiens
ggaataagcgaaccggcctcctagggggtcgtcgtgcgtgcagacagtttatcgagaatcagtgctccgcggctccggggagaaggcaatatgttaaggatacctgtaagaaaggccttagtaggcctttcgtaagtctcctacaggatgtgttcgaacaacatgctcacagcagtcaagcaacttgcattgagtgtatttcgttcgatggtcagtcttgtcatggtggaaccagggaacgatcgtcctccaagacttgtgagaaggttgcgatgcatgatccctcgattctgttatcatgacaggttgtctgttgctggaaactgcaggatgtgccttgttgaaattgagaaagcccctcaaggttgtagctgcttgtgccatgccgagtggatgtaaagggttggcaatatcctaacaaactctagaagaaatccaaaagagccagggcacaggtgtgatggagttcttattacgcaaatcacccattggactgtcctatttgtgacctagggaggtgaatgtgatctgctaggacagtccatgatgtttggaaatgataggagccgattttttagcaggggaagcgtgctgtggaagacaagaacattgggccattgggtacagaccatcattgaccaagatgtataacagtgtactcgctgcatcaggtttgccagtgagattgcaggagtagatgacttgggaacaacagggcagaggcaacctgatatgcagttggcacatacttgaacacgcattgttcctgtctgaacctgtcctgggac

SEQ ID NO: 670775 - DNA, 161 bp, Homo sapiens
gactatatccaattctttaggaggctgagacaggaggatcccttgacgccacgagttcaagaccagcctgggcagcaagaccccaagcaagtccccatctctacaaagaaaaaaaattaaaattagctgggcagtcccagatactcagggggctgaggcag

SEQ ID NO: 670776 - DNA, 200 bp, Homo sapiens
  misc_feature (35)..(35): n is a, c, g, or t
  misc_feature (42)..(42): n is a, c, g, or t
  misc_feature (45)..(45): n is a, c, g, or t
  misc_feature (47)..(47): n is a, c, g, or t
  misc_feature (180)..(180): n is a, c, g, or t
gcgctggaccccaggtctccgagcgaattccagcntgcaggntantnaagcgacggcattagtgagattgagagagactttaccccgccgtggtggttggagggcgcgcagtagagcagcagcacaggcgcgggtcccgggacgccggctctgctcgcgccgagatgtggaatctccttncacgaaaccgactcggctgt

SEQ ID NO: 670777 - DNA, 1016 bp, Homo sapiens
gagcagatccgcgccaccattgagcgggacggctatgcacagatcttgaaggatctggtgtggcattgtcctggccatgtgcttgtggccccatgtgattgtgccagtgggacaggaaggacatccacagacaggtgggagaagaacacaatcgtcatcgtctctacaacgaggaacgttcaccggtgccgccagacgacgctagaccccgaagaccctatgcctgttgtcacgatcctccaagtagcattgtcatcatgcccgtgtgaccgatttgcgtggacacccgtctagatggttcacacccaagtagcaccggactcacgctgtactgcgagcagcggcataggccaatgcaagattccacggcgtgcgaggctcacggaattgcgcagatcgaagctatccctagaaaggcgtgacgtttcgcaacccagggccatgcgacaacgcctactctaggcaagcacacgcgcgatagtggaccagactacggcggggcgaagtcatagttgagtacttgttgacgcgccactaacccgagatcctaggaccgccctagctacggctaccctgtgggaggccgtgtttctgcacgcaagggttgcgcacctggctagatgtgaaccataggcatgtgcactcttgacagtaattcccttcatggcaaagcgtcccaatacggggcaacgtagttgacccacgtgaacccaactattcttccaggcttgctcgggcgcccctggtggcttcaagtttacccggtggcgacaactttgggactacaccaatcgtccaaactaacgcgtgcacctcaatttgggtgcccagttcaaacactttgaacaaaacggggccaaaggcccaaatcctcactgtagcgtccaatttgcccagtcacctccaaggacgttttgggccacccgtacccttggacactagcccgcctacttacaaaggaaacattgggcattcacaggtgcgaggtgggtgatccgggcacgacggacgacaac

SEQ ID NO: 670778 - DNA, 425 bp, Homo sapiens
ccgctcagccaactggtgatgcacttgttcgagaaatttggcaaagctgtgaattatgctattccgccttctccttcacctgaatgtggccatgccatggaatcgcgaccctctgtgaagcaatagtccccatacaccatgtactctgcagatctgtggagctcctctggtatgcaatgaggcttaagaactttgcaagtcccttggcttcgtgcatggggacaataagctagcagtactatgctaccgatgtttatcactcctctatttcagattgtttatgctctagaaggaccatgctataaagtactccagatcactgatggaatattttaagcaaaatgcttctaaagtcgcacagatatcctctccattggtcatcgatggacagaacactccatcccctgtgtctctcaacaacgtct

SEQ ID NO: 670779 - DNA, 256 bp, Homo sapiens
ttccttttaaatgggttggggatttttaaaatgcccaagaaaaacaccctttgtaatttggagaaattttcccccagccttttgttttcagggttttaatgggggagttaacccctcccaaaaaaggaagttggcaaaaacacccttttagcccccttttttaaatgaaaaaggggggcctaaacttaaaatttttataaaggattggaaaattgttttggggaaaattgaaaaaaaaagttttccttggatgcca

SEQ ID NO: 670780 - DNA, 360 bp, Homo sapiens
caagggattagacatgcagatacaggttgctcgtgagattctccactgcacattatagccaatgatgtctaaagtcgaaacaaagagagaatgctaaaacagcaagagaaaagcgtctagtcacctatgaaggaacccccatcagactaacagtagatttctcagcagaaatcttacagaccaggagaaaatagaatcatatattcaaaatactaaaaaaaacttctgccagtcacagatactatactcagcaaagttagccttcataaatgaaggagaaataaagtcttctctagacaagcaaaagcagagggaattcatcaccactacacaagaactacaagaaatgcctaaggaatc

SEQ ID NO: 670781 - DNA, 175 bp, Homo sapiens
gctgcggactactgctgatgcagtgacgacaaaagtatccctgcactcctcatggcgcttcccgccgttcttctcacatgcgtgtatgggtggcggggcgccgctatcggcgtgccgaccctgaacatgattatcggtctgacaacaccctcgtctcaccctgagtcattcgctc

SEQ ID NO: 670782 - DNA, 484 bp, Homo sapiens
  misc_feature (14)..(14): n is a, c, g, or t
  misc_feature (35)..(35): n is a, c, g, or t
cttgaccccctttngaaaggtccgcgcgccattgngttgataccccggaattcggccattatggccggggcggcattcgtgacgctgacagcattcgatccgagatgtctagctccggggacttagctgtactcgtgctaatatctgttgctggcctggaggatatccagccgtctccaaagagtcaggattacctacgttatgcagcaaagagtgcaaggctaaattgcctgaatcgctatgtgtatgatcttcatccatccgacattgcaggtgacttattgaataaaggagagagaattgaaaaaagtggatcattcgctacttggtttaaataaggacagggtgattcgatctctaaggccaccctggagttaccgccactgtgatgagaatcccttgacgttggaccatgtgaattttttacagcccaagatagttaagcgggatcgagttgtcaggtttttggagggttggagttccc

SEQ ID NO: 670783 - DNA, 351 bp, Homo sapiens
agaacacccaaagggccgttgccaaagccctaggagttttttgagccccataattccaaagatagaaacgttcattcatttaagtgatgtagatgttttgggtggtttattaaatgtgtaagtttataaaaactgatggggaaaaaaagtgctccaggtgagggtcgaactcccaacctcggcattggtccgctcgccctgtcatataaggaccgcgcgctaaccgattgcgcccctggagctccggccgcacccctgcgccggggtttttttcagtggtttataaccccgtgacctccccggagggcccccccctgtgttatatatgccaattaaaccttttgcctttca

SEQ ID NO: 670784 - DNA, 281 bp, Homo sapiens
taaaaagatggacgcattcgtaaatgcagagtgaacatgtgttcagtgcaattctggcatgaagttgtctttcttggctaaagaactcagtgatgctgtcaacgtacgagacagaacgatggcagacctgcagtactgcacgcttggaacatgagagagtgacaaagccagtgagctgatgctttgggcgaacttaccctagatgcgtattgaaacttctaaaacgtaggcctatgtaaagaagttgcaatcagcacctagtttcaggaagttcaataggg

SEQ ID NO: 670785 - DNA, 404 bp, Homo sapiens
accagttctggcccccactgctgatgattaccccaaagaagggaaatcagggtatcatagatgataccagcattccgatgttcactgcatgcacggcttcacaaccaccaagattggaatcagaactgagtgtccatcagcagatggctggcacagaaaatgtgggtgcatatacaccgtgcaatattatgcagctataaaacggaatgaaatcctgtcatttgcaacaacatggatggaactggaggcatcatgttaagtaaaagaagccacggacagaaagacaaattttgcatgttctcactaatctgggggagctacaaattaaaacaatggaactcagggagatagagagtagaatggggggaccagagttaaggaaggggagtgggggaccaggaact

SEQ ID NO: 670786 - DNA, 1329 bp, Homo sapiens
taagcatgtgttttctcctacttgggttctcttggtatttactaactttatctctattttcttggtggtttttttttatccctggtttttggtattaggtatagggtggttattagtccctggtcttcattggttcacaggtatttcttgaacccctctgggattccccaccggggctggagatccgagaagatgggcccatgttaatgcgcccaggtctcctcttcctcctctctctatcctactctccctctctggtgtaaaagacacttctatggcgagatggtagacatctggccaactctcccagttatctctccaccctcgccgagaacgaataatacttccactggggcctctcttaaatcccctttaactcgtgaaaaagtgaaagggaatttaaaaaaccatgtgatatttcaccctttgaaagaaggcctttattacagaggtgccgtgttaatagtggctttacactttcccgtgggcgagccattatggggggttattcacaatttttctttttacaaaaaaaaaatttttcccataaaccctaacgggctccggggccctgcgcctgtgttttttttacaacccagaaaaatcccgggtgtttggggacacctataacctcgtggtaggggtggcggatctgtgcacttccaaggggcacaccatcgtggcttccacgtgtggggggggaaataaccccttttgggactgcacaactgaccaaatatttgccccaaggtagaggtttacgcttggttgaactgtttacccccaccagcattgcttgcctttctcaaagttggccctgttcctgtcacactgttacttttcacgcgctggtgttccccatgagctttctaacgtttggctacaaggcgctctaaaacggaggggggcaatcgggtgacagcactacaatttaggaacggtaaatccggccctaatggaagcccttaaaaaggtggttctcctttaccacggcaacgagttgctacctgataattttgttacacaacaccgccggcgttacaaggcggcaacccgcaaaaagaaacagcaccagccaaaaaaaaagggggcgcgcgcaaaaaaatcacccgagagacgacgaatgacacaactcctttctatagaaggaggcaccacggaggtgaaaaaacgaggggggcgcaaaaactcggagggaccgagcagactgtcgaaccaccctggttgtggaaccacagcacctccaccaacagtgtgtcacagtccggtaagctgacacaaatcaacgaagatacaccgcgaaaagaccaaaagacgaacgaaagggcg

SEQ ID NO: 670787 - DNA, 1262 bp, Homo sapiens
ggtcgtcgtctgctgaataggacgccgtcgtcatgtctgcgcttctgcctactgtgatggtcgatagcgtgaacctgctcctagttttccttgatcaagaggaactaagtcacgacctacatgtcatcatgtagcctcatactaaactttgaagagctcactgacatacttccgttaccgcttgacacacagtgaaactgaattacatcacgccaaatgcactgatgtgcgactgctgtgagctcagagtcagtccagtagcggcgtcaataaaggcgatagttacagatagcgttaggggtacattatgaccgcccgcgtatgtactaccctgtgcctcgaaggctgcgcacaaggcacgtggtctcaaccccctacacgtgactgctcgcccgtgcatcgcaacactactcgagaccataggcatatcgtctcgacggcctagagcttcagacatcagatcccacgcacatactatgaatccagcataacgcaacaatagtcactccgcctccagtacacatgcggtcaatcggctacctccatccagctcagtggtcccaagtccgtctcaattccatgccagtccagcccgaggcaggccgtgttgtagtgggttggaacgcacgtgaaacgccggactcacggcccacaatccattgatgcttccattgcactccaactctagccccacatgaaggattgacatagtatcagcagtgttctactccgtaacaaaacactaaaacataaacccaatatacttagtgagattggtaagcttactataaataatttactcccctaaagcgtggcgtaacccggcaatttccgtagcataccctccaaaactttaaaggtcccaagacaagcgagcgcaccccattaacgtaacatgtcctcgctaaccatggaaaacaaagctaagacactgtacttgacaaccccatttaaatttcccattccgaccacatccttcgtccctctaagggaagagccttgtcacccacagggataaacccggtgacttatctgggccccaaagagtagcgagcaccatattggtccggaaaaagaaacattccaccaagaagaaaaaattgataaggcccttcaatagaagtgccccaaacaaagtcattatggcagcccaattcaacacccgcacggttaaccctcttacttgctacacagtaacgccctaaggtcctaagaccgaccgtgaagccagagatacttccccatttgtaaccactgtaacg

SEQ ID NO: 670788 - DNA, 141 bp, Homo sapiens
  misc_feature (10)..(10): n is a, c, g, or t
  misc_feature (39)..(39): n is a, c, g, or t
  misc_feature (56)..(56): n is a, c, g, or t
ggccctcagntgagggaaggtacgagctccctgctggancctgggacccatggcanaggccaggcagcccggaggctgggtggggcctcagtggggctgctgcctgacccccagcacaattaaaattaaacgtgagctgca

SEQ ID NO: 670789 - DNA, 207 bp, Homo sapiens
cgcgagctgcgtcggctcgcggggggggcgggccgggcaccccgggcgcggaggagcgctcctcgcttctctccttcccccctgccgactccgccggacctcccgcggccggccgtatcgccctctctctgccctaatgaacgaccatggcgaatacacaggtcgcgaagggacgccctcaggatcttaagcgtcgcctgagccact

SEQ ID NO: 670790 - DNA, 368 bp, Homo sapiens
ttatgcccagccaaccatggcataccagtggtgcacaaggatcaacgtcacctaatgttctatcctcagcaaagacctttctacagcctccactaacaaccacagcctaagccattctattagtccgttcttgcactgctataaagaaacacttgagactgggtaatttataagaaaaaaaaaataggtttcattgactcgcggatctgcaggctgtacgagaagcatgataccggcatctgttcagctcttgtaaggcctcagaagcttttacttatggaggaaggtaaagcagaagcaagcacatcacatggtgaaagcaggagcgaaagggaaagtccagtgtgtgtgtgtgtgtgtgtgtgtgt

SEQ ID NO: 670791 - DNA, 470 bp, Homo sapiens
  misc_feature (37)..(37): n is a, c, g, or t
catctaggggatcttggctctgtctgcccaggctggnatgcagggcacgatctcgacactctgcaacctctgcttcctgggttcaagtgattctcctgtcaacctcctgagtgtcaggcctctgagcgcaagctaagccatcatatcccctgtgacctgcacatatacatccagatggcctgaagtaactgaagaatcacaaaagaagtgaaaatggcctgttcctgccttaactgatgacattaccttgtgaaattccttctcctggctcatcctggctcaaaagttcccgcactgagcaccttgtgacccctgcctctgcccgccagagtgcaaccccctcttgactgtaattttcctttacctacctaaatcctataaaatggccccactcctatctcccttcgctgactctctttttggactcagcccgcctgcacccaggtgaaataaacagccttgttgctcac

SEQ ID NO: 670792 - DNA, 176 bp, Homo sapiens
gctcaaactaaagacatcggctaatacatagcgagatgtgtgcaaagttcaggggaagcccagcaggtggctccacctaaccaccactacttggtggggcaggtgctgaaagctgcaggactggccacgacccttagtactgtcaactctggcttcctttacaagaaaataggagc

SEQ ID NO: 670793 - DNA, 676 bp, Homo sapiens
gggttacgggataaaagtttgaggccggagggagcgaggccggggagtcgctccagcggggcgctccagctccctcagacgtgggctgagcttgggacgagctgcgttcctgccccaggccactgtagggaacggcggtggcgcctccccaggaaaccggacgactgggtccagccgccgcagggaatgacacctggtgctcctacagccacggctccgggcgtgtgaaggcgagccccagaagccgtgccctgcgacgcccgcctgggcagcaccgataagtgagctgacgtgcaggagcctgcgaccacggtgcagggcccccaaagcgccagggaaccccgtgtgcaagacgaggaacccctgcgaggggtcgcaagggtcactgggattcccaagctggggacaggacacacccgagaggacgatagatcacacagaatgagcccttggacagcggttgattgggttgactttgctttaaaaagcgcaggggggtcgggagagagaaaggggaaaaagtggagcgatttgagagacattcattctctggaagataaatagtgggatgcgccgattattgtgggctagagggcgtgagagagtttagcgtttaaagtcaagagtggcttcaaagtgagaagtgggggaaaaacaagacagcgatggaagaatg

SEQ ID NO: 670794 - DNA, 144 bp, Homo sapiens
tgttatcaccccctcattagacggtgactggacttcagatctggtgatgctggaaatggctcccagcgtgagatgttacactgcacgtggagcacccagctccagagcccatcaccgtggagtggcgggctgtgtaccgagctc

SEQ ID NO: 670795 - DNA, 176 bp, Homo sapiens
tagtgtcttattaaaatcccaaactactgccctcctcctttatagggtcacactttactacttccttttaaaaatgttttttttattgtggtaaatacatgtaacatacattttaccattttaataatgttttaagtgtacagtgaagtggcattaagtacagtaaaaaaaaacat

SEQ ID NO: 670796 - DNA, 383 bp, Homo sapiens
  misc_feature (37)..(37): n is a, c, g, or t
  misc_feature (40)..(40): n is a, c, g, or t
ctctcagggggccccccttttctccctggctttcccnccnaaattcaaaagggatttccggccctggcccccccccccattaaatttaaattttttccccccccggggggcaaaaattttttttgggggggggggcccctttgggcctttttgtcccccttcccccaaatttggttcccccaccaggaataaaatgaaaccggcccttcctttttcccccccaaagggttttaaaaccctttcccgctcctttttgtttttggccccccccggggaatttcctggggaattagccccccggtttttttcccattctttcctaccccaagtttttcctctttccccttttttttttttttaatttttaaatggggccctggtta

SEQ ID NO: 670797 - DNA, 162 bp, Homo sapiens
agatgtgtgctgagctaatctgtcagtctactttacctcctgcctaagtcacatttcaaggcactagtccggaagcagcaccgccagtattaaagatacctcctccgaaaggacgaaggtacttttggcttaccttcctccatgtaccatcttaaggtatat

SEQ ID NO: 670798 - DNA, 429 bp, Homo sapiens
ttcatggttacagaaattaatgatcaggtaatcaagtatacaactagtatgtacaggtatatttatatagttaatacaaacagagagttaataaattactggaacattgagctaaaaataaaacagattttcatgtattcacatactgtctttctgcaagcttatctttctgaaatggaataaacctttcttagactattagttgttccaattgctagctaggcggaattgagcttttcttgtattatttcatttatttacttatttttttgtttttgagatggagtcttgctctgtcacccaggctggagtgcaatggcgtgatctcagctcgctgcaacctcagcctcccaggcccaagcgattctcccatctcagcctcctgagtagctgggactacaggtgcacacccctccttggtgcctctgg

SEQ ID NO: 670799 - DNA, 403 bp, Homo sapiens
gctgaggaaaaaaaaatcagtgatgcttgaatgaaacattaatggaaacttcaaaaacttaaatgcaaagagaaaagaataaaaaagacagaacagaatatccaaaaattgtgaaagaactacaaaagatgtaacagacatacaataggaatgctagaaggagaaaaaggtgagaaacaagcagaaaaatatttgaagcaataatgacaggatttctcacaactaatgacagaaaccaaagcacttatccaggcagcacaaagaacaccaagcagaataaatgccaaaaaaacaaaacaaacaaacaaaaaaccccggaatttaggcattcatattccaactgcagaaaatcaaagacaaataaaaaatattaaaagaagccagaggaaaaaaattgtctata

SEQ ID NO: 670800 - DNA, 412 bp, Homo sapiens
  misc_feature (410)..(410): n is a, c, g, or t
cttgactctgtggacttgccccgaattcttactgcatgaagttcagtaacactgtctcgggggctggattgggacccttttccggcagtaagttaatgtacttaattaaggtcacacagctcataatagagggaggctggaattggaccccaagcctaactcaaaagtggattatttttttttttttgaggcggagtctcactctgtcgcccagtctggagtgcggtggcgtgatcttggctcactgcaacctccacctcccaggttcaggcgattcttctgcctcagcctcccgagtagctgggattacaggtgtgtgccaccacacctggctcatttttgtatttttagtaaagacagggtttcaacatattggccaggctggtcacaaactcctgacctcaggtgancc

SEQ ID NO: 670801 - DNA, 410 bp, Homo sapiens
cgtcgacggcagctccaactgccatggttagacagctaatgcagcagttgctatagccagtgagatggctaaccgggctggacttcagctggaagaatgaaatactttgatgggggatgctctgctctcacacaataacaacaacaacaaccaaaagatgcacctgttggtctgaggattgccatggttaccagaagatgctattcaggcttccaagggagggaagcacaaacaacagaaacagacacataaggtttcatccatatatttttgcatatatgtacttgtatatgtgtatgtaacaataatatacaaagaaaagttatcaatttgaatgggggacatggtggggagggaaggtgggtggagggagaaggaggaaggtcgacgcggccgcgaatttagtagta

SEQ ID NO: 670802 - DNA, 464 bp, Homo sapiens
aggtgattggatcatgggggtggtttcccaattcttatgatagtgagtgagttcttatgagatttggtggtttaaaactgtgtggcacctgcctcctgccttctctggtcgccttgtgaagaaggtgcttgcttctctgttatggtttggctgtgtccccaacaaaatctcatcttgaattttaactcccacaattctcatgtgtcgtgggaggaacccagttgttggggggagggggcggtgattgaattatgggagtgggtctttcctgtgtttttctcgtgatggtgaatgagtctcatgagatctgatggttttaaaaacggtaatttccctgcacaagctctctttttgcctgctgccatccacgtaagatgtgacttgctcctcctcgtcttccaccacgattgtgaggcctccccagacatgtggaactgtaagtccaataaacctctttcttttgt

SEQ ID NO: 670803 - DNA, 229 bp, Homo sapiens
tgatgcgcagactcgtgtcccgaggcttcaaaacccgaacaatcttcctcctgatcgacggttgtagaagatgctgctgctgctgctactgctatatgtgtgtgtgtatgtgcgtgcgcgggtgcacacgcactgtgtgcgtgtgtgtgtgtgtgcgtgtgtgtggtgctgaagaagtggaggttgcttggccttccctactgggtgtggccctgatgaactcactgag

SEQ ID NO: 670804 - DNA, 150 bp, Homo sapiens
cgacgattcgggaactgcgagccgctctcacggaccgactctcagctcatggaggatcgccctgtcagaccctgctgccaaggaaaactgcatgatgcacctgctccgctccctgcccgaccccaacctcatcacctgggtaccgagctc

SEQ ID NO: 670805 - DNA, 1303 bp, Homo sapiens
  misc_feature (482)..(482): n is a, c, g, or t
ggcttaggctgacgcactcaggtccccggggcactgttcgcacacgacggcgggtgcatcccgtctaggtgcgcatcgcccgatgcggggaagtactcggtgcactcttgacacgggccgagcccagatgcgcgacacacacagaatcaggcgtcactatggtgtttcggcgagagatgtgatctgagatgaaccggaaacattggcaactcagaccctgcatacaggccagactactcactgtgggagaacgctgtagacacgtgtctcacaccatgagagtaagagaggctagactgtggtacataacgaaaaagagggaacgaactacgatagcgtgagacattttgagtcgctccgcacatggagagctcgcgttgccttcggattgaaatccaattgaaaaactccgggggtatcccgaattgggagcctcgttgtcacgtgcttgcttgggcctccctctccgagctgcgagcacnctatatgtcggaacgcgctgtaacatagctatatcgataggtctctctggcacgcatattgcccgaggaaccccagaggtaaattcctaagcttggggtcgaaaaaagcgggggccaacgaaagcgagcgtggagggggcgcggcccagcacgttgttgagaactgggcaaccccggcgtgaatccccttcgtgttaaacccgggtccagcgatatcgccaggttgccccatttcggaaaccggtggaacgccccgttaagggcaattgggccgttaggcacggggaacccttttgggggccctcttttttgccctatggggggggggccgtttgtcccccccgagtggtgcatttcggaaaatttgcccggcgaacctgttgcccggcccgttgggagccgttgggggcagcgcattgaaggtcaaattccggtggaagcggaagtttcctccgcgggggaacaccaggtgggggggaagaacttatcccgtttccattcgaagcattattccggaaatttaccggaacggcctttacacacccggaaaaaatttccccccgtgtggtcgcggaaagagagggggcgtagagagcgggtactctctcacacactttcccaacggtgaaaaaagaccccaagaagtggggagattttccacttaagagttgggtggacaaagaggcgcgaaacccgacgcgttgttttccgcaagtggcgccagagtgtttgtggggcttgggaacaaccgccgataccgttgtgcgccgtctctaagaaagtagaggagggttgcttttcacgtagggggaaaccaaatt

SEQ ID NO: 670806 - DNA, 148 bp, Homo sapiens
tcccctattctgagcccataaaagacccagactcagctgcagtgaggagagaaatcaccctgctgtgggggttggggaccactccctgcatcccctctccagtgagagctgttcttttgctcaataaaattcttttctacacatcctc

SEQ ID NO: 670807 - DNA, 320 bp, Homo sapiens
atgtgtatctcgataatagatacttgcttctggttctgagtggatgctgaaagagccgtggagctacgccgatgcaggtgaaacaggaagcaacactgaagcccgaagaatgagttcacttgtaatctcgcctacgctaagcgcgtgaagcatgcagaggaatgggaacgcttgtgtgagagcaatcgcgtggatgccaagaccaaattagaggctcaggcttacacagcttacctctcaggaatgctacgttttgaacatcaagaatggaaagctgccattgaggcttttaacaaatgcaaaactatctatgagaagct

SEQ ID NO: 670808 - DNA, 407 bp, Homo sapiens
cggtccacgcgcctgtgtgtactgtccgcgtcacagagtgtacagatgtgccctgtacaccttctgacatgtgagaccgagctctacacggtttcagtgacctgacctgtgaccatgtggtgattccagctcagctaccttcctgtggtacaccacaattacatgttacacacacctggtctgtcacagacccttacaccagggcacacacgcaggccgtgtgctgtcagcctctttgcttgtgagaggtctttccagacgtcttgggccaggggtgccctgcggctcttcgtgtaccctaggcacatgcaccagattccgtatgagtcacgctttgtgcacaagggtctagacccctctggactgttccatatagcaagcactaagggtcgggtgtttggtcttcg

SEQ ID NO: 670809 - DNA, 477 bp, Homo sapiens
gatctatcctggagagtcgacacgagttacttcgaagacgtaggatagcagcaattccatgaacgctctgctggagaaattgtggtctgtggtctaggattgagggattctgtagaacctaaaacccacgatggaaaagaagacacattacacacatgtggatctttgtctaacaaatcatttacatggcaaatataaactgcttatactcattagcatataagatagcatagagggcaccaatttttacccacctcagttttcatcaaagaataccctaagaaatctaactcagtgacaggtgagatttaacaccgtcagtgagaactcacatgaatatggacatacaatacataccagattcctatatatatgctcaaacccaccttgctttacccaaatagtgatcaatacatctttatggcaacataggaccaagcataatcaccattatagactgcagacattaaaaaaggc

SEQ ID NO: 670810 - DNA, 364 bp, Homo sapiens
ggtcgctctagagtatcccgctccgacggggtggctgggattacaggctcacgccaccatgcccagctagttttcttctttattttttgttgagatggggtttcaccatgttggccaggctggtctcgaactcttgagctcgtgatccacctgccttggcctcccaaagtgctcacaggcttgagccaccatgcccggccctaatttttaaatttgttgtagaagcaaggtcttgctatgttgtccaggctggtctcaagcgcctggtctcaagtaagcctcccaaagtgctggggttctaggcttgagccacctcgcctggcactcgcaccgtttttctgtgcatgcatctccactcccactg

SEQ ID NO: 670811 - DNA, 1421 bp, Homo sapiens
gggcagcctcacctacgagacctgcagccccgccgaccagctgaggctccccgtgctgtaggacttatacagtctatggccacgtggacagtgcggctgcctgccctccgctgccttccgcccagggtcccttcaggagggtccgtgcgtttttgcatgaacgacccaagaggggcctcctggctgctccacttcgcagccatctcgcattttagtttacacctcttccgtggttcaagcagatgttctttctctatcaggcctggtggcatgttgccatggggtctctcccaaggcaacgtgcgagtggtcccaggaccatgtgaggctttggaatgactacggggtgatccaggagaaatgcacgtggagaggccacgcacgggggccggagcatcaggcctgacatattgcgaggtagcatactgtcctagggatgtcccgttgtcgtacgaatgggactcggtaccggtcggtcgattggcgcgatgcgggggaaagggcgtcaccgtccccagctaggcacccctagagaagcgcggacctgaattccattgccagtaaagggccccaaaacggccctaccacttctcaccttcggcagttctattccactgcaacccccatatttcacccgttaaccccaggcacgccccatgtgtcttctccacaggggaaacgcacttgtggcactgaaattcgcaaagcaagcacgattggacaatcgcaccaatatccctggcgtgccactccggagatgaagagtccccaaccagcaccttggttttgcacaatggttcagcctgtgtggagacaccgtgtggaaagcccccgtggaacctggggcgtaatggcacagtgtccgcaactttgactcatttggttctcacatataccccctgtcggttcacccatacacggcccttcaatgtccggtaatcctggccggcattaccccgtgcggtccatcccttgtcagtttacctgtctgtccacaatgacatatggggatagctgcagaaactcccgccgggatacaaaggggcgaaatggctgccaaagtacacacaagtgtctgaatgccggaagcagcccaacataagggggccacaccacccactgttctggcgggcaatatcccttgcattatttacccacaaagcgaccactgccacccataccatctagtataccccatagtccgcgaacaagcatggcgcgcatccacccttcttaattcattacacgttacgactgtagcgccatgtggacacaagggcaaagtgccactaggtaaataggacgtcgtatagacggacaaacacacgcgaggaaattcacctccgccgacagaaaggcccaagcatgaccggccacagggggtgcaaaccgatctgacacactacctggtttgacaaccc

SEQ ID NO: 670812 - DNA, 1455 bp, Homo sapiens
  misc_feature (1454)..(1455): n is a, c, g, or t
tatcatttacgggggaaggcgcttggtgaagtaggccttatttctcttgtcctttcgtacagggaggaatttgaagttaaatagaaaccgaccgtggattacctccgggtctgaacctcagatcacgttaggactttaatcgttgaacaaacgaacctttaatagcggcgtgcaccatcgggattgtccgtgatccaacatcgaggtcgtaaaccctatttgtttgatatgtggacctctaaaataggatttgcgcgttttactccctagggataactttgttcccgtgtggctcaagtatatgggattcaatgtgagttattagtagtctcgcttgtgaacgtggtgtgaaaagatctttagacagtgttacgtgctctcggaaggtgttgggttctcgtggcctccgaaggctcgccccccaagcgcgaaaaatttttataatgtgcgaggtgttgtggatagattataggaaccgtggtggagttgtggtaagagtaactgtgtgtggctattcatatcaatattaaagtctccccataaggggttctctctgcgatacttgggcggtggtattatagccccgactcttcttacagcgggcgaggttccaatttccagctgggttaaaaaagttaagaagaacaagttgtgagaccccctctggggagcccattctattacgggtcccctaattttcagggacaccccggcttgttttttgcgtaaccttgtgccaccgcgttaggggtcccccggcgggcccgtttaacccttgtggttttcccctggggccagggcggggggccctactaaataaacggcgggggaaaggcccacacaaggcgcgtgcaatgtttgttgttggtggtacataaccagggcgcggcgggggcaaaacacattgtggccgcgaagagtaccccttttgtaaatcttcttgtgtaaaacacccctttcccttttattgtatgaacaactgtccccgtgtgatgtttgagggttgttaacacccaggacgggggggtcacaaaacactgacaccgcggtcgggacagaaatgagtgacaccactcatgggggcggcgacgacaataggttgacacaccacacacaaggagttgataaaacacatgacggacgaagcgccttattcggcgggggaaaaaagaggtgcagtggggactatatatacaaaaaaacaaacatgtccgcataaggggaaggagaaacagaaccccaccggcggaaggtggcaacaaaataatttaggaaataaaaaatgagtgaagaaaacacaaccacacatcacaaacaaagaagaaaagcgagtatctgtgatttataaaagaacgagcagcactgtaatcatacaataggaacgacgagccaagacaccctacctgcgtctttgttttcttgacacttactcatctacagtctataatacactnn

SEQ ID NO: 670813 - DNA, 379 bp, Homo sapiens
  misc_feature (234)..(234): n is a, c, g, or t
  misc_feature (289)..(289): n is a, c, g, or t
ccgctttctttggaggaaaccaccgcatcagatctgcgctgcggcagcagtgcatggctacgaaccgacctgagcgactggcatgcacttgagtggccactgttcgtgcaggagtacctgagtcgacacagtcgtagccagagcgtcgtgcgtgaactgcgttcgtggcagctgccgcccgaccgttgtggcccgtggggtttaccatctttgtggctgtgcttgccaggcctngctccagcctgttctcctggcacccggtgcttatgtctttggctttctccttccngatgaccgaggcactactggtgttttctcctgagagttcgctgctgcactccctctcacggaaaggccgagcacgctgccactgggtgct

SEQ ID NO: 670814 - DNA, 478 bp, Homo sapiens
  misc_feature (2)..(2): n is a, c, g, or t
tnttaagagaagatgaaagtaaactaaatccaatctaattccaggatttaacaagtcttgcagacgaactgaaaacccctaagggtattcaaatgccttgttactcaaattgtggccggcagactggaaggcagtggcatcacctggaagctggcgggaaatgcagaatcccagtgtggtgtaatatgaaatatatttggtccttgtccccaggtcctgccacatagctcctcaaacccttggaatttcctgataggaatgttgtttgttattcataatgagcccatttgatcacacttcagtggatgctaataaggtgacttagggtgggggccctcagatagcccaggttggagctggtcaccaggaacaagttattagaggattagagggttgggatttttgagccccacctgctgacctccaggaaaaggggggccatgggaggctggagaccaagctctataaaaactctttt

SEQ ID NO: 670815 - DNA, 287 bp, Homo sapiens
caacccatcctacttctgactactctgggaacctcatacaagaggaatcatacaatatttgtcctttcgtgactggcctgtttcagcgcaacgtattcaaagttcatccatgttgtaacctgtcaggattcccttcagcatcttaaaaatataatttgaatatagttttttttttttttccaagaaaccaattatttacaacctttacaaagtcctacaatctgccacatcagttttacacggggaagggaattagaagaggggaatccacgtcaatcacagacttc

SEQ ID NO: 670816 - DNA, 1460 bp, Homo sapiens
caactgaacgttgcatgcaaaggacagagcgatttacatggactcagtcagatgcgcagcataatgcagagtagacgtcaatggctgatggtgacaagactgtgtatacgaccagtggagtctgaccgacatgcaatgttccgcaagccaggacctgctcggtctgtcgtgatgttcatgcgatgtaaggcagatgaggggcagagagaaaggcaagagaacctcacacaggagagctcagtgagcagtgtagtgacagtcaactaccgcgagcgatattgcgccgcaggcgcacagaggcatggctgtgatgacttgcaaccaggcactggtgtcgcgctgcaggctccctgcgacagacaaaaggccacacacaaagtggcgcaaggcaaggtatagcgacgccagacgtctctcgctctaagatgtgaggctggacacggaacatatacaccacctacttcttagacgcgatgaagggatcgagagaacgctggcacaagtgtataggcacagtagaccacaatatgggatagcgcaaagcatacgcccttcccatgacgactgccataaaaggcaaccgtggaggcaacttgcagacttgattccatatgtgcccgttcctttccgcaccttgaacccagtaccgcccgaagcaccaagggaaacggttatccccaatcccccgatgggacgaaaccaaaaacgcgagccgcatatcaggggggcgttatagagcacagttatccataggaggccacaaacgtgcgcacaggcacgagttgtggcgccgattgtgcatgataacacttgggattacaaccaacacttatggagcgaccaactttcaatacgagacgtttaacccaaacagatacccaatatacgcctatatataaatcataaccagattaaagtttccaccgaagtcaaacgggcaaagtttacctattacaggcgaccgcaagaaaagacattgacggcaaccttcaccgctcggcgcaggaattaaacggaacggctggaacgttacagacccttaaacggtgatgatgtgtcgcccaacggagaacaacgattaacggcctggagcatacatatcacacggcagctatcacaccacaccgcccgtctaccgatggcgacgacgcgatacacttcacactaggagttcagacgcggattaacacttaataccaatgacaaaagtatcatcagggacagcaccttaaacttaatccctcgccaagcctaaccttggagagggagaacaatcaaaagttagaacatgacccgattaaaaagagttcatgaactactagtaaataaccgacaagatgcacatacacaacactacagcaaagaacgattctcccgatggggtcgtcccacacaatagagacttatggacttacaacagagcactcaatttggaccgccaaacaagtctaagggaactt

SEQ ID NO: 670817 - DNA, 982 bp, Homo sapiens
  misc_feature (322)..(322): n is a, c, g, or t
  misc_feature (365)..(365): n is a, c, g, or t
  misc_feature (368)..(368): n is a, c, g, or t
  misc_feature (375)..(375): n is a, c, g, or t
  misc_feature (391)..(391): n is a, c, g, or t
  misc_feature (424)..(424): n is a, c, g, or t
  misc_feature (427)..(427): n is a, c, g, or t
  misc_feature (455)..(455): n is a, c, g, or t
  misc_feature (459)..(459): n is a, c, g, or t
  misc_feature (483)..(484): n is a, c, g, or t
  misc_feature (515)..(516): n is a, c, g, or t
  misc_feature (550)..(550): n is a, c, g, or t
  misc_feature (580)..(580): n is a, c, g, or t
  misc_feature (626)..(626): n is a, c, g, or t
  misc_feature (629)..(629): n is a, c, g, or t
  misc_feature (631)..(631): n is a, c, g, or t
  misc_feature (638)..(638): n is a, c, g, or t
  misc_feature (644)..(644): n is a, c, g, or t
  misc_feature (720)..(720): n is a, c, g, or t
  misc_feature (844)..(844): n is a, c, g, or t
  misc_feature (936)..(936): n is a, c, g, or t
tatgctaacaaaataattattatattcattgattctaagacaaacttttttttaccttttaaaatccttgaaattggcatgtattatacaatccatggcatgtcataatttaatagaactttctttcataggatacattaaaaagtaatgttgcgaggcacagaaagataaatattacatgttctcactcatatatagaagaaaaaaagtagatctcatgaagatagagaatagattggtggtaccagaggccaggaagagtaggggagaggaggaaatgaaaagaaagtgcatgatgggtacagcttcgatagataaatangacctactgtttgatagatgagtagggtgactatactttacantantctaatngatacttgaagatagntgaaagaataccttgaatgttctagcatagagnaangacacatatttacgatgatggacatccncaantacactgattcgatctttacaaanntatatgaatgtcatatcacatactcctgaanntatatacgtctattattgataataataatacgtngattgcataatcaatgatgccttagacttngatgaaaacaatattgtttagaactgatcaaaggatctttaagaangangnatagcantgccangacacccttgaaggtaatggatatactacttcacccttatagccacctgatgacccacatttttggattggtcacngagaattcagagcttaaaacttggcttgttgaccggtagcgtaataagcttggtggcacaaccctttttatggtttaaatggcagcaatgttcctcaaacactgtaaccgttgaagggcttcgnccaaaatttaaactatttcttacggacactacgtctaaaactctgtataaagattataaaatctctgatatgcctctactccacctaacgtntatctgtgggcgtgcgcctttccatataaattctactgaggtgacg

SEQ ID NO: 670818 - DNA, 360 bp, Homo sapiens
gtgttagggaacaacgctcttggggacgggtgcgagatttaagattagtgaggaggtgccctgcctcccagaccctggggcacttgtttatggggttccaggaaacagttcttggcggttggttcactttcttgattgcagccaggaaatgcagtccctgtggcctgtttttttgcacaagtaggaccttagaaaaaacactttttaaaaatgacttttccttctttttcagataccctcaaaaagttatggattacttagtatggctgaaggcatcgtgacagatgctccaacctatacaacaagagatgaactggttgccaaggtgaagaggagtttagagcataagtttgatatttg

SEQ ID NO: 670819 - DNA, 567 bp, Homo sapiens
agaattgctttaagaccgaatgtgtggttgatctcagaatatgtgccatgtgtagatgagaagaatgaatattctgttttcaggtggagcattctgtcgatgtctgttaggtctgtttttttcaagtgtcaagtttagattctagatgtctctcttagttttctgcgttgatgatctgcgaaactgtcagtggagtgctgaagtctcccactaatattgtgtggctatctaagtctcttggtaggtctctaagagcgcgcttaatgaatctagatgctccaatgttgggtgcatgtatatttaggatagttaagtcttcttgttgaattgaaccctttatcattatataatgccctttttgattgttgttggtttaaaggctgttttgtctgatataagaatagctaccccagctgggcgcagtggctcacatcttaatcacaagacgcagtggtggaagttggagcacgatgcccaccataattaagtccttatcctgccacagagactgacagttagttatctatcttaatggttgcatttctaaaatctctgagatgaaaattc

SEQ ID NO: 670820 - DNA, 346 bp, Homo sapiens
gtttctcctcatgaaaagcagtccctggattttgggccatttgaacatgctttcctgttggggggtatgtcactagggcagtggggagacgttttaactttgctgcttcccaaggatggctgtttataatttggggaaagatagggtgggaggcagggcaatgcaggatcccaatcctcatttttcttttccggccttaaggatggaactgctgcttgtcctgttcaagttgctggagcaggggtcatgttaggcccggcctgtagctccttcctgggggctatttttactttccttttggatttttggtttgtgaaaatgatttaataaaggggactggctttta

SEQ ID NO: 670821 - DNA, 1921 bp, Homo sapiens
tgagaggaggggtaaatatatgtttagagcacctttcccagaatctcaggaatgtatagaccctcacccccaaaagataaaagaaaaaaagaaaaaaaaaaaaaaaaaaaaaacaaaaaaaaaaagaaaaaaaaaaaaaaaacaaaaaagaaaaaaaagaaaagagaggaggggcgggcggcccaaaataatcatctcccgccagggggagcaccgatccccagccaccacgagttactctctgtagctgagaacagagaggacggcgacgacacgaaggagagaagaaggcaacgccatatacaacatcaaaacgcgacagagaggagggacacacatgagaaaaaacaacaacaacaaccacagagaggacgggcgagagaaaccagccgagcaccacgagagaacaaacacaaccaagcgacagaaaaggcaagtcccctgcaccactcacacgtggcagaggagcgcaccgaggaacacgcaccacacaagaagcatacgcgcagcgccaccaaacgacacaacacaaccaactcacaccaaggaacacgacaaacaagaagaacacaccgcacacgcgggcgcagagcgagaccgaaccaccaaccaacacaccccacccctaaccccacaacgagaacagacacacacaagagcgacagacacaacacacaccaaccaaggcccagagacatccacaacaaacacacacacgccagcgcaagcacacaagcaagaaaccaccaacacgaccagagaccagacctacacgagacagagcagcgcgcagcaacgagccacacactcagcagacatcgaaaaacaagacaatcaattaatcataaccgtagaccgacagaaggagcaggacaggaacatacaatacaccaaaaccgcaggaccacccaccgccacccaaggagcagacgaacagaacacaccagacaaacacacccgagcacaacaccacaccaccgaaaaaacaaggcaacacagacaacacaaccacacaccaccagaaaacctgagaacacacagcacagccagacacggacaggtcacagaccaagacgggccagccacacgagcaaactgaacaacagacacaaagcacaacacacacacacagagagaaagaagcaaggaaacgcgacacagacaagtccaccacaaagacgacaccacaaaacacacaacagaacacacaaccacacaacccacaaaacacccacgcacagcagcaaccctccaccaccagaaaacacagacgcacaaaaacagcagaacaccaccagccacatagcgacacgaccacccacacccacacaagaccgacgaaagagcaagatgacacgacagagcaagacgaaaaaagcgcgcgccacagaaaaaaccaagagagagagcagcaccaaaccaggacgaaccgagggagaaagaccacagaaacgagagcacagacacgagacacaagacacacaggacgacagaggaagccgcacacacgacaggagagcagacgcaaaaacaagaacgaagacgaaacacgcaacgaaaacgcacgacagagaacacgaacagacaaagcaaggcgaagagcaagcgcagacgacagaacagacggagcaacgaagagaaacagacgagaaaaaacgcaacaagcacagacgcgaaaccagaagaacagaaccaccaccgaacaccagaaccacaaaaagaacgaaaggaaaaaacgaaaaaagaaaaaaaaaaacagagcgtacacggacgcacaagccacagacaagcgaggtggccacagacacagaggactaaatcacaaaagaacgaccaagaggacacgagaacgaaagaagtacagaacaacaagaggcagacaaaaagacgaagatacaacagcaacagagagtgaaaagac

SEQ ID NO: 670822 - DNA, 134 bp, Homo sapiens
cagtcttctcccatcaggttgctgagaatgtcattatttcatttctttttatggctgagtagtgttccatggggtgtgtgtgtgtgtgtgtgtgtgcacatgtgtacctcacatgttctttatccacttgttgg

SEQ ID NO: 670823 - DNA, 446 bp, Homo sapiens
aggccaatggcctccagccttgtcttggctaaagtccatagcaaaagtattgttaccagggggtccttgctcccagagctcccaagatggtggccggccgcttccaaaatgggggtggccacttccaagatggtgcaagcctcgtgttctctgacctggggttcttggcctcagatattccaaggaatggaatcttgggccatgcggtgagtgttttagctctattagaagccctgggtcacggaagagaactgtggaacccagtgactagtgttcagctcgattaggatgaacccaggcacatagctgtgcaggaacaatggcaagcctttagcctgactgggagtggcagtgggtgcctcgctggttcaggagcacagcagacaccctgctggatcccgagggatggaagtcagcagcgggtctgcaatggcagcaaacagcag

SEQ ID NO: 670824 - DNA, 128 bp, Homo sapiens
gcatcaaaacggctcccgtactatgactttctcattctccctgggtacatcgaggtcactgacagaccaggtggaccatagacgttctgctctgaccaagaaaaatcactcattaaaaccccagtgga

SEQ ID NO: 670825 - DNA, 309 bp, Homo sapiens
gcgaaaccccgtctctgctaaaaatacaaaaattagtcggtgtggtggtgcatgcctataatcccagctactcgggagtctgaggtgagagaatctacttgaacccaggaggcagaggttgcagtgagctgagattgcaccactgcactccagcctgggtaacagagcaagattccctcaaaaaaaaaacatttatttttaaataaacaggccaggcgcggtggctcacgcagtattcccagcacttggaggccagcggcagttcactcaggtcggagttcgagactagctcaccacatgagaacctct

SEQ ID NO: 670826 - DNA, 118 bp, Homo sapiens
tctgcacgaagtgattgttcccctggttcactctacttagtcatgtccctaccgatgtctcttctccactggatggaggaaaaccaagccgtggcttcctcacatccccttcggggca

SEQ ID NO: 670827 - DNA, 215 bp, Homo sapiens
  misc_feature (42)..(42): n is a, c, g, or t
caggggtcagttcccccccccccccggtcccaggcccaggcngaagccagggcccagctttcctccctgttcctgtggaggatgtttacgcccaggcgagctcctcgccctttgaggggccatctccccgacccctgcccagccctttgctccccccccaaagggggggggagggggggctttatattttctttccaaataaaattttcttttta

SEQ ID NO: 670828 - DNA, 341 bp, Homo sapiens
  misc_feature (18)..(18): n is a, c, g, or t
  misc_feature (99)..(99): n is a, c, g, or t
  misc_feature (106)..(106): n is a, c, g, or t
  misc_feature (116)..(116): n is a, c, g, or t
  misc_feature (139)..(139): n is a, c, g, or t
  misc_feature (213)..(213): n is a, c, g, or t
  misc_feature (249)..(249): n is a, c, g, or t
  misc_feature (329)..(329): n is a, c, g, or t
ctattcaaagtcattctnctgctcactgagataaatgcgtatctaattggctcctttggaaaggctaatcagaaactcaaaggaatgcaaccatttgtngcttgtntacctatganctggaagccccctccccactttnttgtcccacctttgcttcaagttgtttggcctttccagaccaaaccagtgttcaccttacatatactgattgangtcccatgtctccctaaaatgtataaaaccaaggtntgctcggaccaccttgggcacatgtcgtcaggacctcctgagggctgtatcatgggtgcgcatccttaactttgggcaanaataaacttcct

SEQ ID NO: 670829 - DNA, 701 bp, Homo sapiens
ctgatgttcgccgaccgtagattatgctctacaaaccacaaagacgtgggaacactatacctatgattcggcgcatgagctggagtcctaggcgcagctgctaagcctcctttattcagagccggagcatgggccagtcgaggcaaaccgttcataggtacagactctatatctaacaacggttgatcgttctacaaggcccatgcaatttgtgaataatgcttgcttcataggtaatacgccgatcataatccggagtgctaaagggcgatcgtgactgagttccccctatataattgcggatgcccccggatagtggacggttagcgcccgtctgtaagaacaactatagagtctgcgtgaccctctttattctcccgtcgtctccatactccgtgctcggcattcatgcgtagtagatggagagcccggtacgcagggaaacaggttaggaaccagatcttataccgtctctctattaggcagggggaactaattcccacgccgggaagacctccgtgaggaacgctaaccagtctgtactccatgtagacgcttagactggtgtcctgcctacgtatcttaaggggccatccaagtttcaatcacaaccaaatttattccaattatgaaatacccccttagcaaggacagtctgaaggaaacccgtgttacggtacaaatctagcactaaaacaagg

SEQ ID NO: 670830 - DNA, 185 bp, Homo sapiens
catgttggcccacgtgtcgacgatacggaaaccacggagtcgggtgtgggggagaggtgtcacacccccgcccgagttgtgcatgtgcagttgactggtgggagtgggacagccatgaggtctagggaacttggactcggggaggctacagacctcggcgatatcctgctgagggggaaagcgcg

SEQ ID NO: 670831 - DNA, 343 bp, Homo sapiens
ctgttattctatcctcctccccgcctcaggtccacggcctgccatggtgtattaggggcagctgtgcctgcggcagcattggcctttgcagcggtggcagcagcaccatggctctgcagcggaacccccagcggcttaagccatggcgcttctcacggcatacagcagcagcgttgctgtaaccgacaaagacaccttcgaattaagcacattcctcgattcccagcaaagcacctgaagatgaccgaaatgagctttccttaagcagcgaggtgtaggtggggaccttgatttccccctttgaacaatcgggttaggggggctaaaaaaaggctaaggcccc

SEQ ID NO: 670832 - DNA, 259 bp, Homo sapiens
  misc_feature (39)..(39): n is a, c, g, or t
aaaaacctttccatttaaaacctcacctgcgggggattnatttaaccctttaaggggggggggggcgggggggtgtgaagccaccagagggggggggcctcagggggccctagatccagagcccctccccatcttcctctctctaaaaacaaccctaccccccattgccaccttcactcctgtgtctccagctgattagcctcagactcttcttttattgtttttcttttgtaaataaaaagcaccgggttccaaagta

SEQ ID NO: 670833 - DNA, 710 bp, Homo sapiens
ggtctggaacctgctcaccccttgctcctacagccgcttgagtcctccaccaccacctgctgcggccccgggaacccctcaccttactcagcaagaccccaccgggagccctttatgggggcaccacctaccgcttgtgccccgccccccggcccagttccccacctaggggccctggccccagactacgggctgacaggtagaggggaacggggggggtcggggcaaagtctccatctccccttcctttaaccaggtcctagggctagaggttagaaagccagggctggaagggccaaaggtcataacctcagccagccacctactgaggtacatggaacctgggaacagaagcctacaaacccccacaagaccaagcatcacatggagtgtagggtacactgggagagcagaggtacacagcctctagagaaagggagaggggcgtgtgcattgggagtgtggctcatactcggggggccatggcgcctcctgaggtacaccttatgcccctggtaagggcctctaggccttggggactgactaccccaggggtcaactaaagccagaaggcaaagtggcccctcccgtacactagcacccaggtctcatgcgctccgaggctgggggacgaagggctcaggacagcgggtccatggtctattatcgcctttaattaacccagacctttgtactttacgggtcctcca

SEQ ID NO: 670834 - DNA, 604 bp, Homo sapiens
  misc_feature (590)..(590): n is a, c, g, or t
atcgtgatgggagccaaaaaaaagaaagaaagaaagaaagaaagtactggcggaataccggggagtaaatgataaaagaaatcgggaaggtaggacataggcttgtgcaaagatttcaggactaaaacaccaaaagcaatcgtaacaaaagccaaattggacaaaggggatctaataaaagagctccggcacagcaaaggaaacgatcatcagagtgaacaggcaatctacagaaggggagaaaaatttggcaatctaaccacctgacaagggtctaatatccagaatctacaaggaacttaaacaaacttataagaaaaaaaaacaactccataaaagagggggtgagggatatgaccagacttatgtggatgggtcatatatccagaatccatcatatttaattctttcaaaataaggagctattacaagaatagtttacaagtcagctcggactgcacaaatactggacacaggaaaccatttttacaaatacatatgtttccttataatacggtaatacagaaaataggtctgtatacttcctacgacaaattgggtagtctcttttgcccaatcaaccatagtgngtacggagctcgaa

SEQ ID NO: 670835 - DNA, 490 bp, Homo sapiens
gcgtgatctgcttgtccagctggatccattcatgggacccaggctgttccttcatctgcagggtcttgaggcaggcaatggcatcgtagtacttggcagcagtctgcttcacatgcccctggcggtacaaccggctgccctactggtggataagtggcactgccttcgccttgtcttcgtctgccatggcccatgggtcctgctggtacgtgccagggctctgcaccttcagcatctgcatgtgtaagatgaggcgctgagggttctgatgcagggcgtgcacgtcagcatggtccactgagctgtgttcacgcatctgtgcaacaccgcagcatgagccgctggccctacacggggtcctagcccaccgcgatgttgcggagactctcgagcaccagcgggtacaggaccacatgctagatgtcacagatgaactggacaatctccccttctcgcatggtgcacacgatggtctcccacacatgcagct

SEQ ID NO: 670836 - DNA, 934 bp, Homo sapiens
  misc_feature (490)..(490): n is a, c, g, or t
actaaggtccttccacttctgcgtcctgatggtgtagcggcccttctcacctcctgagtggcgagagacatttgggttgcacagggtgtgctgatggactactggcacagagattcccgacatctcaggtaccgttcctccagggggctataacattcgtgggactgcggccaacggctatggtagttgtcgctaccgtatgctgctccttcgaggacaactgggcctcttgactagcattatgtgtatcatcccgttcctcccttgtaccatgtgtgcctctgccactgcatggatgaactacgactggccgctgtgtgcgctcttgtgctgtccagtgtgatggtgtggtcagtgtcctggacgggccggcagttatttgcggctgtccatagcctccgtctcccgtttgactgcctgagtccacacgaggttccgaacaggccccggactgtccgcgtcctggatggaacgtcgtaagcacggccantattgttccccgactgggccgtcccccgagaatgtaacggaaatgcccatgttgcagaatgtctctggccatgggcccacatgacttgagggaatcaactcctcaaaaacatgtcaagcgtccaacggttgcagcatagaaatacttggagggtactttgtaattactacctactatactaggtcatgtccatagagagaagcccccaagcttgaaagcgcgcgagggggccctgtgtgaacccatgtgtcccctgctcggtcgcgcccgggtaggctctcaaggccgttgtgcgccgtctgtgtcttggtgcgggacggggggtggaccacctgcttcggcgtagccaggtgatccagccaaggcatcggggattgttgggggggcttgccttgaagcctcacttgagggcgagactgtgctgaccggccgtggtccccccgg

SEQ ID NO: 670837 - DNA, 388 bp, Homo sapiens
acacgatccctacacacttctccctctgctctggacgaatattaggccagcggcgccctgacgccacgctgcaccagatagcgctgtgccctgcactgccttaaccccctcggtgtgtgtgcccttctcactctgtctgctctctgtacatttggtaccgtggagcagggcaggaaccagatttgactcatggtttaccacaaatctcagctttgctcaccgggcggctggaggctctcctccctggagccccagcttctgctactccttgacccaagcccggctgctaagccttcagtcctcccaagccctcacagctgcttcagcaatcctcatgagtttggcatgtgccctttttgccctctgcagagcccctcccattcctttg

SEQ ID NO: 670838 - DNA, 1123 bp, Homo sapiens
gcatgcctgtaatcccagctactcaggaggaggctgaggcaggagaattgcttgaatccgggaggcagagattgcagtgagctgaaatctcaccactgcactccagcctgggtgatggagcaagacactgtctcaaaaaaaaaaaaaaagatattattgggtctttcatgagttgtacagggggatttcccagaggctacattgacattgtgttttttaatttgggttgtttatatacggacagaggggtctggcatatgtggcccagactgggtcttccaactccgggcctcaagtgatcctcccgccttcacctcccaagggggctggggattataggttgtgagccattggcgcctgggctgtttggtgacatgtgatgttgaaacaggttggagtatagaagcagatatgggaattaaaccagaatattaacccagacttggaagagattggcaaaaaatacaaaaaaataccactggtttacacttacttattgggttgggaaaaatggtagtatatttttcattaaaagtatgtggtgtgggcggggcacaggggtcatgcatggtaatctcaacgctggggagactggaggtggggaggatcacttggagatcaggagttcgagaccagcctgaccaacataatgaaaccccatctctaataacaatttacaaaattagctggggctgggatgagcgcaggtgggatacacgcctggtaatcccaggcacatgggggagggcaaagggcgggaccggatcaatgagggtcaaggaagatcgaagacccactgcggggaaaaacatgggtgaaaacccacatatctaattaaaaacagaaacaaaagaggcggacagacaaaaaaatatcccgcgaggggggagccaccaggaattacgcaggcaaccgcaggatagacaggtgtacacagagggggggccccaaaaaggtagagacgatatataaagactaagacacgggcccgctgcgttataacaaagagcggaaacgggaaaaaacgtcaggagggaggaaatgtgggggaggaacactaataagcggaggggggacacaagggacgaacacgacagaaatgaaaggcccagggaagaaagat

SEQ ID NO: 670839 - DNA, 432 bp, Homo sapiens
  misc_feature (26)..(26): n is a, c, g, or t
  misc_feature (144)..(144): n is a, c, g, or t
  misc_feature (311)..(311): n is a, c, g, or t
  misc_feature (324)..(324): n is a, c, g, or t
  misc_feature (361)..(361): n is a, c, g, or t
tgaaatatttctgagctttgtttacntatatgtaacttttagtaagaaaaaatatcatttcaattggaattttagagaattttctcgatgaacgggctattttattaaaacggggtccgcggcactggtgaggggtcgctgtangcccctcgctctgcttggggttggacttgggtgccaaaactttgggattcaagaaaaatcaatgagtgatttcggttttgggtaaatcccctgctttgcccgccggacccgcttgtagtgtctaaggtaacctgttggggttgcgcacagcccaccgcgtggatccnccgcaacgctganccgaacgagtaggaagcctttctccccaggcacgtgncttcagggcgtttcccattgaccagtttgaccctggtttgaataaagagaagtgcgtttggattaaaaaaa

SEQ ID NO: 670840 - DNA, 1560 bp, Homo sapiens
aacttaaccccctaataaaattaacttaaccactcactcatctgacctccccaccccactccaacatctcctgcatgatgaacacttcgtgctcacttccttgcccgcctgcctgactcctccaacatcaccacgagcgactactcccctagccactgccccgtacctcacctcgcacgcccctcacaccgccattccacatcaactcgccccacactcactcgagacctgctcacactatatggcatagcacctcactcgcgcacaccttcaccgcccaacttgtgcgcccttccaactattcgtcacacccctgcccctctataccctacaacactcgcggccgagcgccctactatctaccgtgatccatcatcatcttaccctcaccaaccaccctgcacccccattcgacgcactacactcccatacccttgcctctgccaaccctactacaccaaacaagccccttccacctaggccctactgtcccatcctcgcctgcagtgcccccacactattccacttccttgcccagcgcgccaccaccgcaaaccactaccacacacccctccccccctcactcccccgcacccactccccacaaactaacaacccgcccgcccaaggaacacccacaccccccccccaccccgcacaccccaccgccccaccacgcagcacaccctcgacgccacacagcaacaaggacaccacacacccaccccaccacaacgacactcactccaccacccgctctccaaccccatccagctcaccaggcccacccgctaccaaactcacacgaccggacaagcacaccaccactcacacgcaacgaacaccgaacaccaacacccatctcccgtaaaaaccatcactggccaacgccgacaaccaccctgcggccactacaacacaccaacgcctcaccccccacacggcgcaacacgccaccacccatcacccacctaactgcgagaccatcaacaaacccacaacgcgccacaaccacacccactcacactacacaccgcacaccacaaccacccactgaccctcactcgtgcgctaccaccattcccttccacctcctctccaccccttcccccttaatacactgcgaacccatcacaatcaaccccacactccctacacacaagatacccattcactaccccccaacccactaacaccagcctcacaccaccacctacactcacaaccaaactctacaacacccacacccccccactcacactacaacctcaccaccacttcgcaccatcccccacacacgccctcactcacactctcgcaacctcgaaccacacaccaatacacagcatacacaacgacccataccatactctcacacccactccttcacttcaacccacgactcccacacattccacacatccacacatatatctcgccacaccacacctcaacctccacactaccataccgctatcctccccctactgcacgctcacttactagcggtactcatactccctcaccatcatactcctatacatatcttctcaaagttgt

SEQ ID NO: 670841 - DNA, 422 bp, Homo sapiens
tcagctggtaccggtgttccttgtctatcttaaaattagaaaaaaaaaaaggcaggcgtggtggctcacgcctgtaattccagcacttggggaggctgaggtgggtggattacctgaggtcaggggttcaagaccagccgtggccaacatggtgaaaccccgtctctactaaaaatacaaaaattagccaggtgtggtggcacacacctgtaattccagctactagggaggctgaggcaggagaatcacttgaaccgaagaggcagaggttgcagtgagccaagattgcgccactgcactccagcctgggcaacaaagtgagactccatctcaaaaaacaaaaacaaacaaacaaacaaaatttttttaaaatctgctctatggaagactttgtcaagagaatgagaagacaaggggaaaca

SEQ ID NO: 670842 - DNA, 530 bp, Homo sapiens
  misc_feature (12)..(12): n is a, c, g, or t
  misc_feature (206)..(206): n is a, c, g, or t
  misc_feature (215)..(215): n is a, c, g, or t
  misc_feature (232)..(232): n is a, c, g, or t
  misc_feature (234)..(234): n is a, c, g, or t
  misc_feature (236)..(236): n is a, c, g, or t
  misc_feature (257)..(257): n is a, c, g, or t
  misc_feature (267)..(267): n is a, c, g, or t
  misc_feature (269)..(269): n is a, c, g, or t
  misc_feature (271)..(271): n is a, c, g, or t
  misc_feature (287)..(287): n is a, c, g, or t
gaaccgtgtcantccccacacagggcccagaggggtgagggtcccctggctgggaatggtgtgtgttggagctgaccagcctgagcttgtcttgtctcttcttcagcctggtgcctgctgaagccagtcctggagcccatacctcacccctgcctggtgaggatgtcttgttcctgagggaggccggtgtggaaagcctcgcacantggtgcctncagctgttgaagggtancncnggcccttggaggctggcactngctgacagcntntnctctctgcacctgcgntctggtgactttgggtggacgcctttggctttacttgaacaccaaaggtgcttctattaaataatgtacccaagaagttcctggcctttttgtctcttgaaccttgatgtgtgtaaggggtgaatggaaaggcttcattgccccaagggtgcaacccaaaaggggaggtggggcttgactttcttcctttcctggggaaccagggccccccttttttgccttgggggcttggccccttgtttc

SEQ ID NO: 670843 - DNA, 301 bp, Homo sapiens
tggtcggtaccttccaggcttgattgaggccaggcatggtggctcacactgtcatctcagcgctttgggaggctgaagtgggaacattgcttgagcccgggagttggagatcagcctgggcaacatagcgaaaacctgtctctataaaaaaatacaaaaaataatctgggtgtggtggaacacctcctaatcccagtttcttgggaggctgaggtgggaggatcacctgagcctgggaagtcaaggctgcaagtaggccaagattttgccactgtgcttcagcctgcaatcaagcctggaa

SEQ ID NO: 670844 - DNA, 1012 bp, Homo sapiens
  misc_feature (733)..(733): n is a, c, g, or t
  misc_feature (786)..(786): n is a, c, g, or t
agagcttcctatgaacataacgtcaagttcgccgtatcgtcgcagtaatgctacacgatagataccatggctcgatagactgatacttcgaatcgacgcattgcctgcgttgcagttacatcaagtcgtctcttagcattacgtaccatcaccatctcaatcatacactgcgcgcgagtcggacacaacacgtgactgttctctcgaagctcaagtacgataactggatgtgtcgtagagagctcatccacatggtagtactatctaagctatgcgagtccaatgtcaaactgcgatgtttcaaacttattcagtgcacagttctcgagatagcattaagttattgtagcaacttaaagagctattacaaaagaatcaaagatatgagagctttcacttccgagctaagtcgtattatgtaaacgagaagattcagctgtgggacaactaccattgaagaaatacgaaaatagagtcaaattagtactcattatgaggacaaatttatgcgacacattgttcgtttcacattattagcacagctcaccatttcacacacgagtccacttgtactaacacgcatggagattccactttgtacaccacgtttacacgaccgtttcatataaaggatattgcgaacaccagtatttacacaacgatctctacatacggcattggctcgccacactactacgagtgaagccacttcccatctatagcactcagtggngaaacaccagacacgacatggcacttccataaattcgttcagtctacttgccntggagcaccttgctcattagcaacatggttcacactattacacgtcgaactcacagtacatctgtactttagagaaactttggtacatccacaagacactatatatgagaattggcaaacgtggttataccaggatcatttggattgagagtgcatatgtcatagtagacacaacatcatcaattgtaaattgcaaacagaaatcatagaatatacgagatacaca

SEQ ID NO: 670845 - DNA, 533 bp, Homo sapiens
  misc_feature (437)..(437): n is a, c, g, or t
  misc_feature (444)..(444): n is a, c, g, or t
ggccacagagccgcggcaccatggcacctgctgaacgcgcgggggccaagaaggtgagtttcgccccctcgatcctcgcggagctcctggccgctgggctgcgagcgactccgttcacacccggcgtacattcctagacaagccctgtggcctcggccacttggaccggatggtcctgagcctcaatttttccctgtcacgggttggatagcgtttatggagcccttactcggtgcctggcgctgtacagagtgctgtgctcaaggtatctactcatgttcacaattatgcccatttcacaggtgaggaaactgaggctcggcgagtcaggcgaatagctcagggtcacgggtccagaccagcggggagcgaggatcacaagtctagcttttggacgcatgtcgcgcacacatatattgtcactaaccgaccctcanacgtagntattttggctaatacgcacgggaactcttaggactgtaccctcgcgctttggctagtccttggcaggacgcccccagagctgtcggggg

SEQ ID NO: 670846 - DNA, 908 bp, Homo sapiens
gggcaccgtcaccgttgcatgcgttactacacaaaggtgcctccagtgctgatctccactcccatccactatacctgtgatcggcgattatgatagctgcctcgggggcccgtgagcgtatatgaccgcaaggatgtggtaagtgcgaacactgaccacctacctaattaatagaccgggagtagaggcgccttatgccttcgtgcaatagggtgtacatgactgatgtaccatcgatgttagcaccggaaagttcgagaccatgacgcactgccgcgcatagagacacgaatgcaccataacctccctgaaggacgcctgaatggacgcaccactccgatcatactatagccaaagatacggtgcgcgaacgtagttccctaaggattgacggtcgaagggcacttacacggaggctcggattggatgggccctcgtcccgtgccattatgaccatttgtgtaccctgcgacccaatccccatcatagtctcggggcacgcatagccctcttcctttgcacgcaccttggtaaattatgagactatgtttgtaattcccgataggcggtcacgctgcttcgtttccggtcggttgagatctttcatatctttcgaagggccccggttcattttggcaggactccgtatgacggcacgagcgtgacaaggccgcactggaggtcccctactggtggggccaagcttcttggcccttgatgactctccggaaatcgctttgctgcctggtctagagaatggctccccccacggaaggtgaaaccggcttgctgttccttccgtcatgggaagtgactaacttgggagctatctcgtaccagtgaccctggtcctgctcgcgatcccgacgtgagttggccttgcctgggtgtggccgctgtttgtcagc

SEQ ID NO: 670847 - DNA, 1122 bp, Homo sapiens
  misc_feature (623)..(623): n is a, c, g, or t
agcggaagcggcacgggtgctgtccagacttcccggtgcttgaatacaccggaagtgctcgtcatccagcattaccatgtatgtggaccactgagaagggctcatcctggtcgcagggcgctgttgtacatgagtagggaggacttatctccatgtctaatgcacgctgcgcgtgttgtgaagattccgtcgcgacacgcgcgactagtgcaaggtcaggagcgtaccgagccacaggagcttcatggagacgtcatgcaatgtccagatatagatatgcggggtcctcgacccgtgtgggtcgcgtaaggaaggccttgctggtgatggcctgcgcattgacttggggagacgagagcgtaggtgtcccgcacacggatgttctctggctcgatgtaccctacctggacttgtagtagcgttctcctgttggctcgcgacatggaattggcgcgctgggaagatcctactctggcgctctttgcggaccagagattgtgtcccgttgggaacacgcctgttcgtgatggcctcaacctggcatttggcttttggaatgtgcgctgcatgccctgctggtgagacactgccatgcatcccctctgaggccactcctgtggtcnacccttcggagacgtgccatgtgccagcagatgagcacggcgcctcacgccaacacgctctgtcttagcgctgggctgttgcgtggccctcgtcagagggttgggtctatgtcgctcatggccaattgaattgtcacgacgcgtgcaccaccgcttcgtggcgcgagtagaaaatagtacttcaaaggacgcaagttgaccgtgcggagggaaaagaccaggtggtacttcgcaaagaatcggaacggttgccttggtgcgaacggtctggcttacgtacgtgggggcattcgcttgtagggtggccggttttgtctggccccagtggtttctaagcggtagtgacttcccttgggctgtgctcctgcggagggacctgctttggggacctttccgggggaatccgggaacgtggagggttccccctctgggatccgggtggtaccgcgttgtagttgcccggacgtgtccctttcgcccggtgtaaacatgcccagag

SEQ ID NO: 670848 - DNA, 586 bp, Homo sapiens
agcggggggctgcggcgctggcctcggagaggtgacccaagtcacgtggttccgtcttggcatggctcttcgtgacagaagttggcacactccgggagctgaaaaggaggatctggggacccggatcacgctgaccggggtgagtatcaagggtgagtgtgcatatgattagcagaagtcagtgaatcctgcctagcatgcagagcgcgcagggctgattaccaggtggataagctatctgaagacatgactgtgaaatccaggatccagtgagtccgcgggatcttcacgtatcaccggtgaattacagacttaagcagcagtggagagatcagtgtcctaagttgcttaaacagttgcaggagtttccactgctatgaagaatatcatgtgcattacagagaagaagtatgtcctggtgctcagcgtctgaagaggacgaatgctgaagtattaaatccagaaaatgcttgattaaaatattgaatctctcgcatggagctcaaatacagaaacagaccctactttatcaccttggagaagagtggagaagctgattgtatggaagttcccacatcaaaagatc

SEQ ID NO: 670849 - DNA, 1498 bp, Homo sapiens
tttttttcttgtttcaaaattacaattttttttaaaaacaaaaagagggaatgtggattgcaaaacgcccgttcttgggcttctctccggtggagttcgcccctttcccaatgtggcagatggccgctctccctgtgtgtggccttcagctttcctctccggtggaattgaaggggctccagggtgacaccttctcctctcgaagagggtgtggggcgtgtgtggccttatggcgctctcccagagtctcggccgagggtgctctcggccctgtggctctcagaagagagaggtgtgtcttctcactattctacacgagtgtggtctcgcggggtgtggcgcgtcttgtgggccccgttgggtatagcgcgtgtgggtgtatagagggtctcgcgggagaagagtctcgcctgctgttgagcggccgaggtcttgtagaggcggtatagagagagcggtctctttgtatacagcgtgtgagagtctctcgtgcgcacagagagccgagcctgtgtgtgctcctctccgagagagagagcgcgcgaagcgtgtgtgtgcgcacagcgccgtttcgagagaacaaccccaggcgcgtctcctgtgcgtgtgtctctgtgggaggccctattgtgtcctgtgtgcgcccccttttttttgagcgcgcaccacaacagcgcgcgcgggatctcccaccacgttttgacagaagtgtctctttttaagagcccctatgaggagaggggtgtgcggcctctccccaagcgagaatgtggctcttctgtgtgtggaggcactattctctccctctcgggtgtgtgcttttaaggtctccccagcgcgaaggggaagtttcgcggggggagtttcccccccccccaaaagggggggcggggtattagtgtggcggggcccaaggctcttcgttgtctacgacggcgttacccgtggggggagaggtacctcccacggggtgggggccaaggctcttcctaagagggaaggctcccccagtggaactttgtttgccccggggttcccgctctccgttgggggcccacgtcttttggacaccgggctccacagggtgccccacttttttggatggaccccccacgggggccccgagaccccttattctatgggcggcacggcttatgtttagcagctatctgataaccccctgctgtgctgggggcgcgcccccccggggtggggccccatttggtgggaacaaacacctttcccttctctcgggcccaagatgccggggatacacgcggggagtgtgtgcccatgctccagtggtcgcccggcccaagggctcctttcttgtgggcccaaagggggtccccggcaccggcgccccgcgcccccgcgtgccttcgcctttgagtctcggacatccaattctccttctgaggatctttgttctgtcaattatctcggtgtcggtgaagtctacccacgcgggcgggcgcgcgagcacaatctgtgttgg

SEQ ID NO: 670850 - DNA, 401 bp, Homo sapiens
tggtgttctgtggtcatacaggtagccaggaagtgcgggacacctggcagtcacaggcctcacccagctctcacacagcctgcaatcctaaaagcgggtttcacttcccccatgcccccgccaacatcactgagtctatttcgaggcagccggtgaccagggctgagaactcgccccagaccacgaacctccctgttgagagagcaagcaggctcacagtttttcagtgtctcaggagtttgtagcggtaatccagttccttcaaaggatctctggattttcttggctttcctggtgtgttcctgtggtagttcttgggagcaaaagttcacgaagtgagtctccacacactgctctatcagtctgaccaggagctgcaagctagtcatgccttctatcca

SEQ ID NO: 670851 - DNA, 318 bp, Homo sapiens
  misc_feature (312)..(312): n is a, c, g, or t
gaggcgatcagcattgataagaatattcacactgtctggtaatgtaataatctatctaatagtacctgagtaaatatttatcacatcctgttacggcttaccataactgtttagatttcctgtgtgtaattgtcgtatactaacaaatcagtaagattcagtgtccaccccaatgaagttcatggtcctacatggaaaactaaaacaagtgcacatgtgattatactacattgtgcgtgagatcttgacagaaagactaataatcctcgtttcccattatttttacttaatttctatgtgtcgaggcacttntgcttg

SEQ ID NO: 670852 - DNA, 307 bp, Homo sapiens
atctctcaggttcctgtcgtgcccagcagacggccatttcaccttaggtttcacaaacagttgccacatgactcatcagcagcacatgagtttgcatattgagttactgcattcgctaatgtgacatggtcctctaatggactcttgtaacgatggtgagccaaggccatccactccgaggctttcagctttctcttctacatgatctttacaggcgatgagcaacctctctagtgtgtgcatctcggcgaaacacacccatgtaataatgcgatctacagagtgatagcagggaaatagaggtgac

SEQ ID NO: 670853 - DNA, 490 bp, Homo sapiens
aatggcgaacgcatagtagtgccagtcacggcggatttttacaggcagattcatggcagctccgttaacgaaaaacaacatccttgcatattctgcaacaaccgtctgtggtgtagacaacattttcgtaattgttaataaatttaacttaaggttgccattttgtgactcacaacgaagattcacgcttcgggaatattcccaacatcaatttaccatgattctgatattgacaatctaaatgacctgtcagacttgccataagccgctggtatcacaccagaagagaagcagatgacttccggaggtttttatggctgatttcaccctgtcaaaatcgctgtttagcggaaaatatcgcaatgcctcttcaacgcctggcaacattgcctatgcgttgtttgtgctgttttgcttttgggctggggcgcaattgctgaacctgttagtgcatgcgcccggcgtctatgagcgtttaatgcaggtccag

SEQ ID NO: 670854 - DNA, 583 bp, Homo sapiens
  misc_feature (4)..(4): n is a, c, g, or t
  misc_feature (9)..(9): n is a, c, g, or t
  misc_feature (52)..(52): n is a, c, g, or t
  misc_feature (116)..(116): n is a, c, g, or t
  misc_feature (130)..(130): n is a, c, g, or t
  misc_feature (139)..(139): n is a, c, g, or t
  misc_feature (459)..(459): n is a, c, g, or t
ccanccttnttgccccaaccggtattgtaggttgaacccactgtgccaaggnactaattttttttatgtaagaaaaccaagttttaggtatttaatagttactcccttatgaccantatctcatcaagantctaggccntatctgaatatctgaactccatacgtttataccgtgtaagtcaagccattcccagatagaggtccatttgagttacttaagtgtttaccagcacttgtttactacccttgcggatgatatttacagtgtatttttgggtatggttttggggttatttggttgttgttaagatgcctgtggtcccggcgctttgggaggttgaggcgggtggatcacctgaggtcaggagttcgagcccagcctggccagcatgcgaagccctacctctactagaaatacaaaaattggcctggcgtggtggcgggcacctgtggtcccantacgcaggaggctggggcgggagaattgcttgagcccgggaggcggaggttgcagtgagccgagatcgcccaatggcactccattcagcttgagtgacagaggtgagactcccatctcaaggta

SEQ ID NO: 670855 - DNA, 640 bp, Homo sapiens
  misc_feature (315)..(315): n is a, c, g, or t
  misc_feature (319)..(319): n is a, c, g, or t
  misc_feature (328)..(328): n is a, c, g, or t
cggtttaattaagtgggcctaaaggctcttccttaaaaggtttatccggggcatttactcatggaaaaaccatgataatccttggattttaaattaaccattggaaaaaacctttcaaaaaaaaaaaaaaaaaaaaaaaaaaaaaaaaaaaaaaaaaaaaaaaaaaaaaaaaaaaaaaaaaaaaccttgtggcccgcttggcccaagcgaattttaaattgggcaaggttattcattggggccgaatttggggttaattggccaatttgcccttatggggggcggtttacaattcaatggcccgcgttttaaaanggtnggactgggnaaaccctgggggtacccaacttaaatggcttggaagaaaatccccttttgccaagttggggaattaccaaaagggccggaccgaatggcctttccaaaaattggccaaccttaaaggccaatggaaattggaaggcgtaaatatttggtaaaaatccgggtaaaattttggtaaatcaggtcaatttttaaccaattgggccgaattgggaaaattcttattaaatcaaagaattccccgtggggttgagggttggtcaagttggaacaggagtccctttttaaggacggtgactcccgtgggcggttttgg

SEQ ID NO: 670856 - DNA, 89 bp, Homo sapiens
tcaagcttctaacgatgtacggggacatgatttttactaatgtattactgagactagtaaataaatttttaaggcaaaataggaaaaaa

SEQ ID NO: 670857 - DNA, 369 bp, Homo sapiens
cgtgtacagtctagtgagtcttagtgatgagatgtgctgcatgtgccgagtaccatagtgatattgtatggcagacatgagtagattacatatacattatctgattcacacatctaccttttcacacatgagaactagctcagagaggtcccagacagctatactaggtagaaaaaggttccaggattcaatcccactctgctgacatactgtgaagtctggttattaacttctccaatctcatttcttatctgcaatggaaacaggtgtgtgcgggttaatgacatatgtcccatgatggatatataagctcagaatacttatgtaaatttcttattctaacagcatctgctaggtaaagggatgggc

SEQ ID NO: 670858 - DNA, 726 bp, Homo sapiens
  misc_feature (401)..(401): n is a, c, g, or t
  misc_feature (405)..(405): n is a, c, g, or t
  misc_feature (414)..(414): n is a, c, g, or t
ctttatggccgggttgtggggaaggagcccaaaattcctgccaattgaacttttgccaattaaaagggggtggggttaggttccatcgggttacggccctgggaaaataattttaatggaaatggccttccagggggttttaaaattaactgaagtttttaggccaattatgaatgtggcctaaatttccaattaaactggttaatccaaaaaaaaaaaaaaaaaaaaaaaaaaaaaaaaaaaaaaaaaaaaaaaaaaaaaaaaaaaaaaccttgtggcccgcttggcccaagcgaattttaaattgggcaaggttattcattggggccgaatttggggttaattggccaatttgcccttatggggggcggtttacaattcaatggcccgcgttttaaaanggtnggactgggnaaaccctgggggtacccaacttaaatggcttggaagaaaatccccttttgccaagttggggaattaccaaaagggccggaccgaatggcctttccaaaaattggccaaccttaaaggccaatggaaattggaaggcgtaaatatttggtaaaaatccgggtaaaattttggtaaatcaggtcaatttttaaccaattgggccgaattgggaaaattcttattaaatcaaagaattccccgtggggttgagggttggtcaagttggaacaggagtccctttttaaggacggtgactcccgtgggcggttttgg

SEQ ID NO: 670859 - DNA, 939 bp, Homo sapiens
  misc_feature (18)..(18): n is a, c, g, or t
  misc_feature (32)..(33): n is a, c, g, or t
  misc_feature (42)..(42): n is a, c, g, or t
  misc_feature (58)..(58): n is a, c, g, or t
  misc_feature (66)..(66): n is a, c, g, or t
  misc_feature (69)..(69): n is a, c, g, or t
  misc_feature (79)..(79): n is a, c, g, or t
  misc_feature (86)..(86): n is a, c, g, or t
  misc_feature (109)..(109): n is a, c, g, or t
  misc_feature (118)..(118): n is a, c, g, or t
  misc_feature (133)..(133): n is a, c, g, or t
  misc_feature (138)..(138): n is a, c, g, or t
  misc_feature (148)..(148): n is a, c, g, or t
  misc_feature (163)..(163): n is a, c, g, or t
  misc_feature (182)..(182): n is a, c, g, or t
  misc_feature (192)..(192): n is a, c, g, or t
  misc_feature (201)..(201): n is a, c, g, or t
  misc_feature (203)..(203): n is a, c, g, or t
  misc_feature (614)..(614): n is a, c, g, or t
  misc_feature (618)..(618): n is a, c, g, or t
  misc_feature (627)..(627): n is a, c, g, or t
cattatggccggaccagncaccagggccgganncgttggttnggccgccttcccaatngttaccancangaagttgttngaagaancggggctactcttaaccatttgnagccttganggagcttgggttcgnagacnggcaaggganccatgtgtgatgganaaggtcaggagcccaaagnttaaggccgnggccaagtntnactttgaaaggtcaagggagcagttgacacccttgatcaagagggttgaaccggaactggttaacttctggagctatttcggggaactgggaccacagcttgccacccagggaagggtccagaccatggctttccaacccaagttggcctttagaccaccaattggccagtcttagagttcctgtccttaccaattttttgttccattaaaggctgattgattccaaaaaaaaaaaaaaaaaaaaaaaaaaaaaaaaaaaaaaaaaaaaaaaaaaaaaaaccttgtggcccgcttggcccaagcgaattttaaattgggcaaggttattcattggggccgaatttggggttaattggccaatttgcccttatggggggcggtttacaattcaatggcccgcgttttaaaanggtnggactgggnaaaccctgggggtacccaacttaaatggcttggaagaaaatccccttttgccaagttggggaattaccaaaagggccggaccgaatggcctttccaaaaattggccaaccttaaaggccaatggaaattggaaggcgtaaatatttggtaaaaatccgggtaaaattttggtaaatcaggtcaatttttaaccaattgggccgaattgggaaaattcttattaaatcaaagaattccccgtggggttgagggttggtcaagttggaacaggagtccctttttaaggacggtgactcccgtgggcggttttgg

SEQ ID NO: 670860 - DNA, 895 bp, Homo sapiens
tctttcctcccctccccccctattcaccatttcccctcggaaggcgcttccccggtgctggggcagagccggtctcacccaccgataacaaggacgaaaaaatgcaaaggaagcccaccacacaaaacacgagcatcacacaggagagacgaacacacagagcacagagagagccacagagagtatgaatacacacgcataaccgcaacccaaggaaagacctgagcacgatagaaatacccgcaagcaacgcgaacaagcaacaacgaaccacaaaacacacaccgagtaccacagactgaccacagtgaacaaacccaccacacccaaacaaaagacagaagacgaaacacaacagaggccaccacacatcagacaactccacatagaacaacaacaaatgaaaaataacacaagcaagagataggaccccagtgacgaatcacacggcaacagaaaaacacacacaaaaaacgaagaacaacaataaagaagagaaccagcacagaataagagcgcagtggaaaagaaacacacaaatcaagatagaaagaaagaaaaacaagcaagaacatcacaccaacaaagaacagacaacagaaacaacaaagaaaagtagcaaagaaacaatgatgaataatccaaaaaacgacccaaaagatagaaacaaatctaaggaaaaaaccaacaaagggaaaacagaagcagaacaagacaaaagactcctagcgccagaggataaagcaagaacacaaagccaagacaagaaacagagtgacaacaaacacaggagaacactagcgaacaagagagcacagaacgaaacaacgaacaaaacgcagagaaaaagaccagagacccaagacgaacatacgagacaaacgagaagcacaac

SEQ ID NO: 670861 - DNA, 939 bp, Homo sapiens
  misc_feature (18)..(18): n is a, c, g, or t
  misc_feature (32)..(33): n is a, c, g, or t
  misc_feature (42)..(42): n is a, c, g, or t
  misc_feature (58)..(58): n is a, c, g, or t
  misc_feature (66)..(66): n is a, c, g, or t
  misc_feature (69)..(69): n is a, c, g, or t
  misc_feature (79)..(79): n is a, c, g, or t
  misc_feature (86)..(86): n is a, c, g, or t
  misc_feature (109)..(109): n is a, c, g, or t
  misc_feature (118)..(118): n is a, c, g, or t
  misc_feature (133)..(133): n is a, c, g, or t
  misc_feature (138)..(138): n is a, c, g, or t
  misc_feature (148)..(148): n is a, c, g, or t
  misc_feature (614)..(614): n is a, c, g, or t
  misc_feature (618)..(618): n is a, c, g, or t
  misc_feature (627)..(627): n is a, c, g, or t
cattatggccggaccagncaccagggccgganncgttggttnggccgccttcccaatngttaccancangaagttgttngaagaancggggctactcttaaccatttgnagccttganggagcttgggttcgnagacnggcaaggganccatgtgtgaaaagccgggtttttaagaacttccagacggggactgactatggaagggacctgttggcaagggagcagttgacacccttgatcaagagggttgaaccggaactggttaacttctggagctatttcggggaactgggaccacagcttgccacccagggaagggtccagaccatggctttccaacccaagttggcctttagaccaccaattggccagtcttagagttcctgtccttaccaattttttgttccattaaaggctgattgattccaaaaaaaaaaaaaaaaaaaaaaaaaaaaaaaaaaaaaaaaaaaaaaaaaaaaaaaccttgtggcccgcttggcccaagcgaattttaaattgggcaaggttattcattggggccgaatttggggttaattggccaatttgcccttatggggggcggtttacaattcaatggcccgcgttttaaaanggtnggactgggnaaaccctgggggtacccaacttaaatggcttggaagaaaatccccttttgccaagttggggaattaccaaaagggccggaccgaatggcctttccaaaaattggccaaccttaaaggccaatggaaattggaaggcgtaaatatttggtaaaaatccgggtaaaattttggtaaatcaggtcaatttttaaccaattgggccgaattgggaaaattcttattaaatcaaagaattccccgtggggttgagggttggtcaagttggaacaggagtccctttttaaggacggtgactcccgtgggcggttttgg

SEQ ID NO: 670862 - DNA, 121 bp, Homo sapiens
tattcctttgttgcgtcaacgaccctagcctggagactcaatgctgccccctgttataatgtgccttctcgtctattctggtgtgattcatggactttagtgggtcagtaaatgacctgag

SEQ ID NO: 670863 - DNA, 664 bp, Homo sapiens
  misc_feature (39)..(39): n is a, c, g, or t
  misc_feature (65)..(65): n is a, c, g, or t
  misc_feature (141)..(141): n is a, c, g, or t
  misc_feature (145)..(145): n is a, c, g, or t
  misc_feature (162)..(162): n is a, c, g, or t
  misc_feature (169)..(169): n is a, c, g, or t
  misc_feature (180)..(180): n is a, c, g, or t
  misc_feature (205)..(205): n is a, c, g, or t
  misc_feature (292)..(292): n is a, c, g, or t
  misc_feature (380)..(380): n is a, c, g, or t
  misc_feature (398)..(398): n is a, c, g, or t
  misc_feature (409)..(409): n is a, c, g, or t
  misc_feature (475)..(475): n is a, c, g, or t
  misc_feature (482)..(482): n is a, c, g, or t
  misc_feature (549)..(549): n is a, c, g, or t
  misc_feature (562)..(562): n is a, c, g, or t
  misc_feature (564)..(564): n is a, c, g, or t
  misc_feature (590)..(590): n is a, c, g, or t
agagttgggacgtagaatatgggcagccttggagatcgngttcccatgagcactgtacggtattngagagagacccattcgtttttccttaccgccccccgccccgggcgctttctgctcaaagcctagatgcccgtcacncaancccatccggtggcagcnctctagngactggacatncctggaagacccctcagcctctttngctgaacgttcattccaggagcttctccgtcccacagacatctgacacttgcccgacactgccacccgcagaagcctggcgggctcnggtcaccatgctctatctgaagttgcactggccagcatgggcctgtcccaagcgagaggggagacacagtggactgaaaggactggtngaaagtggccaatctctntcagcttaatntggcagagaaaatttgtaacaactctgagcacatgctgggtgaagtcacagctcaaggaaagatanagctggncggaaggaggtgtgcgtggcttctggggtgggacccagaggggaggctctgggacaggggctggggntcagtgccagggncntgaggaagaaatggggactgatctcnaaattccagaattcctgtacatctgttcacgtgcttgtgtccaggtgtgacatggtaatacgtcctaggttgca

SEQ ID NO: 670864 - DNA, 375 bp, Homo sapiens
  misc_feature (76)..(76): n is a, c, g, or t
  misc_feature (318)..(318): n is a, c, g, or t
  misc_feature (352)..(352): n is a, c, g, or t
  misc_feature (359)..(359): n is a, c, g, or t
gcgggccacttgggatgccgcgaccactacttcggatgccgtcatagaaatccttctgttgagttgtgcgtgggcnctcgcatcacgcggcgactgccccggcccaagggccggagcaggaacggcatcacgctggcgaggtcacgggccatgaacgtacggagggtcaagccggtgcgataggacgcgagctttccggcgtcgaagtgaccgccgatcgacaccgcttcggccagcccgagatgggttcgatacgcgatcgtcaacggtaccccgtgactcgcggcgctgaacagcttctgcgcctcggacaaccgnttcgattccaggggccgaggcagttcccaacttngttccgngtttccagggccagtt

SEQ ID NO: 670865 - DNA, 155 bp, Homo sapiens
gcatgtacctaggactctgccggtgcagaatatgagcaatgccatgtacttgcagaaaacgctatagcctgagtttcataggaggtaatcaccagacaactgcagaatgtggagcactgagcaggacaaatggactgtctccttcacatagtcca

SEQ ID NO: 670866 - DNA, 469 bp, Homo sapiens
ctagaggtccctcgctattagaatcctcataataataatataataataataataataataataagaagaagaagaagaagaagaagaagaagaagaagaagaagaagaaattatggagaaaatggacaaaatgggagtacagaagtggaaaatcacatggtgaaggagctagtgaattttctcccttagttatttagctggaaatatgaatccactgataaaggtggatttgctgggcccccgaggcagaggtggcagtgagcagaggatgtaacactgcacttcagcctgggcaatagagctagactccatctcaaaaaacaaaacaagaccgaaaacaaaagaaacaaggacctcactttttactccatatacttttttttcctgttgtggcttttttaaacaatagatgttggtaatttatatgacaataaagagtctcattaaaaagtatttcaaaaattttgtg

SEQ ID NO: 670867 - DNA, 616 bp, Homo sapiens
ggcggcattgcaattggggaatacccggcgcggcctccttaatctgtccggggcagaaacccctcttcttatgtggcaagcagggggatacctatgcccctttgcggccctggatcaatttgggtgtcataaacctgccactttttgccgggaccccacctattggagagtgcttcggcagaagacatatctcacatgtacctccgcgcgtcctcctgttttctccaaaagaagcagcactcttctccactcgtgggagagttctcattaccaccacgactgtttgtacagttaccccgccagttctttctccgcggcccacaaccaccgcacgacagttgctcctccctgtggacacaccacgcgaatggcgtgaattcccaaaacagtgggactcgcagagaaacattttttccctctacacagcagtattgcttctgttatcccaaccacaataatcttctccccgctgtgtgcgtaacttcacacacacagcggtgtgcaacgtctgtttctttttcgtcgctccgtcttttcaactttgtgtctcttcttcggaacaccaccattttttttggtgccaacaaaaatccccctgggttcgcccaacataaca

SEQ ID NO: 670868 - DNA, 110 bp, Homo sapiens
ttctagagatccctataggcgctagtgttataggcaggtgtggttataaatagttttaaatctggtttaacatacagagaaagatacaattcaaacaattagtcctataa

SEQ ID NO: 670869 - DNA, 278 bp, Homo sapiens
gcgtctagtggcgtctgagccccccgggggccgctcagtgacaggtgctgcccgagctggagggggatccagcgacaaacagaggatgcactgaccgccctccccccaggcccaacctccactggcctcagatcccggggttcctggacggagcatgtgcagagtatgcaggcgacaacatatactagaagagtaagatagacaccaagaaagcaagaaaacaaataaacaaaaaaacaagagacaaaaccaagatataacacaataagaaagaccag

SEQ ID NO: 670870 - DNA, 181 bp, Homo sapiens
atctctgagggaaggataccaaggctactgcagtgttacttcactcataagctccagtggacccagtggctcatcaggtcgagtagaaccacccacttctttctgcttaaagactcaccccttctgctttcttatagccttattgcacctctggaggtcaaaagccgcctggcagcttagt

SEQ ID NO: 670871 - DNA, 371 bp, Homo sapiens
ccttttgagacagggtctccttctgccacccagactggagtacagtggcacgatccgtgcaacctccatctcccgggttcgagcgattttcctgcctcagcctcccaagtagggggactacaggcacccaccaccacgcccggctaatttttgtatttttagtagggatggggtttcgacatgtttaccaggctggtctcgaacccctgacctcaggtgatccgcctgcctcgtcctcccaaagtactgggactacaggcgtgagccaccgcgcccgacctccgcccggcttacttctctatccaagaaatcgccaactagactgaaacgagcctctccccgaaccctccagcatgtggccggatcaggca

SEQ ID NO: 670872 - DNA, 311 bp, Homo sapiens
cagtgagacccatctcaaggaaaaaaatttggctgggtatggtggcttatgcctgtaatccctgcactttgggaggctaaggtgggcagattgcttgagctcaggagttcgagatctaggcaacatggcaaaaccccatctttgcaaaaaataaaaaatcagccgggcatggtggtgtgcatctgtggtcccagcctcttgggaggctaaggtgtggaggatggcttgggcctgggaggtggaagttccagtgagctgaaatggtgctgctgccctccagcctggatgatactgccagcccttgtttttta

SEQ ID NO: 670873 - DNA, 366 bp, Homo sapiens
tatgtgtttcatattataacagtctggttgcctttaacacagaactgacgaagaccactgcgtctgctgctatcggttctctctggacattactgttagtattcaaatattttaagtccgcacattccgcagggtgaatcctcttccatccctctgagagtattgcctgttctctttgtctgactctgttatccctgttcttcttggacaacccttgcgcggtctttagaatctctttccttcctccccttttgcccccgtggggctcccggcatcctgaaagccagcaaagcctccagcatcttttccatcctgaggtgcctcccagtggcctggcttgtcggagcaagtttcatcagccctagg

SEQ ID NO: 670874 - DNA, 1084 bp, Homo sapiens
  misc_feature (529)..(529): n is a, c, g, or t
gactgtgtcccggtcttcactctctgcatgaggctcgtgagaggctcctatggatcgtgacacacttgaacgtcgtgggatcatgagtcgcgagatgggctgtagcgtgtctacggcactctatgcgtgtctacgtggataggatgactatagggcgagcaagcggtacttcttgtgtaccattgcggtaatccagacatcagaggtcgcattcgtactcgtggcgcgcgatgatagactgaggtggacgtgattctgtatgcgatgcacctatgtgtacgtatgggccacgtgtgcatcgtgatgtccacatggacggcagatggatcttgcgtcggccgttcgatggctcgatgggctatgacacaatgttgcaaacagctgcgcatgcgatgcatagtgcaaaggttgctcaagtgactacgcatacgcaacgacaggtcatcgtagcgttcacttaaaaccgtggtcctagattgcgagtgacaagtgactaagccactgcagcgagtaccaatctagtgaatcngtctccgcgtcacacacctgtgggcaatgcgagaggaatctatccagattcactttgagcgagtccagtgtccgagatagagcccatagcactcgcgactgggattgacgcgtcgttgcgtttcccacggcccaccgtggcggtcttgtagggttgaggtttcaccataggacccacgaccgaaaagtggcatgaaaccaccatgacgatgtttgtttctgacatcgacagtgggagcgttttctaatgcccggggggaccgtatgcttaacacaagattgggcgcctggtagactagactcagcacaatggagctacggtccctcgttgccagaggtagtgtgggtgggatcggatgtgaccgcaaattccacacaagtggcgatcccgaaagcgacagggaggagaagcgtacaagcattcgagtatgagcgggtgtcgagcacgatggcgttaggcatttgacagtggggtgaccgtgtccgacggaattcatggggggggcccaatggtcctgtaggaagaaaaaaagttttaccacatggagtggacaca

SEQ ID NO: 670875 - DNA, 591 bp, Homo sapiens
ctcaacgctttatacttcatggtggcctatgactggagcaagggtagctcatcacagttatgaggaagaaaggtcggatgaggggcacagatgcaggtaggtggctaattatcctggtggaagggcatggggtttttccattgcttctaatttctcagtgaataataataagtcattagccctaagttactcagtagttgtgtaaaagtttgcctcattaggagtaagaacttcactgaggcagatggatgtggatttgaatcccagctcctttacattctattgattttgacattggacaaattacttatcttcattggtcaaatgaaggtactaatagcacctacctcagagggttgtgaacattaaaggtgaggataaagcacttagcagagtgcccggcatatccaatcaacatcagtctttactgttagggtcccttaaagtaaaatatgaacataattccctcacactggggagtttttgtagctctcttatcttttcagtctggtggacagcagaggttaccctttggggggcaggtcaaaggttaagttccctatggaagatacaactggggggagtcaaggg

SEQ ID NO: 670876 - DNA, 893 bp, Homo sapiens
  misc_feature (893)..(893): n is a, c, g, or t
tgtgtaactcatacatcccacaagcatctactgtgtgcagaatgtctcgtatgtgaaggacacgtgtgggcatataactgtggcttagatgggcttgctaacccctgagaagataatatatcagcagagaacaaggaacatgtagtatgaactgccagtcacacaacctatccagaattccagcaagaagaagtatgggtccatagagctaggaggtgttgaaggaaagattacctgcaggagaggcaatgccgatgatgatagaagattctgagctatggagcgaggcggagccagatgggaattcaggttatctcgggatgtgggacccgtaaccaagcttcttatacttatccaagcaatccattttctcattttaaaaagggagataactatgtggtaagattgtcttaagaattatgtgagatactagttctcaatagtaatacgggtgatggtttccgcagcctggagcgatgttaaagccggccatgtgacttctgaactacgaagcatgcccaggtgcatgcagagattgtaatataacggtgtggggtgtgggtctagaaatgtcttgcaggcaggtggtgcatggtgaggatgccaaggagggagccgagtctattgggtaggaaggagaatgacaaggggggttctcatgaattggccggactaacggggaggatacagggtgtggctgtgttgtccaaacaattcagggtttgttaagaacatcttcgactgtttgtgctggtgtttcacaataggattaagctgttgggtggcggttttccccaacgtattgtgggtgtcaacttggggtaaaaaaggggtaatagtagagaaaagaaagggcttaaaagaaagggggtaacaaaaaacaggataggttn

SEQ ID NO: 670877 - DNA, 218 bp, Homo sapiens
  misc_feature (44)..(45): n is a, c, g, or t
  misc_feature (134)..(134): n is a, c, g, or t
  misc_feature (156)..(156): n is a, c, g, or t
gtgttcagaacgtcaagctagacttttcttccactgttcacagnntaatggcaacctgcaagacttaaaagtaggagatgatgttgaatttgaagtatcatcggaccgacggactggggtacccattgctgttnaactggtgaagataaacaaggnatcctccctgaagaacgaatgaatggacaaggagtgttttatctgattaaaccctgagatgt

SEQ ID NO: 670878 - DNA, 690 bp, Homo sapiens
agcgggtctgtccctcctgtagccgccgccgccgccgcccgccgccctctgccagcagctccggcgccacctcgggccggcgtctccggcgggcgggagccaggcgctgacgggcgcggcgtggggctggccgagcgctcctgcggctgcgactcaggctccggcgtctgcgcttccccatggggctggcctgcggcgcctgggcgctctgagattgtcactgctgttccaagggcacacgcagaagggatttggaattcctggagagttgcctttgtgagaagctggacaatatttctttcaattccatctcttagttttccataggaacatcaagacaatcattgaaccaacttgggtacctgaacgagtttgactgccacattcctcgatgaaaggttttaactgccaaggacattctggacccagaaaaattaattgaacggttcttctatctgactgactagggatgccttctatgtggcagaccttgggagaccattctaaagaacagcatctgacggtggttaaaagctctccctcgtgtacaccgccttttatgcagtcaaatgtactgatagccaaagcccatcgtgaagacccttgctgctaccggggacagcgaattggacttgtgctagcaaagactgaaatacaggtggtgcaagagtctggggggtgctccagaga

SEQ ID NO: 670879 - DNA, 222 bp, Homo sapiens
  misc_feature (59)..(59): n is a, c, g, or t
gtgagctgaggtacaggcagggcgaggcaggacaccagcagggggtgctctgaacctanccgcccaaggagactccaccctggggtccaaatgcgtaacgccagacgcatggatgcaccccctaacctgcctccatctactggagttctttctctcagagtgggggcagtttcttggcccaggggctctgacgctgcggcacgccccagggcaaggggggcc

SEQ ID NO: 670880 - DNA, 832 bp, Homo sapiens
  misc_feature (515)..(515): n is a, c, g, or t
gacgagagcttggagggggaaagccggtatctctttcgtcgatgccgacacagcgctcaccaagcgccatgctcgactccttgggcctgaccatacgaagattgcccaggccgttcgcttcatcatcctggacgacgaggatgaccacttaccagcgcgaatctggaggatgctgatagctgagaaggatcacagagtttctgtacacacgctttcctgggaggggctaaaatcagacgctcccacacgtggtagtgaagcttcgagtgacgctgcacagtgagggacttgggtgacaagccacgtgctgtcacagcgtcgcttgctgtggtgacataacctgtgtagcatagtacggttgccctatctgtgattgcaggacataggacatcgcgtcttatgttcgcacgctgtctcttgcctgatgcgtggtgctccactgaagacatgaggtttggcgtcacgctgttgggggaattgcattgggacgcaggagcaacggtcacaaggcaccngagtgtcaagacacgatcagctctctcgagcggacagcactggaaagtcgcgactgggcaccacggaggcgagattgccggcaatatagggcaccgagcgttgcccgcaaccggtgcgacttaccattaccgctagatcgcagggaccggccgagcacgcgggcaatcccgatggacctctccgggagacagcgacgcatagggcatggagtgccgaaggaaaaatccgacggaagaagcaggggggccacggcatcgggcccggggcctgacggcgaagccgaccacgggggaggaaccgaaggggccactggggg

SEQ ID NO: 670881 - DNA, 354 bp, Homo sapiens
  misc_feature (149)..(149): n is a, c, g, or t
  misc_feature (171)..(171): n is a, c, g, or t
  misc_feature (181)..(181): n is a, c, g, or t
  misc_feature (325)..(325): n is a, c, g, or t
cttcctccatcctggtcctcagtccctgaactcccaggacagaattcctgacctccttggtcaagccttggttcgagaaagagaaactattagtgtaaacaaaccaatcaaccccaaaaccaaaactgtgcctgccaatagcccatttnttggccattgatggtgcatgangagaaatggntccaattaagaaaatcttaaaatcttaaggaataagaaaatgtaataaagagaaagacaatgtcatgctcagggagctaatatgaatcccaaaggaatattgactgttcaggctcaagttaaaattacagcagatcgaaagtgnaggagttgagtggcatcttcttttctgtt

SEQ ID NO: 670882 - DNA, 426 bp, Homo sapiens
ccatttcctcttctggactttgttatcccccaataatgagttggctattctgggtcttttacctcctcatgtaaacagtagaatatgttggttgatatccacaaaatagcttgcttagattttgattaggatagtcttgacatagaacaaattgggaagaggctgggaatggtggcttatgcttgtaatcccagcactttgggaggccaaggtgggtggatcacttgaggccaggagttcaggaccagcctggccatggtgaaaccccatctctactaaaaaaaatacaaaaattagctgattgtggtgcacatgcctgtaatcccagctgaggcagaattgcttgaacctgcgaggtggaggttgcagtgagccaatatcgcacctctgcactccagcctgggcaacagagcaagactctttctc

SEQ ID NO: 670883 - DNA, 1199 bp, Homo sapiens
agcggggtgatgaacaacccggcgcgcaggcggctggctctgggcgcgcgccagacaaatcctactcctgtgagccctgcggaccccgagcacgcgccatgactagcccctgctggtccctggctgcgctggctgtcgcccatggccgagcttatggacccaccgaacacaggtggcacgcccgagcacctgccggcctcagggacaccttacccctgaacgctaccttcacctgcgagacgagggtggcccagtcgcctcacgggatgcgcaggcagctgcgtgtgcatagatgagtcgacccgtcaacggtgctaacaacgactcacgcggaggcttcaaccctgcccgcgccattccaaggggtgacgcctctcacgcgggatcaatcactgtcaccgtatcgacccgcgagcccacgcgtaatgccccagccgacgtcctcccgctattgacttgcgcccgctttctccacagttccacagacaaacgggggacccatctggctgaaagaaaacataagttatgcgaacgccctcgcgtacatacaccctgggacattcggaggacgcaacacgcttggcttcttcgccacggacacggccagcggtcccacaaggggagttatgagaaagaaccgcgcgtaccccgacatgggaacgatttatgaagcggaacggccttcggacccacgggaagtttggacgactattacctgaggtgaaagcccttgagagtgaggacaccaaagccacgcttggagacacagccgcgacgcactatggggcagaccttccactcatacaaggcggcaccaaaacgccaccttgattacctcacacgacgtacgcgtggacccatcggctcacgccacacctggacactttgacccaccgaacttgacgtcatgcccacatctgcaacaccgacccacctccgcgactacgcaacagagcacagtaggaagcccaataagcaacgccaccctatcacaacccgcagacgcagccatccaacagcggcgacaaaacaccaaccgaacccgcatcaaaacccaaccgacacgaccataaccaccgcacccacactcaccccacggaccggacacagacctgcgcccctaggacctcaaaccccatggccaaaagcaaataaaacacacggccacaaacaccggaactacgggcgacatcagacgc

SEQ ID NO: 670884 - DNA, 1700 bp, Homo sapiens
  misc_feature (194)..(194): n is a, c, g, or t
  misc_feature (935)..(935): n is a, c, g, or t
ctcacagctgtctgtgtaaatgtaggacgaatcgaaattaagacaagctgttcaatgtcatcaacatcgactagctaaatagcatgcctaagtaatagtagagctagatactacctaccactacccgtaactgggtagcgaatcgttatctacacgcgtaatagcatagaacctatattgtgcacgtattgaangtgaacccatcgataacacaatccttgctctcccgaatcacatcgcatgcagtcaggaatatgagagaatattggagagctgacgaatataaccagcctctaactacatcgtacaatcaaccgctaaatagaaggtcagtgtattgtatctccgtcaacgtcgtcaaaactcccagagcgagcaaggcaagtgcttcaagtaaacgcgaagatggtttatcacacataaggtacacataggggaaaccttctgcgctaaaagtaatcttactcaacggcgcaatgtagtaacgcgaaggatacacataattaaacaaaaacacacaaaaatagataacataagaacatatatacaagacacgcacaaggggagagaggtggggaacggtataaagtacatacgctcgcgccatgtggggcgcgcgccaatttaaagccaaattttgccacccacaggtccgcagtcttggccgcacgaacaagtcccgtggcgctgcacacaaaacataagctcccaatatgggtacctaataagagcccccaaaggcaaacccgaggttggcacgacccctttgacacgatccccgttggttggtggccagtggaaaaagatatccattgtccttgggggtccgggcaaagacccagttgagacggatggatcaaccccaaagtattaattcataacgtgaacagctggtgcaacaacatcacaggccgtgcgcggaccatagacaattnaatccccacttgtcaggactttttcccagcggcggccttatccatgaggccgtcacattaggcacaacaataaaacacaccccaggccgggacggatggattccgctgtgcgattgcaccacggccacacggggccccctataatgtggccccatgccctgtggagacaatgaacaggggcgacaagcgtcccagaaagagccccccagaggtgcatggccccaacgaaacaacagatcaacgcagggagaaagcacaacaaccaatcaactcaatacacacaacacccacagcagacgcaccaacacacaagcgcacaacacacaacaacagagcacgaagagacccacgccgacaaccgaacgaagcatgccaccagcaagcactgcagcaacgacacaaccacgatgatcacacctgcacagaaccacgagaaggcagcaacaacaaagccaccacacgacacgcacaacagggcagacaccaagcaagaacgccaaagaaaaacacaaaccgaagaccgacaaagcggaagcaacgaccagcagacaaccaaccaagaaagagcgagagcagacaaaaagagaacagacaccacacacccacaccagccacacagcacaacaccacagaaagcagcaacagaagagacaggaagaaaacaaaacacgacgaacacaacgaccaacgcacacaacaaacagaagaaacacaaggcgagacaacagacgacaagagaaagaaaaaacaaaacagacagtacaa

SEQ ID NO: 670885 - DNA, 160 bp, Homo sapiens
  misc_feature (54)..(54): n is a, c, g, or t
  misc_feature (121)..(121): n is a, c, g, or t
  misc_feature (124)..(124): n is a, c, g, or t
  misc_feature (152)..(152): n is a, c, g, or t
ggatctgccccctttactcctcggggaaccaaggccccactctcgctctggatncatttgggtcagcctggctggtcccaaggcattaggatgggggagcaaaaagcaacttatgtatttnctncacccccaccccaaattaaaatgttaanctgctgga

SEQ ID NO: 670886 - DNA, 1032 bp, Homo sapiens
gttattatactttgttgaatttacttgtcattcccatgtgataggtttcttattttgcttttatgggcacgtccacatgtgagctcgcttttctttgtgccggaatttcggcagtctccttctcttcaaggactggagatgcacctcgaggttgttgcaccttttcgaagttcgttctgattgaatccaacccaaggcgtgtgcgacttgggctcaggcttcgggggatgagtgccctttggaactgtagacgtccaacaaggtggcaggactgctcttatccaactggaggccgccgggaaggagaatcaccccggtcattctaacccgtcaccccaggaatcggggtgactcgcacaagacctcatggaaagggtgacgactaggggcaaaacagcagggtggcagggcacgacacatgctccccaccaccaggtctggcatccgatgtcattcatcactcaggacgcagaggtgaccagtagcggattacagagctgggaggacagggccaagcccaggaccaggagcgcctcatcttgccaggcctcagccacccagggtaaaaggtgccagggaaacttgtgggcacactgagaaggaggaacagatgtggaggacctgagggctgctcaaaagggccaggactcagcctgcaagcagtgttttcacttgccaacacgtaacatgtacccactccgcagagaccccgctgggcctgggcccacagggccacagctagcctgcatgtgtgtactgcactgttacagtttgcaaagctcttcacatacccactctctcaccgaagccgtgaattgaggctcttggaaggagtcaggcaaggattgtgcttcccccattatacaggtgacgtaactgagtcctggggaaagtgactggtccgtggtagagccgggacccaatcccctctcttctccttccctgttgctgctgttcttcgatgcccaacacctgtttctcttttctctcaaggggtttcggggcaggagccattacctccacggcccgttt

SEQ ID NO: 670887 - DNA, 618 bp, Homo sapiens
gaactcctgacctcgtgatccgcccgcctcggctcccagggtgctgggattgcaggcgtgagccaccatgcctggccccacataaagtttctgagcacttgaaatgtggctagtgtgactgagaaactgaatttttaattttgtttgagactgggcacagtggctcacgcctgtaatcctgacactttgggaggccgaagcaggaggattgcttgaatccaggagtgcgagaccaccctgggcaacatggtgaaatcctgcctctaaaaaaaaaacaaagtaacgagcccagcgaggttgtgcatacctgtggtcccagctgcgtgagaggctgaggtgggaggaatcccttgagccaaggaggtcgtgcgtggctgtgatgatctgtgatcgtgccgctaaattctagcctgggcaacagagcgagaccctgtctcaaaaaaaaaaaaaaaaaaaaaaaaccctttaaaattttttttggggagaccggggtccctccgttgtgtgttcccccggggtgtggaccccggggggtgttacttattgcccctggcgggtgttgaaacttttggggcttaaacaaatttttcttgcttgggcctccccaatggcggaaat

SEQ ID NO: 670888 - DNA, 224 bp, Homo sapiens
gaggctggggttacgggtgcccaccaccacacgcagataatttttgtatttgtagtacagacggaaggttaccatgttggccaggctgactttaaactgctggcctcaagtgagcatgctgtgtcagacttacaaagcgctgggattacagacgctagcctccgcacctggcatgtgattgctgcttctttgggcctgccacagatagaacgtctgtgtgctca

SEQ ID NO: 670889 - DNA, 587 bp, Homo sapiens
ctaagcagatatagcgttaacctaaataaatgcatacataaaatcatggcatatctatacaatcgaatattattcatccattaaaagtaatgaaatctgtccacttgcagcaacatggaagagcccagaggatattatgttaagtgaaatacaccaggcacagaaagacagacattacatggactctctcatatatggagactagaaagagctggtctcaaggaggtggagagtagaacgggggttgccagaagctgtgaagggcagggggatgaagagaggctggttaatggattcagaaatacaggtggatagaagaaacattagaaggttctagtgtttgacagcacagtagggtaaccacagttatcaatactttatggtaaatttaaaaagagctagaagagggttgggcacggtggctcacgcctgtaatctcagggttgcgggtatgagccaccatgccctacctcttaggatttcaaaaatgcgttaaacaataggtacacggtcaggtacaatggctcacaattgtatccaaacttgaaaggtgaggcaggaggacactgagccaggagcgagaccag

SEQ ID NO: 670890 - DNA, 729 bp, Homo sapiens
aggattggctctgagagaactggctaagattcaggaagaaacaaaaaattcagaatccttacgaaattttggccctaattgtcatcaaaacctgtaggattctgatgacaattagggccaaaattttaggaggagatgtaggatgcaggagaaaattaaagtgttttctttatatcagaggaggaaatagtagaggtcagtgaaggtctggggtagggaaacattcagactgtccatgcatggctgtggagtgagactgcccttagcctgggtcagccttcctgggccataaatgggcatccgtgatgctaggtaactgtgggaacaaaatgacagcttagagcagccatgggtgatgtttggtggtaaaaaacctacaggcgtttggggtcccatgattgttccagaccatgactcttcctggttgtgggttgttacagagcaggagaagcagaggttatgacagttatgcagactttccccctcctttttctcttttctcttcccctgtgcttttccactgtttcttcctgctggcaccgtgggccttgaattcctgggctgtgaagacatgtagcagctgcagggtttaccacacgtgggagggcagccagttctgtcctctggcttcccactttgggatttgggggccctttatcctggtggggtggggggacctggggtaagccaaggaggtttcttagggggcccagggaaagggacatgggg

SEQ ID NO: 670891 - DNA, 130 bp, Homo sapiens
tacatgatacaattcgagctcgtgtacgtcgagaactgaaacgcagctacgttagtttagatatttctgttaggtcttcacatgtatgtatcccactgttccctagtttgagtgggaaaagaccctgggt

SEQ ID NO: 670892 - DNA, 397 bp, Homo sapiens
caccatctcatcccatcaatatccaacatctcatggatccttccaacctctcctcgctccttccaacatctcatcgaaccattccaacatctcatagcgccttccacatcatcatagctcaatccaacatctcatctccccttccaacatctcatcgctccttccaccatctcatacctccttccaacatctcattactccttccaacatctcatagctccttccaacatctccatctctccttccacaacatctcctgccaacttccaacatctcatgccccttccaaacatctcatagccccctccaacatctcctagcccacatcaccctccttcaactctacttctccctccgccctgcagatgtaggcaaggggtctgcagcatgtttggca

SEQ ID NO: 670893 - DNA, 578 bp, Homo sapiens
tgtttatcgatgccacctcagcagcatcttctgagggtggagcactttttgtgcaggggccctattaaggcggacactgctggcagaaccctctagctcctgttgcccgggaaccatcagtgctgtacaccttctgcaaactacttgaagagtcatgtatctttggatgcctcagcatcagtgacttggagctggttatagctgtctgctctctgggcaccgtggctggctggaagacataaacagcaggagcatggtctgcccagagttctggcagggctgggctaaggccacacctgcgggaagccaccgtgcctctatctgccttgtctccgactgtggagatacttaagcttgcctgccagcaggcaggtcacttctttgattgccttcttcctcagggacctctggcagtaaaagcggtagggataaccataggcaagctctcaaaagtagactgtcagttgcagctcggatgtggagggtgtaagtttccggtgggaggtccaagctggggacagcttgaaaatgatttacttaacatgacttttcatggtggcatcgataaccacggggac

SEQ ID NO: 670894 - DNA, 769 bp, Homo sapiens
ccccacccgcgagccgcagcgtggcccacagcttctgggcgctgtggccccgtgcagccgggcaggccgtgtcgtgaccttcgacctcctgccgtgtcgggcccgagcggtgagtccagcccggcagtcgcaggacccggccgccagcctcttccctccacctctccctgcccccagcgccatggcgctggtgctgcagctcggtggcggcggcggtggcccttcaggcggcctatgtgcggcatgtgctgccggggccggtgtccgcgccgcgctgtgctgagggcgctgagcgagccgctgagcgcggtgcagctgcggcgactggaggagcaccgctacagcgcggcgggctgtctcgctgctcgagcctgcgctgcaggctctactggacctggctgctccagtgtattcccgctctggatggcccccaactccatcacccttgcttggggctcgccgtcaacgtggtcaccaagctcgtgctcatctcctacttgtcccacggccaccgaagaggcaccatacttggacatacctttatgtgcactgggactatggattaaccagtcactggatgctattgatgggaaacaagccagaagaacaactctggttccccttaggggagctctttgaccatggctgtgactctctttccacagtatgtgtggcagtgggagcttcaattgccgctcgcttaggaacttatcctgactgggttaattcctgctctataatcgggatgtaagagataattgcgctcata

SEQ ID NO: 670895 - DNA, 353 bp, Homo sapiens
  misc_feature (178)..(178): n is a, c, g, or t
  misc_feature (180)..(180): n is a, c, g, or t
  misc_feature (230)..(230): n is a, c, g, or t
  misc_feature (275)..(275): n is a, c, g, or t
  misc_feature (308)..(308): n is a, c, g, or t
  misc_feature (324)..(324): n is a, c, g, or t
gaataattcacagagcataaaagtaactattagccattttaatgtgtacgatacagtggtgattcgtaccttcacaatgttatgcaaccatcacttctatttagtcaagacatttctgtaaacccaaaaggaaaccccatactcatcagagtcactccccattcctctgtcctcctangncctgacaaccactgatctgctttctgtcactatggatttacctcttctangatgtttcatctaagtggaatcatatatttgcgacctttgtgtcngggttccttcattggacataatgctttcaaggntcatccacgttgtggnacgtgtccggtgcttacttccctttggtg

SEQ ID NO: 670896 - DNA, 208 bp, Homo sapiens
cgtgtcgcatcccccttcgttcataaaaaaaaaaaaaaaaaagtaatttacacgtagcgacaggtcagccacccccatccgcgaagtgaatgctataaaatatggccggggcacatttatggagcacccactatcgggagctctaggaggggactcacaaaaggaacaaacttggaagagagccctgacaccaagggggatggacacc

SEQ ID NO: 670897 - DNA, 142 bp, Homo sapiens
cttgggggcccccccttcccccttttttttcccccaacttaaaaggtatgaagggttttggtttccctgggaggggggggaggcaaccagggttttcctgttccctgattttagaccagttgaataaaaggggcccccttta

SEQ ID NO: 670898 - DNA, 776 bp, Homo sapiens
gtagagatctagcgagtgaatcagacgtggacaagccgtgtggtggtgcgccatgatacggggcaatgatcccgataacagcgtggatgcgtcttcagacagaatcttataccaggaggctgaggaattcctcggtacagattcttgcctcggaaaatcatatacctctgaatcctagactcttgcaagaggactccctcaatgtggctgatttggcttgcctcttccgggccccacgtggatcgatccccatcccagagcttcctacccaaggatgatgagatggaaacgagataagcaggaggaagaaagaagtccctaagtgtggattactccgcggggaatgagaaagtcctgtccctgcttgccctggtttggccagaagtctggactctcagagagaaatgcattctggtgattacatggatccaacagctgatccccaagattgaacgaccggaagtgatttggggtagccatccaggacgaaggtgctggagagggtgaatgccggcaatgaccaaagtgggagctttcagacaatccattttccaagtacttctcagaacgttggggcatgctgtggccacaggctccaaggagactcatgtaatgtattacgggccttggtggcatgagcgagatgaggcagctatggggagttcagggccaatggtgctggaaccttgagggcttctatgcatgagctttatccatatcatcagcagcaacctggtggcaaacttgtccccccacgggtggactgacaagtccat

SEQ ID NO: 670899 - DNA, 210 bp, Homo sapiens
ccgctgaattagcgcattttacctgcgcgtatttccggccgcggaatactccgtgagcgccccggggcgcaccgtgaagaccgcggagaccacgccggcgacgacttcgccgtcgatggccagatcgaacggcagatctgccgcctgcagccggaccgacgtcggcgtctgcagcccgatggcctccgagacctcggtgcggccggtgag

SEQ ID NO: 670900 - DNA, 215 bp, Homo sapiens
gaccctccacctccaaggttcaagcctactgagtagctgggattacaggtgcccgccagcagcccagctaattatggtacatctccagtagagacggggttaccatgttggccaggctgtactcaaactcctgagctcacgatccgtcttgcctcggcctcccaaagtgctaggctaacaggcatgagccgccgggcatggctgggacacagcta

SEQ ID NO: 670901 - DNA, 166 bp, Homo sapiens
  misc_feature (75)..(75): n is a, c, g, or t
  misc_feature (93)..(93): n is a, c, g, or t
  misc_feature (110)..(110): n is a, c, g, or t
  misc_feature (157)..(157): n is a, c, g, or t
gataactcaggcccggtgccagagcccaggaggaggcagtggcaggaaggacaggctgagaagtctgcggctgantgggagcaaatcccccancccctacctggggacanctctagtgagactggtgaagggtggtcagcaggcagggaaaggaganggtgctgtg

SEQ ID NO: 670902 - DNA, 296 bp, Homo sapiens
ccccccccctttttccttttccgggttttttttccccaaagaaaggcccttgaagaagcccagcccgccctggcatgtgcccgagctatcatttgagtaaaagtaaacagggggtaaaaatcatattaagcatcagattcaacttaaattttttatttcatttttttcctttcccttctccccccttttacggggcaaaattatattttaatcaaaaatggaaatgggcaacaaagggtatttgttaaaaacgtttgtttttattgcagagcaaaaataaatcaaattagaagcca

SEQ ID NO: 670903 - DNA, 197 bp, Homo sapiens
acgctcctctgtgggggttcgccaggctctgggggtgaaaatctgctacacaccggggttatgctgctcagcaacggagcggatgtctgacctccctgcggctttgtgacagcggttcacagaccagagtagttctcaaaccactccgatgttgggattcatgttctgcctgagcccgccccacagagcagcagcgt

SEQ ID NO: 670904 - DNA, 130 bp, Homo sapiens
tatgttccttgatgcttcaacagtcccacaaagtagtgccatgaccacttggcccaggtgaacaggtgccagtgtgataaggctggtccctgcgacaagttccctttcttgcctgcctctattcagtttt

SEQ ID NO: 670905 - DNA, 111 bp, Homo sapiens
ccacaatttgcatcatccatcagctccagcatcctatcacctcatgtcatccgacacatgtgttctttatatactccggcagtcagtcaacagttcaccaatcatggggca

SEQ ID NO: 670906 - DNA, 390 bp, Homo sapiens
ttgccacgtaactatttctgggtacctattaacaataccccctaaccccaatacccttcccagcggcgggtaaccattactctagtctctatctcaaaaacaaaacagaacaagaacaaaaaactaaaaatagagctatcatatgatccagcaatcacagctgctaggtacatacccaaaagaaaggaaatctgtgtactgaaaagatatctgcatgcagtcccatgtatatggcagcactattcacaatagccaggattgggaagcatcctcagtgtccatcagcagatgaatggataaagcacatgtacaggtacacaatggagtactatccagccatagaaaagagtgagagcttgtcatttgccacaacagggaatgggtaccgag

SEQ ID NO: 670907 - DNA, 265 bp, Homo sapiens
caactgggccagcacactagtggtcaatcagttgctctaatcacatacatcggccttttccagactggccagcgcggaagcactagtaggacttggggtgctcttcaaatagcgggctattgatagggcattcccagaagacggtgtcactaagtaaatctgtgtgggaccacttttgcacggggcagagattttccaaacagagagcggccagctttcaagaggtcagaggtgctttttcatcccaggggaggagctgcgggga

SEQ ID NO: 670908 - DNA, 591 bp, Homo sapiens
gtgaggccacataggggccccacggatcaacaaggaattcgcctgtgccagagcctcacctacagctacccctgtggcaagcgtgtcttggcagcgcctcagaggctgttctgaaggccctgatggaccagtggtttagtgagcacgacatacggcttgtatagttctgttagcgcggagactgcggtatgcaaagcacagagcagtcctgcctttgactgtcagtgcaggccatcccgcttgctagcaaagatggcagctccctactgtgggtccaggcaatggagttccccttcgccgcccagtccagtggagggctaggtagctcacctccccagctgttgctgtggttgagccgcccgctgacccgacccccctcaggtcataagagagggctgttcacactgcactcacctaggccagggtggcccccagatggtcaggaagccccaggctcacgaagcctctttcagtgcaaaaggcatcaggaatcgcaaggcccagggtctgcagcctggggctggcctgccctggaggagagcgccagggggtggggcgacagtcttcggctatcctccctcccctccagct

SEQ ID NO: 670909 - DNA, 1008 bp, Homo sapiens
ctcaacgctaagtgtgagcggtctgttgtgagtcaggacagcgatgctctgtcccatttggatgataagtgccggctgaccttgcagaggtggatgcgcatggccatgcatgtggacccagaggtggttactctatattagaggccggaaagaaaggctgtacgcggaactgcgcgggagagttgggtggcggcccgtggtagcttatcgcaattgacgtctcggtgctctgtctggcgaccttgattagtagaacggtcgacgagatgtggccggggaggtagtatcctcctagtgagtttagcccagtgtgtgctctatcgccactaaactcttgagcttgctcatcctgtgcgtcacttagtgcgcgagagcctactgctgcaaggtacctgtgcgcagctctaaaagggcatttacagcattgtggcccttgagtgggttgctcatgccgtggattcgcttggaatgggactgtcgcttctgcaggtttgcgttaccctactgtctcagctgcaccatgactttttggggcatccaattagatcatgaaccgagttggtccgggtcgggcggggccgccgcatgggccctccaagctttattatttggactggagcgctgtcctccgggcgctgactaccccggttcctcccagtgcgtggtaactgacgctgggatgttgcttggggctggggtctggaaggtacccgattgtcagtagagatggccgagtaccatacggtgggagggtgaccaaggaccttgtgtagggggttggagatacgagagggagggctggcaaaggagaaaggagttctcggattaaaggaagaggggattaaggtctgcacacattgagacttttatatagcggtttttagaaagaaaaaaaaatgtgcgggggtggatatataatatggggaggaatgaaaattctcaaattatgttttgaaacaaggggcatatttttatgagagcccatattgctgattggtaattgtagtg

SEQ ID NO: 670910 - DNA, 204 bp, Homo sapiens
catacacatgctacaggcctgatgttggttatgtccaagggatgtccttcattgcagcagtactcattctcaatttggaagagggcagatgctttatcgcatttgccaatctcctgaataagccataccagttggcatgagacgatcgatcacagcatggatcttcacactatatagcaaatcactaccacttgatctggcctg

SEQ ID NO: 670911 - DNA, 1018 bp, Homo sapiens
  misc_feature (248)..(248): n is a, c, g, or t
gtaccgagcgcccccaagtggttcgagaccacggcgtcgccgagagaacacgctggtcgctggttgggtggcttcccctcttgtatggggtacgacgtttgagcccttgctgatgctcctccagtggagggacatgccaattgccgcgatatgcttctttggagtggacgttacagtaccaccactgataggaaaggctcagaggacgtcgatcctctttcgcatagtgcatgaaccctgtgcggganccgctctatccttcctcgggggacaccaagtgcagttggtgcaaccgcgaggtgtaacgaccctgaacgttccggaatctgaagctcgcgtcagaagcccgcatggatccttgggaacacctgtggtgcggcccctccaagcgtactcagcgccccacaggtacccctggcgctgcaatccctgggagttccccattgaattgctcccgggggcccacacgccggtatgagcacacgcacggctcggaaggtgcccccagacgcccgttaggcccctgagaggcgagtcagcgtccactacgctggcgtccgagcgaaacgaaagcgatcaaggaaccgggcccggcaggcactaccctgcgctgcataatgttcggcacttctcaagcgcatcgtgggcatggcgtaaagagcttggtattcgtggcaccgcgacctacggtctaccgcaggcgcctctgacatgtccattggggacttgcctccttgtccagctggctggaccacctcgaacgcagacgcatacgaggcccattgtgcaagtatccctggtcaattacatggtcaaattgcacagtatcccccaaagcctgttgtgtgcaactactgaactgagtgccatctccatgctgtacatggatgagtatgataaggtggtactgaacaattatcaaggagaatggtagtagaaggtatatgggtgcccgcctgagaaacaggcaaagtccttgaggatagacagatatacacaccacacacacacaccacat

SEQ ID NO: 670912 - DNA, 299 bp, Homo sapiens
cctaaacaagctccaaaatgcagaggaagaaattgttcccccgtggtagagtttttaatgaatatccatggccccagttttgggtttcaggtaagtcttggaagaagttaaacaccgttttaggcaaatatttatctctttgaaaaaatagggggggggtgccccggaaaaaataaccccttttgaatgacacgtttgtacttcatggatctgtcatcaagttttaaaatccgaatcatttgggctttttaaaaaccattttatactcgtaataaatatatttcatctaattgctgtta

SEQ ID NO: 670913 - DNA, 323 bp, Homo sapiens
atccaaagaattcggcacgaggggagcctgcttgttgcagctgtggggtgaggacggctctagctagttccctttttagactatggcgacataacctcgagttcatccagcagattaaggaccggattggtgttccgtttaagtggggaccgtttggccttccagccgctctggagctctcacaggatatggtgtgtacccctggtctgtgctctccctacactcctttgagaagagacgcgcacagactctaccctctgtatcacatttagtgacccctgtcgtcttgtagacgcgggacaatctttagtagacgcttttcc

SEQ ID NO: 670914 - DNA, 304 bp, Homo sapiens
gaaaacagctggaggtccttcttgattattataccaccattcgctacacctactttgaggtagtctgccgatcagagaatttttgacagaacggggagggtaactctacaccttatgagcacacaacagcaaccactgcacctactactcctacctatgtgtatccccgtggccttccatagcgctcgctgttaatcaaaatcttctagaagcctccttagttcctccttaaagcccttcccccgaacgcagttttatccgaaaaagcgaatgattagaggtcttggcgccgaaacgatctcaa

SEQ ID NO: 670915 - DNA, 487 bp, Homo sapiens
gatcgtctctattgaaacattaagaccgctttataattaacaaatcaggggtgcatgtatagtggctttagaatacatccagtgaaaatccttaaaggagtttgctatagaatctacggataaagacagcactccgaccactatacatccagaacattctatcatgtaaggtcagcatgtttgaacagcttgggacttgattagcctcttagaagactaacgtctaagtggtggttactacatcagcacacaaaatcctgtttaattcataaactaaactgtaataataactgcgtctacgttgttcatatgggatttttattgactaaacagcttccagcctctttcttcatgcatgccaggataacagtgataccaaaacctatcaaagattagaccatcctacccccaaaatataacaataggccaatatctctaaacaaatatgtaacaacagaaaaaaaatgctaaataataactagtagaa

SEQ ID NO: 670916 - DNA, 363 bp, Homo sapiens
  misc_feature (281)..(281): n is a, c, g, or t
cagtaactgtgatcgtccactgcctccagcctggcagcagagtgagactcctcaaaaaaaaaaaaaaaggggagaagaagaaatatggtaatgaaggttagtagatgtcttcaaaaggagcaaatctcctattggcctaatttcgtagcagccatttgttatgattataaatttaaatgagttttagctatagtaatctgcccttttccttgaagataggttccaggacccctagtggatgcctgaaatcacgtacactgtttttttcctgtactatactnatactatgctaaagtttaatttataaattaggccaataagagattaaaaataccaatataaatagacaattatagcaataaa

SEQ ID NO: 670917 - DNA, 980 bp, Homo sapiens
  misc_feature (222)..(222): n is a, c, g, or t
  misc_feature (290)..(290): n is a, c, g, or t
  misc_feature (415)..(415): n is a, c, g, or t
  misc_feature (430)..(430): n is a, c, g, or t
  misc_feature (444)..(444): n is a, c, g, or t
  misc_feature (452)..(452): n is a, c, g, or t
  misc_feature (454)..(454): n is a, c, g, or t
  misc_feature (497)..(497): n is a, c, g, or t
  misc_feature (505)..(505): n is a, c, g, or t
  misc_feature (522)..(523): n is a, c, g, or t
  misc_feature (533)..(533): n is a, c, g, or t
  misc_feature (548)..(548): n is a, c, g, or t
  misc_feature (568)..(569): n is a, c, g, or t
  misc_feature (612)..(612): n is a, c, g, or t
  misc_feature (615)..(615): n is a, c, g, or t
  misc_feature (620)..(620): n is a, c, g, or t
  misc_feature (630)..(630): n is a, c, g, or t
  misc_feature (952)..(952): n is a, c, g, or t
agcgggttttgtgggccccccgagatgaagaggtacggtcgaagccaggagccaggccgagcgggagctgaccaggcttgactcgggtacagaacgaggcaccagtccccttgcgaaccgaagggcctcgcagtggatggaggaggcccagccctgaggtcaacgccaaccaggctagcctggcacggggcctacagggtgggtaggcgggcgtgccgcagnccgtccagggccttccctcaggtcccgggcgaggggcctacgctgcgggccggcaacaaaggcccgantcggcccctcgggaccagagccccacccgatcggaagcggatcctttaccagaggccataggccagtgactaggccgggcctgggcctcccatcggggccggactaaggacgaggccccggggangcccctggcctaccngacccttttctcangccgacancngccaaaagatgcaacgtgccctgccaggcgcccgccagcactngggggccnttctggccagcgccagnntggtggtganggctctgtgtgcggnggtactattcctctacctgnnctccttcgccgtggacacaggctgcctggcggtcaccccgggntanctctntcctcccaanttctggatctggaccctggccacccatgggctgatggagcagcatgtgtgggacgtggccatcagcctgacaacggtggtggtggccgggcgtttgctggagcccctctggggggccttggagctgctcatcttcttctcagtggtgaatgtgtctgtagggctgctgggggccttcgcctacctcctcacctacatggcttccttcaacctggtctacctgttcactgtccgtatccacggcgccttgggcttcctaggtggcgtcctggtggcactcaagcaaaccatggggggactgtgtggtcctgcgagtgccccangtgcgcgtcagtgtgatgcccatgctgc

SEQ ID NO: 670918 - DNA, 346 bp, Homo sapiens
tgtgcctgaaggtacacagaacgactgaggggaatgagaggttggacgtggatggctcacgcctataatccctgcactttgggaggctaagtcaggcagatcacttgaggccaggagttcaagatcagcctggtcaacatagtgaaaccccgcctctcttaaaaatacaaacattaggccgggcacagtggctcacgcctgtaatcatcccagcacttagtgaggccaaggcggatggatcacaaggtcaggagttcaggaccagcctggtcaacatggtgaaaccctgtctctactaaaaatacaaaaattagccaggagcggtggtgcacacctgtaatcccag

SEQ ID NO: 670919 - DNA, 217 bp, Homo sapiens
gacacctgctgcaacagatgatttcagtgaatagaatagaatgtagactgcgcatggtggctcacgtctgtaatcccagcactttgcgaggccgaggcgggtagatcacttgaggccaggagttgtagaccagcttggccaacatggtgaaaccccgtctctactaaaaatacaaaaatcagctaggtgtggaggcacttgcctgtaatcccagcta

SEQ ID NO: 670920 - DNA, 524 bp, Homo sapiens
tttttttttttagctgcaggagcttttattttattttatttttccatatcccaggggcacctggaacgccagcgagacagaactgttcactcccctggaaagggggcctgaagccagggagccaagtggtctggctcggcggttcccacccccatggagcccaggaaagtaagatccactggtttgaaattctcgcttccagcacagcagcaatctgagatccacctgggacggtggcgcttggtagggggaggggcgtccgccgttgctgaggcttgagcaggcggttttaccaccacagtgtaagcaaagctgctgggaagttcaaactgggtggagcccattgcagctcagcaaggctgccgtgttcagactgcgagattgctcctccctggacagggcatctctgtaaaaaaggcagcagcccagtcaggcttgtagcagacttaaacgtccctgcctgatggctctgaagacagcagcggatctcccaacacagcatgcgagcctgctaagggccagac

SEQ ID NO: 670921 - DNA, 694 bp, Homo sapiens
ggagaaaggaagacttgcggagtggctactgttgtttctcactaacactgagaacataaagatatttatgggaataaatgtgagagagaagttgtcagcaggagagagcattagtgtggatgaatgcaagtcattgtgccaggttttgacgaacccactggcaagactctggtattggccgatgctaggatgttcgagtttagctctatctgtccgtgtcgagacatagcgggagtttaagagagctgtgaaagtagcgaacgaggacaagaactctcaatacaagtatttgtggagcacgtgtctttaaggatgctttgattatggagtggtggatgaactgtcttgagtcagtgaagagtttcttgagggtgttgaaacaacatgaatgcattcgaggtttatgggtaccacaagatcagagtatacaagaatactggaagtgtgtgaagaaagaaagcatgaaaggagtaaaagaagtctggaaacaagcgtggaaaaggtctgttgtaataaaagatataatagtatggcaattatagttgttccagaatgtcaaaatttgtggattgttgaaggaaggtactggctattgtatcttgcttaagtcttcatggatattctgtgtgaacataagcagtgtctggtgacttgcgttgctgatgcataatgttactgagagaacttagtagaa

SEQ ID NO: 670922 - DNA, 429 bp, Homo sapiens
  misc_feature (38)..(38): n is a, c, g, or t
ccgccatccccatatgagctgctttcctatcttcacanctgccacctcatgtcacacctatctttgctcaccttttttttagagatggagtctcgctcctcttgcccagcgtggagtgcaatggcacgttctcagctcactgcaacctccgcctcttgggttcaagcaattctgctgcatcagcctcccgagtacctaggattacaggcatgtgccaccacgcccggctaattttgtattttcagtagagacggggtttggccatgttggccaggctggtctcgaactcttgacttcagatgatccatctgcctttggctcccacagtgcttgggattacaggcgccagccacaattgcgccggctattttctcacctttacacctgtcttcttatccctcagtgtggggaacagggggagatccctct

SEQ ID NO: 670923 - DNA, 856 bp, Homo sapiens
  misc_feature (16)..(16): n is a, c, g, or t
  misc_feature (132)..(132): n is a, c, g, or t
  misc_feature (646)..(646): n is a, c, g, or t
  misc_feature (746)..(746): n is a, c, g, or t
  misc_feature (812)..(812): n is a, c, g, or t
  misc_feature (831)..(831): n is a, c, g, or t
  misc_feature (837)..(837): n is a, c, g, or t
ctatcaccttttcttncccccttcaaccagagtcccctcctgctcctctccgctagtccggcccctgacccctttccccagtacccacttcctgcctctctcattaacccttccgtagctgctcaccatgancccatcagaatccagttaaaagactcttccaaatttcccagcgttcctcaataccccatctctctaacccaccaaaagggcctacagcccatcgtaaacaagctctgctcatgcagtcttcttagaccaacacactctccatataacacccctatcctccctgttaaaaagtctgatggctcataccgactcgttcacaacctccaagccatcagtcaagctgtcctccctattcatcccatagtccataacccctatccacttctctctctcgtcgctaccaacaccaccctctacactgcaattgacctgaaggatgccttctttaccatttccctacaccctgattcccaaaacctatttgctttcacctggactgaccctgacaccctccagtcacaacaactcacatggactgtcctccctcagggcttcagggatagccctcatttctttggacaagctctagcccgaaacctcacttccttaaacctgtctcccagtcatcttcaanatgtggacgaccttcttctttgcagcccctctctaaaagactctcaaactcacacgggcactgctctcttaaactttctcgctatcaaagggtatagggncttccccttcaagggccaactttcatcttcatgatgacttacttaggaattaactttccctggggnccaggtatgactcagccanggcagnattaattgaaaattacccc

SEQ ID NO: 670924 - DNA, 326 bp, Homo sapiens
gccgtgatcatacttggttgggtaaacctcatcattatctaaaatacaaaacttagccgggcgcttgtgacgcacacccatagtcccagctaactccgcgaggctaagacaagagaatcacttgaacttgggagacagaggttgcagtaatcatgagatcactccgctgcactccagcctgagtgagagtgagactgtgtctcacacaaacaaacaaaaaacaaacaaaaaaatttgcattgtaaattgtacctcaaatttgagcagttttggtgtatgtgtaaattaaagtaaaaagcagtccacaataatgtattgtaatactg

SEQ ID NO: 670925 - DNA, 1010 bp, Homo sapiens
gcaccaaatggctggatgactgccgtgtgcagctgtgggtggtgccctggggtgccctggtggccctgggatggggaaccgcggtggcttccgcggaggtttctggcagtggcatcctggggcctggggtctgctgtgcctgtggactgtgggcctgggtggcctgaggcctgcggagctctgcggagtgcaaggccgaggataagtgagtggatgcccgtcaccaagttgggccgcttgtgtcaatggacatgaatgatcaagtccctggaggagatctatctcttctccctgcctattacaggaatcagagatcatttgatttcttcctgggggcctctctcaagggatgagtgttttgaaggattatgccatgtgccagaatgcatgtcccgttgcctggccagggcgcaccagtgttcacaggcattttgttgctaatcgtgggactacaagtggccagcgtcgtgtctagggtgttacggttgctccaaggatggttggtcaaccgccattccgtgtgggccatcatacctggccaagctctccatcgtaccccgtgcggcagaaggctacttgggggaacaagatcgggcaagccccacactgtccttgcaaggtgacaggccgctgcgggctctgtgctggtacgcctcatccctgcacccaggggcactggcattcgtctcctggcacttgtgcctaagaaggctgctcatgatggctggtatcgattgacttgctaacacctcatgcccggggcttgatttgccaccttggcacttcagccatggcacctttgatgccatatctaagaacttacagttacctgacccgcgactcttgaagcgcgacgtgtattccccacgtctccctaatcaggagttcacttgaacaccttggtcagaaccaaccaggatctccgggccacggactcagggtccagtgtggtacgacataggattaaacccgcaaaatacgtaattaggtgtccattccacatccacaat

SEQ ID NO: 670926 - DNA, 240 bp, Homo sapiens
tctgaaacaggaaaatggcttgaccccgggaggcggaggttgcttgacccaaaattgccccattgccctccaaccggggtgacagagtgagactcggtctcaaaaaaaaaattaaagggaattcacatttttggccccacgatttcccggcgggcacagacagacaacgcttgtgctgacaacatagcaaaagcttctcttgcacaaaggagcaccttcgaatgtgcccaagggcccgtg

SEQ ID NO: 670927 - DNA, 192 bp, Homo sapiens
tcccccacaccacctgagtcaggaggcagcgtgctggacctatcagtggcctctctagactctactgatccatcccaaatgaggatttaaacagtccagaaagcagggatcaggaatgaggacagggaagtggactcccatgatgttctacaaggttcaagaggattctatggaataagcagatcaacttta

SEQ ID NO: 670928 - DNA, 1079 bp, Homo sapiens
  misc_feature (863)..(863): n is a, c, g, or t
gtctaaacacgtgcgtaaaacactattggggccctgtctcgataattttatagtgtttcgtagccacccgacccctgtgtttgtggtccccttatccgcccgtggtgtgttactgccgacattgcgctctcgtggatatccaactgggggggggttgaggcacaacttgcaacgaaagctctccagatagtgttatagcgtcccccttggaaatttcgcgccggccaacacttggggggaggagcaacgtttattggccccccctcatgccaccaagttgtcttcaacataagtggtagagggtttcacaccccctttggcccacttcatttttttgaactatgtcgcagcccttttgaccgcaaaataaaaagtggcgtcttccctcttttaagcctttctctccggcccccccttttgtttcacgacgacaactaccacaggggaaacaaccccctctctggatttataactgtcgctcggccaacttaccagtggaaaccccctctgggggcccactcaaaaatatttgagatgttaaatctctcccacaacgttatgcccaagaggagccctaccgcgtgacacccccctttctgagccacttgtccacgaaaggggggagagtctccgagacataaggtctctctaaggcgtttctaacaaatctgagaatacccgctccgcaaggcgcacacctgtctgcgccctattttttctttcattaagcccgcgaataacaccacacgacttatttatataattatacacccctttcacccacactacacattctttcctatgggaccacaacactattgagacgcaccttctccccctgtagaactttaacaccacaacantatttttgtgcacaccagaccctacattctaacactccctgttctttatgtaattctgtaccagctatacaccccgattctccgcttacgacaccaacatctataccacctccttatgtgaaaaaacattctctacaccactcacacctagccattacattatatgataagtttccataccccattaccatttccagcatttcccctcaaacctta

SEQ ID NO: 670929 - DNA, 144 bp, Homo sapiens
ggcctggtttgccagcctgcccagtggtgatcacctctaggagggaggacgcggtcctctcaggaagtggggtgtgcattcggggcacttgggtttctaaaatgctgaaattctttaaaaagagatagaggtccaatcttccgg

SEQ ID NO: 670930 - DNA, 1153 bp, Homo sapiens
  misc_feature (1)..(1): n is a, c, g, or t
ncgcagcgtgctatactgtcgggacgtgtggtttttctgccctggtttgctgtgtcttgtctgtgcgcttgtttttcggttgtctcgtctttttttttgtgttttgccctcgtgttggtgtgggcgtccctgtttgtcgctgtttgccctgggcccatgccccctgttgtttgttcacttgtttatatagaagttggggtgagatatttttgtccatgctcaccggcctcgctcttttggtgttaattcccctttttaagtctgtggctctgtggttttcgcgctttgatgccttgtttgtgcccggacttggtccgtcccttggggttgttatgctcggggtagctttgcgcatgcctccacctttatgtgttttactaggttcatacggtttggcaccgtatatggcccatccctgagctgcatgccgagtttgccattttgtatgtttccctggcccagaaggcttagttggttgtgtgactgttgtataagtccgcgtttctgtagcctaagatttgagtgtttcccctactgtacgttcccctggtatgacctccctgagttaatttgggttataactggagctccatttccacccgctttgctctttgttccacatcgctgatgagagaagccttagtatctgtaaatttgaatttgaggcccttaaacccccttttaaataattaggctctgtaattaataagtgtaattaaggcttgtttttggtggagaaaaaaacttacgcttaaaccctcacggtaaactctctatgaattatgcgccacgcttccacggtgtatttttgtattctctaagtgatatggatcactatcgtataaaaatatgagataaagttgggaagatatatttgaattaatgctcgttctgcttgagcggaaaggtcacatgtaatttatgaaaatttaaaactctttggttatattgtgttcaccactcactagtattccagcactcactttatagtttggttttgagaactctttctggtattacgctttatggccacaatgtatataaagaaacccagttttggttatatttttataatttgtaaagtaagtttggttaaagtgatccctgttctttttttattttattgtcctttccattaaaaatatttgaaaga

SEQ ID NO: 670931 - DNA, 381 bp, Homo sapiens
  misc_feature (45)..(45): n is a, c, g, or t
  misc_feature (57)..(57): n is a, c, g, or t
  misc_feature (62)..(62): n is a, c, g, or t
  misc_feature (82)..(82): n is a, c, g, or t
  misc_feature (85)..(85): n is a, c, g, or t
  misc_feature (117)..(117): n is a, c, g, or t
  misc_feature (128)..(129): n is a, c, g, or t
  misc_feature (147)..(147): n is a, c, g, or t
  misc_feature (151)..(151): n is a, c, g, or t
  misc_feature (161)..(161): n is a, c, g, or t
  misc_feature (176)..(176): n is a, c, g, or t
  misc_feature (221)..(221): n is a, c, g, or t
  misc_feature (233)..(234): n is a, c, g, or t
  misc_feature (237)..(237): n is a, c, g, or t
  misc_feature (252)..(252): n is a, c, g, or t
  misc_feature (264)..(264): n is a, c, g, or t
  misc_feature (274)..(274): n is a, c, g, or t
  misc_feature (284)..(284): n is a, c, g, or t
  misc_feature (292)..(292): n is a, c, g, or t
  misc_feature (296)..(296): n is a, c, g, or t
  misc_feature (313)..(313): n is a, c, g, or t
  misc_feature (315)..(315): n is a, c, g, or t
  misc_feature (341)..(341): n is a, c, g, or t
  misc_feature (350)..(350): n is a, c, g, or t
  misc_feature (371)..(371): n is a, c, g, or t
ggaagaacgaaaggaaattgatgtggaagtgaggaaggagattgnggatgctgcccngtttnccgcggccggtcctgagccnccnttggaagagctgggctaccgcggtctactccnggcgacccgcnntttgaagttcgtggtgcngatncagtggatcnagtttaagtcagtcngttaaggggaggagaaggagaggttataccttcagggggctaccngacagtgttctnnacntggttaaggaggaanaaaacccggtcnatgaaattcnatgaaattcntggaaacnccgntaagtgtgtagattgancnggtagtaattgcatgcggtttgtacnttagtgcgntaaaagatgaattattgagtncgtaaagatt

SEQ ID NO: 670932 - DNA, 849 bp, Homo sapiens
  misc_feature (79)..(79): n is a, c, g, or t
  misc_feature (81)..(81): n is a, c, g, or t
  misc_feature (118)..(118): n is a, c, g, or t
  misc_feature (143)..(144): n is a, c, g, or t
  misc_feature (209)..(209): n is a, c, g, or t
  misc_feature (214)..(214): n is a, c, g, or t
  misc_feature (258)..(258): n is a, c, g, or t
  misc_feature (268)..(268): n is a, c, g, or t
  misc_feature (292)..(292): n is a, c, g, or t
  misc_feature (295)..(295): n is a, c, g, or t
  misc_feature (310)..(310): n is a, c, g, or t
  misc_feature (336)..(337): n is a, c, g, or t
  misc_feature (358)..(358): n is a, c, g, or t
  misc_feature (381)..(381): n is a, c, g, or t
  misc_feature (389)..(389): n is a, c, g, or t
  misc_feature (395)..(395): n is a, c, g, or t
  misc_feature (405)..(405): n is a, c, g, or t
  misc_feature (430)..(430): n is a, c, g, or t
  misc_feature (487)..(488): n is a, c, g, or t
  misc_feature (490)..(490): n is a, c, g, or t
  misc_feature (527)..(527): n is a, c, g, or t
  misc_feature (542)..(542): n is a, c, g, or t
  misc_feature (565)..(565): n is a, c, g, or t
  misc_feature (684)..(684): n is a, c, g, or t
  misc_feature (834)..(834): n is a, c, g, or t
agccaccgcagaggccaaagccatgccaggggggggggcgggagccaggggaacaaaaacagccttgaacaagaaaacncnggaggcagaatgcaacagcccggcccccccaacaccngagccaggggaagggccccggaaannggaaggaggcacaagtgccaagggtacgtggcagcctcccagtagcattggatgcaggaaaaaanacatngacggggaaaaacaagccgaaccagggggagggggagagccggnggcgacacangaaccccaaaccaaagaccagggngcngaaaaagagccaacncaacacaaggaggatgaaggcgaaanncaaccagaaaacaaagaaganagcattgaaaacgggagagaganagacagcnccaacngcggagccanaaaccagaagcctgacatgtttggnagtccttttcaataagcacaggaggaggggggggagaggggcaagggcgggagacanncngcgcggggcacgggaggcagaagacaggggcggggcnggtggcacgggtggnaggagcaactataaacataagtnagctgtttagcaaaacacacattcctagtaggttttggttttttgatctttataaagatgaggtttttttcctagttactgtattaagtatgacttcttttagaaggttacaaaaaaantcagatgttgatacctttttaggaaatgtgcataccactcatcaaatggaatgctgaaagtttgaggtgcttgtatataatcggataaacaaaactgatcaacccaatgtgattttaaaagccccaaagaagcttctgttttgggtctgntctcttgatggagaa

SEQ ID NO: 670933 - DNA, 396 bp, Homo sapiens
  misc_feature (20)..(20): n is a, c, g, or t
accctgcttgagccaggagntgagtccctctcccactcattccagcccaacaaaggaaggaggagggggcccatttgtttgtcccagagcttattggccattgggtttcattcctaagtggggccagggtgggagggagggacaagggggaggaaaggggggagcacccacgtgaaagaatttgcctgtggccttgcccgccagcctaagtgccacttgacattctttgtcaccagcaacatttggagccccctggatgtcccctgtccccccaattttgcattccatggcccccccgtgccacccgtaggcagcctttttgttataagaaaagcagacgcagcagttgggacccctcccaacctcaatgccctgcattaaatccgcaaacagcca

SEQ ID NO: 670934 - DNA, 112 bp, Homo sapiens
ggtccgtattgagtggcatgtgatacagaagagggcaggtgcagtgactcacacctgtaatcccagcactttgggaggcgaggcgtgagccatcgcgcctggactttttttt

SEQ ID NO: 670935 - DNA, 384 bp, Homo sapiens
tgttctacgaggatcccggaggcaactgcacattagaaagagtattttcactccttaagaaaaaaaaaaacaggcctggtgaagtggctcatgcgtgtaatcccagcacttggggaggccgaggtggatggatcatctgggggcaggagctcgagaccagcctggccaatgtgaaaccccaactctactaaaaatacaaaaattagccagccatggtggtgggcacctgtagtcccagctacctgggaggccgaggcaggagaatcccttgaacacagaaggcagaggttgctgtgagctgagattgcgccattgcactccagcctgggcgacaagagtgaaactgcgtctcaaaagaaaaaaaagatgttcccaccttaatgc

SEQ ID NO: 670936 - DNA, 328 bp, Homo sapiens
gagaggtgtcacagcaaccccacaatgctggtagcctgagcggagacttccagactcaggaactggagaaagtcagtctgttgtttaagccaccagagtggtgtttttgttatgtgcagctggagcagactgagacaggtggcagccatcgaaacacgcattgtaaagctacaactgtgtattttcccgtagcaagtggtcgcatcctgtgactatccaggacccatcagcctctcctttaatgccatccatcaacaatcattgcctgagtcagttatttcaacagaggttgcaaaatggcagttttcctatactcccatttctctta

SEQ ID NO: 670937 - DNA, 496 bp, Homo sapiens
catatacatagaaacagtcgaggaaacaacagagtgctggagaacaatgtggcgacatagagaacacttacacactgtaaaatagggactgtaaactagaaagctatatgtaataataagccatttgtactttaaaaataactgtgagcatagtattattcatcataatcattattatcatcaaaggagaggacctctagtgaatttatgtagatatgcccatgtagcacagaaccatacaaaaatagctagcaaaaatagcctacaccttttgaaactgtttcccatgctaagaagtatagaatggaaaggggtcacagacctaagatagctagatatcacatagtagccacagccaattatcagggagcactcccaagggacaggcgaccttagatcatccatactctatgtcagcccatgtaacttactgtgcctatctcaaagttgcaaggatccatgtctaatatcatacatgctattcctaattttctgg

SEQ ID NO: 670938 - DNA, 594 bp, Homo sapiens
taaacccgagaataaaggagactcctttatctagtaagacaagctttaaatactactgactgccctaagaataaagattactaagccatgagtccatatagaaacgataccttaggtatacctatagcttaacatcccatggaatactgccaagaaaatctccagatggaggagccaattgctgtggtctcttcagatctataggatcggcctccatctctgtccctagccttccacacacttccaagatcacaggggaaggaggagccagaagcaaccgcttcgccattcactcaccctgaagaggcttcccttctctatcccacaggcgaatgaggtattactatgactagtcaagtatcttccccttctgcccttaaactacactgaggccaaattctgacaagaacttgcacatctatatacataacaaataaacatataaatacattacgtaacaaactgaccatttacatgtcaagatgaagaagcagatctacttcaagaactaaataaaatctcacatctaagttaacatgaaaatccagtgattccactttagcaggaaaaatttgaacacaaactaaaaatccc

SEQ ID NO: 670939 - DNA, 168 bp, Homo sapiens
gccggtaccccctgttggaaagtttctccagttacgcggtggatgatacggcactcaaacgttccaagaggctgtcagggttcacttcaatattgataacaccttctagttcaatgccaagttcagccaatgttttgtccaaggcatgagcttgttcaattgtacgtg

SEQ ID NO: 670940 - DNA, 107 bp, Homo sapiens
tttgtagggggatcggttcacagcatgaggaagtggatgcagctgtacagagaagcaacctattgacaacaacaggggaatttccaattaccatcgagtacacacgc

SEQ ID NO: 670941 - DNA, 458 bp, Homo sapiens
ctcttgagttgatgaggagggtagagtggaggaccaggtagagtgggggatcctagatcatgtatttgtcttacttttataaaaaggaaaaaaaggaataagagtacattttcggccaggtgtggtggctcacgcctgtaatcctaacactttgggagaccgaggcgggtggatcacggggtcaggagttcgacaccagcctgaccaacatagtgaaactctgtctctactaaaaatacaaaaattagccaggtggtggtagtacacccctgtagtctcagctacacaggagactgaggtgggaggatcgcatgaggccgggaggtcaggtctgcagtgagccgtgattgcaccactgctttccaacctgggcgacatagtgagatcctgtctcaaaaaaaaagatgaaaaaaagtatattcattttagttgcatattgtggacaaccaagagtgtcg

SEQ ID NO: 670942 - DNA, 872 bp, Homo sapiens
tagagcagccctgggaacacggaaatgaccctgtctctacacacaataaacgagttagctgggtgtgctggcacacacctgtagctacttgggaggctgagtgaggaggattgctcgagcctagcaggtcgaggctgaatgagctatggttgcgccattgctctcctagcctgaacaacagagtgaaaccctgtctgaaacagcacacacacacacacacacacacacactcacttttgacataaatatatataacactatgaactcaccataatgaatagtatacactctgaactcatgcttatatcatacaggtgttacgaagtacttttcatgacccgtgttttcaataattcttcatatcattatttataaatgtggtggtaaacatatatcttgtgttaattacttagaaccagtcttctatagctgggagtatatagaccagtataaatatttcattattacaaataagtgccacaaatataaactcttgactgaacttgcctgccattaatattgtatccctcagagatctgcggtagcaatgtgctcattaccccttattctggccaaagaatttacaatgtacactgttcctgcccaggtgcggagggtacataccaaaggaccagcacattggggggagcagaaggcgggtgggaacgcttggacacatcagttcgaagaccagcgaggcaaatggacaaactagctcattaaaagaacaaaaatactgaattggggtgaacacggcaagaagccggcccgcgacagcaattcggaaccccgagtagaggaacagagccccaaaaccgaaagataaaaaacgaacggggcaagtaaccgattcgcgcccaaagaagaaacac

SEQ ID NO: 670943 - DNA, 125 bp, Homo sapiens
cccccttgcgtgtctcatagatgatggtgaaaccccagaagcatgctgctctccgggagcttgaagaagaaactggctacgaagggggacatggccggaatgttctccagcggtctgtatgagac

SEQ ID NO: 670944 - DNA, 121 bp, Homo sapiens
gcggccgcctactactactactactgctcgaattcaagcttctaacgatgtacggggacatgagggcttccaatgtgctgcccccctcttaatactcaccaataaattctacttcctgtcc

SEQ ID NO: 670945 - DNA, 1723 bp, Homo sapiens
  misc_feature (316)..(316): n is a, c, g, or t
  misc_feature (327)..(327): n is a, c, g, or t
  misc_feature (1723)..(1723): n is a, c, g, or t
tcggtcccagccaccgctaacactacaggctggttacccccgaccccctcactactcctacctccgtgggcggtctgcaggcgatcgccggagtgaggcttgagagctggtgaggcggaatctgctcggactagtagtcatagctggtggtcgggcggtcgcaattctaggaattggaacagacaggaggtaagcacgcagtcgagcgctgcttggccactcggcgtgaatcgcgcgccccctgtagctgctagggtgagctcttgaaccatttaggcacccgagtgtgggcggtcgcaagcgctgcgtcaatgantcgcttgtcantagtcttgcgtatgtgttgtcagctgtgcgacgaggcacggccactgggtcagggtagtcgatgatcctgaatgcctctgcactgcactcgcagggcgcagcgagcgcgcacagggagctagtcttgtcagcccgggtgagccaagtggaccacttcacaatgggcattgagggagtcctaccagcagtgggtgccaattgtcgctgtctaagtggccccctgcccaatagtgggtggagacattggccgaacggcccttgcattgggggtgttcacagtaagcgagcccggcacatttgactttgaccccttcccctaggattaacccttgcgagttgggggaacactcggcagtaggccacggcccaatgcacttgcaatttggcttcgcgcctttaattggagcgaacgggggcgcctagctcgaaaatttaggggaggaaccctaaaaagtgtgtgcctcctgtggggacgacttttgcacatcggctcccggacctcccgagattagtatcttgggaccccttgggagggacacgctggcacctcggaaacttgattgccttccaagttaaaattggaattccattccaagtgggaccgttgtacccccactttggtgcctatgaccccctgtggaaccaccgtttttaagccgccgggacccctatgaggccacgtttataacacacggtaaacgcctacacttgggggcacttcgatcaaagaaccacacggcgcgagagggttacacacaagggccacaacttccattaggggggtggtcggcacgacaaaaagtatcaagacttttggtggtggtaggaagccgtatgagacgtagggcgactttaatacaaattccaatcgggttgttaaggtgtggaggacacaacgagaggacgtttggtttaatcaattatagtagttttagccagaaatctagagcgtttgggacacagaaacgccggagaaaatgcgaggagtccgtatatcccttgcgcgggatagaaaagagacctagggacatggaaaggcccttataagaaaggacaaaccctatggcgttgttagccagagcgcgtccgtctttactgtgtgtagacattgtggccctccattgtgtaggccaacgccggacaaatttaccggaatacttcccaggatgtttaccctggaggacacaacgctgtggctgtatgaacgtgaacttcagtcataaccctcgcgttccaaggatgctgacacagacgaaaactttctgcgccccgtgtggtgtctcgagagaaaccctggtgataacgcacacgcatctgtgacgcgcgcacccttggcgacagcgcccccagtgtggcttaccatcacagcatccgacacggcaacagatcggcgcgn

SEQ ID NO: 670946 - DNA, 749 bp, Homo sapiens
agcggctctttcccttcggtgtgccactgaagatcctggtgtcgccatgggccgccgccccgcccgttgttaccggtattgtaagaacaagccgtacccaaagtctcgcttctgccgaggtgtccctgatgccaagattcgcatttttgacctggggcggaaaaaggcaaaagtggatgagtttccgctttgtggccacatggtgtcagatgaatatgagcagctgtcctctgaagccctggaggctgcccgaatttgtgccaataagtacatggtaaaaagttgtggcaaagatggcttccatatccgggtgcggctccaccccttccacgtcatccgcatcaacaagatgttgtcctgtgctggggctgacaggctccaaacaggcatgcgaggtgcctttggaaagccccagggcactgtggccagggttcacattggccaagttatcatgtccatccgcaccaagctgcagaacaaggagcatgtgattgaggccctgcgcagggccaagttcaagtttcctggccgccagaagatccacatctcaaagaagtggggcttcaccaagttcaatgctgatgaatttgaagacatggtggctgaaaagcggctcatcccagatggctgtggggtcaagtacatccccagtcgtggccctctggacaagtggcgggccctgcactcatgagggcttccaatgtgctgcccccctcttaatactcaccaataaattctacttcctgtcc

SEQ ID NO: 670947 - DNA, 599 bp, Homo sapiens
aatttctattcttttctattctttaatcatctcatcaaacaacctcacaaaccccaatcaacccaatccaaacacccccccccacaaaaccatccatgtataaccaacttaccccacaaatccaaccacccctcatacaaaacacctccacctacacatccaacaataacataccaactattataaaaatatccacaacccacaaatcactcaccccccaccccccacaaccaataaccacacacccatccaacccccaccctctacacacacaaacaccatcctcacacctcccacctaaataccaaccctcctcactatctcactcaacacacacaatataaccccactaatacaacaccccacacctccccacgctaaaaaactccctaccctcaacatccaccaacaaaacttcccccaacaacacccctacccacaccaactccataccccaccaaactccacccttacaaaaccccccaacacccaacactacccccaccctcccttcctccatacccctcaaatcccccacaacaacacaccctacactcaacccacatcacaacacacacccacactcgacacacactact

SEQ ID NO: 670948 - DNA, 865 bp, Homo sapiens
  misc_feature (339)..(339): n is a, c, g, or t
  misc_feature (342)..(343): n is a, c, g, or t
cggcttgcagaaggataagcagagcatggacggtggccccagtgacctaagccactatgggctactagaaaagcaaggctggcaaagtgacatttccagcggtcaactcaggaccccttccctgcagatacaatcgagagcagtgagtaagtcatagcaagctcttccccacaggtataggggaaacactggtgatgggagtagctcttcttgctcttagctgcatgacaaccatcgtgccagccaggtagctgaagcctggcagaggacgcccagtggcgccttttcagtaggttcttgggaatgctccgcagccaacttaagccgactgagttcctntcnncatggggaccagtgtgcgatggctgcacacagcagcttccttggtagtgtacgcagcctgttggttgtatgggttgctctaagggaccttggagacaggcctttcaggtggatgttcatgtttctgaccttgcactaccccaatgtaggctccaaacaggcatgcgaggtgcctttggaaagccccagggcactgtggccagggttcacattggccaagttatcatgtccatccgcaccaagctgcagaacaaggagcatgtgattgaggccctgcgcagggccaagttcaagtttcctggccgccagaagatccacatctcaaagaagtggggcttcaccaagttcaatgctgatgaatttgaagacatggtggctgaaaagcggctcatcccagatggctgtggggtcaagtacatccccagtcgtggccctctggacaagtggcgggccctgcactcatgagggcttccaatgtgctgcccccctcttaatactcaccaataaattctacttcctgtcc

SEQ ID NO: 670949 - DNA, 529 bp, Homo sapiens
catcgacaagttccacatgcttacgatctctatctctgtgaagaagcagctgacggaggagtaagtcgtgacctagtgacaacctgggggtagaattgtcctaaggcagttgaccccaccttccaacatgttttcactttatttgcccctccctacatttgggttaggttccatttggatttgcagcaataatgactttatttctctcttggtcaggatttggcacataaaatccttttattatagaactagctattttagttacatagtaatgtaactaatggagagatttatagagaattttgtttttgctgtcatatatgtccattttggagacagatatgatagaactagaaattaagttgcatttctgcaagtgccatttgaatgaacttcaagtatcttcttaattattaaattttctgatgaaggcatagtaacaaatatatagtattattaaatctaattaatatttggaaatattaataaataggtattttatttactgtaaaaagtcaaacttcattat

SEQ ID NO: 670950 - DNA, 445 bp, Homo sapiens
gcgtcgacaaaggcacctcgcatgcctgtttggagcctgtcagccccagcacaggacaacatcttgttgaggctccaaacaggcatgcgaggtgcctttggaaagccccagggcactgtggccagggttcacattggccaagttatcatgtccatccgcaccaagctgcagaacaaggagcatgtgattgaggccctgcgcagggccaagttcaagtttcctggccgccagaagatccacatctcaaagaagtggggcttcaccaagttcaatgctgatgaatttgaagacatggtggctgaaaagcggctcatcccagatggctgtggggtcaagtacatccccagtcgtggccctctggacaagtggcgggccctgcactcatgagggcttccaatgtgctgcccccctcttaatactcaccaataaattctacttcctgtcc

SEQ ID NO: 670951 - DNA, 756 bp, Homo sapiens
taaatgattgaacagaattattgggctgtcttgagtgtcttgggtatggctttggcagggctgtctgggggttcccccgcttggcttgtttggggctgctgctgcagcctttaaggctcttcttcgcttcttcagctttggagtctccgggaaaacccgaatgcacagagccttctgggtcacaaatcggcggtgggctcttcggtaatacagaggggggaaggtgtactcaattcccagcccccagaatatcttctcaaagacatcatagtggtgtacggaggtcagagcatcattttatcctctggcttcaaggctcattagcagatagcgttggggggcttggcccatttcgatgtttctccaagtgttctttcataactgcggatcttgacagacaaggcaataattcgagccctccagggatctggtgtcccgtgggttggccaacaatcttcttcataacctgtcttgctgattctaagcatctccttctggtgggccatttccaaagacaagagtctttccagcgaatatatcagccttctcacattcccaggggacaatccggggaaagctttagagcacggtaaaaggagcgtgggcaatcaatccagccatagactggggcggattcccgaacgcacatatccgccccccgggctggaacgcagcgaaactcgaggcagaccgccccccggtctgaacgcggaacctgggggccccacggccgcacgcccgggacacagcctggta

SEQ ID NO: 670952 - DNA, 869 bp, Homo sapiens
agcggctctttcccttcggtgtgccactgaagatcctggtgtcgccatgggccgccgccccgcccgttgttaccggtattgtaagaacaagccgtacccaaagtctcgcttctgccgaggtgtccctgatgccaagattcgcatttttgacctggggcggaaaaaggcaaaagtggatgagtttccgctttgtggccacatggtgtcagatgaatatgagcagctgtcctctgaagccctggaggctgcccgaatttgtgccaataagtacatggtaaaaagttgtggcaaagatggcttccatatccgggtgcggctccaccccttccacgtcatccgcatcaacaagatgttgtcctgtgctggggctgacaggctccaaacaggcatgcgaggtgcctttggaaagccccagggcactgtggccagggttcacattggccaagttatcatgtccatccgcaccaagctgcagaacaaggagcatgtgattgaggccctgcgcagggccaagttcaagtttcctggccgccagaagatccacatctcaaagaagtggggcttcaccaagttcaatgctgatgaatttgaagacatggtggctgaaaagcggctcatcccagatggctgtggggtcaagtacatccccagtcgtggccctctggacaagtggcgggccctgcactcatgagggcttccaatgtgctgcccccctcttaatactcaccaataaattctacttcctgtccaaagaaaaaaaaaaaaaaaaatgtgttgggggtggcagaaatttaaacatttggggggcaagatagaaataggaaggtgcaagaagacgagaaggtggtcacaaaccggggcggtgaacg

SEQ ID NO: 670953 - DNA, 1260 bp, Homo sapiens
  misc_feature (260)..(260): n is a, c, g, or t
ggacggtgatagccgtccgaccgtagcctgctgctttcttgcttactgtttcggcttcccggctacctcgcccgggcacggtgaaggcgggccaggctggtggattggtcggatatgcccttgtctcccgtcggccaatctctgtgcccctagcagacactggacgtcgactacgtggggctatgctagtcgagcagtcgggcgaggacggatagatagggcgggcacggcctgtcgagtctgtgctgggtgggcactgntggacgacggggagtgatacaagagatctagcgatatgcactggtagagactacaggaagcgcacgagctttgagtcattacccttgcctgctggattgccatattaagagcagctctgcggaagagtggtgctgactcaatgcatcataccggcagggcatgctgtgacaacggtgggtgattgcaccataggacattacttcagtctgggtgagtaggaagccatgtatgaacaatcgctaacattgtgctgcagaaggtggccagagtcccgcgcgatttgtcattacgttcgcatagcacttgggcggacttcaattgtgggaccaggagtctctcctttgggatgccgcaggttgcaatgctgtaatagtggtgatttgtaacatgcgcgacgtaactcttcgaaggcaccgattggaatgttcgggaactacgtagtccgaaaagccatgctctattttgggcattagctaccggcaaggaaagagacacaaggtgcggaattgattcacttaggccctagatataggtgaggaattgctacctgtcaccctcaccctatggcagagaggtttgcttccgttgcccctattggattacccctaagggcttcggaagccccacgggcacttggggcctttggtcgctcttacgttcttggcgaataccgttggtggacactcgtcacagggacccggcggacgatcacacgacgtttaagaagaggaggggaaggcagtccaggcccaaagcggggtcaaactacttgcgctggtgggcctctcaaatgtctgggtaccaccatcaactgatgcatagtcccccgtttgtgtccatgtaccaaagaggtaatagccggagaacacgagaacggttcgccaaattaaaacaactttctatggccaagagcttatcgacatcgtaacagaagctctacacataccctggttgataatttatggcgccccaaacgtcgtgtttgttttacgccatcac

SEQ ID NO: 670954 - DNA, 448 bp, Homo sapiens
atacggtaagggtaagacaaagacataaaaatcaaaattaaccagaaaataaaacagtcttctctcccaatgacaaaaaatagcttcaataccaactccatatcagaatagcttccaccgctgacatgtcctgctgccatacacgcgggtcaagtgggtagggcagcagaccccaaggagccatcacgggcaagagctggagtttgatacgtcaaatctgagtatgtgtgtgtacgtgtatatatgtgtgtaagaaatatatggggtgtaactagatatgagagagtaccctttaggcagctggatatgaaagatcaatgaatattttgtctggaagaggagaggggaattgtatagaagagctacgtgtattcttggtttgtgaaggactctgtactcaactctcactaccccctaagcacttgagatttctagcaaggactagaca

SEQ ID NO: 670955 - DNA, 899 bp, Homo sapiens
  misc_feature (339)..(339): n is a, c, g, or t
  misc_feature (342)..(343): n is a, c, g, or t
cggcttgcagaaggataagcagagcatggacggtggccccagtgacctaagccactatgggctactagaaaagcaaggctggcaaagtgacatttccagcggtcaactcaggaccccttccctgcagatacaatcgagagcagtgagtaagtcatagcaagctcttccccacaggtataggggaaacactggtgatgggagtagctcttcttgctcttagctgcatgacaaccatcgtgccagccaggtagctgaagcctggcagaggacgcccagtggcgccttttcagtaggttcttgggaatgctccgcagccaacttaagccgactgagttcctntcnncatggggaccagtgtgcgatggctgcacacagcagcttccttggtagtgtacgcagcctgttggttgtatgggttgctctaagggaccttggagacaggcctttcaggtggatgttcatgtttctgaccttgcactaccccaatgtaggctccaaacaggcatgcgaggtgcctttggaaagccccagggcactgtggccagggttcacattggccaagttatcatgtccatccgcaccaagctgcagaacaaggagcatgtgattgaggccctgcgcagggccaagttcaagtttcctggccgccagaagatccacatctcaaagaagtggggcttcaccaagttcaatgctgatgaatttgaagacatggtggctgaaaagcggctcatcccagatggctgtggggtcaagtacatccccagtcgtggccctctggacaagtggcgggccctgcactcatgagggcttccaatgtgctgcccccctcttaatactcaccaataaattctacttcctgtccgcaccttaaggggggatcctctataatcgccgag

SEQ ID NO: 670956 - DNA, 365 bp, Homo sapiens
  misc_feature (30)..(30): n is a, c, g, or t
aaaacttaggctaggtacgaggctgggtgngggcactgtggccagggttcacattggccaagttatcatgtccatccgcaccaagctgcagaacaaggagcatgtgattgaggccctgcgcagggccaagttcaagtttcctggccgccagaagatccacatctcaaagaagtggggcttcaccaagttcaatgctgatgaatttgaagacatggtggctgaaaagcggctcatcccagatggctgtggggtcaagtacatccccagtcgtggccctctggacaagtggcgggccctgcactcatgagggcttccaatgtgctgcccccctcttaatactcaccaataaattctacttcctgtcc

SEQ ID NO: 670957 - DNA, 892 bp, Homo sapiens
  misc_feature (419)..(419): n is a, c, g, or t
  misc_feature (448)..(448): n is a, c, g, or t
  misc_feature (467)..(467): n is a, c, g, or t
gaatctgaacatgctggtgtgtccatgggacgcacggctccgttccgatcgtcaccggtattgtacatcaatcaacgtccgtagcctaacgtctacgcctgtactggccgaatgtgtaccgctgattggcgcaaagatatccgcctttgtagagccctgaggagacgtactcataaggcgagatagtgagatgagatggtccgattatgtagttactcactggtgatcgtagtgaaatagtgatgacaagactgatgcatctagaagactctggaaggactgggccgagatttaggtgcgcaatgtaagctacagtgagtgagaatagtatgttgtggctaaaagaagtgggcatttgccaatattacctggagttgacagggctacgcataccacacctttacacaagcgatacaatnctcgggcaatacaaatcagaagaataggngttgttcgctagctaggcntcgagggggcgttgatccacgcgtctgcgcgagaacctatggggcaatagtccagaggggtcgaccctatttgggatacatgtccccgatgggcactgtggccagggttcacattggccaagttatcatgtccatccgcaccaagctgcagaacaaggagcatgtgattgaggccctgcgcagggccaagttcaagtttcctggccgccagaagatccacatctcaaagaagtggggcttcaccaagttcaatgctgatgaatttgaagacatggtggctgaaaagcggctcatcccagatggctgtggggtcaagtacatccccagtcgtggccctctggacaagtggcgggccctgcactcatgagggcttccaatgtgctgcccccctcttaatactcaccaataaattctacttcctgtcc

SEQ ID NO: 670958 - DNA, 137 bp, Homo sapiens
tcctgcgggcgtcgcactggttgtgacagggcgatcgtgggacatggtcgtgatcggcgtatagctcatgcacgcctgatctaagaaggatcctgacagattatggcttcgagggacatcctttccggaaagacttt

SEQ ID NO: 670959 - DNA, 290 bp, Homo sapiens
ggacgaccaggggacaacctcatctctgcctgtctgcgccgtttaggtctaggtattttcatcggagttggcgtgaccgaggtgggggatcactggttgtagaataccggatggtgagctgcagcatctgcattttcatgctgattcagttcctcttggggagcggcggggatgcggtcttcaaactggtcggcaatagctcttatgcaggaattcaggatctgaaaaacatcttaagccatttttaaacacaaacaaaggccttatgattctaacatcagaaatctact

SEQ ID NO: 670960 - DNA, 969 bp, Homo sapiens
agcggctctttcccttcggtgtgccactgaagatcctggtgtcgccatgggccgccgccccgcccgttgttaccggtattgtaagaacaagccgtacccaaagtctcgcttctgccgaggtgtccctgatgccaagattcgcatttttgacctggggcggaaaaaggcaaaagtggatgagtttccgctttgtggccacatggtgtcagatgaatatgagcagctgtcctctgaagccctggaggctgcccgaatttgtgccaataagtacatggtaaaaagttgtggcaaagatggcttccatatccgggtgcggctccaccccttccacgtcatccgcatcaacaagatgttgtcctgtgctggggctgaccggcgtccacaacacgaggactgtcgcagagtgtcgctcttgtggaagacgccacagggacagctgtgcgacagggctatcacagtggcgccaagttatcatgtccatccgcaccaagctgcagaacaaggagcatgtgattgaggccctgcgcagggccaagttcaagtttcctggccgccagaagatccacatctcaaagaagtggggcttcaccaagttcaatgctgatgaatttgaagacatggtggctgaaaagcggctcatcccagatggctgtggggtcaagtacatccccagtcgtggccctctggacaagtggcgggccctgcactcatgagggcttccaatgtgctgcccccctcttaatactcaccaataaattctacttcctgtccctatgtcttttgtatctacattcttgacggggcaaggaaattcctctgggaacctttgggctcattggccttttcaacttcagaacacaggttgacaaactcaggcctgcctccatgaaggcagaaaccctgcaaagggctggggactggtgggcttatgtcaggtggctactcctggaagcttgatttggactccca

SEQ ID NO: 670961 - DNA, 166 bp, Homo sapiens
tctgcacagagattcctgcttaaaaaccacaaaggatgactatggcttctaagcaagcaagcctgagaggctttacatgggctggctcctaatatcacaacaaaatatttctttgccacaaaggaactagactatgtagcaatcacatttacaaaactacatgcat

SEQ ID NO: 670962 - DNA, 269 bp, Homo sapiens
atccgcaaagtcctgtacgccaacacagtgctgggtggcggcaccaccatgtaccctggcattgctgacaggatgcaaaaggagatcactgccctggcacccagcacaatgaagatgaagatcattgatactactgagcacaagtactccgtgtggatcggcggctccatcctggcctcgctgtccaccttccagcaaatgtggatcagcaagcaggagtatgacgagtccggcccctccatcgtccaccgcacatgcttctaggcgga

SEQ ID NO: 670963 - DNA, 269 bp, Homo sapiens
acagaagcgtgtatggcaggatgtgatgagctggcaggcagtcagttctggcgcagagatccacatctcaaagaagtggggcttcaccaagttcaatgctgatgaatttgaagacatggtggctgaaaagcggctcatcccagatggctgtggggtcaagtacatccccagtcgtggccctctggacaagtggcgggccctgcactcatgagggcttccaatgtgctgcccccctcttaatactcaccaataaattctacttcctgtcc

SEQ ID NO: 670964 - DNA, 354 bp, Homo sapiens
  misc_feature (26)..(26): n is a, c, g, or t
  misc_feature (43)..(43): n is a, c, g, or t
  misc_feature (306)..(306): n is a, c, g, or t
  misc_feature (331)..(331): n is a, c, g, or t
  misc_feature (349)..(349): n is a, c, g, or t
ggcagcactgaattccaatgcaaagncccagaatcactgtgcnctgtctcctccaagcacacagatttttttctccatgccatgcaacctctgcctcaggggatgggggagaagtggcatcagcaattcaagactgtcttttgtaccctcttcagtgcctctttcagcgatatgaagttaaaaccaggtactttgatcactcacctgatttttgattcttatcaaggtgctttttgtgaggatagttgttcaatttggtggaacaaactaggaggagtcatgatcagtggaggtcttctatttggnccatcttgttctgtctccatcctgnccatttattattaaagtncagaa

SEQ ID NO: 670965 - DNA, 696 bp, Homo sapiens
gaccagctgtgccctgtgggacattgagacaggccagcagacagtgggttttgctggacacagtggtgatgtgatgtccctgtccctggcccccgatggccgtcacgtttgatgtcaggcgcctgtgatgcctctatcaagctagtgggacgtgcgggattccgatgtgccgacagagcattcatcggccatgaatccgacatcaatgcagtgggctttcttccccaacggctacgccttcaccaccggctctgacgacgccacgtgccgtctcttcgacctgcgggccgagtcaggagctcctcagtgtactcccgatgacaaggatcatcgagtggcgatcacctcatgttgccttctcgcgcagcggacggctgctgctcgctggctacgacgacttcagacgtgctaacatctgggatgccatgaagggcgaccgtgcagtgagtcctcgctggcctacgacaagcgcgtgagctgcctcggaggtcaccgacgagtggcatggctagtgagccacgggattcctgggaattcctttcctcaagatctggaactaactggccccagccctcatgggtcccaggccaggaggaggccctggcccaatgccgcacaagtacaaggccagggcacttgcggggcatgcgcgcaagtcccagcccccttccccggaccacgtaggcctatagggtc

SEQ ID NO: 670966 - DNA, 426 bp, Homo sapiens
gaggatccccgattagcgagagagggggactccatactgctggagattaagtttccaccactcagtagaatgggaacttgacatataatttatgttgagtcgcagagaaaataacttacatttcctgcataccggagtttgtcagataatacccatacctgcagaataatcattaacagaaagtgggtgataaacactgagtatctcaaacaaatttatctacctcaaaaccatggggtactgtggctcttatagtacgacaaaccacggtggtcttatctcaaggccagagtgagatgtgacgaaatgaccctctggcattttggtgggtaccaacataaagagaacagggaatctgaggagacgcaaggacaccttctctgcagaacgaaatcactgtcattggtgaggtgtgattctacttca

SEQ ID NO: 670967 - DNA, 380 bp, Homo sapiens
  misc_feature (132)..(132): n is a, c, g, or t
  misc_feature (140)..(140): n is a, c, g, or t
ggcccctgtagttaataagtatcttgtagagagatcatcccaactttcactcactagttttagcatcccattgaagatgttcacctgaatcaatcagtaccacaatgattgcccaaatacagattttctaantccatcantccttttacatttgttggttggcattaccctaaaaggtagagctttcccttctctccaatttattcattgatttatatcatgtggacttgtggcttattttatttgagaagttgtaatttgttcgtttggccagtggcgaccccttcaagctggcttctgtgtcctttggtatgtccccatcattcttggagcatgttcttactttctaatacaaaaagacattccatgctcaaaaaaaa

SEQ ID NO: 670968 - DNA, 132 bp, Homo sapiens
ctgtacaggacatcatttgcgtgtattacttggagcccgagctgcaggtgccgtcattggcgtcgcgagtggacacccataacccaggcgctgtgcgcgcactgcgcggagaagttcgcggtggtgcggccg

SEQ ID NO: 670969 - DNA, 118 bp, Homo sapiens
tctcaaatgacatcaaaggtctgcatattgtatgatgtattaatagttgatagttctaagtattgtgtcatagatactatgagcactataattcatatttgacacatgcatgtggact

SEQ ID NO: 670970 - DNA, 193 bp, Homo sapiens
  misc_feature (140)..(140): n is a, c, g, or t
atcttgtgtcatcccccttcgtgggggagggcacaaatgtggctgccaaacaacttctacctgggcagcgatgggcgcactgtgtgtcaactgcacggtagccagttgtatgcaagaacgacaagtgcatccccttctgntggaagtgtgacaccgacggacgacttgcggggaccaactcatgacgagcccc

SEQ ID NO: 670971 - DNA, 679 bp, Homo sapiens
  misc_feature (12)..(12): n is a, c, g, or t
gaaagatttctngtcagaactatctttgtgcaacagttctggatttattgccagctgcacatgtaagaatgacaatcacatgtgtaaacaattctcatgtagtataaatgtataattctcatgtagtataaatgtataaataattctcaagtagcttatttgaaaaatgtggcaatgaaaatgttattagaaacttactttgggctgagcactatggctcacgcctgtaatctcagcaatttgggaggccaaagcggacagatttcttgagcccaggagtttgagacctgtgtgagcgacatggtgaaaccgcctatatgaaaaataccaaaataattagctggacatggcgatatgtgtgtctgcagtcccagctacttgggatcctgaggagggaggattgcttaagcccaggaggtagaggttgcagtgagctgaattcgcactactacacttgaacctgggtgatagagtgagaccctggcttaaaccaaccaacttacctaaaaccaaccaaaattccctattatggatgacaacatgctatgatgggggcaccatgcaaattagaatctgtatggtaacccagcactgggaagaaagttgggccaccaaggatcaatccccggtacttaaaaccttttggtttaatcaacgttaaggatggcttggccttctt

SEQ ID NO: 670972 - DNA, 655 bp, Homo sapiens
tggagagggagaagcaagcggtcaacctggactatagtcaccctagcgtatgtcatgccgtaagctccgtcatccatggtcctgagccgagcatatctgatagaaactcaagtcatatagtgaagtcacgctagtaccagtgtaggcaggacagaggagccggtgacatgtaagactgtggatggcttctgccctcctggacatgatgccccaagcatgctctgactgtgcacgaaggtctgactcgggcctttcagcaaacctggccctcacaccacctccctcactcaagcgtccctagcatctcgtaccccaggactgagcaggcagcgtgtgacactgcccggtcccgtcaccccaggagcaccgcctggatgtagggggcctcccgcgtatcctccctgatctgaggcccgggtcctcaggatcccagagaacgtgacgtcaccaaagagaggctgacccccatcccagcaggtagatcaacacatgaggaaggcgtgagactgggacctcctagcagggggtgaggagctgtgtggcacagcaagactcccagggcaggtggacagccagtagccggggctccagcgtcacttcttcgtggcgcggtatgctgcgtccaggtcagccatgttgcgggcgtccgtgatca

SEQ ID NO: 670973 - DNA, 195 bp, Homo sapiens
cctcgtgtatattgaagtgaatggaacagaagccaagcaacggtggagtgtgggtcagacccagaggagaacagtgccaggtcaccagatggaaagcgaaaaagaaagaacgggcactgttccctgaaaaccagcatgtcaggtatatcctagttactggacaagacgagcacgttcgtggtgggccaggcactg

SEQ ID NO: 670974 - DNA, 1305 bp, Homo sapiens
  misc_feature (433)..(433): n is a, c, g, or t
  misc_feature (509)..(509): n is a, c, g, or t
  misc_feature (648)..(648): n is a, c, g, or t
gtcgaaaataccgattttagactctcgagaatgtggcccatatgctatgagtggtcacgggtgccctgtctgtgacctgactgaatcaacatgcgcagcaaaagtcatcggagtggtgcctgcagagtagacagcgacgagagaaggtgatctgtgagcaccaggtgacgtgtttacagcgctctgttcgtagtcacaccctttgactgaatctggatggcctgatggaacaggacatacttccaaaggtgcaactgaagagtatcccgaaacgcaatggaccggattcctacgtcgtgtatgagtctcatcagggtcggaaccattgttgtaggcagccgggtgcttggacacacgtatgagtaggaaggctcacgtccccaatacaagaaaagagctgggagtgagcaccaggcagcttgccaagcagagntctacctatcaaatgtcgtgtgtacactttgggaaggaccgggttttggcgtgagaaagcacagggaaggtcgccnttacatgtaacgtaaacggctattccagaattagtgaaccaagcgggtctccgtaggaatagacgcctgcactgagatgcgcgcgtattatgctacatgcagtgcaagtggaccacgctgtaggcagtgctctacccanacggcagaaggtttgcacgcctgcttgcgatccacagaacaaagcccgatcacgtgccagtgagaaaaccagtctgaccaatggtgggcataatacttcgggcctggcgtgaccacttttgtcatgggttaaatcattggcaggaggccccaggaactgtctgcccccaaatcagcgctttgttatgtaactgaaggggcctattttcggttaccctgtacggtgacaaagtgcgttatccgacgtaaaacttggaacaagccattcggggttggaacaaaaacgttgggcacgtgcccaggttgaaaacttatttttgcgccaactgttcccaattggaccccctgggaaattcgtacctggccatagttccagcaagaggcttataggagaaccaagctttgacgctgtgcttacccctggcccgttcgccaaggggagctaattggtgggtacatgggacctggcaaggacgccctgtgaaacttaagtcgaccaatgtgcctgggtagaactaagcatgggtgtcttgacctcggtttaactcaaagacaacgtaaaactttcgggcgttgcctataacgaaaagaagtacgtgttgactctttgtcctaccctaggaggaattctgcccctaatgattcccagaagggacac

SEQ ID NO: 670975 - DNA, 257 bp, Homo sapiens
  misc_feature (224)..(224): n is a, c, g, or t
acaaccaagacagggttctttaaacatggattccaagcagtgaatgaagacaaaggtttctaacccaacacaaaaggacagtggatttgactttctaaagactttttttgtggacaatttgacatttggagaagaaagacggcacactaacccagataatagttttaaagcctggaattttttgcagtttgatttggaaacggatgacctcttgaaatgttaanttttaataaaatttgtaacacttaaaaaaaaaa

SEQ ID NO: 670976 - DNA, 635 bp, Homo sapiens
gagccacaggtaaagccttccttttctctggtcttaccgcatcctttgtccaaacaaaggcagaagtcccctgtcccccatgcagttgtatgtacgcagagagcccagtcccagctcctaggcggtcagacaggcaccccgagtcaccactggcctgccagcaccagcagctccaggtccctgaaatccagcaggcataacctaagaggttacctagagttcagtcaagctcctcaaatagccactaagtgaaatgaggaaaagttatgtaaagtgaagtaaaatcctcaacaatgaaacacaaagctgttattctctttttatgaaactccagtaaattgtttcagaaaatgaaagtgccggaaaagaaatatttccattgggaactagagatgccctgtgttaaaatggtcacacagaaatctggacgaccaagctttaaagctttggctgtgttttaagctatagcctcggttcattagaatgggatttttttttttaaccaacaaacttctactttttctctctatgtgttgttctgcttaagcctctgaaaactaatttataaaattgaaaatgtgttcttgtagcaattccatactttctaataaacttgatatagacccttttgtaaa

SEQ ID NO: 670977 - DNA, 125 bp, Homo sapiens
caggatcctaagctccaacaagagtgaactctgaattaaaaatattattaattattaaaaatggcatttagataattcaaataaaaaaaaagaggaagcctcctttgttcttagtagggagctgc

SEQ ID NO: 670978 - DNA, 1005 bp, Homo sapiens
cgatgatgctgactgcctgtcatcaacatgatacgccgatcaccagcactttgaagttcacctctaagttccttgactacgagacagactgcgagacattaagggccacttaaccatagaggactgtgtgtataagacgacgtctacctaaccgcatagatcacgctggactgtcgagtctcacttctacccgcctcgccgtggaataacaagggcgtggagaaagcactcgcgcatacggtgtgagagactggcttctagcggcagttgtagcccaattgcgtagtaatggaaacaaatcgagcgtcggtggagcatgcgtgatagaaacgatgtggcttaaagcaccatggtacctctataggatggtgtacgggcccaatggttgcgacgtcacagtccattatatcacctcgaaccgccctactggattgttcccgcaccgaccgtcttgctcatgcatctcactacaaacgacatagagtagcttgaaagcgttattacactaataaattggcgctgcattgctctgaagatccgtacggtcaacacgacatctacatgccatcgcatatatgtccgaggcacgagcgtgtgggccaggacagcgcgactcgcttcatagggtaaacgaccacatgtacaaaggttagcgtcgatcgtccatgccttttgtccataaatcctatattcctcagtgaattaccctcaatgaatcccaatcagagaagaggggttcgagcaggattggagataatttcacgcgttaaatagagtcggtgcccccgggaggaatgaggggttgtacccgggataagacaaagtatgctatctgactcgtttcactttttgatcttatgctttatccgtgggcgagtcatggaataagtggacagccgggacacgccaacgaggatggacaagactaacgcgttccctagccgggggcctactcccaacactgggcgtagaacaacctaaaccccttgtccgttggccttattg

SEQ ID NO: 670979 - DNA, 126 bp, Homo sapiens
aacgtgaacttaagtattacttgtacctgcattttaagaagagtctgtatgagtgtgtagctatgatggccaaaagaaactttttctctctccctttgctaaattacaggactaaggagttctcct

SEQ ID NO: 670980 - DNA, 1070 bp, Homo sapiens
  misc_feature (292)..(292): n is a, c, g, or t
ggccgagcgcagatcgcttgcagcttgtctagactgtgtgggctgggaggtctggctagggctgtagctttgcgacatgaggatctaacatgccgtttggctcgcagatttactcacatctcgtcctttggaagcaggaaaaggaaacaacatataaaatgaaacgccctagtacaaagtcccaaattcttactttagtggatgtaaacatgtccagtgttgctacatagatcacacacgtgttttcacgccatgctcatgacagtggttcgtttgtgtaggttgtcaacangtgttgatgctcagcctacagcgaggaaaggccatgactcacagacagggtgtccagtttagacagaaagcacacactagatgattcaaacagcgttcgctgaattctctaattctcgtgttgtcatcacacgaaagccttatcatagaattccatacattctagattaagtttacccaagataactgtaactcacgagtttgggttctcgtcaaggtatacaggcagtaaatctccctatttcggtgtccagtttttcaattaacagtttcgactctatggggcgagaaacaaaccacgagagcaccacacaaacacaaaagacaactgttgtcgcggcgcacacagcgcacccctggaacacagccctcttcggaacacacccaaacggtgagaggagaccccgccgcagcgcccaacagcggcctacccagtgcaacacactgcggcacaaacgccgagcgatacgcacaacagaggagagacacacccacgatggaggcaaacacacaaacgaaaaaggcggggtcgggcgagaaaaaccacaaccgccagaggtaaagacaacgaaacaagccgcgccgcgctggagcggaacaaacggagcgcgcagggcgctccaggagaccagacgcaaccaaccaccagaagaagggcgagagtgcagtcgaaggggcgcccatcgatagcagcgacgatagtcatcaggcacgaccggggcgccagcccacgcaggcgggcaggcgcgcgcagaagttcagcagaggaattacacccg

SEQ ID NO: 670981 - DNA, 553 bp, Homo sapiens
  misc_feature (43)..(43): n is a, c, g, or t
  misc_feature (45)..(45): n is a, c, g, or t
  misc_feature (52)..(52): n is a, c, g, or t
tgagacggagtctcgctctgtcgcccatgctgaagtgcaaagncncgaactnagctcactgcaagctctcaatgcacggggaacgccaatatcctgctcaagcctggaaagaaattggaagtagcagtgtaagcctggagagcccaaaacatatagaggccaatgtgggaggatcaaacgaggaccatgggtgctaaaaccaaccagggcaacatgggcgcacctaatgcctaaaaaaaaagaaaaaagcacctgggcccccccccttctagttttttgagaggaaaaggaggaaaaaaccctggacccaaacacaagagaaaaggtgctgagcaaagccggcgttgtgcaacaaggccatttgttgggcctttgcatcctctaggtaaaaaaaaagacctctggaccagggtgagaaggtggaaaaaattaagatcgaggggggcccccacaaaggaattacaatattcaaggtacacggggtgaagcatataaaatacacaatcttaagtaacttctcctttaaagaaaggaatgaaaattccaaaaaaac

SEQ ID NO: 670982 - DNA, 410 bp, Homo sapiens
  misc_feature (335)..(336): n is a, c, g, or t
tattagggtatattgtaatatgcaaatatggtacagcactccaattaccctttaaagctgacatggttttctctttattttctatgagcatgcagagctctgagggtatttggaaaacttttggtatagtgggggttaactgttttttgactggaagctgagcaatcagtgataacagattttgctgtggttggttgatttggcagaaaagcatgaacagttttggtttaaatgattgaataacctgattagcattgttttggggtggttttttttggttgttgttaaagacacaacaaagcaattttaagggtaatcagatcactgcctttccnnatctgatgaatctttttttgagaaggcctcacctctctcaaaaccccttcattgaatactgagatgaacaagta

SEQ ID NO: 670983 - DNA, 1318 bp, Homo sapiens
  misc_feature (281)..(281): n is a, c, g, or t
  misc_feature (1116)..(1116): n is a, c, g, or t
  misc_feature (1123)..(1123): n is a, c, g, or t
tgcagtgagccatgatgtgacactgcattccagcctgggcaacagagtgagacaccatctcaaaaaaaaaaaaagaaagaaagaaaagaaacaccttagttcagaaacctgtggggttccaggacacttgtttgaggatttggtgattccagtgctctcagattattccaagggcattgttagatttgggattggctgacttcttgcttcagttccacacagcaagggttacccctgtggtttaggacagaccttagttgagtttacagcttggttcaganggccctttggttctgttgcacacacttgaaattacaccttagttcacattagaattaagtcacattacctttcaggtggtatctgctcagattttggtactgagacttaacttggtttagattacacttcagattagaattcaggactctttacattagccctgggcagattccacacagattgcattggcttagattagtccttaggcggttccctttcaggcaggtctccgtggttcacaggtattccttgccaactttcacccaggcacaccctttaggcagaccattgtcagaaggactctgggagatgctgcattgtcagacacccacagcttgggtgccctcaggcagagccataccctgagatacttgtggccccaaaccccaagtcactttcacacgctgaggtacccatagtcagttctagatcttgcttaccccgaatagatctaagtgatccatttcacccaaggtaaagcctgggctatacattagtgagacccaatttcttacagaaaactactaattaaattagccagatgtggtggctcaataacctgtagtccccagaaatctccggggaggctgaagcaggaataatcgcttgagcgcagggaggtgaagcttgcagaaagcgcgcatttttgaaactcagacctgggtgtacgatcttcagggtaggagcccgtgtcttccaacaaaattataaagactaagaacaaccaacaataaacaaacaacctgaggggggtcatcttctatcttgtggtgtggggaaaacaacgaggcataataaaagcgaccatggttaatctggtgttcctcgaccccnctttgtnagcacagggggaaacttcggggcccgcatatggaggcgattatacttacgggggactgtattgctgtacacctaacataaaaaaaagcgaagacaggatctgacgagacagagaatctatcatgacaagcagatagcgactaactaacaatgactctaccactactaactatgaacacgactgactgaagaacga

SEQ ID NO: 670984 - DNA, 177 bp, Homo sapiens
  misc_feature (134)..(135): n is a, c, g, or t
tgtcgtggctgacggtgcgcgagaacatcagctttggccttgagatgcagggccgcccggagaaagaacggcgcgcgctggtggatgaaaaactcgaactggtgggcctggcccagtggcgtaacaagaagccnnacgagctgtaaggcggcatgcagcagcgcgtcggggtaccga

SEQ ID NO: 670985 - DNA, 316 bp, Homo sapiens
aggctctctacaggcatttcatccagctcctcctctccaggacatttcatccagctcctcccctacagggacatttcatccagctcctcctcgacagacacatttcatccagctcctcctcgacagagacatttcatccagctcctcctctagggacacgtttcatccagctcctcctctacggacacatttcatccagctcctcctctagggacacattccatccagctcctcctcgacggggacatttcatccagctcctcctctacggggacattccacccagctcctcctctacggggagggtaccgagctc

SEQ ID NO: 670986 - DNA, 396 bp, Homo sapiens
atatacagcacgaggctgctagataaccctccctgcatcttgagacaggcagaactcttacccaaaagatgggactgagttcagatatcagatacattaatcactcatcattgcttacattgatgaaagtatcttttccctctgttaataattcaaaggaaaacaaattctatgttaatgctagtatatttctgtccaaacaggttgcctcagttcctcaggctacagtgaagactgcattactgaatgggtcggcggaccggggagtgcagggctctgtctcattcagtgaccgctccttctgcgtcgcgatcgatgtctctgtgtactgagattcctgtatcctttcctcccatacactccatacttgtagtctccatgctcatcatgccgtgg

SEQ ID NO: 670987 - DNA, 209 bp, Homo sapiens
  misc_feature (164)..(164): n is a, c, g, or t
aattggtatgactagtgaaatttggttatgtggatttgtgaatctgctgaagacctggagaaagcgtggaactcactggtttgaaagtctttggcaatgaaattaaactacgagaaaccaacaaggaaaagacagtaagaaagcagcgagatgcgatgaacacntttggtgctaaacaatctccggtgtaccgatgctcgaacttcgta

SEQ ID NO: 670988 - DNA, 149 bp, Homo sapiens
gactctagagtatcccccaattgataagcggatagggcggagacaaggcaaagatagtggaagaaaggaggcaggagatggagagggaagctctagtgctgcttttcttgctgttgaaaattgggggaagtccactccattttactaaa

SEQ ID NO: 670989 - DNA, 205 bp, Homo sapiens
  misc_feature (8)..(8): n is a, c, g, or t
  misc_feature (20)..(20): n is a, c, g, or t
  misc_feature (94)..(94): n is a, c, g, or t
  misc_feature (140)..(140): n is a, c, g, or t
acttctangaggatccccgntcacgactgctccaggcttcacccttggggcaacaattaaggcccccccttaaaccccaacctttggaaacaanttggaccaccaacaaacaaacttcccctggggcaacggcttctttnctccaacccccttcaaacttttcttggccaaccttcttccccttgcggcggcaaataactggcca

SEQ ID NO: 670990 - DNA, 221 bp, Homo sapiens
aacgacgatggcgcgtcccagcttgtcccttgagaggtgacacagaccccccactgatccacttggactccatccctatcactgacccagatcccagcagctgttccagccggcacaggcgtgccagcctgggtgagcaatggggatgcagcggacggagctttctccggggcccggcactccagctgaaagcggaagagttcccgtcgcattgaccggtc

SEQ ID NO: 670991 - DNA, 372 bp, Homo sapiens
ataccgtatccttagatcatatctttatatgtatagcagactctattcatgtgctcagagatggcggggatactgtatactgttaatctatctgtcagagacttactataacacgaagtcatctgatcggaatcctgctacctgctaaccatatgattgtatattgtataatgtcttacatcagataatgctaataatgtttgctgatttcatatgttaaagagctataaattccaacaaccaactggtgtgtaaaactaatttaaaatttcctttactgaaaggtatattcccattattgtggggaaaagaagccaaatatattactatgtgtaagagtaattaaaatattaagaaatgagatgtaggaag

SEQ ID NO: 670992 - DNA, 863 bp, Homo sapiens
gattttttacaaacaaaatggcgaaagcactgatgtcatttttagcagtcacttaaggcctatagaacttttttcaagtcggaaggtcctgttcttactatctccaaaaatgggcatcgaacaatcaatctaggagcgtggcagtgggtaaacctggtggacaggcaccaaagctattttctcatctgtcctgtggatgagtggaactgtggacacaacgtgatgtggcacattcatgggtgcacacagttgtacagacaaatcaataacaccacaccagttctggaaagacacacatcactgtgtgctttgtttgatgagctttgtcacattctaatccctctccccatcctgtttccactttgtggaaatgtgtatcctgtggtgtcagcaattctgattctgaaataggatcaggttttactaaacagcttctcttactattatggtgtcgactcgtgcttatgaataaagggcaggcacagtttgcagaactgtcttaaggacatttatttttttcccttttcacgtaatttacacttaatatctattcagagtcatatttaaaatattattagtgaatacagtaacttacgacaacacggtccttggacttacacttcttccacggtcaatgctcagtgtggtcatacgggcctaaatcgtacggctatcagatattactttacgttacatagctgctccacaacggccttagctggccgccacttgattccccggataatcttctagtgaatcggttacactccctcccaacggcgcggcttctactttgcgcacacccctacctagatggactcacgtcaggccccctgggatccagcacacagtagcatcacaac

SEQ ID NO: 670993 - DNA, 156 bp, Homo sapiens
  misc_feature (5)..(5): n is a, c, g, or t
  misc_feature (71)..(71): n is a, c, g, or t
taccngcataaacgcagctacgcaaaaggtggttagggcgatgagtgtggggaggaatggggtgggttttntacggtagaactgcggttactcatcctatgtgggtaattgaggagtatgctaaccaccattttgcgtgtgctgcgtttatgcggt

SEQ ID NO: 670994 - DNA, 1760 bp, Homo sapiens
  misc_feature (1537)..(1537): n is a, c, g, or t
atgtaatcctgtgcactctggtgagtgccgaggcagtgtgtgatcacaatgtgtcatgtgagttcaatgactagcctgaccaacgatgtgtgacaacccatgtcatcatactcaacacacatcacaacacacattcagtggcttgtgtgtgtgcgttggcatcaaatgccctgtcaatcccgagacacctctgtgggaaggtacaatggacatgtgcagtgcatccagccataggagagttatgcgagcaagattcggacagcagacaccgcatgcttttacatacactcaacacacatcaccgacacacatacagcacatgggctgttcgtgtttgggcttgacaaaccaccatggtcatgtgcccacagcgtaaactacagggagcaggtcgcatgaagatgccatgtgcagcgacactttccaccttcttggacgatcacaccttggagcatgtggccaaagcaatgtggttatagccacggagtcgcatcgatcccgacagccactccagacaaacaacacagtagacaacgactacacaacgcccatggggacaccgaaacaaccaatcggagaccaaaggtcaccaattccacaccgaaacaacacacagaaacacaagacaaacacaaaaaagggccagaaagtacgcgacaacaaacaacaagacaagcagcataggacaggagcagcggcagacagagcagcgtgggaacacaagcaccgaagaagaaacggcaatgagatcaggacgaaagagcacgcacacgacaacgaaggagcagcagcacggagccggaagagcgcagagcgagagcaccacaaaccgcaaagagcacagagaaggacagcacaacgagtcacagacacaaaagaagcggtacggacacaaagacagagagagcagaggcgagaacgcaacagcacacagccaagcagaacaaaagccgacggagagacagacacacaccagcacaccaccgaccagacagacgtagcagagaaagacccacacacacccacacacagaaaagacacacacaacagaacaaccgcaccgcaggaagtccgcacaacactacgcaaagcacgaagtacctcgcagaacacgagacacgtcacacgaccgaagcacgtaaggccacacaagcgaaggaggagcgcacaacaaaccaccagggcagaacacacgagcagacaaaaagacaaacaaacaaccagaacagaagacaaagcctaataaaaacaacaacagaagaacgaggaacggagaggcggagagtacgcacggagaagcgagagaggaagaagcaaagaagcaaaagaaggacgcgcggcaaagggacgaaaaagacacgcggaggacgcgacggagagaagcagcgcgggagagcggacaaacgagcgagacagaaagcgagggagtaaagatacggaacgagaaaggagcgcagagcggataacgcgaagagagacgaagcagcagacagaccacggccagaccgacaccgccagcaggcagaccgcgacgagnaatgaacgagagaagaagcaaccgcagcggcggcagcagcatgaagcaagagcaccgcagccacgcggaggcgcaaagcacgcgcggagacgggcgcgcacaggacggcgagagcggacgagacgcacacgaggcgcacaccgatggagacacgccacgaccgacacgcgcagcgacggcacgagcgaggcgagcagaagaaggcgaagaccgaagaacagaa

SEQ ID NO: 670995 - DNA, 922 bp, Homo sapiens
gcttttttttctttttttctgttgtgagcagcggggcgtcgcgagagcagggacgcaggatgggttcatcttccatttgtgctctgggcctcctttttccagacttgttctagccgctcttcttagtattttctcgcaaatctctgatgccagaggccgacaaacctcgaccagttccaaacgccgggttttctgttttgcgccacctggtcttctggggacgattccacagctttccagatacattcgatgtttccccttctgaccgatcccacgccatgtggacacctgccaatcttagttccagaagtggcttgtattgacctgtttccggggtcacctgaggtctcccccgtgttcctgggtcctcttcagaggccccgaacagttttaaccttctgagtcccccgcccgggtcccttacaccctcggcatacacgaggctgttggcacaagtgtagaggctgcctctgtgtgtggtcttaagtaaactggaaatgagacaacttgacgtggctgctcctccacagagggtctgcacacggccaccttcacaactgccgttgagctttcaccacgttctaagaactttacgggccgggaacctctgtgtccacgcactgcaccacgtatgagtgaggctcgccttctcccgccccaggcacttgggagtcccactgttatgagaacggcaccttcaccttcacgagaggtatactttttaaactgctcacgtttttgagctagttttaaatagtttgctgaaaaactcctgagtaacacctgctacatatcatgttttaattgcttgtcaccacattaaccctttaattttatttagtaaagggtatccacagtaggacttttttgaattgtaaataggtggttttattaaataaaagtccatgtaaaattggttaaa

SEQ ID NO: 670996 - DNA, 349 bp, Homo sapiens
ctccagcctaagcaacagatcaagactccatctcacaaaaaaaaaggaaaggaaggccttgccataaaaaaggtttaaatttttaaatttaccatttccggagatcaacccatttcacactggataatagctacatttcccacgccactgtatcctcaatattttatctttggccttcagaagatttttggttttttttggttttcccaaggggaacaatctttctgccaggcggcccacatggccctgaatttaatagcagggccacctttttatggcctttttatccagtttcaccgcaccagagtaatggaattggaaatttccaagcttatatgggttaccattt

SEQ ID NO: 670997 - DNA, 131 bp, Homo sapiens
tattaagatctgagcgcggtggcagtacatctcttgcaacacatgtatctgatgttccattggacagcttggacaaacagtggtgtgtgatgtctctgtggggctgatattcgaaaattgaagacaaaggc

SEQ ID NO: 670998 - DNA, 433 bp, Homo sapiens
  misc_feature (371)..(371): n is a, c, g, or t
  misc_feature (376)..(376): n is a, c, g, or t
ccaacaccacctatatctccttttttacacccacaaccacaaccccggggaaaattggtgaaattttaaaaaacccccccacccccaccccttaataacaactattataatttcatactacactcattcataaataaactcatccttcataaaaaatcttacaattttatcaactataccattaacctctttacatctaaaaatcccattctaatcctatcacattctccataccttaaacccttatcccattcaaacactattcattttttataataatcatccttaaataacttaaaataactatcaattccattcaatattcatcacacaatattacaaacaaatactatccccacaccaattagagnaatangttatttttatgattaaataacttactctccaccataaacactttcctctacctcct

SEQ ID NO: 670999 - DNA, 1020 bp, Homo sapiens
  misc_feature (1020)..(1020): n is a, c, g, or t
gagctgatacttaaagcagtgagctctgaagaaagcatcaataccatctaaaccaattatctttcaagatttttgggtgggtattagaaaacccagaaggaacattgtgatgctgatgtgcctaatagggtgcggacaggcgttggacaacgaaagtctctggctggccctaagtgtggcgaatgctgctcagtggaaacttgctgggctcccgagtcccaggtcaattgctctaggcctcagacttcccaatttatgcttgaggatataccaggctcccttgatgccgaccgatggccccaagctaagattgcaggaactttgagagagatagacgacagagacgtttcctcctactgtttggcgcacaggtgaggcctgggaagtttcgtgaacgctcgaacagtggattcatagccgcttcgggacctttccacaaaacgttgcttgggcaatttaaacaagggcgcagttaagaagccattgtgatggtccggggcccattggttcagctttttaaccccgtgatccctccgtaataaacagtttggcggttgaccctctcttaccaattttgttgttccccccttttccctttggaagctatccaagggtgtcattacccaatccttgtgtgcgacacactgtcgcgaggtggggagtccatcaaagaaatgggaaccttcatagaggggcgtccagagaatcccacatacacacaggggtcaaaaagcgctacaggcaggcagaaagggcaggagacacaaaattaccctgtttggctcccttatcacccgttaaaaaattattaataaatccccgacagatgtggtgggttaaaacaacgtctgggcacacagggtttcttccaccacttataaacaacgcttttcttataagaacccccgagggggaaattattctgatcgcgtcctaacggagcaacacaagctggggtgtggaaacaagccgcggccacaccaagaacggatgtggtgcgtatcattgattgcaaccacn

SEQ ID NO: 671000 - DNA, 1308 bp, Homo sapiens
  misc_feature (518)..(518): n is a, c, g, or t
ggaactagtctcgagttttttattttattttttaattttcctcattaaactttttataagggggtctcaaaattctggtgacaaatttggggtcaagtggttcccattaaaaagtacggatttaaaaaactaaataacttaaacactggcgccacacggcaaaaaaagaaacaccaagggggtccacaaaactattctcctatatcctatctggagggtactaacggagagctataggtgatcatttacccagtctttaactactaaacacttacagtgggccatatgtgagaaacaaacatgtctctgagaaaccggtttcttccacccactggtattaacaatgtggggtgtggcgcaggtaatacaggggatcacattatccattaaaccactatctgagaagctatacctggggccaaaactagaggtagactctatgccacgctctccaaggcaacgccatcacatatagggtgaccccacgcggtgtatagaggatgagaacacccacaacncgggaaaaacatgggagcctggtactcaaatatatcaccaaggaaaaccagcgcaaacagcgcagaaccacacacggggtggcgcataaagccagcgaagaacctctaccacaacaacaaccactaggggcgtctagcgcccgaggaaacacccctatatcataaccaacgctacagtggggtgcgacgaacatttaccgcgcgaggaaagcttatacacagaacatctactgacgggggcccaattatctaccacaggtttcttaattccaagcacgaagaaacaggggggacggaaatcacacaaatcctttctagacctctataacaagtgtaccgagagaacacatcttgtgcacctattgcacacagtgggcgaaaccccccggtgtgtgggcaaaacaacccacaaacacgaggggggacaaataacagcgcgggaccgacactaaattatgcggagccccgggagaaaagtggcaacaccgaggagcaatcacacttccccacgtagacacgcacagagttgaaaccgcgccaggccggagcgaatacaaccaaaaggggaggggaggacaaccaacacaatggcgaagatgacctaccccacgagaagaaacacggcagatggaccccacacgaacacagaaccacaaactccagtggcaacgcagagaacaaccaacatactcaagggacacaactacgcaaacgcccgcaaaaagagtgtagggtccccccaagaggaaaagacgcctccacactccaccaaaacgcgccacacacgacg

SEQ ID NO: 671001 - DNA, 373 bp, Homo sapiens
tgacctgaccttgcgcctatgggacctaatttatcttttatgtatctcggctctgcttatgtctaattcccacttgctctgaagcatatctctaggaatcgccccttctgcattcacctgacagttactgagcacgacatttttcacagatcagtggaatcaatcatcccaaatcttggtcttaagcagtgtcgtgggagtcttccttagaattgtcttgcgaatgtgcaaactgatactctgatcacacactgaattctgacactggctgtaaattatctgtgcagtaatacagagccttaagacattgccccaggcaatgcccataatatcctaaaggtcccttgacagttaagtttcaaggatcaaggtt

SEQ ID NO: 671002 - DNA, 261 bp, Homo sapiens
tctcagtcatcgtttctcatctgaggtgcataaaaaaaatcgctttcagatcaagttgacatgcaatacactgcagtattctccctgtcgcttttaaaatgataatctgtttcagccatgcaaagcagggtataaaataatatttcagtgtaaccactcagcggaagaaataaaccattccagttgcaatacctgatgtaccgttctctgatttcaaacccttcctttttctctgccccgactttgatgtttattcttgtg

SEQ ID NO: 671003 - DNA, 554 bp, Homo sapiens
gcacttcgtggttattcctttgctattgtgggacagctgtatgtattgtcttgctcgtccttctccagcattctatctagcaaacctctcagctgttggagcacctagtgctgtgctagctgcaacctcagtataggcctttgcaaggttcttctcctgggcttggatgctctcttgcaggggagccactcgggatctcttgggggctgacactgccagggtgggctccaaagagcagcggtaggtgtctgcctggagctcatagtcctggagcgcttgctgcagggcctgggagaggtgggatgctgtggccctgtcccgctctcggctctggatcttcctgcgtcagcctctgccagggaagaacccagagtcaggaggccaggaaatgccaatcaccctgactctcctctagccagtgcctccagggccacagtcaggcagagctgcctcccaggaaccagaaagggccgggagggagacctgggccaaactccctcctttccctgacatcattctctctgttttcctccttctctcctgattccaccttg

SEQ ID NO: 671004 - DNA, 881 bp, Homo sapiens
  misc_feature (611)..(611): n is a, c, g, or t
tagatttgcacctaatttaccagatgtataaagaagagctgatactaatcctatcgaaacttttcaaaaataattgaggatgagggactcctttctaactccttcaatgaagccagcatcattcctataccaaaatgtggcagagacacatgaaacagaaaacatcaggccaatatccttgaggaaaatagatgcaaaaatcttcaagaaaatattagccaaccaaatccagtagaatatcaagaagctaatccaccacaataaagtaggctttatccttggggtgcaaggttggttcaacatacgcaaatcaataaatgtgattcatcacataaacagaactaaaaacagaaaccatgtgatcatctcaattgatgcagaaagcaaaagctggcagctttccccttgagaatgagaacaagaaaaggatgtgcactctcactactcctagtcaacacggtacctcaagtcccagccagagcaattaggcaagagaaagaaataaaaagcatccaaataggaaaagacgggaagtcacactatccccgtttgcagacaaacatgattctttacataagaaaatccccatagtctgccccaaatctccttgnatctaataaaacaactttcaggcaagatttcagggtatacaatccatgtttaacttgagtagcctttctatatagagtgtccacatgggagccaattcagactgatgcttatatagccccacgaaagtaataccggatagctaaccgggggaaattcccccagggattcacacacgggacccatgcccagatgagagccctcttataggcagcgagtctacacagttcccaaagcgcgatctggcgaaatgcagactaaaaaccgcacaa

SEQ ID NO: 671005 - DNA, 824 bp, Homo sapiens
accccccggctacccaccttttttttagatggcgcccccccctagttttaacccccccacaattgtttctgtacaataattacgtttcccccccgcccgtcttctgtctttgtctaggaagacacattggtgtctatgaacaacaccacacaccgcccacacaactttctatttttccgagcaggtgaataaacaactctttcgtgtacacaacactaactcactttatcttccctcgagggaccacacactctctctctcccagcgcgagtctcttctttataaaaaaatgtgaatttcttggtgcaaaatatttacctcccaccccccccgcttcgcacctcttatctttggtacacatatcgtattccacaccaccacacctctattcaagaagaatgtaaagctctccatccgcctcttttcctaacaactcgtattcaaacacagccaaccctctctctctatgtagggtgcgtccctcttcaatagcacagggcactacaccgtttcttgatatatataccacctcccgtccccacacgcgcggcggtccctcccatataaacaagttattccccccctttatcaagaacaccccaacctgttgtacttgccaccacttacaaagaatattcttttaccacttcgcccctacagacacgaattttcttgttgcacccctgtgtatttatggacacatttcgcaatgtagattctttgcagatttcttttttttttatccccctcccccaattcttccaccaagaccctcttagaggacacccccaaaaacaaatttctcttcccccgaaaacataaca

SEQ ID NO: 671006 - DNA, 371 bp, Homo sapiens
catggttccggacatgatggacttgactgttgaagatagaacagatcattggtactggattggcactgtgtacgctgttgtaattctgtcaccatgtactacagaaatagaacattctcttgaaaagaatggaggaaagaacaagaacagctattgatatctcctcctctgcagagttagaatgaacgtaataacacacttttaactcatcatctttcttaacaaaaagtcacttcagatttagaagagaataccttttttttctttgtatttttcgagacagggtctcactctatggtccaggctggggtgtagcgatgtgagcttggttcactgctgcctttacctcccaggctcaaatgatcgttcca

SEQ ID NO: 671007 - DNA, 606 bp, Homo sapiens
  misc_feature (520)..(520): n is a, c, g, or t
cacacctttttttattcattcacatatattacaaatatacccaaataccaccacaacataaaccactaatccaaaacaaataaacccaaatacctctaaataccacaacaacatactcccaacaaaacactaccaccactaaaaaaaactatacattccaataaaataaaccaacacccacaacttaaacaaacctcacaaacttatcttaaaacaaaaacaccaaacatactaacccaccccacttaaccaccataaccaaacttcccaaacaaccacaaaaggccaccaaccaccaatccaccctttaatactcaaaaaccccaaccaaaaacgtcctataaacacaaccacacaactcgccaactcacctaaaacaaaacaccaaaaatcccaccccaaaaccctcccaacgctcaaacatacaacatctcccatcttacccaaaaacctgccaaaaccccacaacaaaccccatttttaacaaaaacccctaaatacactcatacacctccactcnaaaaaccacaaatacaaaaaaccccattccatctccacctaacaaaccaccataaccaactaacaataattcgcaacatacccccg

SEQ ID NO: 671008 - DNA, 562 bp, Homo sapiens
aggtactagggtgggaagaacaggctagtatgtcacagtgcttagttacaactgttaatgtgtgacctgctgttggtgtacatgtgggtacagggtgtataataaatccaacaagatagagtataatatcaatactgctaaatctgcatgtcctctgtgtgactgatagagcgttgctatttcatttttttaagacaaaatgaaagcaacatatagagttccaatgtattggtgtagataatctagttgggaatacttataagtctcaccttcccctttaaactaatattcataattggttcatatgtttaaaagactttaatttacaaattaaattgcaaatgggagcattagatttagttttagacttaggtgggtagcaatgccagtcaacttaaattacgtaacttcttgcaaccacgaaacctgtcatacgctgtacagtaacaagtgttggcattatcagttgaactgtaaataccaaatgcttcttccaattagtctctatcatgattaagtttctaaaatttatctgaacaccattcagaaacttgttttgggc

SEQ ID NO: 671009 - DNA, 225 bp, Homo sapiens
taagaagccattgatggacctcattcatggaaagttctgtaagtgttgccaaggaacatcagtatatttttcctgtagctggcacctttgagggagtctggtctcaaggccatctgttgcaagcaagggtgagacagccactatctctactcagacttagactctactaggcgagcgtgacaggaggctggacattggtacagaaagagtctgcatgatctattc

SEQ ID NO: 671010 - DNA, 826 bp, Homo sapiens
  misc_feature (157)..(157): n is a, c, g, or t
  misc_feature (168)..(168): n is a, c, g, or t
  misc_feature (422)..(422): n is a, c, g, or t
  misc_feature (453)..(453): n is a, c, g, or t
  misc_feature (474)..(474): n is a, c, g, or t
  misc_feature (479)..(480): n is a, c, g, or t
  misc_feature (490)..(491): n is a, c, g, or t
  misc_feature (509)..(510): n is a, c, g, or t
  misc_feature (544)..(545): n is a, c, g, or t
  misc_feature (566)..(567): n is a, c, g, or t
  misc_feature (674)..(674): n is a, c, g, or t
gagacgattctgctggtatggcgcgcccatttgtctcttggatagcctggtgcatacgtctgtatctcattgtgatacttggtcctagtgattcatcttgcttcgataatgagcgcaccagatatcatagaagggccctgtgtgaccatagcgggtnagttcgtggangcatccatccaaggcataggagctccatggacgcgctccattaacatagtcatcatgatcataggttattagtcctactccgaaggtcagaattagattaactgtctggcacgtgaagggaaaaaaaccttctgaccggtgacagagaccatgagatggattggccaaacccccaaagatggaatttcaaatttcacctggtctcgggccttttccaaaattggctggcgataacaggctatgagccaaccggnacccaaggcccaaagttatttcaacaagtgnctatgctcaagaaagtgtgtngtatnncatttctatnnatagctgtaaactttatnncaattatttatacttattggttttaatacttctnnaattccattttttggtcgtanngaaggtcacatctatgacacatttcgggttttagaaaaatggtgttacagtctttggttttgggggcctatcagcgtggtttatacaagaagaatggttgaatgagnctattgacgaaggctgtgtatcccgatgttgttgaggagtgtcctctataccttcattagaaattattgtttttgactgccttttagtcctctgttcccttactaatatcatctgggttattattattacaggaaagtggggtattgaaact

SEQ ID NO: 671011 - DNA, 532 bp, Homo sapiens
  misc_feature (7)..(7): n is a, c, g, or t
  misc_feature (29)..(29): n is a, c, g, or t
  misc_feature (94)..(94): n is a, c, g, or t
  misc_feature (116)..(116): n is a, c, g, or t
  misc_feature (126)..(126): n is a, c, g, or t
  misc_feature (150)..(150): n is a, c, g, or t
  misc_feature (160)..(160): n is a, c, g, or t
  misc_feature (175)..(175): n is a, c, g, or t
  misc_feature (185)..(186): n is a, c, g, or t
  misc_feature (192)..(192): n is a, c, g, or t
  misc_feature (239)..(239): n is a, c, g, or t
  misc_feature (283)..(283): n is a, c, g, or t
  misc_feature (296)..(296): n is a, c, g, or t
  misc_feature (298)..(298): n is a, c, g, or t
  misc_feature (315)..(315): n is a, c, g, or t
  misc_feature (331)..(331): n is a, c, g, or t
  misc_feature (400)..(400): n is a, c, g, or t
  misc_feature (405)..(406): n is a, c, g, or t
  misc_feature (413)..(413): n is a, c, g, or t
  misc_feature (415)..(415): n is a, c, g, or t
  misc_feature (434)..(434): n is a, c, g, or t
accgccngagaatcgccgacataaccctntcccgcggttggttatgtacagatgccgcattcggggctctcaactggttgatataaaaatgtgncctttgttaagcatttatttcnaacactaagnagcgactctgttaacgtcttttgnttttttggtnagtcttttacatttnaatagttttnnagacantctaggttaagcagagcaaagtgccttgtttgcctttaattgggggntgggaagggaaaagggtacttgccacatagtttcctttttaacngcactttctttananaacgtttgcattttgtnacttgctaccctgagnactttcaggaagactgacttaaatattcggggtgagtaagtagttgggtataagatctgaacttttcanctgcnnagcaagnanaatatttgacattgtgacntgactgtggaagatgatggttgcatgtttctagtttgtatatgtttccatctttgtgataagatgatttaataaatctctttaaatacttaaaaaaaa

SEQ ID NO: 671012 - DNA, 129 bp, Homo sapiens
  misc_feature (102)..(102): n is a, c, g, or t
actctagaggattcctccctctccgacatctttaggaggtgatagtcatcgctgtacgaggtgtcatacaccaggttgttggctgaaacatactcctgaganacgcacgggtccagccagattcgatga

SEQ ID NO: 671013 - DNA, 251 bp, Homo sapiens
  misc_feature (45)..(45): n is a, c, g, or t
  misc_feature (152)..(152): n is a, c, g, or t
aggcccgcctgttacgatggtgtccatgagtttcaagcggaaccnagtgaccggttctacagcacccggtctgcggctgttgccatgtccgcaccgggacgttcatcctggggacctggtacatggtagtaaacctattgatggcaattttnctgactgtggaagatgatggttgcatgtttctagtttgtatatgtttccatctttgtgataagatgatttaataaatctctttaaatacttaaaaaaaa

SEQ ID NO: 671014 - DNA, 134 bp, Homo sapiens
gcggccgcctactactactactactgctcgaattcaagcttctaacgatgtacggggacatgtttctagtttgtatatgtttccatctttgtgataagatgatttaataaatctctttaaatacttaaaaaaaa

SEQ ID NO: 671015 - DNA, 213 bp, Homo sapiens
gtatgtatacacatatgcacatgtgtgcgtatgtgtgtatacacatacatatgtgtgtacacatatacatatgtatgtgtacacatacatatatgtgtacacatatacatatgtatgtgtacacatggatgtatgtgtacgcataaacatgtgtatgcacataaacatatgtatgtatacacatgcatatatgtgtacacatatacttatgtg

SEQ ID NO: 671016 - DNA, 342 bp, Homo sapiens
tcttaagactgtgttctagatggacatggtggctcatacctgtaatcctagcactttgggaggccgaagtgggtggatcatttgaggtcgggagttcaagaccagcctgcccaactcagtgagacgccgcctctactaaaaatacaaaaattagccgggcatggtggtgggcacctgtggtcccagctgctcgggaggctgaggcagaagagtggcttgaacctgggaggcagaggttgcagtgagctgagatcataccactgcactccagcctgggtgaccgagcaagactctgtcacaaataataataataataataaaaagactgtgttctgcatcacc

SEQ ID NO: 671017 - DNA, 1276 bp, Homo sapiens
  misc_feature (707)..(707): n is a, c, g, or t
atcttattacctatccaacagtttgttacctgtctcagagacttttactcgagccttattaccactccattcactcatgctctccataactgctcaatcttaccgaagggtgacaacggctcactccaagaggtatcagccgccgttcataaataccgttaaagaatttcccagcgtgcgataagaacttacacccgctcagtaactacgctagtcgacgagacgatagtacatactactaggcgtgcaccatgcacctacaagggtcctcacataaggaacatacaagacgcgagacaccaggataactgtgaacgacacaatgccatggattacaaacttggtaccatgcgagtactcttcatttgaacgcgcttgcttaacaagggcactacaagtgagtgttacttcgacagtgtcctcaccgtgtctacaccatcttccctggatgggttcatgcttaagccttctatatactttgaaaaagcttatgccgagcaggagacctatgctgaaagccgtcacctatctccgctcacaattgaatcgagtcttgcaaaccctgattctctatccacatgaatctgtcctatgcaatcctgggcctaacacttggagatcatgtgtcaaccatttttaaccaatcccatataccaattctaacttgttgggccttatcgcaacgtcccgacacagtcccatagacntacgcctaggcctaatctgcgttcgcaaatggagttgttgagtataggggtacccactacctatctcttctgggtactggtgctttccccattgtctaatttggcatagtaagtggcattctcttatgagagagatacaattccaagattagacaaagaaggggaaatttacggcaccacgttgcaacaacgccgcacgggaagtggggttgtggccaggcggttaaccaattggataacccccccgcgtaaagcaaaagggggccataatcgataaagtggtagtcagacccgcactattggacaagattggggaaaatgacccagatgcccataccatgaaagggtattggaaacacacaacaaaagatccaatatttccgcattaggacatatacagttacattaaatatccacaagcgcccgttttggttatgttaggaataccctatacctgaacgacgttttggacaatacagcgccacttgaaacctttgggtaggtatacagccagattaagacgaaggaattagcatcacacaacattagaagcaggagtataggagcac

SEQ ID NO: 671018 - DNA, 151 bp, Homo sapiens
tgctggcagtgcggacgtgtctgccaggtcactgtggatgatgctccatgccatgtgagacacacaatggtcccagagatgacatccggaggccaagagctctcttcctcccgtgctaggaactgagagtgatgcgactgtgggtggcatt

SEQ ID NO: 671019 - DNA, 304 bp, Homo sapiens
  misc_feature (33)..(33): n is a, c, g, or t
gttttgtgcttgttgagtccttgaggatccccntgatggaacctcactacttaggattgctgaggcatcgagaatggcatgatacccgggaggtggtgcttgcagtgatgccgagatctgtgcctgcacactccactctgggtgacagagcaagactctttctcaaaaaaaaaaaagcgggccaggcttgctcactcatgccgtgttaatcccagcaacttggggaaggcgtgaggacagaattcaattaacttgtgagccccgtggagtttgtgagaccacgcctgtgggcaacatgtggcaa

SEQ ID NO: 671020 - DNA, 177 bp, Homo sapiens
ccttgtctcacgcagttcctcagcagtaagtacagatcatttctggcgtagcaagctgagacagatcttgacctatcgtgctcatttcatccctgcctataatatattaatcgtccagtgtttagagtgaaggggaggagaggagtgtgctcaggttagcccgcaagcttgctggtt

SEQ ID NO: 671021 - DNA, 164 bp, Homo sapiens
ctagaagaaattttatgaataagccatcagaaagccagtgctaacaggccagcggttcaaaaactcggaaaatgggatgtaaaaagagaaatttcggaccccacaagtctttcagggttacaacttgtcccaggggcttaattgagggctgggtgtatgacctt

SEQ ID NO: 671022 - DNA, 816 bp, Homo sapiens
gtcccagtgccgcggggcggcgcggggactgtgctgtggctgcctggcgccgatcagccagtagacatgatgagcatcaaagcctttactgcttgtctctgctgtgtgagcggtggagctgctgatgttgtgctgacaaggatgcgctgtcaacatagagtgctgtggagtgctgctggcagtggacctctacgtgggcaccaactgactgcttcgtctaccacttcctgttggatgtgagaggccatgtgcctgctgggccagaccacgttcactgccgaccaaagcagctgtcgtgagacacttgggcttcaagaagcccgtgaagcgagctgcgtgctgtcctcagcactcaacagtgctgcttggtgcttgtgtgacaactccatacagcctggtcaacatgctagaacctcgagccagtgccttcgggggcccgcatcaagggtggcatgccacgtttgcactgaactgagaaccctgtgagttggggaccccttctgtgtagaacgtttgcatcatcttctgtcaaacgcagaaccatccagatgtttctgtttgtacgaggaaccggttgcagatcgtcaaggaggtgtcgattgccgagcagtccctcgctgtggcttgttgacggccacttcctgtgtctgggtctgacacgtcagtccatcatccgcattacatgccatgtcgtctccatgactgttccctactgcagtgaggaaggcggcgatcgtcggaggtggggcggcgtctgtgcggccgggggttgctttttccgtcgggttccgggccgtgggtcggttgtgggggtgc

SEQ ID NO: 671023 - DNA, 182 bp, Homo sapiens
cagagatgatgccactgcactccagcctgggctgacagagcaagactccatctcaaaaaaaaaaaaaaaagggtggttagaaattcagggcaggcgctttaaaaattcccggggcccagggtagatttccgtgaaactctggtgggcccccggggaatatgtggccttctcagggggccttc

SEQ ID NO: 671024 - DNA, 988 bp, Homo sapiens
ggtcgacgatctgccggcgctggtgctaatactctttctagtgcaggcgggatgagagcgggacgtgtgcgccggcgagactgggagagcgaagggggcaggccacgtggtatgacggctgcaggatgcctttgcagccacgcgcgcgccttccctgtcttgtgtgcttcgcgaggtagagcgggcgcgcggacagttggcggggattacttttgctgctagtttcggttcgcggcagcggcgcgctgtagtctcggctgaagacagcggctcgaatcacacataagaactaatgttcggagaggaagcaagtctcggctggcggacagggcgcgcactggccatgctggccaaaacggacggagcagggacaaagagacgagactcaggacgcgcgcagaccaagagagcggaaccccagtgggatgagactgagcgcaccaccacggggagacaagcgccacagagacgtgccgagaacaaacgacgggagaagccactatgagaaaccaggaagaggcgggacaacccccgacggttatcatggggaaggggccacacccgtaaacagggaggagcaaaacacggacccatggcagagtcagggcacgtgtgacgacgcgcaaagagaaactatgacacacgcccaagggtaacatgacacccggacggagaagggaacttgaaacaggggacacaagttatccacaaacatgtacccattcccccccgaaggtgaaaccaacctcagcctaggcacacggccacagaggatagtcgaggacgaccacatgccgcgagccacaaccgcacaacaactggggcgcaacaaagttcgcatcacacacacgggaagaagcggacccctttaaagacatggggagacaacgtagcctacacccacacacgaacccccgtaactcgtgccgacatatgagccacttacaccatgtacacacccaaaacactatcaggcgcagaaaacagt

SEQ ID NO: 671025 - DNA, 351 bp, Homo sapiens
cgtcgggctgagcgcactctggactacctgggccttgaaggatttggaataggatcggcgttgtggcttgcatagaaagacccgcttaaaaggctagaaatggtgtccacccaaatttaagtgcacaccatgtcctggcctcgcggggctgggtagatgacttggccggacggatacggaagctcctcagaaagtgagttttttggtttttggccggaggggatatgcattcgtattcttgtcaagaaggcagcggcaacaaaaaactttatttgagccgctttctggagattaagataaatatcttcaaagggaaggtttgaaactaggactccatgagtactattttat

SEQ ID NO: 671026 - DNA, 940 bp, Homo sapiens
ctcgatgcttaaagaaatacaatgtggtgaagaactgggttgaggtggagatagccccagacatccgggggagaattcccttatgctcacttctctgagcttcaaggttctgaagcatccagataacaagttccgggtccggctcagagccctgtagggccaaccgtcgttggcccagtattcctctcaagaccctcattatgtcttgtccctcacgaggtccatcgagccaatgcttgcaggcgaacgagggaacgatgtgccatggcgccgtagatgggtgaaaggtgactctcacaacgtaggcgtgcctgaccgttctctccattgcacgcgctattggtgaatgaatcaggacatccacgttcatggtacttatttgtacacatcgagatgcatttcactacctctccgatgtagcgctcacccttgggacaagatctatccgctaccactccaagcacatgggttagtgcaagaatgtctaacatttctgggtcccaaactggcaacggagcaaagggttaatatgagcgtctgtgatcgtcttgccgactctatctcaggacacaaagagcccgtgaggatcgcatacaatgcacaaagtacgagagatcccgaaggattaaactcccagtcaccggacattaaaggcgaggggcagtcattctgtagtggtgctagtgtaagggatccattttccatccaccactggtgatgcttctttggccgtgcttgtgctacactcccggctttgcgtgcgtgtactggggctcgtgtaaacctcccccagtgttcttcaccagtaactgaggggcacgaatcctaatgatgaagaccccttttattaaagcaaataccatccctcgccttgaaaggggtaagcttggctctacagtcacagggaacctcctacgaccattaaaaccaccagcacgaa

SEQ ID NO: 671027 - DNA, 582 bp, Homo sapiens
tcacacctgagcctagttgttggtcacatgaggcctcgctgttcagcctatctctgcttttgagaatgcttgtcctcactagacttaatcagttgctagtgtttatttaaagtgagagaagtataactcttccttttacttgaacacttaaaagccattgtagggttaaccgacctaattccaatattgttgtctcagggaacagggagccccaaggagagggagaaacatggggaacagctggttagtgcaacagtcagaaaacacacatttaccaattaagttcattgtctcatatgggtgtggttcatggtgctccaaaacaattacaatactaacatcaaagatcactgatcacagaccaccataaaagatataataataatgaaaaagttggaagtaatgcaaaaactgccaaaacgtgagacacagagacagaaagtaagcacacactactagaaaaatggtgccaacagacttgctcgacataagattgtcacaaaccttccatttgtaccaaatgcagtatctgtgaagtgcaatacagccatgtgcattaaacaagatatgcctataatatgt

SEQ ID NO: 671028 - DNA, 252 bp, Homo sapiens
  misc_feature (25)..(25): n is a, c, g, or t
  misc_feature (106)..(106): n is a, c, g, or t
cgcgcgtcaggggaggcgagagaanacaaaaaaaaaaaaaacttaatctgtgacgactctcttaatttccaccgctacacttccacttacttacatgatcatttcnagagatgtattgttgaggggggcggtggtttatgtcaaataccgaactcttccaacaccacgaacacttgccaagtatttcaatccttgctatgccactgctagggtaaagccaacattcatcagcaaggtgaatacaggagtcca

SEQ ID NO: 671029 - DNA, 141 bp, Homo sapiens
gctggagatagctggcggcaggactcagcggcagcactcgtatctccgcaggcgtccgatgctggacagcacggagcagccaggagtatcaggtgtgtactgccctggacacctccgaacgctgttcctgggtacgagctc

SEQ ID NO: 671030 - DNA, 570 bp, Homo sapiens
tccacctcaagtctggaggacgcacctgcagctgcacagaggtgctgtgtgctgggagtggggaggctcgccgccaaatgctggctcagatccccaggccagagagatgggtctttatacgtgataagagcacggataagccaccgggtgggggggtcaaaatcaaaaagtcaatatccaagtctttagccgggtcactaataaagaatctctcaggccggctaaacgatagccggtgacttggtgcgggtaagccatgggcgggtaatctaactgggaatgacctttacattataaatctttaagacacataggggtagcttggtcaaagagtactatatttttatccttccaagtagaattttactttaatcataggatggaaagccaaattttaaaattccttccttggggaataggtgtgggaacctaggtgagaggaccaggggaggggtcagataccttaattttgtttttaaatcacatttgaatggcagatactcagaacatcaagtcattaagttaggtgacaatcagtatggggcgagaagggtccagtaccttttcatt

SEQ ID NO: 671031 - DNA, 912 bp, Homo sapiens
  misc_feature (3)..(3): n is a, c, g, or t
  misc_feature (5)..(5): n is a, c, g, or t
tantnccccgggcgaccgtaggaacgacccacggcgactgccaacacaatacctgcggcgcgcgtgggctatagaaaagtgcgccggaaacgattcctcggggccgagcatgctcccgccgaactggcccggggaaaaagatcgcccccggccccggggcttgggcccaccggtggaagtgaaggccaccaccgggttccgaaagacgcaggagcccggtcggaaaaaccactggtgcttggggtggcgaagaccccccgccccccaatcaggaaaccgcgcggtccctaaaaggccagagccagggggatggttcccaaacgataaaaaagaagaaggcgggccaccaccccggcaacacatagatgaggccgacaaaccccgcaggatgcttatagccgccaaagacacaccacttgggagacccaattggacccccccatcgcgtgtcaggaacacccacacccttccccccgcaagaaggaatcaaagatcacttaggggcgccccacgaggtggtgcgacagagtagaacaacaacgcgcacttaataagtgctacacaagagagcaaacacaaaagggtggcaaataataagaaagcagatattgcaagatataaaagggtggctacgcacacttcagcactctgtgggcatgagccagaccccgatataccatgctaccacaactggtccccgaagaattgggtcaacaaaacttatagtgacccctcgattggtcaagcttatcaataacttttttgagctacagatgtttcacggaaacaaaaaagtatgggggaagaacatacagaagttttctaacaggcccccggggtaataattcaacgggtttttttaaaggactcacaaacaatccaatttgatttttgggcccaacacacataaca

SEQ ID NO: 671032 - DNA, 1201 bp, Homo sapiens
  misc_feature (8)..(8): n is a, c, g, or t
  misc_feature (71)..(71): n is a, c, g, or t
  misc_feature (80)..(81): n is a, c, g, or t
  misc_feature (86)..(86): n is a, c, g, or t
  misc_feature (89)..(92): n is a, c, g, or t
  misc_feature (98)..(98): n is a, c, g, or t
  misc_feature (100)..(102): n is a, c, g, or t
  misc_feature (109)..(109): n is a, c, g, or t
  misc_feature (111)..(122): n is a, c, g, or t
  misc_feature (127)..(130): n is a, c, g, or t
  misc_feature (134)..(136): n is a, c, g, or t
  misc_feature (138)..(139): n is a, c, g, or t
  misc_feature (141)..(142): n is a, c, g, or t
  misc_feature (147)..(148): n is a, c, g, or t
  misc_feature (157)..(157): n is a, c, g, or t
  misc_feature (171)..(171): n is a, c, g, or t
  misc_feature (177)..(177): n is a, c, g, or t
  misc_feature (186)..(186): n is a, c, g, or t
  misc_feature (188)..(188): n is a, c, g, or t
  misc_feature (193)..(193): n is a, c, g, or t
  misc_feature (208)..(208): n is a, c, g, or t
  misc_feature (213)..(214): n is a, c, g, or t
  misc_feature (224)..(224): n is a, c, g, or t
  misc_feature (226)..(226): n is a, c, g, or t
  misc_feature (229)..(230): n is a, c, g, or t
  misc_feature (266)..(266): n is a, c, g, or t
  misc_feature (279)..(279): n is a, c, g, or t
  misc_feature (287)..(287): n is a, c, g, or t
  misc_feature (292)..(292): n is a, c, g, or t
  misc_feature (299)..(299): n is a, c, g, or t
  misc_feature (303)..(304): n is a, c, g, or t
  misc_feature (319)..(319): n is a, c, g, or t
  misc_feature (334)..(334): n is a, c, g, or t
  misc_feature (338)..(338): n is a, c, g, or t
  misc_feature (356)..(356): n is a, c, g, or t
  misc_feature (368)..(368): n is a, c, g, or t
  misc_feature (385)..(385): n is a, c, g, or t
  misc_feature (782)..(782): n is a, c, g, or t
  misc_feature (833)..(833): n is a, c, g, or t
  misc_feature (1149)..(1149): n is a, c, g, or t
  misc_feature (1175)..(1175): n is a, c, g, or t
  misc_feature (1177)..(1177): n is a, c, g, or t
  misc_feature (1190)..(1190): n is a, c, g, or t
tattaatnttaaaaaaaaaaaaaaaaaaaaaaaaaaaaaaaaaaaaaaaaaaaaaaaaaaaaaaaaaatanttttatttnnacggngannnnagaaanannnggagaanannnnnnnnnnnnacatnnnntagnnntnngnnatttnnaaagagtgnccgtcggatccggncgacanacttagatnanaatancaatatgaaacccangcacnntgagagagananatnngacgcagtcatatagctcacacagatcctgaaggcncagaatgacaagngagaatcnataanacagaangtgnngagatgtctgtgtanaaccgaagccccatncgtncaccgccacctgttttanatgcccggacancacatgacctactgagnctgagcctcaaaagaaccatgtgtaaagaaggtctgaatatagagcaaaatcactcaaatggacaggatatgtgtcagcctgaatacgtcagcacactacagactgggtgaaagtgataaagaaacaaaaaaaagcagctatggacctcggcctgaggagtatgagttcctcactccagttgaggaggctcccaagggcatgctggcgcgaggcacgtaccacaacaagtccttcttcaccgacgatgacaagcaagaccacctcagctgggagtggaacctgtcgattaagaaggagtggacagaatgaatgcatccacccctttccccacccttgccacctggaagaattctctcaggcgtgttcagcaccctgtcccccctccctaaccacagntgggtcccttttcaacactgccacatttccttattgatgcatcttttcccnccctgtcactcaacgtggtccctagaacaagaggcttaaaaccgggctttcacccaacctgctccctttgatcctccatcagggccagattttccacgtttccatttcaggacacaatcatttaatatttccctgtcttacccctattcaagcaactagaggccagaaaatgggcaaattatccctaacaggtctttgactcaggttccagtagttcattttaaagcctaaattcttttgtggttgttgctggcccaatgagtccctagtcacatcccctgccaaagggagttttttttttgtgagagaccctgtnaacgacccaagagaacaagaataaancnataactgtgtgtnttttggctgga

SEQ ID NO: 671033 - DNA, 291 bp, Homo sapiens
  misc_feature (6)..(6): n is a, c, g, or t
catcgngggctgctatacagaatcttaaaaaaaaaaaaattttttatgaaatgaagtcagattgtctgatgagggactgcttttaccatccatccttctgcccgggctacataccctatcccttggttcctctggcagccgcgtttaccactgagatgcttagcaatatctcaatagcgaccccaaacaaaaatgaccaaaacagctttaatataaagatatattccataaaagagtttgccagtcaaagagaagcatcacacttccgaaaaacacaggctttcttctctg

SEQ ID NO: 671034 - DNA, 327 bp, Homo sapiens
tggcagagcttttagactgaagattttcccttcgtaatgccagaagcgttcctagaacttccccagctaaaacagggagacgctaacgtctctacctctaaggataggcccgccaaatagagttagcgtgaagaccccagcttgaccaaagatggtgacacctggggatttatggtcagcgacctgagtgaagcaacatcctccttgccactggctggtctgttcattttaacatgaacatgttttaatgcagactgttcaagctgtttcaaaacagtcattaaaaatacacatgcaggagcacctgtattaaagactttgtttgga

SEQ ID NO: 671035 - DNA, 152 bp, Homo sapiens
gtgtgtacgagtacggtgtacgctgggatgacatgctgagtcactcagtgctgagaaatctaagctgggatgaagttagggactgtggctatcaaaatagccaggagagatttatgttaacaagaatgcagatattagtttagtagttagag

SEQ ID NO: 671036 - DNA, 268 bp, Homo sapiens
atctagtaccctgtaccaagctcatattcatttctgtgatcacgcacatgagaatggatacttaattaaaatgaagtaacattctgcctaattaagtttggtgataaggttgtgaatttgtctgtgtacttgaataactgatttagtcaagaaatgatttgtcattatccgtaaagagaattcaccaaacaggacaaggcatattctattagaagaatgtagtcagccaggtgcatatcactgcatatgagaaactacatgcatcagt

SEQ ID NO: 671037 - DNA, 1178 bp, Homo sapiens
cggctggtggcctgccgcgcggcgcggcccgcccctcggcctcgggcgcgtggcttgcctcgcggtcgcgcgggccgccggtgccgcgctgtcgcgcgcggcgcggatcgccgctgtgcggtcctggcgccggcctcgtctctgcgggctcggccctgtgctccgccggctggctcccccggtgtgagcggcccgttgtgtccttctgcgccccgcggtggtccgcgggcgacggtggggtgcgtccctgctgtcgtcgcgcgccccgtctgcctccgtttcgttcgacgtggtctgttgagcgcgcgcggcgcgcgcttccgcggccgcgttggtcctcccgcgcctcggcgcgggcgggcgagcggtgtggtgctccgccctcgtcgcccgcgtccgtcgcgcccgcgcgggtccgctcgctggctgctgctgttgtcgtggtggcggcgcgtggcgtggacgctcttgtctagcgggggctggcgacggcgcggtgctcgctggcgtggcgcggcggctgtcggtctgccgtggtgatatgtcgcgcgggggggggggggggggggggtggcgggggtccggggtgggggggggggggggggggggcgtgggggggggcgggggggggggggggggggtggctgcccctataggtgctgagctgctgtatagcagcaaggttacgcgtgcctgaacgggaagcctttgcgccgtttgtgcgcaggagtcgtgatgcgtgtgcgcagtgtgacgcgtgcgctagagcagtggtaagcgtgtcagtgataacttctgctcttcatcgtgcggccgactgggctaaatctgtgttctcttcggcggcgctgggtgatcctcgccgtactgcccgcttggttaacgtcgccgcccaattggcaaaatattctggtaaatcaataaccatctcatcagagggtagtgaagccatgcaggaaggcgcttaccgatttatccgcaatcccaacgtttctgccgaggcgatcagaaaggctggcgccatgcaaacagtcaagttggctcaggagtttcccgaactgctggccattgaggacaccacctctttgagttatcgccaccaggtcgccgaagagcttggcaagctgggctctattcaggataaatcccgcggatggtgggttcactccgttctcttg

SEQ ID NO: 671038 - DNA, 231 bp, Homo sapiens
aattcaaaaccaaattgctaaccactgttctgtaaacagtgtaaactctacctctttagggcagagctcataactatttttttaaaaaaataacaaaatgttatttgaaattaatttacgcacatattatatatatataatgttaaaagtgagagtatttacactaccacattgtggtgttggggggaaaactccaggggttcccctcggggataagacaacttctctcta

SEQ ID NO: 671039 - DNA, 136 bp, Homo sapiens
tagaggatccccggtaagcgcggctgttttcattacaactgagccacaacaggaattccaagcatatcttttaaacctgagatagtcagagaatgtgtgccatcccagccaaatcgtgtcagagggtgaaaaatga

SEQ ID NO: 671040 - DNA, 1475 bp, Homo sapiens
ccgtagtgacttgtttgtccattattatgtggttggccgcacggtgctagttgtcggcgtgcccacccagtgttgctggttgtgtttctctgctgttctccactgttgtggaggggccctctgtggtggtattgtttaattcgtgtgccacactatttgtttgctgtcgtgacttgttctgcggtacttgtgtggtcgtccccacgagtttgtggtgcgtgttatttactgggagtgttctggcgttttgtccgttttgttgccgccactgtgttggtcttcttttggtcgccgtcctcgcgttagtgtaagggacccgttgtggtccgcgttcgccccccgcggcgttgtgtgttagtggccccttcccgtcccactcgccacattgcgtggggaacgctgtgttgaggggctcccccagtgttgaccgcctgtgtgtttgtggttttcccccggttcctcgccagggtgaggttgccgtttgtatcctgagccggcccaatgggggccccgggtccttgtgtcgccgcgtgccgctggaacggtttcgttgttcgaccccccagttcgttcggaagttgtttcaacgtgagttggggcacccgttgacgttttagccgtgggttgttccgagtccccgttatgttatggacgttgaacccgagacaagggtgaaacagtcccccgttatgagcacgggaagtttatttaaaatgtgaaacccactggctttaaacacttttgcgtgagagcccccctgtttgttgtaaaagaggaattggccgcttgttggagttctggggccatctatatcccttagccctaactcttcgtttgtcccctatatggggccccttctatgcttgaggacctcacttggagaggtataataccactgcttaaatatccactctcgtaagagccccgcggcacacgagcagaggcctcggatacgagaattcccctctcttataagacacctccccacgggccctcttcacctcgaagtattgaaggtagtctgtgttctccccaaggccacgaggggcccaaggcccagggcccgagagaagggattctccctcgggggcaccacgacccagctcgaccccataatgaataccaccttggaatttcttgtacataaagaggagtcgagcctcttgtaaataccaccgttatgctcggccctcgctcgtggaaccacgaaatcgcctattgaatgcaccacgctagctcacggtatagtggatgacaccacctgattctgagagccctaattaacagaaactctttggaatgataatgtcactctagacctttgatacgccacagtgtgattcctggacacgagtgtacttggctttaccctggcacgcttgcttggaaaatgtcaaacctcacggcctcacacccccgacctactgacattatttatattaatttaaattaatataatcttttatttccaccca

SEQ ID NO: 671041 - DNA, 1209 bp, Homo sapiens
attctctgcggtgggtttttgttgcgccctcccctcttctatttagttgtgttgtcgtcgcttcccctcccgtcccctaaaaagtggtttgttttttttttcgcctcgcgcgtgcttatttgagtgtctgtatgttattggtttgggtggctgctgggtgcaccaccaccacacgccgtgtttgtggtggtggctcgcagcagacacgtctgtcatatcattttgtggtcgcgccgcgggagttgttgcatctctcatcaatgatgagtgagtagtagtgtgtcgttgccgcgtcccgccgccttcttttgtgttgtgttgttgtcttgtctcttttttctgtgtgtttgtctgctgttgttttgtgtgttgtgctctttttgtgttttttttctttttgtgtgcggcgtcgtgtgacgacgtcatcacacgcgaggttgtgttgttataatatatccccttgtgcggtgccgccccgccgtggtgagaagaggagtgtgcccgccgccacgactcgtcgcgtgtgttgtgtgggcgcgagagacactactctcccctccacacggtgtgtcaccacacacacagtgtgtgtccgcagcagcagagactcttcttgttgtgttgtggcgtcaccacacactattgtgtgtggtgtgttgtggtgttttatagtagtataagtagtctactcttctctccgcacactatactgtagagagagcagagtcactactgtgtggtgtacacacacagagatattttctctctctctgcacactctctcttctcatataagacccacccccgcgctctgctctttctctctcatcagagagagagagatatgggcgccacactctcgcttctctctcccacaacagtgtccacacacacacagcagcgcgagagagtgtgagaaacacactctcgtgtgttgtctggtgtgagaaataatatgatataagacccacaatgtttttaaattttctgcccctctaaaactctttttatttttgtttttatttttgtaaaaaagaaccctctctctggccccccccctccccccctctgtttgttccccccccctgaaaaattatattaaagcctttgggttcccccgggagggggggggaggcgcccccccgggttatcccgtcacacccgaacatttgagacaccccctggagaaaaaaaggcgcccccccctta

SEQ ID NO: 671042 - DNA, 283 bp, Homo sapiens
tctttacgatatacgcagtatggggatacgggtgtacgtgtgcctgatggtaagaaccggtccagggcattattaatcttagagcgaaagcctatatcactgcgcccgctcataatgtgattgccattgctaggtttctagattgttcggtggttagtgtagatcagtgcggcaggagtccgaggaggttagttgtggcaataaaacttattcatgatactattatcagagatcaggttcgtccgttagtgttctgtataggactgatctataggactggtgg

SEQ ID NO: 671043 - DNA, 876 bp, Homo sapiens
cgtggtggctcacgactgtaatcccagaactttgggaggccaaggcaggtggatcacttgaggtcaggagttcgagactagcctggtcaacatggtgaaaccccatctctactaaaaatacaacagccaggtgtgatggtgcacgctcgtaatcccggctactcaggaggctgaggcaggagaatcgcttgaacccggaaggcagaggttgcagtgagctgagattgtgccactgcacgccagcctgggcaagagagtaagactctctctcaaaaaaaaaaaaaaggattttaaattcccaatttttttttctaactcttttttgcggtgtgtttttcgaccccggtatacctttagtatacctatgtgcttatcacctgtcgggtcacctgcgtaccctgacatttcatttttcagaagtaccttacccctggcttcctccatttttatccatggctccttgagaaacgccaagggcccccctcctagttactccgcagcggtccctgcacacgacgagacgggcggccaacacctgagccacgcagaattcgtattggacatttaccgttttaatttcctaaaaagccatttgagattggccggggagggggtttgcggttcgcgcccttgtggctccattgaagtggctgtcacaggaagtggcgcttcacaggggctttattaacctccctggtacaaatgcctattcccaaaattttgtgtccacttttcatttgtggtccccgggttaattctcaaaaaaacatttcccaaaccattctttcttacccccttatttttaaaaattcttttacctaaattggcacgttcacaacaataactcccggaaagggcccctatacctttataaaa

SEQ ID NO: 671044 - DNA, 142 bp, Homo sapiens
gacagaaatctcatcctctgctggtgattggaaccagaattatggccctcagcagggaccaccccaacaatggagtgccagcagcaacaaggtccaccacctcctcagtgaaagccacaaggaccagcccaacaaggaggtg

SEQ ID NO: 671045 - DNA, 397 bp, Homo sapiens
  misc_feature (381)..(381): n is a, c, g, or t
ttttatttttttgagacagagtctcgctgtgtcacccaggctggagtgcagtgccacaatcttggctcactgcaacctctgagtcccaggttcaggcgatactcgtgcctcagcctcctgagtagctgggactacaggcgtgcaccaccacacctggctaattttttgtattttagtagagacggggtttcgccatgttgcccaggctggtctctcctgagctcaggcaatcggccaccttggccttctgaaagtgctagaattacgggcatgagccaccgcatccagccagaaagatacatatctaattctagaaataggcatggcagttattcagttcattagttaacaggccatgtgctggacctaaattaaaatttnttggatattgtgttat

SEQ ID NO: 671046 - DNA, 163 bp, Homo sapiens
agtctctaaatcaatctgaatgataccattcagattgatttagagactggcaagattactgatttcatcaagttcgacactggtaacctgtgtatggtgactggaggtgctaacctatgatgaattggtgtgatcaccaacagaggagaggcaccctgcgaat

SEQ ID NO: 671047 - DNA, 113 bp, Homo sapiens
gggcttcgagcatctggggacagaccctcctggaaatggtctatgcacactgctgaggctcggttagcagttgagacagcacttgcaccatcagcctctacagaactggacat

SEQ ID NO: 671048 - DNA, 316 bp, Homo sapiens
caaatcattgaatctacacttaaggtgaatgtatcataatcagtatatcataataaagaagccatgcatacccttaattatgtggattcactctaattggtagttatattttcctgggtacatagtaaaggtcgtttaatctaacaaatataaagctcattattttacgaagaagaacctcaagtaatactctttctaggagccactattgtactaaatattatattcattaagtgtttccaggatagtttgacgggtactgttgatgaaccaacagcagataaaaaatatcctgcccttgtgtagaagctaaaat

SEQ ID NO: 671049 - DNA, 243 bp, Homo sapiens
gtgtgcatttgccagtggcaaatttctattctcaattaacccatgcagacaaatgctacgacatctgctgagtcacgttatagaagcatttgcgagtggacgcatggaggggcccgactcagtcgtactcctgatatgctaaatccacatactgctgagaaggtgggacatgtgatggccatggcatggacgccaccagagtccaacaccagagtacttagctgctctagggaggtgcgactg

SEQ ID NO: 671050 - DNA, 420 bp, Homo sapiens
gttatccgcgtcgctcttcatactgtggaaagtctccctgacagctccatcatggcgtggccagtttcttggctcgagcttgctctcgaatccacgggtgacagtcatctggtaggacaggtcatcattgatctccctgtagagccaggcgaagatgtgggggctcacgttgtgggtcggcggtgaagtaggagaatggggccacctggagggtatccatgtgcactgtggtctccccctttgtggtcgagatgatggagccaaaacttggaaagggcggattcccagggagggcattggcccggaaaagacatcctctcgggctagctgtgtgcttcttccaagagctcactgaactggctttcctgtgcagcctgacacaaactgcatgccaagtggtggagactttgcccaggtagg

SEQ ID NO: 671051 - DNA, 811 bp, Homo sapiens
  misc_feature (1)..(1): n is a, c, g, or t
  misc_feature (62)..(62): n is a, c, g, or t
  misc_feature (120)..(120): n is a, c, g, or t
  misc_feature (170)..(170): n is a, c, g, or t
  misc_feature (214)..(214): n is a, c, g, or t
  misc_feature (220)..(221): n is a, c, g, or t
  misc_feature (239)..(240): n is a, c, g, or t
  misc_feature (246)..(246): n is a, c, g, or t
  misc_feature (259)..(259): n is a, c, g, or t
  misc_feature (261)..(261): n is a, c, g, or t
  misc_feature (284)..(284): n is a, c, g, or t
  misc_feature (347)..(347): n is a, c, g, or t
  misc_feature (354)..(354): n is a, c, g, or t
  misc_feature (370)..(370): n is a, c, g, or t
  misc_feature (386)..(386): n is a, c, g, or t
  misc_feature (410)..(410): n is a, c, g, or t
  misc_feature (416)..(416): n is a, c, g, or t
  misc_feature (426)..(427): n is a, c, g, or t
  misc_feature (433)..(433): n is a, c, g, or t
  misc_feature (444)..(445): n is a, c, g, or t
  misc_feature (647)..(647): n is a, c, g, or t
  misc_feature (708)..(708): n is a, c, g, or t
  misc_feature (716)..(716): n is a, c, g, or t
  misc_feature (746)..(746): n is a, c, g, or t
  misc_feature (800)..(800): n is a, c, g, or t
nggtgacctccccacccgtcccaagcacacacacagacacacacacacacacacacgcacantggtcagggagctcgtggctgtgaggggccaatgggcggtatccaaacattttgaggngattttaactggtaggttcaaagcaagctgtgctcgacttcagtgagggntatgctgtgcctgagagggggttactgtggcatccgcacagttnagtggnntgtgggggccagcggggnngtcaantaggctgtctgtngnttgactcaaagtggagggaggtngtgtcccccggatggcggctgcataacgtgtagatatctgtggtctaatccacacggaggaantgtggangaggtggaaaactgcnaactgctgatggtgancgatccttgtttctggcatgacanagtccngcttacattnnaatgantcccaaggcanntgctgtttttgcttcatgatgtcctcagtgttgggaaggcaatttgtccatggcagaaacccgtagagccacttcagcatgcagtagcccaggctctggaggtctgctgcggcgggagggcccgcaatcccttgtgcagggtccatgcttatgaactcataggtccccctcgtgagggctcctgctgccttccacgtaggcnacgtgtttgccacttgggcaatagcggaaggcgaacaatacgcctgccaaagtcacctgantctggtcntctggatccacaaagatattttcagctgtnacatttccatgaacatactcattctcatggtggaactccagggcatcaagcagngggaggcaaca

SEQ ID NO: 671052 - DNA, 228 bp, Homo sapiens
  misc_feature (18)..(18): n is a, c, g, or t
  misc_feature (69)..(69): n is a, c, g, or t
  misc_feature (90)..(90): n is a, c, g, or t
ggggggggggggggggangggaggagagagggggagaggaggaggggggggggaagggggagggggggnggggggggaggggggaggggnggggggggggaagggggggggggagagagaagaagggagggggggggggggggggaagggggggggggggggagagacctaatcccccattttcctcctatccctcaaccccgacatcattaccggggtttcctttta

SEQ ID NO: 671053 - DNA, 196 bp, Homo sapiens
ggatctcgatatcaaatgccttccactgggaccgaaggctgctttccccctccctagaggtgcccattccataacctgggagactgaggagagcattggtctgaagcccagttcctgttcgccgatccatcccctactccaataatcccccactcctcgctaggtctcagtgtacatcgctgtcattggggcaggg

SEQ ID NO: 671054 - DNA, 732 bp, Homo sapiens
ctgtctagaggatcccagtaaaccggaaacatgcctttgaaaacggcacaagacaggtatgccctctctcaccactcctattcaacacagtgttggaaattctggccaggcaattaggcaggagaaggaaataaagggtattcaattgaggaaaataggaagtcaaattgtccctgtttgcagatgacatgattgtatatctagaaaaccccattgtctcagcacaaaatctccttaagctgataagcaacttcagcaaagtctcacgatacaaaatcaatgtacaaaaatcacaagcattcttatacaccaacaacagacaaacagagagccaaatcatgagtgaactcccattcacaattgcttcaaagagaataaaatacctaagaatccaacttacaagggatgtgaaggacctcttcaaggagaactacaaaccactgctcaaggaaataaaagaggatacaaacaaatggaagaacattccatgctcatgggtaggaagaatcaatatcgtgaaaatggccatactgcccaaggtaatttacagattcaatgccatccccatcaagctaccaaggactttcttcacagaattggaaaaaactacttgaaagttcatatggaacccaaaaagagcctgcatcgccaagtcaatcctaagccaaaagaacaagctggaggctcacactatttgattcaactatatacaggttcagtaccaaacagctg

SEQ ID NO: 671055 - DNA, 639 bp, Homo sapiens
tggggggaggtaatatgggttaaatagtttttttaatttatttagggggaatgatggtggtggtaaactttaatagtgtaggaagctgaataatttatgaaggaaagggtgtcagggttgattcgggaggaccctatgggtgcgggggcttggtatgattatgggcgtatgataagtagtagtaactgggtagaacatggttggtgggtgtatatatggtaattgagatggctcgggggaataggtaatgtgattaggagtagggttaggatgagtgggaaaaaaaaagagaggaatgtaaagttaaattatcgccttttggggttgaggtgatgatggatggtggagattgggtgctgtgaaattggtttaaggtaatagctttctagtcaggttaggtctaggaggagtaggggcaggtttgggctcgtaagaaggcctacataggggatggtgcggtgtgtgatggaaatgtggcgggtaaaggggctccttgggtcgaaaagttacatgggcgtcagcgaagggttgtaatacccgtaggggcctacaagtgggggcttagcgaagttgctttagcctaaaattttcgtcggaaggcttaggaatgcattggataaattgtccatgaggataaga

SEQ ID NO: 671056 - DNA, 1017 bp, Homo sapiens
  misc_feature (334)..(334): n is a, c, g, or t
  misc_feature (344)..(344): n is a, c, g, or t
  misc_feature (358)..(358): n is a, c, g, or t
  misc_feature (374)..(374): n is a, c, g, or t
  misc_feature (390)..(390): n is a, c, g, or t
  misc_feature (467)..(467): n is a, c, g, or t
  misc_feature (502)..(502): n is a, c, g, or t
  misc_feature (527)..(527): n is a, c, g, or t
  misc_feature (569)..(569): n is a, c, g, or t
  misc_feature (612)..(612): n is a, c, g, or t
  misc_feature (616)..(616): n is a, c, g, or t
  misc_feature (630)..(630): n is a, c, g, or t
  misc_feature (633)..(633): n is a, c, g, or t
  misc_feature (636)..(637): n is a, c, g, or t
  misc_feature (643)..(643): n is a, c, g, or t
  misc_feature (651)..(651): n is a, c, g, or t
  misc_feature (659)..(659): n is a, c, g, or t
  misc_feature (664)..(664): n is a, c, g, or t
  misc_feature (676)..(676): n is a, c, g, or t
  misc_feature (693)..(693): n is a, c, g, or t
  misc_feature (707)..(707): n is a, c, g, or t
  misc_feature (763)..(763): n is a, c, g, or t
cgtaagagaggtgggcaagtacgtgttacagacggcacgccgcctttaggcggtcaaggtggggcgagcagacgttcgcccccctgcagtcggccgggtcactacccaagagcctttggaggcggaagcatggaacggtctgcaaacgttcccgagcgggcctctgcggctctggcgggcgtttcgaacttgggcgccgggcacacgcccagtcccgagagcgctgagggttcccttagcgttgccctcaccccggccaacccgcggggcgccagagtcctggccctttaaactgcctgcgctgttgcctcggcgtcttcgtttcgcgcgcccngcccgcggcngcctggctggagcngaacatggacccggcntgcgcgggtgtgtgcngggcgctgtggcctggtgggtgcgccttggcctggaggctgggagtgccgcccccagccgctgctacccacgcaaancctgggctggcttctgcgggggcggcgggcggccngagccccgtggctgcagctcgtacnggggagcccgccgcttgctgggagctgcggcgctggccctgngggggagccctggggctgtaccacacggctgcggtggcacctncgcncccaggacctccangcnganngctcanccgcgcantctccctntccanccgcctgcagtnaccctgtaccagtacantatgtgtccttctnagcagtccgagccttcctcgacttccatgccctgcctaccaggtggtggaggtganccctgtgcgcgggctgagatcaagttctcctcctacagaaaggtgccatcctggtggcccaggaaggagaaagctcgcaacaactaaatgactcctctgtcatcatcagcgccctcaagacctacctggtgtcggggcagcccctggaagagatttactataccagacatgatgtgtactagccgggagggggcggttgggaaagaggtctggccagagggggcccagttgtggcggcaggggcaatggccgtg

SEQ ID NO: 671057 - DNA, 311 bp, Homo sapiens
ggtgactctagggatccacagtacgcttctactatatgaagcggtactggtaacatatgatccaactttaacaatttttagctgagaatactttttaagtatcaatcaaatgtatcagcatccaccataagcgcataaaaattttcacatgccattaacacttgtgttaccatcataagcctacagacctacacactaattatctttaaaacccttattaggctgggcgtggcggctcacgcctgtaatcacagcactctggggggcccaggcgggcagatcacttgaggtcaggagtttgagcccagcct

SEQ ID NO: 671058 - DNA, 418 bp, Homo sapiens
taacccctctttagatttattgcgctcaaaacccaatttaaaccccccccccatgtaaacgggggggcagggcaaaaaagaaaaatgtcccgaaagccagtcttggaaaccaccagttctggcccccccgcaattaatcgcccgtgattgggttttggtgtttaccatctggtccctggtgggctggggggtcagagatgtcgagacgctgtgcagacgcctcctgggaggggcacggagccatctgacgccccttgggaaaatgtcacaaagagagagtggagaaaaacggccacttgtccggccatggagtcctggaggacagttggctggtacccaaagatactcatagaggccagcaagcgggggttacgacgagcatccctaaggtgaacacggctgtccaaagccaaggtcg

SEQ ID NO: 671059 - DNA, 1010 bp, Homo sapiens
ggagagagagaactagtctcgagttttttcttatatttttataagcttccacctcagggtttaactggaaaccagctttgggggcatatgaggcacaaggaatccagctctggttccctaagaagccatccacagggttttaccttgtagactgtcatcactggtcagacaatctggggtcctctggtcccggtggcaacccttagggctggttctgggacagcgacgggagccccaagacagacttgccagtagcgggcatccagcatggggctggtattccggggctattgttggactttgagagctgtgtacagaacttccacctggggtccctgttagaagctacagcaagggcctgatctggctagactccatactatttacatagtgtagaccagaaaggcacagtttactggggtgagggtccagtggaagagcgtacaagagattgttatccaaaaagggagaaagaagggccccagcggagaaacgggtagggtagcacatggtcattactaccataatacatacgagacgtaattccctattaccaagggggacacagcccgtcacagggggacatagaaatccgagaccttgcgggaaaggagccccatcatcgggagctacggggccatacagatacccggggtacccagatccctggtgcccgagtaccccggggactcagatctcagatcaccagatccccggataccctgggtccccaggggtcatacgaggcaacaaaaggatacagaaatcgcaccggggtactacagaagacccccaaggctcccacaggagacatacagggaacatactgcggtccccggagattcccctctaacaatgggagatcgtagaaccccggggttagtcgggggcatacacagaagagaagagcggcgaacagcgttaagagagcacgttgggaacaacccaaattgggggattacaatcagcactaagggccccagggtccaagaacgctcatcaagagggag

SEQ ID NO: 671060 - DNA, 1166 bp, Homo sapiens
  misc_feature (680)..(680): n is a, c, g, or t
acaaaggaacacccctccaacaagaaatcattgggagggcacacctcttggtgaggcccactccaaaaaacgcccacacaaacagcgattaccacagactttttatccaagagaagatccaaagttcccatttaaacccggggtcccaaaatttttcgaatcagtgggcaactgttccggaaaactttaatgcatccagttccggaaagggttcccccaagaaaacctgtcccagaaccaggtccaacacctaggactgaaaaattagttcgccgaaaggactaaacccatttcggaaatatgaaatccaaaactgcggaagtccaaacggaagaaattccatgcggatttaaatttaggagaatcccatggaagaaatccctgaaaccattacgaattctgggccttgttgaaaaagttctaccggagaaagatgcctttcagaggaagtactacaggacgggaaccttccaagaaacgccaatggtgccccccggccggccctgaaccctcgggaactggctgtttgggcctcctggtgctataccttttcttcaagttcctggtcagcatgatcaggacggggtcttccttgacgttggccagcttaatcctcgtcttcttgtggcccccgtgggagttcgatgaataattgtgttaccggaaattgacaaggggcntcttacgccaactctgacagcaagcagaaactgaatgactgactcagggaggtgtcaccatccgaagggaaccttgggaaactggtggcctctgcatatcctccttagtgggacacggtgacaaaggctgggtgagcccctgctgggcacggcggaagtcacgacctctccagccagggagtctggtctcaaggccgatgggaggaagatgtttggaatcttttttccccatgtgctttagtggcttggttttcttttggtgcgagttgtgtagaatgctgtgtgtgagtgtgaatttgtttgtgatcatagaaaggtattttggctgcagggagcgcagggctgggaccgaagggacaagtcccttttcatccttggtgctgagtttctgtacccttggttgccagagataaagtgaaaagtgctttaggtgagatgactaaattatgcctccaagaaaaaaaaattaaagtgcttttctgggtc

SEQ ID NO: 671061 - DNA, 284 bp, Homo sapiens
ggatctcttttccccacttctgttactgacctggcctaagttggactgtgtggtgaggaaactacaggtaatggaaaatatctttatggaaaagcagaaaatcctttgcccaaaagggaatacaagatgtcaggaataacagccccctcctactccttgctcaaaaagtcttcctccccatggaatgttgtcttatacaccacaattggtactccatagtttaggaccaaggcattgctttgtgcaagctgtcattttaaaaatgttggcatttcaaaaaaaaa

SEQ ID NO: 671062 - DNA, 908 bp, Homo sapiens
ttcggcacgaggtttctccatgttagtgaaaggagcaattggcttcgatagatatatacaattgatgaaaatatcagcttgtggaatttcgtcaaagggaccaccacgggaagtttctttgatatcccattttaatatgttagcatctggaataccaactttgtgcaacagatcgatggcaccggaaccacatcttcctagcgcaccaatgattaacacggttggctttctggcgccggtggctaaggcttctttataatctttggtaacatctttaaccaacgccttttcattggggtaaggcgacactgcaggcaagtcttcatcgtcagaatgcgtttgcttgaatgcccagtctcttacaccaagggctgcacctgcgaacccagcgtaaaatccaaaggcagcaactcttctaccttggtcattttccaaaaattccaaatcatatagagtaccgtgtcccttaataaatctcataaggacattttgccacccagcttggtctttgtagcagtgagcaaactggatgtgttcgtggactagagggaaagtatcggtttcaggcatttccttcaaacctataatgattctgtcgcgtggagcggttttccatgaacctgcaggcactataatggcacctgcttgacgatattcgttaatattgaaagtagattgtggactgtcctctacatatattttgaagcccttagctatcagttttttaaccgtggtaggtgttaaggcagcacgtgcctctaggggtttagtttcagctcttagatgtaatgtgacggcagccatttttgcggttgtgtgaaaaataaagcgttttcgttgttatcttatggtatggcttctaaaataccagtttccgtcaggaaagatgggctttttatattttcatc

SEQ ID NO: 671063 - DNA, 555 bp, Homo sapiens
cgccagctccactattgaatcggaaccccccaaacacgtagagggagtctggtggacctcgatggtagacacgctagagtgaccatacgagacctgtggtgtggtgtcccactctggagctcctgacaccacagagtgccggttgccagctggtactccagcagctgctggttgaagccattttccggggagtaaccgcccaccaggagcagagacaggcctcggcgggcagtaagggtgtgaccagcaacggatagcagctccacggtctggggggccttctcctgccgccattgcagggtggtgaggttgaggacccagaaatcacgggtgacgcctccagcggtaagtccccccagcagatacatggcaccacggacagcgggcacatatgcggctgcaatggaaggagcggggcgatgggcctgggcccccgtcctcggctcccgccagcatctgtgtccagcggcgctcactcactgagtacctgtacaggtttcccagcagcccctggggcaggccaggccccaaatatcacaaggtgcatcgggtcat

SEQ ID NO: 671064 - DNA, 522 bp, Homo sapiens
  misc_feature (23)..(23): n is a, c, g, or t
  misc_feature (171)..(171): n is a, c, g, or t
  misc_feature (246)..(246): n is a, c, g, or t
  misc_feature (281)..(281): n is a, c, g, or t
  misc_feature (415)..(415): n is a, c, g, or t
  misc_feature (423)..(426): n is a, c, g, or t
  misc_feature (428)..(428): n is a, c, g, or t
  misc_feature (430)..(431): n is a, c, g, or t
  misc_feature (434)..(434): n is a, c, g, or t
  misc_feature (437)..(437): n is a, c, g, or t
  misc_feature (439)..(439): n is a, c, g, or t
aactttagttcatcgcaccccgncttacaggcttaacatagaatgtggacctaaatacccagaagcaccctcctttgtgagatttagactaaaaattaatatgaatggagtaaatagttctaatggagtggtggacccaagagccatatcagtgctagcaaaatggcaganttcatatagcatcaaagttgtcctgcaagagcttcggcgcctaatgatgtctaaagaaaatatgaaactccctcngccgcccgaaggacagtgttacagcaaatatgaanactccctcagccgcccgaaggacagtgttacagcaattaatcaaaaagaaaaaccacaggcccttccccttccccccaattcgatttaatcagtcttcattttccacagtagtaaattttctagatacgtctgnagacctcnnnntncnnganagnangctcccattcaaaggaaatttatcttaagatactgtaaatgatactaattttttgtccatttgaaatatataagttgtgctat

SEQ ID NO: 671065 - DNA, 617 bp, Homo sapiens
  misc_feature (70)..(70): n is a, c, g, or t
ggcaggggaattgcttggacccgggaggcggagattgcacttgagctgaggtcatgccactgctactccnagccttggcaacctgggcgagactcctatctcaagaacaatagataaagcataataagaaagacaaactaccttgttgcgggcgctcgctgcctctcgagagaagtacttttgaacccacccactccggggattggttggcgcgcgcgcgtgtggcccacacaagattacgggataccaagacagacagtatcctgtgggccattagagaggaatagttccccacaaaagggcaagagctccgagggaaggaatcaatgatctcttatagggcgttcagcgcagtagttttctctctagatcagcctttataaataacagagcgcgccaggttggaggaccgaacagcgcgcgtcttcttcgttgagacagatacactctgcgtataccctggagaccttcccaggggaggcgctatctatccacgggggggccgccctttagctcagagaccgaggacgggagggtctcgacaaagcgcgatcacgccccggagttctccatagatatatttgtcacgcccaccgcggcgcctctggggtgggcga

SEQ ID NO: 671066 - DNA, 1442 bp, Homo sapiens
ggtgctgctgctcgtgtgccatgactcggagcagagcaaagccgcgatgtccagcgttcttccactgcagatgatggtggaggacagagctgtgtgcacgagtgacatcgagagtcgcgttggcacgagctgtcctggctgggacaagaaggattgcggcgcagaccctgaagggacaccaggagaagattcggcagcggaagtccatcgcgtgcctcctcacaccagtggcccagtgctgcccatctcccttccagacaaccgagagcgagtggattaccccgtgaggccaagaatcgcgtgggcaccgacagtgtgccacgtcagtgatgccagtgtttcctgccgatcgggacgtcgcaggagtgagccagcgggtccggtgctggcgtcagaaagatagacgaaggagacaggcaaatccgtcaaactgcggcacctgtgactgacatcagagtggttatgtgagaccgagcatgcatgacacggcagcctgacggtctttacaaagcacgctcgcacaccaaggcggacacaacacgtggcgcacgcaacgacaggggcaaagacagggcgccaagcaagcaggggcagtacctacacacctgcggtgggcaacggcaccccacctcctggagtggcaggagattcaattccgacgtgcaagtacccagaccaagatacagagcttgggcgattacaaacctctggcttgtgccaatggattggcagaaagcaaccatctcaaggaaagcccccagagagaccgcgagaggctcgtagcacacgtgtccttacttatccgaggggccctcctatgggaaccactgaatacaggaacaacagaacactttgagcagttggcagccccaggagcatatcggacaggcatccagggaaagtaagctgagaccacagtctgctacacccaccacgaaggaatgggccaggtgcgcacatctaccttgacagcatgtgacacacatgtgaggacactacagagggacaactgtcgtgatctattagagacagattacatatgcgacagaaacagagatggagatgagggaaccacacgatagcagaaagatggtagcccagagggtggacgacacacgggtaaggcccgaactacagtttgaaaccgagtaccaaaaagactacgggacgagtacaaccgacaagagagcacagggaatgacaagggaagaaccccgtagtagagggtctgaaccgacgtaaacagaatagcacaacaacaggagaggacgatacaagatagtagcggggagcgaaagcagaccaacgacgaaagacaagaagaagaagaagaaagagaggatgacatggaagaggcaacgagactaagaggcagaccaggagacagcgcgacgccagacagattagatcaacgcaaggcacaagcgtaacaggacgatcta

SEQ ID NO: 671067 - DNA, 479 bp, Homo sapiens
  misc_feature (23)..(23): n is a, c, g, or t
  misc_feature (171)..(171): n is a, c, g, or t
  misc_feature (238)..(238): n is a, c, g, or t
  misc_feature (372)..(372): n is a, c, g, or t
  misc_feature (380)..(383): n is a, c, g, or t
  misc_feature (385)..(385): n is a, c, g, or t
  misc_feature (387)..(388): n is a, c, g, or t
  misc_feature (391)..(391): n is a, c, g, or t
  misc_feature (394)..(394): n is a, c, g, or t
  misc_feature (396)..(396): n is a, c, g, or t
aactttagttcatcgcaccccgncttacaggcttaacatagaatgtggacctaaatacccagaagcaccctcctttgtgagatttagactaaaaattaatatgaatggagtaaatagttctaatggagtggtggacccaagagccatatcagtgctagcaaaatggcaganttcatatagcatcaaagttgtcctgcaagagcttcggcgcctaatgatgtctaaagaaaatatgaanactccctcagccgcccgaaggacagtgttacagcaattaatcaaaaagaaaaaccacaggcccttccccttccccccaattcgatttaatcagtcttcattttccacagtagtaaattttctagatacgtctgnagacctcnnnntncnnganagnangctcccattcaaaggaaatttatcttaagatactgtaaatgatactaattttttgtccatttgaaatatataagttgtgctat

SEQ ID NO: 671068 - DNA, 308 bp, Homo sapiens
gcagctgaggcgggaggatcacttgagaccacgagttggaaaccagcctcggcaacatagtgggaccctatctctctttaaaaaaaaaaaaaaaaaaattagttaaccaggcctgatggcacatgcctgtagtaccagctactggagaggccgggaggtggagggggctgaggtggaaggatggcttgagcctggaaggttgaggctacagtgagtcatgagtgcacaccactacactccagcctgggcaacagagtgagatactgtgtaaaaagaaaaaagaaaaggaggggaaaggaaagaaaatg

SEQ ID NO: 671069 - DNA, 926 bp, Homo sapiens
acacgtatcctgaaaactggagggccttcaaggctctcatcgctgctcagtacagcgggggtcaggtccgctgtgctctccgcagcacctccacttccatttggggcaatagcaaccgcacccctgaatttctccgcaaatttcctgccggcaaggtcccagttcattggagggtgatgatggattctgtgtgttcgagagcaactgctcattgccttacttatgtgagcaatgaggagctgcggggaagtactcgcagaggctaaggcagcccaggtggtgcatggctggtgtgatgcttcgctgattccgatatagtgcccccagccagtacctggtgtgttcccccaccttggggcatcatgcgaaccacaatgaaagcatggccactgagaatgctagatgcgaggacatgtgacgtgccgaattctgggcggctgctggatgcttacttgaacagactgagggacttttctggttgggcgaacgagtgaccaattggctgacatcacatgttgtctgcgccctgttgtggctctataagcaggtgctagagccttctttccgccaggctttcccaataccaaccgctggtttcctcacctgcatttaattcaggcccaggttcccgggctgtcttggggggacgctgcaactcgtgctgcgaagatgggggcaggttgatgctaaaagttgcgaagagcccaagcttaaaaggagccccacggaagagaaacggtcccggagagaacagaaaacccaggctgtgcggacggggtgacacacgggggtgcccccgccctaggagggaagggcttaatcttttcacgcggcgggtgctggccacgggcccggaccccctgtttactgcccaaaaccttttgggggatgaacgcggccccaggaaccagcggcggcatttcacg

SEQ ID NO: 671070 - DNA, 248 bp, Homo sapiens
aattaatcaacgtacctcgaatttataggtacaaaagtacccgagatttagttactataatatatacagactaatacagacattaataaaaagacaattctgtagacatttaaaaacagccagctagctaatataagcaaaaatactctataagcaatcaggtgacatatatcatctctattttccaggccgagggaccctgtcagatgagcatgctggagtgatatctgttctaagcccagcaagca

SEQ ID NO: 671071 - DNA, 138 bp, Homo sapiens
ggtcctcacctatcgttggatgggctacagcgcatctcaccctaacgttcatttcatcggggaacgatgaggagaaggtttcctatcggtgcatccgcaactggaagcctttgtagcgcatggagggttgaacctctg

SEQ ID NO: 671072 - DNA, 155 bp, Homo sapiens
gtgctgtggtgatgtctgctcccaggattaggaggcagaaggagatcccttccacggtgctagcgtgagatggatcctctcagggcccaacagctggctgcggagttggaggtggagatgatggccgttttttccaacagattgaccagtgcttg

SEQ ID NO: 671073 - DNA, 1329 bp, Homo sapiens
ggtgagaacaccacagatttgtgtatctggttctgtactaactatcaagattatctcgactccttactctactctacatgatccatatgctctgcctattgaaacctgctacattcaccctcagttgtctgtgtggcaccacattggcatccagtacgggctcatagtattcactcgtggctgcatgtagcatggcatcgtcaaaagattagtattgtctcaatcggtcatccagactgtaagctcgaggcactcagacgccactttgcgttggggtgaatttttacataccagtcagaggttcgttcatggtcaatctctctgatattgacttcgtactgggatctcaagcctactcggtgatcaggtagctcgactttgatcgacatacagtaggatgtttcaagagcacgatataactacgagcttgaactactctactagtgagactcatgtagaacaccgtatgtgttcccctgtatttagtggtataccgcgtctggaaaggggcatgcaacaaaacttcgtaatctccgagtctcattaactgtgtctacgtcccactacatgggccatgaccacacccttgctggttgcaatcatgcctgactataccctcgaggcttcgttcgccttctgggaatggacgccatttccacgactcagatcgaaggcccacagtatgttggaaaggttggtcctgtcgataacagttttgaagctatgcgtaccccaccgtgggaaatggcgccgatggcaacgcacgtgtggggtcgccaattggcggaaatgtgcccacgtatttgggcttaaaactcggccccggttatccataggggacctgtgagacaggtttgcgaatgtagcccctatctcgagcgaaacaccacgttgcccaaagaagcaaacagcaccaagcccaaagccataaggtatactggacagggcggcaatgcgagggcccataagtaccctttgaaaggcccctttgaaacccggctcaccttgcacacgcgaagtttgcgcacaaaagttttctccccaagcgaaggaataaggggccttcatctaagggttctcggacccaaagaggattccatcgcggctatttttgacacaggggggccggccatacccttgcgtgggtataggacacaagaacgcgaaggtaggggggacccgccatattcgaggtaaaaagtgggttcttccaacttaggaggctggtttttcccttatataaaccacgcttctctaaccccgccctccacgccttggctgtggggaaagaaacttacggaggacgcttggcaagggaaatccccccga

SEQ ID NO: 671074 - DNA, 703 bp, Homo sapiens
cgggacggagctgagcaggaagagccgtgcgccatggtggagaaggaggaggctgacggcggcattagcgaggaggaggcggcacagtatgatcggcagatccgcctgtggggactggaggccctagaaacggttgcgggcctctcgggatgcttcttgtcggcttgaaaggacttggtgctgaaattgccaagaactctcatcttggcagtgagtgaaatggactgatccatgctgtatcacgtaacaggtaactcctagaagatcccggagtctcagtttcttgattcgtactgggtcttgttggccgatatagggctgaagcctctttgtagcgagcgtcagaatctacaactcccattggtgtgagtgtgagaggtggacactgaggactatatgaccgaagcatgactcggagagatcaatgatatgtgcactactagaatttccgactgcgtcgttcgctgtcttgacgtatgctgctgccatggttagtgctcatagattaagaggtatgatcatgaatctgtgatcacaaaattagtatctatacgttacattatactagtgatgatgtattatggctaaccatgtgagatacacatttggcacaatctagagagagcatggagttgtgtaggaggaagaaaacgtagaaagtttgcccaaaggggttaaggggcaaggaggtaggaaagatggg

SEQ ID NO: 671075 - DNA, 463 bp, Homo sapiens
  misc_feature (376)..(376): n is a, c, g, or t
  misc_feature (400)..(400): n is a, c, g, or t
gacacagacccagaccatatcagagtctgcataggaggatctttcctgctcaggaagatggtcaaacctcatagaggtagtttcaaaccacaggacaatttctgtgtcttcacagagaagaaagcactgttaattcctgtttttacaccctgaagcagtgcaccatattaagatacagtgggacttgagctattcttctgtgaagaggaggagggcaactgtgaaagaaatggcttgactgtaagatgttctcagtctaaccaattttaggaaagaaaatatgtgaaggcagaggatccaaagcgattcccttcaaaccatcctaccccatgggacaccctttgtgaactccctaaggtaacagcagtccagaacncagatgacctacaggatttctgtncctttccagctttttattttaccattgatgcttcctttctcctataaaggaaacaacagcttc

SEQ ID NO: 671076 - DNA, 191 bp, Homo sapiens
gtagccagcggctgcatctgaggcggacgccgcagtgtagggcacaccctgagggtagccagaaacgttgaccaagacccgagcaacttaggggcttgcagctcctctgttcccaaccgatcccaagagagaggctgttagtcttggacttggcgttcgcacccctgagagaaggggtcaaagctcccctg

SEQ ID NO: 671077 - DNA, 976 bp, Homo sapiens
  misc_feature (976)..(976): n is a, c, g, or t
agggctcgccggaaccccgccgggcgcaccacagcgagcaggggggggtgctggctcgcgatccctgctttatttaaattattcggtaattttagcagtacaaaatctttgactatgaccatgggacacagacatgagtttatgttttggtttgttttggtctggggatcatgtacttttctaaatcctctgcacttcctttcattaacaaatggcagagtgcccgaagttcctctattattcatagaaaagaaatttgtaaggtaagactgaaaaaataaaatctacagattcacggaatgatcttccaatattaagaacatacaaagtatactaaagacgtctacatttagtgctccaggtaacaaatcaaacatttggacgttggacgtccctgtgcctatttcttggtaaggacagcacagataccaaggtgtgggcgaaagctaggaaaacgcgtcacgggcgctcctaggggtggtgtgagatgaatacacgggatggagttattgtgagcgccttaacaactttcgtttaagagtggcggggatggcattatcactaataggacaggggggatggggaagagggggaatgccactttgggcgtcgacggagtggtcttgtaggaggcagtggctcctccaggggattctatatctgggccggggcataagaaatatgagtgtgatggtagtgtcgcaactgagtcgaagaaggggagccgtaagtagggtgtggcgccgaaaacaataggggggacggcggtgacacaaaccaggtggggggggtaacaaaaaacaatataatacgtggaccggatgggatggggtagacacggggaggtcgagtggacataccggcaagacgggaatcgataatatgaaacataaaaaaacggggcggggacaacaaccagggggggcaatacaattgatcactggaataagggggtcatatctgcagtcaaaccggn

SEQ ID NO: 671078 - DNA, 515 bp, Homo sapiens
agaggacccgaggaagacatcgtggaacagtcgtgtatccgacttagagctggagctctgtttcaggatcgtgctgccagacttggaaagtcaattagtagactcatcgttgtggcctcgctcatcgacaaaccgacccaaatttaggagggacctgtgccaggacctgtgagggtatttgggggcttcagtagctcgtatgttggcagcctttcagtgtatcaggcgacaaaacagtttcagccacctcagtgttctctgcagaacagtgggcttccctctagttggaggtaaaaccacctcagctaattgattatctgccagcagaagaaaacagaaggttataccatccattgggagtggaacacaactgcccaaaagttaagaccttaaaccaattatttgctttcccttgagaaattctctgcctcttgttggggaaatgacacgttgaggggaattcccaggaaatcttgatccaacaggttggacgtatgtgtggaaattactcaaac

SEQ ID NO: 671079 - DNA, 105 bp, Homo sapiens
ggatttgctggtgcagtacaactaggcttaatagggacatgaaacaattctcagcaaattaaaaaaaataaataacaccaatcacccgctcagaccacagcaaaa

SEQ ID NO: 671080 - DNA, 105 bp, Homo sapiens
agacggccaagaactacttcaaaaaggcctgaaggatatgggctatgggactggattagcaaccccagggggaaagaccttttatcttcccattatagtatctcc

SEQ ID NO: 671081 - DNA, 313 bp, Homo sapiens
gccccacaggaccccctggaacagttcggcatatccgaggaggccaggttccagctgagatggcttgcaggcgtgagcagggcacggtggtcagcgtgcagcggacgggactggccctgccagccatgaatcgcttggccatgctcgatctgtttgtttggtttttggtttttgggtagggttcactgtgttgccaggctagagtgcagtggtgcacagctcactgtgaccttgacctctgactcagtgatctctgcctcagcttccagtagcgggatcacagcatgagcgcacaccgccatcacactgattt

SEQ ID NO: 671082 - DNA, 279 bp, Homo sapiens
ggatttgctggtgcagtacaactaggcttaatagggacatgaaacaaccagtttttaatgtaggtgaaaaacagccttctattggaagaagatatcatctagaattttcatttctggagagaagtgaattcttagcttcagttcttcaaaggaaaggctgactgttggggctaatgtgtctggtgactgagttgaagccagtgctcatttattattccagtaatcctagggccttaaaaattatgctagatctattctgcctatgctctgtaaacaaaa

SEQ ID NO: 671083 - DNA, 246 bp, Homo sapiens
  misc_feature (3)..(3): n is a, c, g, or t
  misc_feature (200)..(200): n is a, c, g, or t
tanctttctgtgtgcttaggtgcccgagctactgagggtctaagtccgggcagccgaagagtgtggtaggccctcgccgcggtgatggtggttagcaagatgaacaaagatgcgcagatgagagcagcgattaaccaaaagttgatagaaactggagaaagagaacgcctcaaagagttgctgagagctaaattaattgnatgtggctggaaggatcagttgaaggcacactgtaaagaggtaatt

SEQ ID NO: 671084 - DNA, 389 bp, Homo sapiens
tcataaccttataaatctacctggtgttctgtcctcctttggctgagctgaatctcgattcatgagacatagttactttccactcttccctcccctttctgcaggcagtggagcttcaccctatgaccactaccatcacaggcccacagggtcactgccagactaccactgatttttgtttaaggcacaggggctgtttggtcagcttgtcacgaatgctgccaggcctagaacctaccctttatgtctgtgggctcctatctggctcagggcaggtccagaaatgctatccaagagtcaaggcctggaatcttggacctcaagagctgacctttacttctctgtggccagtctgttacataaggtgcaagacaaagccccctttactt

SEQ ID NO: 671085 - DNA, 243 bp, Homo sapiens
cgaacctagcgtgagggctcctgcagcaccaggggcagcactgcacccgtgtgaaacttctggagagctgcagcctcaccacgcctcggggctcccttcgctgctttgtagccacccatagtttggagctaccgagatgagagcacagggggacattgaacagagcagattcttcatggatgcacagtcaggccccaccactctctgcagctgaacagtctcagccatgtacttgcgtcccag

SEQ ID NO: 671086 - DNA, 299 bp, Homo sapiens
gttccaagttgggggtttttttaaaaattaaaaaaaaggaaagcttttttgttttgccccctttccccatttaaaacctttttttcccttttcctgggatttttgaaaataaacccttgtgtgtcctgtagtgtcctggtttaacccccccccaccagcttccccgggggggtttggaacccctgggtttgtcccccccccccctttggggggggccccaagggcttttgggactggggtttgtacccccttgtttggccttttttgtggttgatgctgtaaactttttggctttttta

SEQ ID NO: 671087 - DNA, 342 bp, Homo sapiens
  misc_feature (307)..(307): n is a, c, g, or t
tgtattggtagggctcgctgcttctcctcggcggcctgatgtgctctcaccaggtggccggtctccacgtacagttccttcagcagaaggtcgaacttcgtgttctttccaaactgctccttcagcttatccactttctcttggaggagcatttccatattcttcagaatcatctccgcctcttccacccgctcttctgtggcttacagctgatcctcatgttcttcccgctgcgcatccaggcgcctcctggcctgctctccctgaaggctgagcaggcgatgcagctcggccacacggtcctggngcaccagccagacctcctgcaagtgctgggcctgg

SEQ ID NO: 671088 - DNA, 242 bp, Homo sapiens
agtgactagaggatcccacctcctaccacgaatagccagagactctctcaacagcacgggtgtatacctctgctctgacctggcactataatgaactgcttgaatcaagcttgtcctacccacgggccacatgcagaccaggatggctgtgaatgaggcccaacataaattcgtaatctttctcaaaacataatgagatcacgatggcaatctgttttgtctttttccgtggggtaggaggt

SEQ ID NO: 671089 - DNA, 119 bp, Homo sapiens
gagccagagcatatatcactatagagtagatagtaggagagtctgtctcctgtagtaagagttaggaggtcgtctgtccttgaaatagtagtgtgtaggtagatgctggtgtaggctcc

SEQ ID NO: 671090 - DNA, 854 bp, Homo sapiens
gttgtgaagtagaaactgatttctaattgacttcggctattactaaatatgtgacatgcatgcacttctttttaattgaacagtatgtttgctgctgttgtatctcagtttgaaagtagtaattgatgaataagaattcctagaaatattcttcttccataatgatatgtcacagatgttgtgagtgctacgacacacactccatctccattggttaagtcaagtttagtggacgataaacatgtagataatagctgtgtgtggtaatgactctggcccactcacccagaggctcgtgtatttccataagttatgggacccctctgatctgtctgaaatggccaccatcagatcattgagacttgacatgcagtctaaagatgtgtgtggtctgagatttctatatactgatttgtgaccagcagaataacttgtgctgtttccaaaaccagattctttgtgcctcttatagaagccagatgaacaggaggaagctgtgaccttaaatgtcatgtgctttaatgcttagttcctttaagaaatgtatacttttatcatggtgttatagtagaagatttggaaaattctgagaagtgtcagaagaagcagatagtcatcagtggcacacgaatgcgcccacgcaagccagccaaaaagttctagagaccggctttggcccagcccccagaggacagtgacccaggacaaaaagggccacggaaaaaaccggagcatcacaagagccgagtgctcaccacaaaagagacccggggaaacgaaagtgttgacaaatcccaagagaagtccggggccaacagggacatcacaaggctcaaacaagcgcaagaaaaacg

SEQ ID NO: 671091 - DNA, 830 bp, Homo sapiens
ggacttagcgttgctggtccatgtatagttccggcattctcagtatctctctctgacactagcctatggagtggttcccacagagagcgtactatgcgagctattatgtgcatgtgcgtcctatgtatgggtaataaatagtgaggtttatacaatggaaagcgatgatccatgagatggttggcctggagagaattcgggctgtagaatattgccacagaactcaggcgcacagcagaacaggtcatgatcagttccagaagtggtcctgggtgatgagccgggtctgggacaatggttatccttgggacatgctgctcgtcagtcgatttggaaccttcctcaagaacaagaataccgagcagccatctctgactggttgtacatgaagcagatgaatgcaaaggattcaagcatgagaactatggcttgatgcctttaaagtggagtcctgaggaaagagcctgtatttaacgatgagctcccagcaagcattctgtgtggcattgtgtccgtaaagcctaacgtgaaggaattcacaggagacctcggccatattgagaggaattggagaccatatttgagggcatagactgtgtaatctttgcaacagggtatagtattgcctaccccattacttgatgagtctatcatcaaaagcagaaacaatgagatcattttatataaaaggagtatagcctcctctacattgagaagtcaagcataggcagtgattggaatagtacagtccctaggggatgcattcccacagatgactccagtcctgtggggcagcacaaggtataaatggaactaaactaggcgtctag

SEQ ID NO: 671092 - DNA, 186 bp, Homo sapiens
  misc_feature (39)..(39): n is a, c, g, or t
  misc_feature (125)..(125): n is a, c, g, or t
  misc_feature (128)..(128): n is a, c, g, or t
  misc_feature (154)..(154): n is a, c, g, or t
  misc_feature (176)..(176): n is a, c, g, or t
ctcactatgttgccaggtgtcttgaactcctagcctcangcactcctcccaccttgggccacggaagtgctgggattataggtataagccaccacacccagcctctgttcaagacttcatatttnttnttaatcatccagtcttgttaggttgnatgtttcttagaatttatccgnttctcctaga

SEQ ID NO: 671093 - DNA, 109 bp, Homo sapiens
gtttctagtcaaacccaaagtctcactccttcatctatacattctcttcatctgtcccttgtccaggagtggggaccattgtagggttgctcagcattcctcgcaacag

SEQ ID NO: 671094 - DNA, 800 bp, Homo sapiens
gagtagagtggggcgtgctgaaaagatacccgaaaatatggaagggactttggaactgggtaactggcaaaggctggaacagttggagggttcagaagaagacaggaaaatgtgggaaagttggaatttcctagagacttgttgaatggcttgacaaaaatgctgctagtgatatgaacaataaggtccaggctgaggtggtctcagatggagatgaggaacttgttgggaactggggcaaaggtgactcttgttatgttttagcagagactggtggcattttgcccctgccctaaagaactgtggaactttgaacttaagagaggatttagggtatctggcggaagaaatttctaagcagcagagcattcaagaggtgacttgggtgctgttaaaggcattcagttttaaaaggaaaacagagcataaaagcttgggaagtttgcagcctgacaatgcaatagaaaagaaaatctcaggtgacattcaaggcagctgcagaagtttgcataagtaatgaggggccaaatgttaatccccaagaaaatggggaaaatgtctccagggcatgtcagagatcttcatggcagccctcccatcacaggctgcaggctaggaggaacacagggtttcatgggcgaggcccagggtccccatgctgtgtgaagcctagggacttggggcctgatctcagcgctctagccatggagaagggggcaacgtaaaggtcagcatgtggtccgaaggggaagcccagctggcagttccatgggtgaccgcaggccttccacacacgggcg

SEQ ID NO: 671095 - DNA, 842 bp, Homo sapiens
  misc_feature (35)..(35): n is a, c, g, or t
  misc_feature (71)..(71): n is a, c, g, or t
  misc_feature (124)..(124): n is a, c, g, or t
  misc_feature (140)..(140): n is a, c, g, or t
  misc_feature (152)..(152): n is a, c, g, or t
  misc_feature (159)..(159): n is a, c, g, or t
  misc_feature (220)..(220): n is a, c, g, or t
  misc_feature (225)..(225): n is a, c, g, or t
  misc_feature (246)..(246): n is a, c, g, or t
  misc_feature (254)..(254): n is a, c, g, or t
  misc_feature (260)..(260): n is a, c, g, or t
  misc_feature (289)..(289): n is a, c, g, or t
  misc_feature (291)..(291): n is a, c, g, or t
  misc_feature (295)..(295): n is a, c, g, or t
  misc_feature (297)..(297): n is a, c, g, or t
  misc_feature (299)..(301): n is a, c, g, or t
  misc_feature (326)..(326): n is a, c, g, or t
  misc_feature (355)..(355): n is a, c, g, or t
  misc_feature (376)..(376): n is a, c, g, or t
  misc_feature (395)..(395): n is a, c, g, or t
  misc_feature (438)..(438): n is a, c, g, or t
  misc_feature (500)..(500): n is a, c, g, or t
  misc_feature (767)..(767): n is a, c, g, or t
  misc_feature (808)..(808): n is a, c, g, or t
ggccagggcaaagggaggcaacagcaggagggacngaaggcattcatcatggatttgaaaggtcaggcttngagaaaattaagccctaacattagcccagggcaaccctcatatgtattgaggnggcttcttccctgganatcaagaatggngcaagtngtgtaccctccttgggagaggtaaggaattagtcacaccactcatttcggtgcttggaatncagangagggggcgggaggagaaaanaaagaaanaaagantaaggggggcaagggaggggggaaaggananggangngnnnaggaggggctgctcaggtttgctgngaagagtggggaggggagaccctctaggnaacagcagacacactacagtnacagtgacttctatgagcntacagcatgggctattgtgcagaattgattccaacaagcctcncttcttggtcgtttctaagctcctctcatatgggcctcgaattcagattggtagcgtaaacnacgtaaatgatgccagaacaactctgttctcgttgttggaatggaaacaaaatgagggtgcccccaaggcacttcagacacctagacctccacctctaggacctgctggggttggccactcttcccatgaagagcaggcagcaggtgcgatgctcgtagatgaggaaaagaaaggggcggtcgacagtgaagcggacttgggtggacagcggcatgaaccccaccgtggtcacagtggtggcttgggtgccttcctcgttcactgtnatcgtgccttggtgcttgaacaggtcgatggcgatcctttngtcttagatgcctgccatgttgtcatttttgtta

SEQ ID NO: 671096 - DNA, 729 bp, Homo sapiens
tggaaacggatctcgctctgtgcccaggctggagtgcagggctcaatctgtggctcactgaactctgcctcccgggttcagccattctcctgcctaagcccccgtggggtactggaattgcaggcgccttgccaccatgcccggcataattttcaaaaacttttgaggataagaagacgggggtttcaaccgtgtgttgggccaggatgtggccctcagaacctcctgaggacctcggtgattactacacccgcgcttgttggctcctccccaagaagtgccgcgagtaaacagcagggcgaaagacctaacccagccccgggcgcggtaccatccatttattgtatttaaagacccgattgaaccactataaacaatcagtatgcgccgcagtggataaggcgcctcttatgcgctaggtcccccaacaccttaggacaaggcccacaagctgggagggcaatggccgcaacacggaaggacttttcagaggacccccccgtggggcaaacaatggccaaaccctcattctccgaatgaaaaaggttatctccccacgctggacaactcccctggaagaacggtacacctggacataaagcacactcttcaattcaaggcgagtagatagatacttcacgccctaaacgtcgacagaggcacaacagaacattctatacagttccgacgccaaacaaagaaaaacacacgctccgccggggcgacacc

SEQ ID NO: 671097 - DNA, 160 bp, Homo sapiens
gtaaggaggagggaagtagtgacttcaacatgtgctggctgcggcactggccggtggctactgtgtgacgtgtctggcccggagcgggcagagttggaggtggtggcgtcgctctccctaggggctgtcgggacgctcctctgtgggaccgagcctggga

SEQ ID NO: 671098 - DNA, 644 bp, Homo sapiens
  misc_feature (482)..(483): n is a, c, g, or t
  misc_feature (495)..(495): n is a, c, g, or t
  misc_feature (517)..(517): n is a, c, g, or t
  misc_feature (521)..(521): n is a, c, g, or t
  misc_feature (525)..(525): n is a, c, g, or t
  misc_feature (527)..(527): n is a, c, g, or t
  misc_feature (539)..(540): n is a, c, g, or t
  misc_feature (545)..(545): n is a, c, g, or t
  misc_feature (550)..(550): n is a, c, g, or t
  misc_feature (563)..(563): n is a, c, g, or t
  misc_feature (584)..(585): n is a, c, g, or t
  misc_feature (596)..(596): n is a, c, g, or t
ctgatttcccccccctggaaaaaatagtatggcctcccggtggaccaggtgttttgtcccagccaaagatagtaaagtgggtcagccattgtaaccacgattaggaggtttaaagatccgcctttggatgggaggaattcaaattctggctgcgtgctttttaatattgatatgcttaaacactcccccttatgccccaaatgtaggggtataataatgttaacaagggcatgatcctctttataattctaccttgagggccgtctccaagtttgatggattttaacagggtgctccccaggtagctttaggagggctggccacttaaaggtggggagcaaagaatttttttatcccacatcaaccttttgggcagatttggacttttccattttttgccctcaaagcctgttaaaatagtttagcgggcataaggtaacttcccatttacaaactctgcttaaaatttggggggaaatttnnaaaaataattgnccgggtttttgggaatttgttntaangaangnaaccttttgtcnnataanattcntattttctttttntaccttttataaagtaagggnngggtgggggtnatttgggttttttttgttcccccagtttaattaatccttaaaccttga

SEQ ID NO: 671099 - DNA, 254 bp, Homo sapiens
  misc_feature (56)..(56): n is a, c, g, or t
  misc_feature (119)..(119): n is a, c, g, or t
  misc_feature (135)..(137): n is a, c, g, or t
  misc_feature (149)..(151): n is a, c, g, or t
  misc_feature (154)..(154): n is a, c, g, or t
  misc_feature (186)..(186): n is a, c, g, or t
  misc_feature (194)..(194): n is a, c, g, or t
  misc_feature (203)..(203): n is a, c, g, or t
  misc_feature (211)..(211): n is a, c, g, or t
  misc_feature (218)..(218): n is a, c, g, or t
  misc_feature (231)..(231): n is a, c, g, or t
  misc_feature (246)..(246): n is a, c, g, or t
cagcatgcaagagtttttcctttaaaaaaaaaaaaaaaaaaaaaaaaaagcaatgntttctctaaaatcaaagagggagtcattttattccaagatgttttatcttttatgttaagggntcaaagcttataattnnnttttttaatttnnnaangagggatcaactccagtttccaatgtctatgngtctatgngtgtatgtnccatacanatgattnacatgaggccggnatggccaagttcttntggggggg

SEQ ID NO: 671100 - DNA, 904 bp, Homo sapiens
taaaaagggggttttttttttttgttttcccttcccccccccccccgggttttccttttttttgtgaaaaaatttttttttgggcctgctgttccccctctttcttcttctattctcttattcttccccctccacgccgggggggggcagggggagtgatgagaagaaccaccagcagcccaagaaatattaaatatcgtgcttcactcttctcgtgggaccaccaagagagaggagcacaaacaagaaggtggggtgtggtgtctcacacccccaccaaacacagtgaagagaagaagacaggggggcgctcttcttctataatatatactcccccctccacttattcactccacactagtccacccaagagagagagtgtggcgccacacctgtgttgtgtggatgggagcgcaagtgaggcgcccacagagattgtgcgctcatcacacaggcagagagagagagtggtatagacaaatctaatataaaaaaaaaaatatactttctcacttatatcatatataagattgttgtggtgtgctcaaaacaaaaaaaatataaataaaataataaaaaaaaataaaataaataaaaaagaaaaagaaaaaaaaaaaaaattgacacctgcgcgggcgacatcactataatgagcggagcgaagacgagagaaaacaaagaagagaataaagactgacgcaaacggtaagagagtgaacaaaaaaagagacaaccaacgacaaccagccctagtatgttgtatgacaaaaagaaggagaggaaataaaaacacggcggaggacccccccaacgaagggggggggaacgaaaataaattaagaaagacagcggacggctccaccaaataaatacacgagcacccagccaaaaaaagagaagggag

SEQ ID NO: 671101 - DNA, 892 bp, Homo sapiens
aaggctgggtgtgcggctcgcggcgcgtggaggctgctccctaccgcgcgcgagtcagactcgggtgggggtcctgccgcctttgcctgcccgcgcagccctggtggcctgaggtgctgtgcgtgtggacctgcggtgttggtgagacctgtgcctggcgcccaatggacaaatggagcaacttcgaccccaccggcctggagctgctgccgccaaggctggctgctgctgagctggatgcactctgctgttatgccaatggactgccctgaatcttggcacatgattgcatgtgatgcatgactgctgcagtttgtgatgcaacatgtccaatgctcaaatgatgtatagatgtgcctgcctgtggatgcagctcaatgatgctgagcatgatcctggggctgcatgtgcttgatgtgatgatgtgaggtgaatgacccttgagctgatggatgaccctgggcatgcaccatgtgccagtggcccagtatcaagacaagctggccctgggcatgctgctaccgatggaccaactgaatgcagcagcaacttctcaatgagtgagaatttacgtgaagcagtgaggagtcctgtgcaggaagcaggaagccatgcggcgagccaccgtggagctgggagatggatgctgctggcacaatgaatgagatgctgcgagtggaggccgaggccctggtgctgctgcgccaaggcctgagcgggagaatgcagacatcatcctgcgagcagatcccgcctgaaggcggctgagcacctgtcagacctgtcttggagtccatcatgacggctggcacttgtttggggaaggatccgtgctttgtgacagactgggacaatgtgacagcactgtgttggctgaccagtggctgtgggc

SEQ ID NO: 671102 - DNA, 136 bp, Homo sapiens
cgacacatcacacagtagtactaccaaccaccaccatcacaccagcagtaatactaccaaccaccacatcacaccaacagtaatactaccaaccaccagcatcacacaccaacatgtaatactaccacaccaccag

SEQ ID NO: 671103 - DNA, 263 bp, Homo sapiens
ccacaagaggacttacttaagctcaccttcacggtgtacaactaataaaacaacatggaagttgcaattccttgcctccactgtgagacaaaccccagccacatctccagcacacaacaacttccaaatgcctgaaccgcagtggccattcaacgcctccggccattcaacgcctccgggccattcaacgcctccgggccattcaacgcctccgggccattcaacgcctccgggccattcaacgcctccgggccaattcaacg

SEQ ID NO: 671104 - DNA, 361 bp, Homo sapiens
gtattttttttttttctagtacaccttgtaattttttattgaaagctgggcatgggccgggcatggtggctcatccgtagtcctagcccttgggggaggctagccaaggtggattgcctgagttcaggagttcaaaatcagcctgggcaacatggtaaaaccccgtctctgcaaaaaaaaaaaaaaaaaaaaaaaaaatacaaaaattagctaggcatggtaagtgcgtgcctgtaggcccagctacttgggggggctgaggcaggaggatcactttagccccggaggcaaaagttgcaatgagctgagatggcgccactgcccttcagcctgggggacagagtgagaccctgtttcaaaa

SEQ ID NO: 671105 - DNA, 152 bp, Homo sapiens
tacttttgcacagggaacaaaaggcatcctcaagcttttacgtaatgctggtgtgcttagcgacgtgctgaaagttgactgtgcttgtgtcgtgaatgccaacatgaagagacgttattatggttgtgtgttgctttcagctagatactcct

SEQ ID NO: 671106 - DNA, 478 bp, Homo sapiens
agaccctgtgactgtgaccttatttgagaagagttttggcagatggagttaagtaaggaagttgccttagatcaccacaaggcatgggttcagatcctcgtatctggagtgctccaaggagaacttggaagggcagagtgcagcaggactttctgcgggcaggagttgaacatggtccagctggtccagaggcgggcagacctcacgtggaagggatggtgatggcttctgctaccgtcagtgagctgaaggagagatctgagacacagacatggggggaaggtcccgtgcagatggaggcagagatgggggtgatgcagccacagccaaggaacatgcagaaccaccaggagctaaagagcctagaaagtcctcctcgtgacctttctgaagggccagggctttgctagtgccttaacttccgattctggccttcagaactgggagagaataaattttgttgttttaagccaaaaaa

SEQ ID NO: 671107 - DNA, 123 bp, Homo sapiens
gctgactccatcttgcttctaaactcacaaactcttggttcatccctgggcataggccaagatagctattggaagaaattagtttatagtttaacccttaaagcaggatgataatagcctctt

SEQ ID NO: 671108 - DNA, 194 bp, Homo sapiens
ccatcgggccgtcacggccagccgcgagtcacactcaaacgggttcccactcaggttgatttcacttaaattaaataaataagcaaatataccttcttctaacgtagacatcttgttgtggcatatatccagctctgccagcgctgagagtttggccaggagcccaaggtccagcgccgggagcagtcccactt

SEQ ID NO: 671109 - DNA, 244 bp, Homo sapiens
agcctggtgtggtcatcgacggcggcgtggacgtagtcgaacccgatcgggtacgcgtcgtggcgtgagcgatggttcgcgttcgtccctccttgaatccgccgatcctctgccgtccgggatgcggccgagtttcttcacatcaatgtggacgagatcgccggggtggtcatgctcgtaacggttcgtggcgcgggtcgcgcggatcaccgtgccggtgatcgggtcctgccatgccaatggc

SEQ ID NO: 671110 - DNA, 180 bp, Homo sapiens
aagcagaggctggaaagccacttcttatgaataccataggaaagaataaagtattgctcgcgcctgtgatcccagcactttgggaggccgaggagggcagatcacgaggtcgggagttcgagaccagcctggccaagatggtgaaaccccatctctacttaaaaaaaagcattgcggccg

SEQ ID NO: 671111 - DNA, 166 bp, Homo sapiens
gagagaagctctcactctgtcacggctcactacagccttaacctctagggctcaggcaattttcccacctgagcccccgcaagtatgtgggaccgcggatggtgcaaccacacccagctaattctttaatttgtctatagaaatggggtctcgctttgttgcctag

SEQ ID NO: 671112 - DNA, 486 bp, Homo sapiens
cagtctgtaacgtgagtcctgccagagcagcttgtcctccaagaaggcgacggtgggcagcgtcaggaccagcgtctggtgcttgagcatgctgtgcacatttaagccaacagccgggatcaagttgaaggtcttaagcctagaggtggcctccacgatgctctgtggcatctcctcgtgtgttaagtccacgaggagtacggagtccccccaacggcggtagtgccccagctctgtcaaggacttgggggcttcgggggggcagctctaaggaagccatgaattgccaggtcgttccgggccccccttgaccgtcaatggccccttttgagcccccgtcccgaaaatcttggccctcgagggccccaaaatcccctttaaggggggccgaattaaaaatcctaaaatcaatgtaataaacgtgtttcccgggttgaaaaaatggttttcccctttccccaatttcccacccaaaataaccaaacc

SEQ ID NO: 671113 - DNA, 139 bp, Homo sapiens
  misc_feature (9)..(9): n is a, c, g, or t
  misc_feature (33)..(33): n is a, c, g, or t
  misc_feature (45)..(45): n is a, c, g, or t
  misc_feature (77)..(77): n is a, c, g, or t
gagggggcncgggagtggggagaacggaaaagngaagggacggtntggagggacaaaaagcggcggccaatcctcgncacactgatggcccttagcagggtactcctacctatctccccttttatagtaataatggtat

SEQ ID NO: 671114 - DNA, 166 bp, Homo sapiens
gtcttaagcactggggcctctgtggaccttggcctcctcgtggacctgggcttcgtaggtgagcactgcagcctcccatgggcattcccatccagcgccagcaccactgcaacatatatgacctgagtgctattgtatttcaggcttgtgtgtgtatgctacttca

SEQ ID NO: 671115 - DNA, 273 bp, Homo sapiens
gggaggggtgatagaggatcccaccaccggaactctcacggctgacagagtcacgagatcccactttgggccacttcttcatctcacaccactttctccttccctcacgcagcttgcagccatgttcactttttgattctttgcactatgcgacaagcactcaggggctctcggcacatgcgtgtttcttcatacttgacttacgctttcccaccagattctgggtatggactgaacagctggctgagagctcgcggctggtggcggtaccga

SEQ ID NO: 671116 - DNA, 165 bp, Homo sapiens
aaaaaattttttaaaaaccctttttttttttaaaaccgggccccctttttttgttttttttgggggaaaggtttaaaaagggccccctttaagggggccctttttgggtttccccccccaacccaaaatttttcccccccccccctttttggggggcccggggga

SEQ ID NO: 671117 - DNA, 106 bp, Homo sapiens
tgcaggctggtactgtctggagttatgggatgggaatagccgctcatgtcgagctaacggtaacggtgtggggccgcgtgcgatgccgccgtggcgccttccccgg

SEQ ID NO: 671118 - DNA, 255 bp, Homo sapiens
  misc_feature (1)..(1): n is a, c, g, or t
  misc_feature (79)..(79): n is a, c, g, or t
  misc_feature (88)..(88): n is a, c, g, or t
  misc_feature (188)..(188): n is a, c, g, or t
nagtgcatggctgcgatgtggtgttagtgattgggtttcggtcgctctcccgtgtatcccgggctggtattttgctcgnaccagtggntgcccaagggcaaagtgggcacgagagggaagaagcagatattttgaagagaacagagagactctgaagttctaactgcggatcatacttggggggcaantggcactttaacttggcttgttgacgtttggtccttctttttaactcaatcttgcctcagtttttgg

SEQ ID NO: 671119 - DNA, 796 bp, Homo sapiens
tgctgctcgcatctgctatagtggaggccggagcaagaacaggttgaacagtctaccctcccttatcagggaactactcccgaacctcgtggtagcctccggtaaacctaaccagtcttctccgttacatcctgagcatgtgtctcctctatctctagggggccatcaattgtacatcactataacaattactcaataataatacaccctcccttgccctataaccctataataccatagaatcgcctccatctctacgttctgatgccgttcctaaatcgatcagacatggtcctcacttcttccattatctcgtcccaggtcctcagactgtctgggcattcagctatatcataccataacctatgaacgctgccaaaccatcacactaccaacctctcttccgacacccaggccggcagtggagcgaggatgctcgcgatgtactaataactcagacaacactaagtatgctcgatatttcttcggtgttcaaccctgaaatgtttgatcattcagtatccataccacgggcttctggaataagtctcctcatattgtagacttactacatccggtatagacaatagaggagaccactttggggatacagttaaggtattggctctgaagtctatggagtattcaatttggacttacctagaggtttttaatcgtcgtgtagtccatcagccagtgatcatttactagttacgcgagtaagtactgttaaagactagctgctgaatggcaatattttcagcctcccggttaaccataaatccatgcgttatcc

SEQ ID NO: 671120 - DNA, 209 bp, Homo sapiens
tgtctggtgcaatttgtattctccgtctcaagacacgggaagaacaggatcataacggaagtggtcccaatccacaaggctgcctggaaacctgtacatattctgagccacaacagaggaacagatcaaaagtggctccggccgcggaccggaccctctccggaaacatctccgtcaggcccaatagtctctccgacagggtctcatct

SEQ ID NO: 671121 - DNA, 170 bp, Homo sapiens
caccacagggaaactgccctatggctatgggcccggaagagtggccctggtgccagcgggtcaaggctgagcttacccaacaggaacaggggttttgcccccaggcagcagcagcagcgcagctaaagccagccagccatatagtttttcgtgttgtcttggagccagcc

SEQ ID NO: 671122 - DNA, 196 bp, Homo sapiens
aacgtgggattcactggattcaaagtagaacagctgaaccctcgtggagccattcatacgggtccctactaagagacaagtgattatgctacctttgcacggttaaggtacccgcggcgttaaacatgtgtcactgggcaagcggtgcctctaatactggtgatgctagaagtgatgtttttggtaaacaggcggg

SEQ ID NO: 671123 - DNA, 262 bp, Homo sapiens
tcgtcactccggatcgcccgattccggccatgctgctctttctcgttatgtgtctctccttctgtcgtccacctgggggtcttctttgtcggctcccactgtgtgcagacacccgtcgtgactggtacctcccgtgcgccaaatgtaatgcacactccattgcatacagaccgctctcacagtcatcacagtctggtttcttgatatcctgaaggaagattcggccacctcgttggttctagcagcttcatcagttcctcat

SEQ ID NO: 671124 - DNA, 155 bp, Homo sapiens
aagtccttaaataatggtgacaaaaatgaatttatactcacctatataagaagatagaacaagtgtaactacccacctcttccttcaagatcactattcagaagagcctccgacagttagttaatatgtgcatcaccccagatccaggagaggcg

SEQ ID NO: 671125 - DNA, 750 bp, Homo sapiens
gtgacaggactgctagttcagaattcaagaatgctttcctagtgtgtgagatgatgggcgtggattccttctgcctgtcactgggcgcaaagcaaattgctttagttattggatcgagcagttcttagaagcttggttggtattccttcatccactagcatccattgtgtgaaatagaccagttttcagcttggtgatgcctgtaagctaagaagccaatggttagccgtgaaatgcaagtcttgggtaggccagtgttcaatgaacgctagagattagtcagaaaagagttaggctgtggggctttagaaagggattttgagtcctgtcatttctacttgggagcatttcggagcagattacgtctttcagtactaaaaacaagtggctacctgatggaacacttttcttacccttatagggaaactgagcacaagctgaatgatattgtctgctgccaggaagagacatcgaagcaaaagagtcaaacaaaactagaaacctagaagaaatgggaaaacaatagagggtgcctctagaatcgaaagcaaatctgagagacgagacaccatagaccgaatatttatcgttgaaatccatcttatccatcatctcatggggtgcaacaggactcctcgatcctgggtgagcattatgggtacgacagttttattacgcaaagatttattacgtaccatagatgtgctgagtgtaccattgtaccttgagcacatacatacgataccttat

SEQ ID NO: 671126 - DNA, 176 bp, Homo sapiens
ggtaactgctccccttgtgatctgtttaataccctgtacatatctttgagttcaacctttagtacgtggggcttgttcacttcgcggctaaggaaagaacgagcttgtggaagacaagtctgcggcttggtgaggctgcacatccagcagccactgatctgagcagagtattaacg

SEQ ID NO: 671127 - DNA, 408 bp, Homo sapiens
  misc_feature (32)..(32): n is a, c, g, or t
  misc_feature (110)..(111): n is a, c, g, or t
  misc_feature (113)..(113): n is a, c, g, or t
  misc_feature (135)..(135): n is a, c, g, or t
  misc_feature (390)..(390): n is a, c, g, or t
  misc_feature (406)..(406): n is a, c, g, or t
cttgtgtccaggagttcgagaccaccctgggnacgtggtgaaacccttctttattttaaaaaaaaattttgaagaagcaaactcctgtctctactaaaaatacaaaaaanntncgctgggcatggtggcatgtgnctgtaatcccagctacttgggaggctgaggcatgagaattgcttgaacctgggagtggaggttgctgtgagccaagatcgtgccactgtactccatcctgggcaacagagtgtgactcagtctcaaaagataataaagataatatttttttaaaagtttgaaaaaaaaaggtgatagctatcaacaggtattattttgggggggctcctgctgtttgcttaagtactgtgttcaagggctttacttgcataaccntcattaattattgccnaa

SEQ ID NO: 671128 - DNA, 787 bp, Homo sapiens
tatccattctgatgtatttgctggatttggacgcatcccttttccttatgtcgctcacatctagttaatggggacttaacctccattccatggtttgagctcatctctctggaatgccgcgtatataagacgctggcatgtaaggctccatgagagacagcaaacctactaggacgttaatttgcccattctgggctcttgttgtataacttactggcataagtagactacttttagtgttctaagtttaatatgattaacagagaacggcttttttctcaggttcaggcttttcatgaaagtagtttggagaatcaatgaattgcaataaccagcttcacacaagcataactgataaacgcgagtgctacttgtagtcttggcaacgtgagccaacgaacctaggacgcacgggccacttcctacctgtataggacgggcccccatacggagatgaaatcttgtttcctggtgatgcacagaatcagaactacagtacagagtatcccaaatgaggccctgtgtctagacaggacgcgttcgtttttcccaaatcgtaacgtcggatttactgtagtgaaattgtagctgccatactggtagtctacattagagcccttgacgtgctcggaccatatattctccttccttcttatgaaccaggttgtttccttcgtagattttcccatatgtcaacatatcgcttaccagtcacacaaagtttcctgttataatttcttttagcagacaagttataagtcagatgtaattagcatcagagggataa

SEQ ID NO: 671129 - DNA, 986 bp, Homo sapiens
ggtgactgcgagccacgtgggtcctcgggcgcgtttaggttgctgttgtgcaggagctctgaagtgcaccaatgcttcatgcggccatgagacgagaagccactgagtgctaggagcgtgatggacgcgttctctttcagtatgcgaactcagaaggcgacaactgagggatccgacacgttgtatctatgttgtccgaggaagcattatacttcatggacggttgtggcagtcacgacagggcattcgcggcatatgttcagggctgcagttgcacaagtggcgattggcctgggtctttcactgaaagtattatacctacaaacggacgaacgacattagggtttgaaccttggcaccgtggaccgcaggtccccagtgacgtactgtgaacccagggtccattcgtgtggcaatagcgtacggatgacgaacttaccagtggtcgcggagattcaggttgcggccccgactaggagggttcctttgggcgaacggaggcggcacatagcaccattgatcgcgggattggattggggaacttgtgttgcgcaggatcttccactttgcgcgtacaggtcgggggacagacacgaagatcaccctatcgtcacgaaagaggttcgccgaacgggcgcgtagcgcagaagtgccgacgtcacctggttggcgacagcgacggtcaccgtgggaccaattaacgtagaaggctattgagttagagaagcgcataagccaaatatgtgaggttaaacgttgtcggggatcacgtgtggtgaaaataaatcgatgcaatgaggtagggaagtgttgtcgatggcatgtaaatacggttgtggcaaatccggaggaagaatatgcactggaggagatattggacgagcacgtgtagaaacgtgtgcaaaaacgatggcgatatcaggaaagtatacaacaaaattgaacatcggtgagatgtactatacatttgaaaatagagtgtggaa

SEQ ID NO: 671130 - DNA, 141 bp, Homo sapiens
aaggggcgtttgtttgggcgagaatccatgcttctgacccagagcactgggtgtgggcacgagatcgcgcgcacctttcctagagctccaggcaccgtggaggcctgaggtcatcggcctgagagaaggtacatctgcact

SEQ ID NO: 671131 - DNA, 180 bp, Homo sapiens
tgatccaaggattccatgagtattgatcagaacaggacttttgcgatggacttgcactacagtgaggagacaggccatgccttacaagtgcatgcagcatcactgattcacatcctcaagttaccgcacagtgcccacccaaaagtatagtccgataagcctggcagtaaggcagaacat

SEQ ID NO: 671132 - DNA, 292 bp, Homo sapiens
acattagatcgagctcctacccttaaggctgcagtgcagagaccagtgggagcatctgtagtgaagcacagcaaggtatgtccatccccctaggtctccacttgctcccatagaagactttagcccaagaagaactgtctgacctgtaattctgcagcacagtcttggccatcggatgggggtgatctgacctgaacactccttggtttactggcctctccagtatcccaactgagccacgcctgcttgcaggtgcagccttgggtgccctggtggcccacatcacagctcc

SEQ ID NO: 671133 - DNA, 263 bp, Homo sapiens
gggcatgccagactggagccccgaggaggcggtctcctcttcaagtagtgggagggggcatggcctggagtgttgggggcagcctgggaacacctccggttaatagtgtgtggttacagacgaaggatgtgactcgtcttgcagcagtcaccatgcctgaccgctctgtgagtgtactttccttggacaggcaaggcttgttggcctagggctgcgcttgacatactccgtcctgctcgagccattctaggttctcctttctt

SEQ ID NO: 671134 - DNA, 161 bp, Homo sapiens
ggtaactcctcccgagagtacttccaactctgctggccccgaatccactatgcaccaccaaggcggctggtggtgcctgcagtacacagccagtctcttcgtggtctcactctctcttctgcatctctactcttaagagactccggcattcaaagcctccg

SEQ ID NO: 671135 - DNA, 253 bp, Homo sapiens
cggccgatgaacgctttcatggtgtgggctaaggacgagcgcaagcgctggcgcagcagaatccagacctgcacaacgccgagttgagcaagatgctgggcaagtcgtggaatgcgcctgacgctggcggagaagcggcccttcgtggaggaggcagagcgcgcggtgcagcacatgcaggaccaccccaactacaagtaccggccgcggcggcgcaagcaggtgaagcggctgaagcgggtggagggcggct

SEQ ID NO: 671136 - DNA, 268 bp, Homo sapiens
  misc_feature (2)..(2): n is a, c, g, or t
  misc_feature (148)..(148): n is a, c, g, or t
  misc_feature (154)..(154): n is a, c, g, or t
  misc_feature (171)..(171): n is a, c, g, or t
  misc_feature (202)..(202): n is a, c, g, or t
  misc_feature (247)..(247): n is a, c, g, or t
gngtaacaacaatcaggagcctgtgtctggcggtggatctattatccatgacgggctaacccagatgaccatctggccatggggggcactgtgccacttgaaggagttctagtactacccgcccctgcgcatgcccatcatccccttnctgctntgagcgctcacccctgntgaggctcagcccctcaacccggtggcattntgggggaggagtggggcccacagctctccagcacccggaataaancccgcctgccccagtcgaaaa

SEQ ID NO: 671137 - DNA, 190 bp, Homo sapiens
cagatggagtctcactctgtcacccaggctggaccttgtctcaacaaaaaggaaaaaggaggtacagggaggatgatggaggactgaggtttggtacacaaacccatgcttttttttttctttttgaggcggagtctcgctttgttgcccagcctggagtgcagtggcgcaatagagcgagactctgtct

SEQ ID NO: 671138 - DNA, 138 bp, Homo sapiens
gcggcgctctagaggaccccttaattactggcagaaaaaaaacgtgcacgacatactacaaagagattttttaagtttaaaaaaagttggatctttggatttcctttttttttttggggttacttggacgcggggtac

SEQ ID NO: 671139 - DNA, 1298 bp, Homo sapiens
  misc_feature (114)..(114): n is a, c, g, or t
  misc_feature (332)..(332): n is a, c, g, or t
  misc_feature (374)..(374): n is a, c, g, or t
  misc_feature (391)..(391): n is a, c, g, or t
  misc_feature (393)..(393): n is a, c, g, or t
  misc_feature (405)..(405): n is a, c, g, or t
gcggatggggaaaaaaaaagatgtgagacatcgctccggctggtagtattggctacctctaaaaaacgccgtgctgctctcgtaataattgagcgagtgcccttcgcgaactgntaacgtcgcgagaacgtcgctagcgctgggagtcgcgcgttcgggcgtagcgtcccggacggcaaggagcagcgcgtactagtcacgcgagacgcgaggcaatagtagtatgcgaagtcctggagaggtgactgtgtcaattgctggaggatagaatgaacgagaggctcttgcggcgagcctcagctagccctgttcgtgtcctcacatagagaggnggagaccgatcgaggctaggctagggttccgcaggcgcttcngtcggcctcgaaacaanancgtagtcgcggntcactaccgcgtcgtcggacacgtcggtgggacgtcacgtaggaggtccgacctctcaaaaggccacgactgtatcgcctttgtggaatcgaagccatggggtttgtgcgagggccacgcgtgtgtccctcgcgtgcaatccatgaccgcaacgcttacgttgtcaagagggcagggagaaattgtcctggcgtgcaattgtaacagcggctagagaaagcggggcggaaagagtgtggaccccaggaggccagcgtctcatacatcgcccagacccgtttgtccgggagtccttggccttggggggagacacgaaggtaacccagtgcgccagctaagtaccggagccagccgcgagctactccgcgctggacaagacgccccactgttctgggggccaacgagcttcgaagcccctttcgagcagcggggcagtctcaagcccgcgcgccgaacatctggaatcgcgtcagctggggggcaaagtgaagtttccctgagaccccaagtccgacagcagaacccagcccaatgaaatcaagacggagcagagctgggggcctaagggagccctcggagagggacagggagggcaaagtggcgaatccggccagaaactcgggatacgaagcggaagagggataaggggaaaaccccggcaaattgggtggaccagcaaagcggagggggacacaagggggcccattgtaaaacccagacgcggacttgggaacaatctgcgcacagtgacttcgcgcagacgcgcgggagacccagacccgttgtaggagcactggcgcacgggaagctcacatacgagaaaccgcgaaccaactacaagaagggcgtcagcatcacaccagaggaatatctaagtaaacaccgtgtaactg

SEQ ID NO: 671140 - DNA, 938 bp, Homo sapiens
  misc_feature (31)..(31): n is a, c, g, or t
  misc_feature (96)..(96): n is a, c, g, or t
  misc_feature (100)..(100): n is a, c, g, or t
  misc_feature (114)..(114): n is a, c, g, or t
  misc_feature (308)..(308): n is a, c, g, or t
  misc_feature (464)..(464): n is a, c, g, or t
  misc_feature (514)..(514): n is a, c, g, or t
  misc_feature (537)..(537): n is a, c, g, or t
  misc_feature (735)..(735): n is a, c, g, or t
  misc_feature (792)..(792): n is a, c, g, or t
  misc_feature (809)..(809): n is a, c, g, or t
gttgggttcatttcctgcccaagaagctggntgaggcagtggctgaagcccacctgggcaagctgaatgtgaagttgaccaagctaactgagaagncaanccagtacctgggcntgtcctgtgatggccccttcaagccggatcactaccgctactgagagccaggtctgcgtttcaccctccagctgctgtccttgcccaggccccacctctcctccctaagagctaatggcaccaactttgtgattggtttgtcagtgtcccccatcgactctctggggctgatcacttagtttttggcctctgcngcagccgtcatactgttccaaatgtggcagcgggcacagagtaccctcttcaagccccggtcatgatggaggtcccagccacagggaaccatgagctcagtggtcttggaaccgctcactaagtcagtccttccttagcctggaagtcagtagtgnagtcacaaagcccatgtgttttgccatctaggccttcccctggtctgtgnacttatacctgtgtgcttggttnacaggtccagtggttcttcagcccatcacagatgagaaggggctatattgaagggcaaagaggaactgttgtttgaattttcctgagagcctggcttagtgctgggccttctcttaaacctcattacaatgaggttagtacttttagtccctgttttacaggggttagaatagactgttaaggggccactgagaaagnacagagaagtgacagctaggggttgagaggggccagaaaaacatgaatgcaggcagntttcgtgaaatctgccnccactttataaccagatggttcctttcacaaccctgggtcaaaaagagaataatttggcctataatgttaaaagaaagcaggaaggtgggtaaataaaaattttggtgcctggaaaaaaaaacaaaaag

SEQ ID NO: 671141 - DNA, 182 bp, Homo sapiens
tgattagcggatgctttactgttcccaaacacacacacacacacataaacacagtgggcgcaatctcggctcacggagactccgctcctgggttcaagccactctcctaccttagcctccagagtagctgggaccacaggtgccgctgccaccaccctctggctaactttttttttttcttt

SEQ ID NO: 671142 - DNA, 705 bp, Homo sapiens
  misc_feature (17)..(17): n is a, c, g, or t
  misc_feature (29)..(30): n is a, c, g, or t
  misc_feature (63)..(64): n is a, c, g, or t
  misc_feature (68)..(68): n is a, c, g, or t
  misc_feature (118)..(118): n is a, c, g, or t
  misc_feature (341)..(341): n is a, c, g, or t
  misc_feature (399)..(399): n is a, c, g, or t
  misc_feature (416)..(416): n is a, c, g, or t
  misc_feature (423)..(423): n is a, c, g, or t
  misc_feature (535)..(535): n is a, c, g, or t
  misc_feature (550)..(550): n is a, c, g, or t
  misc_feature (564)..(564): n is a, c, g, or t
  misc_feature (570)..(570): n is a, c, g, or t
  misc_feature (611)..(611): n is a, c, g, or t
  misc_feature (617)..(617): n is a, c, g, or t
  misc_feature (626)..(626): n is a, c, g, or t
  misc_feature (629)..(629): n is a, c, g, or t
  misc_feature (643)..(643): n is a, c, g, or t
  misc_feature (648)..(648): n is a, c, g, or t
  misc_feature (658)..(658): n is a, c, g, or t
  misc_feature (661)..(661): n is a, c, g, or t
  misc_feature (663)..(664): n is a, c, g, or t
  misc_feature (666)..(667): n is a, c, g, or t
  misc_feature (670)..(670): n is a, c, g, or t
  misc_feature (672)..(672): n is a, c, g, or t
cgcgaccgagagaggcngcgagcgtcccnncctcagagagcagctcccgagacagagcctcannctgnctggaagatgccgagatcgtgctgcagcgctcgggggccctgttgctggncttgctgcttcaggcctccatggaagtgcgtggctggtgcctggagagcagccagtgtcaggacctcaccacggaaagcaacctgctggagtgcatccgggcctgcaagcccgacctctcggccgagactcccatgttcccgggaaatggcgacgagcagcctctgaccgagaacccccggaagtacgtcatgggccacttccgctgggaccgattcggccgncgcaacagcagcagcagcggcagcagcggcgcagggcagaagcgcgaggacgtctcancgggcgaagactgcggnccgctgnctgagggcgggcccgagccccgcagcgatggtgccaagccggcccgcgcgagggcaagcgctctacttcatggagcacttccgctggggcaagccggtgggcaagaagcggncccagtgaaggtgtnccctaacggcgccnaggacnagtcggccaaggcttcccctggagttaagggagctgattgncacgantccggaggngantgccccacgggctnccgancggcagggcncangnncnntgnanctgctgtggtgggccacggagggccctaggatg

SEQ ID NO: 671143 - DNA, 965 bp, Homo sapiens
  misc_feature (31)..(31): n is a, c, g, or t
  misc_feature (96)..(96): n is a, c, g, or t
  misc_feature (100)..(100): n is a, c, g, or t
  misc_feature (114)..(114): n is a, c, g, or t
  misc_feature (307)..(308): n is a, c, g, or t
  misc_feature (314)..(314): n is a, c, g, or t
  misc_feature (317)..(317): n is a, c, g, or t
  misc_feature (337)..(337): n is a, c, g, or t
  misc_feature (354)..(355): n is a, c, g, or t
  misc_feature (374)..(374): n is a, c, g, or t
  misc_feature (377)..(377): n is a, c, g, or t
  misc_feature (383)..(384): n is a, c, g, or t
  misc_feature (403)..(403): n is a, c, g, or t
  misc_feature (412)..(412): n is a, c, g, or t
  misc_feature (427)..(427): n is a, c, g, or t
  misc_feature (436)..(436): n is a, c, g, or t
  misc_feature (442)..(442): n is a, c, g, or t
  misc_feature (451)..(452): n is a, c, g, or t
  misc_feature (465)..(465): n is a, c, g, or t
  misc_feature (471)..(471): n is a, c, g, or t
  misc_feature (476)..(476): n is a, c, g, or t
  misc_feature (479)..(479): n is a, c, g, or t
  misc_feature (482)..(482): n is a, c, g, or t
  misc_feature (490)..(490): n is a, c, g, or t
  misc_feature (492)..(492): n is a, c, g, or t
  misc_feature (500)..(500): n is a, c, g, or t
  misc_feature (517)..(517): n is a, c, g, or t
  misc_feature (521)..(521): n is a, c, g, or t
  misc_feature (526)..(526): n is a, c, g, or t
  misc_feature (530)..(530): n is a, c, g, or t
  misc_feature (533)..(533): n is a, c, g, or t
  misc_feature (545)..(545): n is a, c, g, or t
  misc_feature (548)..(548): n is a, c, g, or t
  misc_feature (551)..(551): n is a, c, g, or t
  misc_feature (553)..(553): n is a, c, g, or t
  misc_feature (567)..(567): n is a, c, g, or t
  misc_feature (576)..(576): n is a, c, g, or t
  misc_feature (587)..(587): n is a, c, g, or t
  misc_feature (605)..(605): n is a, c, g, or t
  misc_feature (619)..(619): n is a, c, g, or t
  misc_feature (630)..(631): n is a, c, g, or t
  misc_feature (762)..(762): n is a, c, g, or t
  misc_feature (819)..(819): n is a, c, g, or t
  misc_feature (836)..(836): n is a, c, g, or t
gttgggttcatttcctgcccaagaagctggntgaggcagtggctgaagcccacctgggcaagctgaatgtgaagttgaccaagctaactgagaagncaanccagtacctgggcntgtcctgtgatggccccttcaagccggatcactaccgctactgagagccaggtctgcgtttcaccctccagctgctgtccttgcccaggccccacctctcctccctaagagctaatggcaccaactttgtgattggtttgtcagtgtcccccatcgactctctggggctgatcacttagtttttggcctgggnngcggcngtngtagtgtgtccgggtgtggngggggggggagggtgcnntcttggggcccggggtcgnggngggggnnccggccggcgggggaccgngggggcggnggtctgggggcgggncggctgagngcgggngcctggccnnggcctgggagtgnggtggnggggncgnggngcccgtgngntttgccgncgtgggccttcgggcgntggnggtgngggngtngtgcctgtgggntgnggntngcgggggcgcgggngggtgcggncggccgcgggngacgggtggggggggggngtagttgggggggnggggggggggnngttgtttgaattttcctgagagcctggcttagtgctgggccttctcttaaacctcattacaatgaggttagtacttttagtccctgttttacaggggttagaatagactgttaaggggccactgagaaagnacagagaagtgacagctaggggttgagaggggccagaaaaacatgaatgcaggcagntttcgtgaaatctgccnccactttataaccagatggttcctttcacaaccctgggtcaaaaagagaataatttggcctataatgttaaaagaaagcaggaaggtgggtaaataaaaattttggtgcctggaaaaaaaaacaaaaag

SEQ ID NO: 671144 - DNA, 126 bp, Homo sapiens
gatgatactatgaaataaacggctgtgtaaacttcattcttccttgtaccagttgccatcttttagcgccaaaggaattgctgtctcccacttggattgaatgcagagcctgcagtcgcggccgct

SEQ ID NO: 671145 - DNA, 100 bp, Homo sapiens
  misc_feature (87)..(87): n is a, c, g, or t
ccgcgcccgccgccgccatgccggacatgctgggacataggatgtgtacccgtgagcccccgcggccgcacgcctggtgcagcccanatcccaatctgtg

SEQ ID NO: 671146 - DNA, 1881 bp, Homo sapiens
  misc_feature (200)..(200): n is a, c, g, or t
  misc_feature (391)..(391): n is a, c, g, or t
  misc_feature (819)..(819): n is a, c, g, or t
  misc_feature (1855)..(1855): n is a, c, g, or t
tgggaaaaagctagcctgaggtttaatttgggcccaaaaaaaaaaccaatggattggtttggtaccttgggggctgtggccaaggggggtctccccaggttagttaaacttccccaggtgtgggcgtgagggcatagggttgaccctcagggtgggctcctcctgtgttccccagtgtgctcacccgtgcattaggggcnctcttctcccaggtcctctggaggcgcaagcggcaagagagagggtgtaagcgtctgggagaagggggtttgcgccggcaagttgtgtcccaatttgtggcgcgaggcactgtccaggaggaactccagaaacacaccagagtctctccccatatcaaggtgtgtctccgaaattttcttctcaaacaaancccaggggcggcccttggagagagagaacgtgtgtgggggcgcggcgtctaagacagagagagcctttggagaccccccgggcgcgccatgtagaggcacataaaggtgtttgggagaccggcccatagggggtgtgtgtaatcgctttaagaaggcgcgcgggggcgcttgtttgtgaggagagggggccccccccactataaaagaggcgcgcgaaagttctccacgagaaaaccacatctgctgcgttgcttaataaaagcgcgcgtgtggtgggtggggtgtctcctcccgcggataatatgagagatataccactcactgagtggtgccccggagatatacccccgaaaagaaaatatccccgaagcgccgccgaggatcatctcgctctgtggcgcgcctctcacaaaaggacaaacgtttncccccatgagagaagagggagcgcgacaagaatcccccgagatgttgccccacgaggggggccccaacagtctataggagaaaggtgtacacacaataccaaagagtccccccgtggggatacaactcaaccaacgagcgcaagagttttgtgcgccccaggcggcgcccacaaattgtggtcccctgtgggtttatgtgaggccccccctcgatgttctaagcaagaagggggggcgggcggcgcctctcccacaaagaggtgcgctcgggagaccacaaatactggtcggggcggcggagagtgggcggactactcaccacatataaagaggggggccgcaagcgggcttccttcccaaacaagacgtgtgactctcggggggcagtcttcgtcgcacaagtgggggcggggcgcccccccaagcaggggacgagaaagagaggggcccccccatctacgcacaaaggggagggggggatcaagagagaggcccgcgagtggcgctggaggtgtgtgccccgccagagaaggaatatggggccctcccacagaaagaaaaaagaagaggtggccccccgaggagggagaggacgaccaccctccgcgtgagtagtcgctcgtgagaaaacgaaacacaccaagacaagcgacccaggaggggagaacgcccctcgctcgcgtgggagacgagaaaaagtgtgtcgctcccagaaacaaggaagagaccgcggttgctaacgaacaaggagaactatggtcccacgtgcgggcgaccccaccacggcagtgggtgcggcgcggccgacaccaccgaaagaacgatgagatgttggttgccacgccacgacaacgcaagtgagacgaatcgaacacgcaggtgcatcacacctcaagatagagagcaacgcacagaagcgagggacgcgcaatcactactatgatgacaacgatcgcgagcacgaaggcagcagctgcgcgagtccaaacaaaccgcagagtgaggacggcagcaaccaaagctccaccgcatcangacgacgacatagctacaagacgatt

SEQ ID NO: 671147 - DNA, 1343 bp, Homo sapiens
  misc_feature (354)..(354): n is a, c, g, or t
agccggctcaagatccatagctgcacagaccggggcccgcgctctcactcctctcgccgatccgagagctggctcggacagcatcgctgaagtacatttaggagctaggcgggttcattggcctctaatgactgccctgtatccatgggctgagggaactaggctggtaatgacctatgctggctagaccgcatgttacgcataaatccctgaactattgacttaggttgcacgaccgacaccgcgtacggatcggcgcaatgtggcaatgaggcaaactgagcctgagagcttgcagagctgctgcgcacagtaccgatggtggtccagaattgagatgcgtgaaccagttcnttatgggtaagatggcgttctcgccgtagccggaactgctgggtggaattcgactcggctctcggtccatcccctggggggtcctatcacgatgtaccgcgtgtctgcttcttcgccgccccagcttggccctcatacttgcctgcgtggtgtattttgctcccgttgcttaggctcctacaacgagaggaccccaggtggtctcaatttgcgagcgaccttagaacgagatagagaatacccctagatggcgtacaggacgagagttacaacgccatagtaatgaaaccattccccctattcatgttcaccgtgcgccttgccagggggactgtgacccacccccaaaagtgtattggcaccctgagtggcggtgcatcccgactccataggcattggccaacattacgccgttggagtggcggtgttccccccaaagggaaacctcaattgaacccctgggaggagcttggctctttcgatgtgagccccaacagtaaagtggcaaaccccaaaatggctcaggtacgagtcccccttaacttaagcgtagaaagactttcggcatttgtagcttggaccgcttcacttacccggtggagttgaaagcgtgggaaggccccttaccctatttctttaaccgagtggttggcacacgcttaggtagccgcctccgaggcgaattcacccctgcacaaaccggatagtacaaacagttggattcagacgcttaaacaaatattgccaccgcgcacgtttgagtcctaaacggatggtcttaccacaaccattcactacaagtttgtggtggaaccttttggaccccctttgaggcgcgggtcccaggaaacggcgacctttgtggaaaccaatttcacccagtacttggcgttgagacccagacttggttccagtccgataccttacccatgagattgcgcgcccgcacccaaatggggcgcaaagaagtcactatccaccgtgggaag

SEQ ID NO: 671148 - DNA, 346 bp, Homo sapiens
attttacctcagggtgaagagtcatggctaccttggggtaacaactgttcgtctgggtcttgaccatgcatgtactatagcggctgtgatcatgtgtgtctaccccatcgttctggagtcctgatctcccctcctctgtgaatgctaccagctaccctgatgtatctgatctgaaaaagttccgctagactctgcattacttcagatgcttgtggcaccaatatgacaggtgtgatgtttgcctggggatgccgaactgagaaaagtaccatctcctgttgtaatggagttaatggcgttccgctcaggacagctgcacttacatctggtgttaaaccaccgttat

SEQ ID NO: 671149 - DNA, 252 bp, Homo sapiens
  misc_feature (23)..(23): n is a, c, g, or t
tccgggtatcccaccagccactncttcctcctgggacctcggcaaactacccctcgtcttccctccctcggtaggccctgatgcgtggaggaccccgcccgggctcggctctttactccattcacagccgtgcacgcgcttcaagccaccagggttgagacatgtcagctctggagttctcggttgttgtaggaggttggctgttttcaaatcgtaatgatgtttcgagcaaataaatttgattgatacaga

SEQ ID NO: 671150 - DNA, 444 bp, Homo sapiens
  misc_feature (21)..(21): n is a, c, g, or t
  misc_feature (41)..(41): n is a, c, g, or t
  misc_feature (95)..(95): n is a, c, g, or t
  misc_feature (173)..(173): n is a, c, g, or t
  misc_feature (207)..(207): n is a, c, g, or t
  misc_feature (225)..(225): n is a, c, g, or t
  misc_feature (385)..(385): n is a, c, g, or t
  misc_feature (387)..(387): n is a, c, g, or t
  misc_feature (435)..(435): n is a, c, g, or t
taaaagtgaccctcgtgcctnaagccctccccgaagtgccngggaattaacaagttgtgtgcaaaccaacaccccagctaaattttggtaatttnccgtagagatggggttcacccatgttggcccaggctagtctcgaactcctgacctcaagtgatccgagtgctgggtanaggtgtgagccactgcacccagccttctcttcanttttgaatgtgtttttantttcatgctcacttactcaactctctctaaacatgcagatatttaagtgtgctttgacagctgggtgtggtggctcactcctttcatcccagcactttgggaggcctatgtgggaggatcccttgagcccaggagtttgagactgttgtgagctgtggtntnctgctgcactccagcctgggcatcagagatcctgtctctaaacacaanttggattat

SEQ ID NO: 671151 - DNA, 236 bp, Homo sapiens
atagtgaatgagtctcaatggttcatttaaaaaactgtacagatctacagagaggacaaataggacaaaatgtgaacaattggtgaatctaagtagaaggatatctagaacatttcattggttaccttctattctcccaaatttttctgtaaagattgaaaatatttttaatattaaagcaaggttgtcctaagaaacaggtggttaaaccaaggggtcaattaacatttttggta

SEQ ID NO: 671152 - DNA, 311 bp, Homo sapiens
gcacgagtctctctctctctctctctctctctctctctctctctctctctctccgagaaacagaaggagaagaagctgactcccatcacctatccgcaggggcgagccagggataaggagagaggggcagaaaaagagcgggagagcgcggcgctcacacagagaggccgcaagacagggagagacgaagcgacccgagcagccctctgcccgcctcccgagaaaaagaggaagagaaaatgcgtgcggctgtaaatgtctcagcccctcgtgcgtggccctgtcccttggaacctttggacgctctgctc

SEQ ID NO: 671153 - DNA, 983 bp, Homo sapiens
ggctcttgtcatttagccatcctttaccagctccatgaatggttctgcaggtttctgcggccccccggacagtggctctgacggcgtgactgatggtgctgctcacatctgtggtccaggcaaggtgccactccatgatgaattatcgtgcaaccgagattactggcatggaattgctacgcgtagtagatgggacacagtcgcttcctgtgagaagatacgatctacaaccagggaggagttcggtgcgcttcgacagcgacgtgggggagtaccgggcggagactggagctggggcggccctgatgaggacgactggaacagccagaaggacatccgtggaggaggagcgggcagatgccggacaggatgtgcagacacaactacaagctggactgaggccgatgacccgtgcagctgccgagtccagcctagggtgaatgtttccccgatccaagaaggggcccattggagctactcacagaactgcttcgtctggtcacgtcgacggatttactagccatggcatgcattcaaagtcctgattggtgcctgatatggaccaggagcgaaaccagactgggagtcgtgtccaacatcctgaatccgtaattggagactgtacgcttccagatcctggtgatgctggcaattgaccccccagcagggagatgtctacacctggcaagtggaggcatcaccatggctgtgactagtcctgttccccgtggagtggaaggcacagtctgatgctgcccggagtaaggcattgaccgggagctggaggcttcgtgctggggcctcatcactctgtccgaatgggcctcttcatgcacaggaggcatgcagaaagtccacgaggatctgggtaacagggttcctgagctcctgaaacgacatgggctaagaacaagccttgcgggtacgtgacaactggcccaggcagaccttagttccggtggtacgctgccgaattgccgatc

SEQ ID NO: 671154 - DNA, 159 bp, Homo sapiens
ttcttcaagaaactccccggtacgaggccagatagagagttgtgggtcaatctagtaacatggactgaggacattttctggcgatctgccactaagtgagtaatactcaaacaatgataaaataaagcttaaagaagaaacacaaacagaaaagcccag

SEQ ID NO: 671155 - DNA, 1008 bp, Homo sapiens
gtgagtgaaagtagtgggttggtgtgggccggaggaaagcgttggaagactcatcgtagcgtgtggatttgagccgccgcatattcttggagccctaaagtcttgataagtgctatcgttgattcctggtccaatctgggacctgataagggttttatgtattgacaaactctatgggaatacaagtgcgcaatcttcagaatcggagatttagtgaaagctggtgaactatatggcgacgtagcttattgtgcatcccaacctcacggaaaggttgtgttgggctttgcttacgtaaatcactaaataccggtctattggctctaccgttttgaagtaacgaagggaatccccggaggtattgcaagactgattgcaaatccgaagtagcatcataagttgagcacagaacaacgtaatagtgcgctgccgttggttcagagtggaaattcagttctgaacatgtgtgaaactcagagatgtttagaatttctgtggtccaaacacctccccttcatgagtgggggtccggtcagccgggttcgaaggaagtgattcactccgtgaggagtagggatctccttccaactttttgtctcacggagtcttcccaattgcaacgggggcatttgcctttccttctctgtcaagcatcgaagagctctagggtccccttgtgctaaaaggagcgactggggggcagtcagatgacgaactgaaggactcccggtcggtccgttccgaggggatgaaagaaaaacttttgctacgccaatggccggttcccggcatcctctacctttatgaaaagagggtccactccgggtagcagcgctcagggatgccataagtgttccaacatctggggtcggggaacactttcgcgagaagagaacccgcacgcttttttgtgccacaggtaaaacacaagctcgcggtcggctccccagagggagagaatttccacctctccatgtttgcgccacgggcgggtgtttcttgctcacg

SEQ ID NO: 671156 - DNA, 334 bp, Homo sapiens
gtcgacgtcatcaggaaggtgcaaatcgaaattactttgagatgccacctcatacatgttaggatagctattatcaaaaagacaagagctaacaagtgttggtgagggtgtggagaagagggagcacttgtacactgttagtgggaatgtattatatattggtgcagccattatggaagacagtatggaggttcctaagtaaattaaaaatagaactaccatatgacccagcaatccctcttctgggtatatccccaaaggggaatgagattatctctatatcacagtttctttatccatttgcccattgatgaacacctaggttgtgtctgta

SEQ ID NO: 671157 - DNA, 154 bp, Homo sapiens
caccagctcactgctctagtaaccacagctgaatctcccgtcgtgggccccctccacggagtcagctggtgtagaataacattcctgctgatgtggacgctgaagtcaccgcgttactggttcctggggcagcctcagccgcagttcggtgtgt

SEQ ID NO: 671158 - DNA, 515 bp, Homo sapiens
  misc_feature (7)..(7): n is a, c, g, or t
  misc_feature (95)..(95): n is a, c, g, or t
  misc_feature (97)..(97): n is a, c, g, or t
  misc_feature (100)..(100): n is a, c, g, or t
  misc_feature (102)..(102): n is a, c, g, or t
  misc_feature (111)..(111): n is a, c, g, or t
  misc_feature (120)..(120): n is a, c, g, or t
  misc_feature (189)..(189): n is a, c, g, or t
  misc_feature (196)..(196): n is a, c, g, or t
  misc_feature (209)..(209): n is a, c, g, or t
  misc_feature (213)..(213): n is a, c, g, or t
  misc_feature (216)..(216): n is a, c, g, or t
  misc_feature (220)..(220): n is a, c, g, or t
  misc_feature (225)..(226): n is a, c, g, or t
  misc_feature (230)..(230): n is a, c, g, or t
  misc_feature (234)..(234): n is a, c, g, or t
  misc_feature (242)..(242): n is a, c, g, or t
  misc_feature (250)..(250): n is a, c, g, or t
  misc_feature (252)..(253): n is a, c, g, or t
  misc_feature (282)..(282): n is a, c, g, or t
  misc_feature (324)..(324): n is a, c, g, or t
  misc_feature (345)..(345): n is a, c, g, or t
  misc_feature (368)..(368): n is a, c, g, or t
  misc_feature (375)..(375): n is a, c, g, or t
  misc_feature (377)..(377): n is a, c, g, or t
  misc_feature (382)..(382): n is a, c, g, or t
  misc_feature (395)..(396): n is a, c, g, or t
  misc_feature (399)..(400): n is a, c, g, or t
  misc_feature (409)..(409): n is a, c, g, or t
  misc_feature (412)..(412): n is a, c, g, or t
  misc_feature (452)..(452): n is a, c, g, or t
  misc_feature (503)..(503): n is a, c, g, or t
gcctgangtactttcactcacatatgcggggcttagtcactagcaaacttgtttttcttttttacagattttccagcaaagttattaaatgtcantntcnantaatggacnccgcatggntgtactctgaagccatggaacaccacttcttagttaccttcacacaataagccataacatatagctttnggctgtncacaattaagcancagngangggnaaagnnagcnagancaccagantattttcngnngcacagcttcattaactattattatttanctgcctcattttatgttttttctagcccccacaaaaatgaantttccctgtctcatccccagnttaggctttttctccatctcccnacacatncnttgtntcctttcatcggnnaanntctgggggngantttcccaacttcagtagaaatgataaaaaaggcaaccgcnggtgtgtaccataaggagacacaagaagaaaggtgacactaaggctacagngcacagaaaaca

SEQ ID NO: 671159 - DNA, 113 bp, Homo sapiens
ccgggtgggtctccccctcatcagcgtccggctcggccgtgttgaccacgctgtagagcaggctcccgtccccgttcctcttcagatagcccatcttgccgcctgggaggaac

SEQ ID NO: 671160 - DNA, 260 bp, Homo sapiens
ctcagcctcccgggttcttgcgattctcctgcctcagcctcccgagtagctgggattacaggcgcctgccaccaggcccagctagtttttttgtatttttagtggagatggggttttgtcatgttggccaggctggtctcgatctcctggcctcaggtgatcccgtgcctcggcctcccggagtgctaggattacagctatgagccgccacacccagcctcttgtttgttgacttcttaatagcagccattgcactccgg

SEQ ID NO: 671161 - DNA, 261 bp, Homo sapiens
gatcccccctacatttgcaggagcatagattctatcaggttgttttgtcaaagcaggttattcagtgattcctccctatcattcttaagaacgttaaactaatgtctgttgtgtgtttagctctgagatagaaatggaaaatatgtaaaatcctctgtataggtaggttatattgcggttgaacttctgtactagccccttttctcagactggtaccttttaacaatatcaccgctaatctttttatagtgttatctctaa

SEQ ID NO: 671162 - DNA, 114 bp, Homo sapiens
atgtagcttttctattcctcgatactgtaagaggcggggtatccggagagcgaatgttacgaatgtgggactgggatggcctcgtgatgaacgtcaaagctcgacggactcctg

SEQ ID NO: 671163 - DNA, 159 bp, Homo sapiens
atgtacaaacgtcatggagggagatcgaggtgtttggtgcacatgacggtgagtgtgtgggcccggctgggccatcacagtgaaaccagtgtgtttgctaaaaatagtaaaaagaaaagaacccaaaattgaatcaaataaaaaaaacgtatgcggccg

SEQ ID NO: 671164 - DNA, 229 bp, Homo sapiens
aggtttttttttgggccgtttccaggccccttccccggccactttccttggaaaggggaggaagcctttttttgttttggaaaccccggggaggttgaacagggaaaaagggaagggactaacgggctccggaagggggggggttttttttttaaggcccggggttaaagggggggggcccttttttttttcccccttttttttttttaaaaaaaatttgcccacttga

SEQ ID NO: 671165 - DNA, 402 bp, Homo sapiens
gcttatagctctgccaggagacaggttagctgttgcccacgtcagctgacacactccgacttttgttgaccagagaatacgggagggttagagggctgcctttggactagtctacgtgtacacctactgtcctgtgtcgtgaggcaggtgctgatgcaggctcaggaggatattcgttgacatagttctttactattagtggaatctggcacaatctgtctgagtgctagcctgaggcgtgtgcatcatgctccatattacttactgtggcttgtcgggccagaggttgtattgcttgaagttatcgctacttggtcagtttgagccttccttagtatactgagttcctcctctgctcggcctaggactcggatgtctactgcctatgagccccttgtgcgt

SEQ ID NO: 671166 - DNA, 141 bp, Homo sapiens
tcgtctatggcgacacgcggtcgatccatgcccaggcgatccggctcgcccgtgaccggggcatcaccgtccaggtcggtgatgcggtgctgatccagcagcgcggcgcagcgttcgggccagcggtcgtggccgtccttg

SEQ ID NO: 671167 - DNA, 466 bp, Homo sapiens
  misc_feature (450)..(450): n is a, c, g, or t
agtaatttttataagtataaaagtgcatttcattctcaaaaagttataaaggaaaaagtacaagttctcccatcttctacccatgaatttcttctcttttctccagaggtgcccattgttaacgatttggtgtgtatctttctttcttttttgagacagagaatcgcttgaacccgggaagcagaggttgcagtgagccaagatcactggctttgtgccaggagaacatgggatgtgtggcctcctcagctgttttcaggcaggtgcgatgcctcaggggagggagcacaggtacctgcaaggtaattctgtcaccccaccccatgaccagatggcaaagtacttccaccctacacatggatgtgagaaaacaaccaaagacaagcagcaatacaaattccaaaagtgtaaaaagaaaaccataccagggagcaacaagaatgaacgcangacattttaaattttg

SEQ ID NO: 671168 - DNA, 419 bp, Homo sapiens
tggagtgcagtggtgtgatcatggctcactgcaacctctacctcccgagttcaagcaactctcctgcctcagcctccaggtagctaggaccacgggcatgtgccagcatacctggctagtttttgtatttttagtagagatgaggttttaccatgttgcccaggctggtctcgaactcccaagctcaagaaatccacctgccttgcctcccaaagtgctaggattacaggcgtgagccactgcatccagcccaaaaacattaaaaaaaattatccagctgtggtagtgtgcacctatagttctagctactcagaggctgagatgggtagatcccttgagcccaggagttcaaagttgcaatcagatatgatcttactactgcattccagcctggccaacagagcaagaccctgtctcaa

SEQ ID NO: 671169 - DNA, 746 bp, Homo sapiens
gccttttgtgcgcaggtgttcctggggaggccacagccgctgtggtgccacttataagcgcgggggtgatcaactacaccgcgggttttttatatacccgcgggcggggtataactttttctctcgggagaagctgttgtccgactgctggccgctttttggggccgcgccagctagatgcaggcgttgtcttccacgcaagagcgaccgactggtgttggtgcgtccgctcgtcgtagttttcccgcgaggatttttgtgccaccaacggtcgctcccgccctcttcttggggcggaggagtttttttctactcccgcgatgtgattgttccccccctctctctttctttttgacaccccgcgcgcggcgtctcgctggtggctcctcttgtgtcggccccccgatggggttgtttgcctccgtctgttgacccgccccccctcttgttgtgttgtgtgcctcaccaccagacggctcttctccctcatggtgggggttccccaccccccgatggtgggtttatgcaagacgatgactactttctccggcggtttttatgccaccaccacctttcctcgtcgcacaacggcgcgcggggcggcttcttccctggcctgctctcttttttctatttttgttgggggccgcccccccttttttcccccccccttttttttccccccttttttttaagggggcccttttttttttttttccccccccctcccccctctttttccccca

SEQ ID NO: 671170 - DNA, 399 bp, Homo sapiens
ggtgcgtggatcactctgaggtcaggagttcgagagcagcctgaccaagagtggtgggaccccttctctactaaaaatacaaaaattagctgggcgtggtggcgagcgtctgtcatcccagctactcgggagactgaggcaggagaatctcctgaacccagaaggcggaggttgccgtgagccgggatcgcgtcggctcactgacaacccaggcctgggactacacagcaataaatctgtcttaaaaaaaaagaagacttatacactctagttactgtacccctttctagtgctatgactaacgttgggactgcacaaatacttacgtatggtgttaggatggctgtagtattgggcgtacgtaaccacgctgggcctgtccatatgcaaggggtaccg

SEQ ID NO: 671171 - DNA, 133 bp, Homo sapiens
cgatgcagcatatacattagtgtactgttataccttgcctatcagtgtctccgcagatacatagtctcctcatctactgtgttacaaaacttatgagcatgtttgcgcagcatcaatcacacgggaccggtcc

SEQ ID NO: 671172 - DNA, 275 bp, Homo sapiens
aaacagtcagtataatattctactatttgtgttgataaagataactggcagaatggaactctcacatgggatgtacctctgctggcttctttgggagttgctaccatgctgtttgggtagggcctggtgacagcagttgcagggactacagccgtgatactctatactccattctacgtgacgtgatctggcttcccacgttcatctatttatctactcttaacagtctcgttctccattttccgaatggggaaaccgaagtatggggctggaac

SEQ ID NO: 671173 - DNA, 951 bp, Homo sapiens
tcttcactcggtgtattcgtggacgatggactctccatacctacacccatgtcgcactcctgttcagttaagcttgttggataaggaggcagtggcggtccgaacgctgatgtggctttactcgaagcgtcgaattggcgcttttaggtattactgcactaggtatgtagactcgtaggtcctgctcactgtcccctgactgatattccctaaagctgttcagagctctgaatatggtatgcttagaatagtcgtcttcaagacttggataaacttctaatagttccacagtcttacgtagttggtgtctggatatggtcgtggttggccacatgaggagttgacgttggtattatgtctatgagatcttacgccaagtggggccatctttggtctatgatgatttgagatgcaaactccaacatgctgattgtactccgattaatgcaattgggacgttggggatgctagcatgagtgatcagaagttattctagagtcatgatcactgaacttgtattcaatcttcacgtgtgcttccatccagtatacgccagtgacctaggtaccgggcccgcttgagattcaaagctggtctgtctatcagaaggcatatattgaacgttgattgtccccacagtatgcgggtaggctatatggggtattcctagcctgaggcgtgcgacctatgaggactagagaaatgcggaaggaggaccttcactaccagggaagccagcaaactcgcggtacgactgtgctgtacctgcaagcaggcactatcagtccaaagcccgggatatcgacccgacggggggctccaattacggtcaggaatgcagaaaccaagggcttcgcggaacgtcgaagtctcggaggcacaagggaatcggaacataggagcagaaaaaggaggacaaaaagcacaaccaggaaaaaagtacaccgccga

SEQ ID NO: 671174 - DNA, 593 bp, Homo sapiens
ggacacagagatttcctagccccgttaccaaacgaaaaagcaacgcaagggcttctaagaagccatcccagatgaccttattgtgcgtttgagaagagcagtcctcataccagagtgtttggggtttgggcctctttcagtgtgtattcattcttacgtgggaaagttgtatccgaggtttctgtggtgcatgaagcttttgccttcaccatctgttcccgttgtcttcctcgtggtgacatcagagtacagcagtattttcccttgccatctaagtggggttagggcatgttttgactcaaccgtgtgtgtcccctcaatgccaggggaataatcctaccctaagtcagctgaactgaagccaggatctaagctgtcaaacgaatgagacccaggttgctttaaacagcattggtagagatgaccagttttccgttgcagcgtacctgggaagaccggtatgctaattagtcttgcaacaaaagatgttccgttggcttcatctaaacaagaggcaatctaccgttcagtgtcataacgacgttcattccaggaggcaatctctgccctgtgctccgggacagaatggaatg

SEQ ID NO: 671175 - DNA, 670 bp, Homo sapiens
gaggagcaagcgtctgccgcggtggccgggtgccggattagacaagatcaaagctgcaggacataatggacagatgatgcgttcacagagatggaaggcatcttggatctgattgatgatgcttggcgataatatacaagctgccttcatgcagggatgcttcgcattttccactgcaagtgagcttcctgatccctgagatcaggatatgggtgggcaccacagagtctgtcaaagaaccaagaaatggaagtggacagactttaggctcgttttaccagtacctcgcatgaagaatgtaccccccatcgacaaagctgactgcgtaaggatcctttcttgtgggatggattttcctccaaaacgtcacacgaagatacaatgcgatgggttgtgtgaagatgcgtcctaaatttcaagacctttgaggaatagattagtgatcaaaagtgtatagccatttagtttgtggtagcgaagtgggatgcgaaattgagtgagaaactgagattacctcgagtgaagtggtgaatatttacgtctttaaacctaaagactgcgtcattgagtagctgtatgatttgaacgtgattgattgagtcgtgatgctctacctgctgatttggtttgctgaaaagttttaagcttccaatagttatgtgtgtcctga

SEQ ID NO: 671176 - DNA, 285 bp, Homo sapiens
agaaagggtttcaccatattggccaggttggtctcaaactcttgacctcaaatgatcggcctgccttggcctcccaaagtgctgggattacaggaatgagccaccacgtgctgtcctgaatgggtctatttctgagggtactgtgcttagaccctggagtgaagtggggagatcacagctcactgaaaacttgacctcccaggctcatgtcctcctcccggttcagcctcctgagtaggtgggactataggggtgtaccattacacccgggtatattttcctttt

SEQ ID NO: 671177 - DNA, 486 bp, Homo sapiens
ggcggtacctcaggatgcaagtgtcgtgattgatttgagcaagcaaggggtacgtgacaggcgctgtatgcaccggtggtcagagtgaaacagaacagagcagggagtttcacaatgttcttccatacaatgcctgaaatctatgggtaacatcgggttctaagtcatgagttgatttttaactactaggtttaagccaggcaggcccaggcctggctttgggcctggcgctgggctgcctgtctttgatttcacttccttgtttttttcttaaaacaggtactgagtataaaacaatatgagagagcctctctcttccctcaccagctactcaggaggctgaggtgggaagattgcatgaacccaggaggtcagggctgcagtgagctatgattgtgccaccacattccagcctgggcaacagagcaagaccctgtctctaaaacaagaaacaaagtgcaccagtgtgtggattccagcttctcc

SEQ ID NO: 671178 - DNA, 367 bp, Homo sapiens
cagatgaacatgacccagtccgttattaattcaatgggtctgttcaccagaatgtggtaatttcgttcttgtaatttgccagaattgtattgagtaaaggaaatagttacagtctgcacacccgagaccaggacaattcctccgatgaaattggctgcatcaaaggtagactttcgcacaggttgtgaggttggagtcacagtggttgtttgttgtacctgatgtagtaactgtcttggaagttgtagaaggggagggctgaactgtgggtttagctgtagaattggctgttggcactggagtggccgtggaaacggaacagaagtctgtcgtgttccccacttgacaatcactaactgttgagtta

SEQ ID NO: 671179 - DNA, 366 bp, Homo sapiens
actagtaacggcgcatgtgtgaattggttagactgtcgacaggtgtcgagggtcagtggcatgggtggacggcacactattgacaaagtctactgagacttcatgggatagtaggggagcgcaacaacatagctaccctggaggacagtgccaccatgagagactctatcaaacccaaggcataataggaatagatgtaacctgtatcctcaattattttcggatttgtgaaatggtcggaatacatcctttgaacaaaggaaaatctctttaagaacagaagggcacaaatcaaatgtgtatccgaaggaagagcaagaacatggccacacccaccgtcccacacgagacatttgtgcgctgaac

SEQ ID NO: 671180 - DNA, 127 bp, Homo sapiens
gtactctaccgctctttaggctgagaaggccagagcacagtgtatgtgtgttgtgtgggtgcaggccaggacgtgccctccatggggcatgcaggctctgcagtaccctcagcgctgggtctccact

SEQ ID NO: 671181 - DNA, 84 bp, Homo sapiens
ctctgttttcttctgtgtggatttaatgagagaaatttaaatatggccgttaaattccaaaagtttcaagcctttgactgggga

SEQ ID NO: 671182 - DNA, 387 bp, Homo sapiens
cagcggatacctatcgggcgagggtacactgttcccaagggcaacagatgcaccaggcagcacagttcaaaggacagctagacacacttatgatctggaaacacgtaatgatgtaacccaatgtcatgtaccacacaccttttctccaaggaggtctcataattctagaggggaaggtccagcgtgattacaaaatgaagacagacaacacaacatatactctgtggagatatcctactcatactatgcacgtgctgtgatcttgaacataactcgtcccaaataacttgtcacgatcatcctagactttaaaggttggctgatccatcaatctatgcactcaactgtaacttctttcccagtgtagttagcgcgtgctgtccgaga

SEQ ID NO: 671183 - DNA, 534 bp, Homo sapiens
  misc_feature (527)..(527): n is a, c, g, or t
tctcttggcagggtggttttgccttagacttttatagagaggagtatacaagttacaggtggaggacttacatgtgggattgttttgcaatcagaagtctcagtcagttgccaaacaggaaatatttatctctgtgtcatgctggttttaggtggacaaagagttctaatagagagacaaagaatgaggaattgggctgagcatggtgatgcacatctgtaatcccaccactttgagaggcccacacaggaggattacttgagcccaggtgttcaagaccagcctaggcaacatagcaagaccccgtctctacggaaaaaaaaaaaaaaattgtaaaaaagaatgaggaattgaagggtctgtgtctggtcttgtcccactgggatgggataatctcatgggataccatatactatggtgtatgcagttcatgggtgaccaaatcattgttatgtgatgcatgcctgtaatttgtaaaattccttgcaggtatacaatttattgattaaacaattggaagtttgganaaataaa

SEQ ID NO: 671184 - DNA, 455 bp, Homo sapiens
tcgggcgaggcagtctcgtggggccacagaaggcctgggttttctgtcagaggacaggatgcacattccttcaagatacattcccagattgttgggcatctcgttcttgggttttctgttgttgctgttccgttttgtctgtcttccctcctttgtttactagcagcctggaatttgccactttttctaaacgaagatttatggaacacttaccacacggctgacgctgtgcgaggctaaggttctaatacaccgcagctcacttaactctcgcaataccataaacgcacactgtttcatcttgaccctttcttgggaaggtgacagagaggtaggagggcaaacatcttgtgtgccccgtcccaagggtattactggtggaataatatccgcccaccaccccagtttctaatttgctgtaggctgtgacgctgtgtggcaaagactaggagtcc

SEQ ID NO: 671185 - DNA, 465 bp, Homo sapiens
cggtccctgtacgagaaccgtagaatgcttcacgtcttccatccagcttgagggctcctgtgcagtccttcactgcttctgtgtactgctgtcaggacctactaggcagagtgctctgtagctgtacgtggcagattccaggttactacacaagaggctttcactgtacttctcaatagctttcttatggtttcccttctttacaagctcattgccttcttccttcagaactctggctttctccacatccccagcagaaggcactctgttctttgtagctgtggtttctttggatttgcttttagccatctctttgtggttctccgaaaggcaggaattccacctcttctgagctgaaacaggcaccaaggggattgagggcagctttcaggcgccactcaggcccaagcgagtccatgagagctctggtcattctgttgatgccttctacggcttcgtcggtca

SEQ ID NO: 671186 - DNA, 825 bp, Homo sapiens
  misc_feature (825)..(825): n is a, c, g, or t
accacgcgtcgacggcaggcagagttaaaacggaaatttagaacagttgaaacaggagagaattagtcgatatcagggggtgaatctctacattaagaacttggactgacactacttgatgatgagaaacttacggaaagacacttttctccttttggatcaacttaccagtgctaaggtaactgctggaggactggaatgacagcacaggcgtatggctatcgacatgcatatcatcaatcatccatgaagaagcaaaccaaagacagaacacatgagaatagaactggacagcatagagggcatcacaaagccacaatatatagttgcccatggacccagaggacaggaagagagaaaggcatcacactagacacaaaccagaaatatgcaacacgagatggcatggaacagagagacacaaacacatgacacaaatgcacaaacattacacaatacaaaaacacagacacatggacagacgacggtagcgaccacatacgaaagacaagaacaaaacacaccaaagagcatcagagaaaaagagacacgtacaataataaataacacacataaacccagacaaaagcaacaggaaatcgaaagaaccaacaaaaacacaacgacacagcaaccagcacaggatagccgaagcaaaacactccaaggaacaaaccaacaagaacaaagagaaaaagaagaccaaaacaacacaaaaccatgaaagccaaaaaaccaaacaacataaagaaaaaacatagcgcaacccacaaagagaaaacagaaacaacaagaataaaacaagagcaaaaagcaaaacaaaan

SEQ ID NO: 671187 - DNA, 352 bp, Homo sapiens
  misc_feature (42)..(42): n is a, c, g, or t
  misc_feature (112)..(112): n is a, c, g, or t
aaaacccgttttccagagtccttcaaacaagcttgggaggantggagttcaacattgaccttgcccaaaaagaaggtctgcatcgactttgggcacagctcagacaccctgntggcaaccctcaacaaaacaggaaaggctgtttcctaccttggccccaagtagccaggacctgggcgagtcttccggatataaactgaagaggcaggctgttgatctggtctccccggcagatctggaacaccaactgctcagtccagtccagcccagccatggagttcctgcccagacaggccttccccgctggctccctgcaagcttccatgtaataaagtcaagctgagtttgttga

SEQ ID NO: 671188 - DNA, 318 bp, Homo sapiens
ttttggggggtttggggggggaggaaaaccaaatgggagttgggggagggggggaaccagttcgggaaccccccgcctggagtcagggccaggggggcagggccccccttgtatccaaaagttcccaggggggattgtaatgggggttgggactggaggttgaaaaaggggtttttaaaaggaagggggcaggagttggaattagtgggccccccctgccccccaagggggggggacccccccccccccacttttaatgttttttaaaggcatttgggttttttaaaatttggccaccaagagcacctttttttgtca

SEQ ID NO: 671189 - DNA, 366 bp, Homo sapiens
  misc_feature (37)..(37): n is a, c, g, or t
  misc_feature (48)..(48): n is a, c, g, or t
  misc_feature (59)..(59): n is a, c, g, or t
  misc_feature (67)..(67): n is a, c, g, or t
  misc_feature (218)..(218): n is a, c, g, or t
  misc_feature (231)..(231): n is a, c, g, or t
  misc_feature (283)..(283): n is a, c, g, or t
  misc_feature (320)..(320): n is a, c, g, or t
  misc_feature (322)..(322): n is a, c, g, or t
  misc_feature (333)..(333): n is a, c, g, or t
taatgttggtttccccttggaagttcctttttaactnccccaaacccntgtccttaagntgtggtcngaatgtgtcccttcaaaattcatatattgaaatcctaacccctgaggtgatggttttaggaggtggggcctttggaaggtgattaggtcatgagggaggagccctcatcaatgggattagtcccttataaaagagatcccaaagagttgcnttgtccctttcantatgtgaggaagcagtaagaaggtgtcattttatgaaccaggaagtggcccntcaccagagaccaaatgtaccagcactttagttttgnanttcccagcttntagaattgtgagaaataaatttttgttgttaat

SEQ ID NO: 671190 - DNA, 582 bp, Homo sapiens
agcgggccgggggcggggggcggcgggcgacggggcgggcgcaggatgagggcggccattgctggggctccgcttcggggaggaggacgctgaggaggcgccgagccgcgcagcgctgcgggggaggcgcccgcgcctgacgcgtgggccctatggccatggaccaccagccagctgtatgactgccgtgccccatttccagttccaagcagttgagtgttaattgttccctttgccgcatttcacacattcaatttggtgaaggacaccaagacgtggagtcctagcgactgccgcccgtgggcagtttcctgggtgggcagcatggcatgtggccccagcacatggagcggacactgcatgccgaggccttcggccctggctgccgtgctccactgcaggcatgcccatgcctccggccgcagcctcaggaagaagcggcctgaggacttcaagtttgggaaatccttggggaaggctctttttccacggttgtcctggctcgagaactggcaacctccagagaatatgcgattaaaattctggagaagcgacatatcataacaagagaacaaggtcccc

SEQ ID NO: 671191 - DNA, 199 bp, Homo sapiens
atctcctgagctcaagcaatcatcctgcctcagcctccccagtcaactgggactacaggcatgcagccacacacccagctaatttaggtgtttttcgggtagagctggggtttcacccatgttggctaggctggtctcaaactcctgccttcaaatgatctgcccgccttggcctcccaaaagtgctggagatatacaa

SEQ ID NO: 671192 - DNA, 838 bp, Homo sapiens
gcctgcctgtgctcccagcatggctgtctctgcagtctgatgggcaaggactctgctgtgcattctccactgccgtctactcgtgccactcctggtcccgacacctagcctgcctgtgaaagaacacccggaaatgaaaggccaccaagaagaaatggcactaccgtcctaggaccagacgacaacatggcgctggatgcacccaggacccgggccctaagtggatcacacaccacacccgcacgacacccactctaacaacccaccgtgccagcaccctctcacccctgtcccgcacctgcggcccaatcacacgctaacaccacacacggccgtcgcccccatgcgcgcccagcgacgcgccacacctcccagaaaactcaacaccaagcattcgcaccacaacaccccctgcccccacggaccacccacgttaccccaccccacccacacgccacctgctgccacgccccctctaccgacgccacaccacagccacaccgcaccccgcgccccaccacacgcacacccgcgaccaccccgcacccagcacaccccgacacacgaacaagccataaatccacacacccggccaaactccgaaccaccaccaccgcccccaagcaccccaacccacccacacacaagccctgacaccgcgcaacaccccccacagcgaccacgaacatagccaggccccaacaccacaccaaaacccaccagcaccacctaacggaacaacccacacataaacacaccgtccacccaacgaacaacccacccaccaccagccacgaacacaccgacaccgggcacccaccccccacacaccctcaca

SEQ ID NO: 671193 - DNA, 752 bp, Homo sapiens
attttttattattttctgtctttatatttttattgcactgaaaatgcagcttcttcattgggtcaatatcacctcttcatcgaccccagaaagggagtggggaccctgcatgctgccccctccccgaccccggggtctatctggcaggactggggaagggagcctctcagggggtggcggtccacgcccagtaagcacctgggcagctgtgcggcggccgaggcagtccgaaggtgtggggtcagctctgagctctatgtgcaggtccggtaccccgagcgccttgccagtcgggacgccagggcccatcgagtatatagtcgctatgcgcgcccagggtgcccgtgcgccgtggggctgggccccagtcgtgcctgtgcccagcaggtccggttgcccggtgcgccagatctcccgcaggatccgttcggctcctccagccgtgtcgcccgtctccagtctcctccgccgacgtgaacacgttgaccgtcgaggggcccgtccggctctgcggacagctcggggcccgggaagcagtgtcatcgagggcccagccggaatcaccggtgtcctcctacgatcctgcgtacgcaagtccctcggagctccagggtgactgctgacgggggtcccggaaggctaagccgggccccgggacccgagagcagagggcccacgaaatgcgtctacacaccacgcgagggtcgacccacgggccccaaccaacgccccacaagttaaagcaaaactca

SEQ ID NO: 671194 - DNA, 286 bp, Homo sapiens
acatctatgcctcaggcatgtacatgcagatgtacttgcaagttcttacattctttacgtcacaggtctaactcagttgatggcccatctagggagcttttaaacatatcctcatgccaagctccgaaacagatccattcactccaaatctctggcagtgaggcgcaagcatcattattattacaagttaccttagccaactctaatatatagttgtctggatgagaatcatctgttgcccaggctgcagctcagcggagcgacctcggctcagtgcaagctccgc

SEQ ID NO: 671195 - DNA, 161 bp, Homo sapiens
tgcctacaggatcctaagaggaggaagggaacccgtaacacgaagcttaagaagaaggataaaggtgaagctggtcagagaagaaacctcctgagtgctgacatgaatatttttgaacgaccttggggattactgtaccctcctctgtgccctcctctgtt

SEQ ID NO: 671196 - DNA, 286 bp, Homo sapiens
  misc_feature (188)..(188): n is a, c, g, or t
ttgttcctcgaggacgcccaccccctctttcacaaagaattgtccagccccatatgctaaaagtaccagggttgagaaaccctgaactacactgagggattgagattacgttcaaaataatattgaacactggtagtgaagtctgaatttaaagcactggcatatttattcattcaacaaacacatancaagcacttaacatgtggcgctggtgtctaggggccaagatgctgtggggacccaatagacgtcatcgaagaaccaattaggagtaccgagctggaat

SEQ ID NO: 671197 - DNA, 208 bp, Homo sapiens
  misc_feature (53)..(53): n is a, c, g, or t
  misc_feature (61)..(61): n is a, c, g, or t
  misc_feature (66)..(66): n is a, c, g, or t
  misc_feature (89)..(89): n is a, c, g, or t
  misc_feature (175)..(175): n is a, c, g, or t
ttaattgaaataaggaacagtccagtgatggtggcagatggaaacaccagtgnggaaattnggatnccaaaaatgtccaagtttgagtnccaggggaattcaattcttagaacctagacacccattttctttaccattgtcattgtgatttttgcactgttttgctattcagccncttatctgcatggaataaaaccataaattcttt

SEQ ID NO: 671198 - DNA, 155 bp, Homo sapiens
atcatctattgacgtacataaacacggcaacaagcaagccatcatttagtaaatctcgtacaaagaaactctccagaatctaatggcatcacagatcctcgcatcaggcacatataaccccgattgtcttgttttctatcgcagcaatcagcttt

SEQ ID NO: 671199 - DNA, 195 bp, Homo sapiens
cctataaaggtttttaaaattcccggggaagctttaatgacgtttgcccggagtttttctttatataatcaaaattgaaattggtggtggactatggaactttattatgcctttttccgtcccctttcaaagcaaaagctttttccatgggaggaatgtttagttttaattggcttaataaattttttccttaga

SEQ ID NO: 671200 - DNA, 350 bp, Homo sapiens
ggctatgtggacatcgtgatcagcagagagagatctctgtacacagacacgagaacccatgaagagagatgaaatcatacacaaaaggtgtgtggacaggcagcagagatagagatgcacgaaagtgtccgagacatcacgtgtggctccagcccatgtaactgacagtgatagacacctctatctgccccactgtcctggggtcgctcttgggaggcacgggcatgggcgtgtctggactcattctgtatcaatccagtgtgttcctgtcatagttagtgtctcccaagcaggccatggtaagggcctcgcaggggccattggggagcacagggtcaggcttctcggga

SEQ ID NO: 671201 - DNA, 294 bp, Homo sapiens
tacgagtgactatgagtagcaggactaccgtgacaatcctaacatagtccattcttaatttaactatatatattgatcctaaatactaccggataccggcggagtgcgaacttaaagctccaggaccacgagcctactagctatctcgcacctgaaacacgctatgatgactaacacccttaattccatccaccctcctctccctaggaggcctgcccccgctaaccggctttttgcccaaatgggccattatcggagaattcacaaaaaacaatagcctcatcatccccacca

SEQ ID NO: 671202 - DNA, 300 bp, Homo sapiens
  misc_feature (17)..(17): n is a, c, g, or t
  misc_feature (61)..(61): n is a, c, g, or t
  misc_feature (142)..(142): n is a, c, g, or t
  misc_feature (172)..(172): n is a, c, g, or t
  misc_feature (183)..(183): n is a, c, g, or t
tggcctcctcaccaganccatctttttactgtagtttccccacgcggatgtctggagacangcggcccccccagatcaccggtctctgtcccttcggtccccgggagatcctggtgggggatgaggagaagcggacactganacgcttctctcacagcggagaatacaaggncaccgcgccgntccctgagggctgctccccgtggagcgtcgccgccctagagagcggggtggtcttctctatagcgcacggtctttctcacaccccaggagatgtgagtggggagggcctgatctctc

SEQ ID NO: 671203 - DNA, 199 bp, Homo sapiens
ttttttctgttcaagttctaaacgctgcttgctgcctgctgcaggatctgctctctctcttttcggagttcattttttaaaatggctattcatgctccttgtactcttcatccagtttcctaggttgtactcattccggcgctctatggccgcatggtgatcatccacctccaagggccattaaagacttgaggcttct

SEQ ID NO: 671204 - DNA, 218 bp, Homo sapiens
  misc_feature (114)..(115): n is a, c, g, or t
gatcgactggtaccaatgaggtctcgctctgtagcccagactgttctcaaactcctgtcctcaagcgatcctcctgccacagacttctgggaccacaggtgtgcgccagcatcnnagcttatttaaaaaaaaatttttttttttttggtagtctccctatgttgctcaagctggtcttgagctcctgggctcaagcgatccgccccccttggtcgacg

SEQ ID NO: 671205 - DNA, 491 bp, Homo sapiens
tccactagtgtaggcctgtgtttccctcctgcaagcgattgacccttgagaggatgaaaatgatgttagacaaaaagcaaattcgagcaattttcttattcgagttcaaaatgggtcgtaaagcagcagaaacaactcgcaacatcaacaatgcatttggcccaggaactgctaacgaacgtacagtgcagtggtggttcaagaagttttgcaaaggagatgagagccttgaagatgaggagcgtagtggccggccatcagaagttgacaacgaccagttgagagcaatcatcgaagctgatccccttacaactacacgagaagttgctgaagaactcaatgtcaaccattctacggtcgttcgacatttgaagcaaattggaaaggtgaaaaagctcgataagtgggtgcctcatgagctgactgaaaatcaaaaaaatcgtcgttttgaagtgtcatcttctcttattctacgcaaccacaacgaacca

SEQ ID NO: 671206 - DNA, 722 bp, Homo sapiens
  misc_feature (50)..(50): n is a, c, g, or t
  misc_feature (103)..(103): n is a, c, g, or t
  misc_feature (133)..(133): n is a, c, g, or t
  misc_feature (142)..(142): n is a, c, g, or t
  misc_feature (212)..(212): n is a, c, g, or t
  misc_feature (282)..(282): n is a, c, g, or t
  misc_feature (285)..(285): n is a, c, g, or t
  misc_feature (322)..(322): n is a, c, g, or t
  misc_feature (332)..(332): n is a, c, g, or t
  misc_feature (335)..(335): n is a, c, g, or t
  misc_feature (358)..(358): n is a, c, g, or t
  misc_feature (361)..(361): n is a, c, g, or t
agcggagagcacatccggtgttagaagcgctggtaggccttggagaggcngggttaaggaagagtggagactgctgcacggactctggaaccatgaacatatntgatcgaaagatcaactttgatgcgctttntaaacatgnttctcatataaccccgtcaacgcagcagcacctgaagaaggtctatgcaagttttggcctttggtatgtntgtgggcgggctgcaggggcctatgtccatatgggtcactcatttcattcagggctggcctgctgtctgnctngggctccctggatattgatgatttggctgatggcaanacctcatagnccntgaaactgaacagaaaagactgnganttcttgctggatttgcattccttacaggagttggcctgggtcctgccctggagttttgtattgctgtcaagcccaggatccttcccacatgctttgcatgggcacggcacatgaatctttaacctggcttcagcactcagatggcactctatgccaagggagccggtagactaccttctttctgcggaggtatcttggatgtcaggcctgagcttgttgcttgtgtcttccctggggaatgtggactttggatccatttggcttttccaggcaaagctgtatgtgggactggtggtcatgtgtgggcttcggcctttttgatactcaattcattattgcaaagggcgaacatggagatcag

SEQ ID NO: 671207 - DNA, 454 bp, Homo sapiens
cagaagtaataagcatggagcttaatttgtgaactgacaggttcacgtggctactttgtcaggccacttctggcaggggaccagagagccacgtggtcaggacacagaaggccacttactcctcttggctctgcatgaggttactcatgcggttatgtacaagcagtactcactgaggaggaatagttaagaggagtctgttttatgacagttaaagaagttgccctgtaagctggggcctttctgccaactctgattagcgtctgggtttgtaacaagaaaacaacaaaagattgtgcaggggcagacgaaagttctgatcaagaccgagattgttcacgttggcttgtgaatcaagtcagctgtggtgctgaggactgttgagtccatactctgaacagtccttgactgatcttgtccccgggttctctgaggtgcagcagcatatagcatt

SEQ ID NO: 671208 - DNA, 524 bp, Homo sapiens
  misc_feature (1)..(1): n is a, c, g, or t
naaagatcctgtttcagtggttttttccagttactcatgccccaaccttgggatcatccttcattcacctctcttattctggtctcttataatccacatggtctttctttttttttttttggaaagggagtctcattcggtcgccaggttggagtgcaggggcatgatttcggttcatggtaacctctgcctccggggttcaggtgattctctgtgagtagcggggactaggggttgtgcaccaccagtcggggctattttaaatctttggtagagaggggagtctcataatgtggccaaagcgggtctcgagctctgggcctcggggctttaacacgtatgggcggttatgactagaacattggtcccagtatcggcgtgtctcattgggttcaactcggctcaaacatcatttccccaaggagggcctttcgtgtttacttaaaatgggcacccccaaagagtcttaatttcctttttccggtgaacgttgtaccacctcgaggggaggaccgtctccagat

SEQ ID NO: 671209 - DNA, 110 bp, Homo sapiens
ctagaggatctcgccaggtaggactaagctgatagaaaagcgattacctaaaagaatttcacagcgggaagcctattcgcaggatttctcattactatcaacatttcccc

SEQ ID NO: 671210 - DNA, 340 bp, Homo sapiens
aagctgctcctggccatcgttggccagtgagaagggtccttttcccctttaaggaatgaagctcttcaggacctatccttccatgcaatgagacctgcatgcagccatgtcagataccacctgaccagagtagttttctactgaagactgtcagggggtgtgctgggtttgcacatgttgttactgccttaattctaatgttaggtttttttttttcctgtatccaatcagtgtaaaagccatatcaatgacgtagtaatgtaatatttgtaaagctttgctctcactgcttttattttaatccggatttcaaattgaataaaagtcacaacaatctcta

SEQ ID NO: 671211 - DNA, 256 bp, Homo sapiens
ggccggaacttttgggccgggcccctcccagggcccccgctccgtgggaaaaaacagttcctccatttccttgaaaattgaacgatttttaaaaatagattaaatttcgctggaaataagtacccagaaatttcaggggagggtgccgggtccttcccgggcctggggttttgaaaccacccaggtcccccacctcccctttaaaaaatgcaaattttttttttgacaaaaatcacatacttttttttttaattta

SEQ ID NO: 671212 - DNA, 381 bp, Homo sapiens
gatctcgcgacccgtcagacgctgaactatgtgtttttaaggctggttccctttgtaaatggtctcaccagatgttgttagctggactttctgagatgtggattaagcttttcttttcttttcttttcaagaaagagttttgctcttgttgcccaggctggagtgcaatggtgccatctcgactcactgcaacctccacctcccaggttcaggcgattctcctgcctcacgctcctgagtagctaggaatacaagcacccgctaccacacctggcaatttttttttttttttggaattttaagtagagacaggatttcaccatgttggccaggctggtctcgaactcctgatttcaggtgatccgcccacctcagcctccc

SEQ ID NO: 671213 - DNA, 685 bp, Homo sapiens
  misc_feature (74)..(74): n is a, c, g, or t
  misc_feature (142)..(142): n is a, c, g, or t
  misc_feature (324)..(324): n is a, c, g, or t
gtatgggcgtgttgagagaggcgcgcgcgcgcgcccgcgggcccgcgctccacatttattttcactctctcacnatctgtatccactcccccccgcgttttgttgttgcgcgcgggggtacattttttccggggagccctcncccgtgcgccccttaggggccccttaaaactgttttttccaaaacaggggggggcggggcggtattccggggtattttggaccccgcggtcccctccaattaaaggacaaaagcggttcttcccccccctcctaaggggtgtgggaaaaagagggttggttcccctttttttaaaggggggnccggtttcccaaaaaaaaaaaaatccccttttccccgggtttaaaccaaatttagccttccccccttggagccccgggggtaaaccccaggggggttttttttattttcccgcccctgccaaaaatggggaaattttgtttaaaccccgggtgggtttccccgggcccggaaaaaccggttttcccaagaaatttctttccccccgccggggggggtggttttttccccccccccaaaaaagggggcccctgcccccttttttttttaccccccagggggaggtttttttttggggggggggtccaaaaaatttttttggggaaatttttctttttcctttatttaaacctcccttttgga

SEQ ID NO: 671214 - DNA, 889 bp, Homo sapiens
ccgttcttgttaataaactaacagaaagacaaaataaaaaacacaaaacaccaagaacacacaaataatcggacttcccggcaatgggttttcggctcctcaattcgtcccttgaatcccgccattggaaaccccccaatttccaaggttacccatgtacctgcgttgcaaccgaccctgggaatacacaagaggtctcttctccaagaccccctccccgccgtgttgcaatctgtttttctgaaatacttttatcctctattggcatctcgtccccattgctccacacacctccttacgccaatgttctcctaattgttaggccttctgttccaacgacactttttccccattctccgccccccaccctgttgcgccccgaggctaccccccgttctggtttgccgcagcccgccctttacccccttttgggagacacccccccctctggtggttacccctgccacacctgcgcgggcaggatcacccaccttgatggtttctacacacttttatctgccaggaccgcccctctctttccaatctatccggcggtgttggatcgccccccttctcctcgtggtgacaaattcacccccccactcttgtggcaaaaattgcacacacacagtctttcatagcaggggccaatagccccccatagcacaccctgaccttggtataaccgacattctgaagaaaaccacccagaggttctttggaatcactttctttcgagaacatgtggatatttgtcccccatataccccaaacagaataggaggaaacccctattatcctaatattgtcccacccaaaacaaaaagtgcaccgttgtctcaaccacccgcggggaaaagaacccccctggggggcggcaaacataaca

SEQ ID NO: 671215 - DNA, 826 bp, Homo sapiens
  misc_feature (302)..(302): n is a, c, g, or t
gggagtcgaggtttcgggcttgtaccgcttggcggtgcggcctggtgtcggcttgcaggttcttctgtgttgttctctgccctgcaagggcgtagagctgctactctcctctgcaagggcctaccgtgggggccacttaaccatccgccttgccttgggtggttgcaccaaatccggccgttctaccgcatgtgtggttgctcacaacaagtgtcccagggaatgggccggtttcgtagagcagctgggtcctatgatccatgggcccaacagtcatggagaaaaaactcgttggccctcanactagacgagggatcgcgtcatgtgatgtggttggggggcccaacctctcttaaggcctatggaaaaagcttctgggtctgtgctgggttttttccctctgcattcctatgattgatcaccaatagtgttgagagactgggaaggaaaggggcacggtgaagtcctgtttagtttctcagaaaacagatgcaggaagttacaagatacagacggctacaagaaaacataaatgagctgactttagtggagcatacgcagtgggaacaggtcaaggtcttttttgaaacaagtggaagggatcttaaatttgtgtaagaatggggcgtcaataacttgggtttccaaaaaaaataaaaaaaaaaaaatgggttggggggtggagcagaggaaagtttttaacacctttgggggggggggccaagttggtgtgaaattggatacgtgtcaaggattgggtaggatggtgtggttccaaaaaaaagcggggccgggtttggaacaggggtggttggtaaggcagagg

SEQ ID NO: 671216 - DNA, 193 bp, Homo sapiens
agtactaggtaatagcttaaactagtcaggttaggtctcaaggcaggagtcaggggccaggtttgtggctccgtcaagcacaggcctcagcatcaggggcattgtagcggtgtgtgcatgctcagggtcagcacatccagcagcaaagtgtatgtgggcacagcaaagttcagcatttcacgcgcgcatgcac

SEQ ID NO: 671217 - DNA, 215 bp, Homo sapiens
tcctgctcggctcccaaagtgtgtgatacaggcgtgagaaacatgcccagcgccatgtcatttttaatgcctggattgactttgtgggaatgaggcaaggtaccttttaagatgtcagctgtatagcatactagtagtgaatgtaggctatgaagtaagatgcatctgggtgtgagctgtgactagtaatatactaggtagtgtcatcttgcaca

SEQ ID NO: 671218 - DNA, 593 bp, Homo sapiens
ggtggctatcatcccatgtcacatgccacctcttgtacattgacagtggctccctggaggctgttctgggcagagaaagaaaaggttcagtcctggaccagcaatagaggggcatgagagggacagggcagcatgcatgctgctgacccaggaggccacctgaggccctcccagcataaaacccacctcctgccctcccctgtgtgctggggagcagcccagagatgcagacacacggccaggaccatgctcccatctgggttgcacacaggtgtcattattttggaagtggtgtggcttactttcaggcccaggaaggcttgggaagcttgacctcacaggtgacagactcaggaccagggagcgcagagcctgagaaatatccccaggtgctgtgtgtgctgtgatcaagctctggcctttcccacctgaaaccaccagcagattaaccctggcccccaggtccacggcagagcctgaacacacatacacaacttccccactcactcaaacttgccaacagatccagcaaatgtggtgaaacaaaaacaagtccagagaagtaagtgctgccagtttgatatggttccaga

SEQ ID NO: 671219 - DNA, 106 bp, Homo sapiens
cttacacgcacctttcactcacctgacgtgtcactcacctggcttcttcccggaaacacggggggggttttgggtacccgcgctcgaccttcgtcctcttggtcct

SEQ ID NO: 671220 - DNA, 139 bp, Homo sapiens
gtcacggcactgcaccttgcgcacagcggcgccaccacctcctcgggggcttgccgtcccgcgagatgcgcctgagcagctcgctgtaggtgcgccgtccagccccggcctcttcctgcgcccgccggcgtcaggcact

SEQ ID NO: 671221 - DNA, 353 bp, Homo sapiens
  misc_feature (70)..(71): n is a, c, g, or t
  misc_feature (112)..(112): n is a, c, g, or t
tcttgagtacttgagctgggccttgaacgagctacagtgtgtgcagaagggtgagaaggaggggcgtggnnggacccagtggatcgagggtgatgagctgcacctggagatnagagtggaaggtgtggtctgcaaagcaaagtattcaagaaggtgcagtgaggcccaggcagacaacctttgtcccaaggaatcagcaggatgtgtgggccaggatccccctttttgcccagcattaggcaaaaatgtccaaccccccccagggatttgttaacagagtctgttttttgggtttgtcccttttcctttttttaaaacaaaacccatgcccataaagtggtcttggtgttcca

SEQ ID NO: 671222 - DNA, 434 bp, Homo sapiens
agcagcctgagttattttagtggacggaatcggaacacgctggctccatatcgtgaaattgtacattaatgtctcttacttatttgcctctgttacttcttatatctttttcctttcttcagactccgtccacggagatgctctccccggtcttctgctgcaatttagattcctttcccttctctccagttctccttcccttaccaaggagaggggagcaaatggttgtgggcaagggatttggccatacatgtcaagctggtagtgggttgttcaaggtgccatagccacccccaaactatgttttgtttaaacgcgtggggttacttaattctctgcacacccttgtcaaggggagtctagtaaagttgccgagggtaggttcatctccaggtttcgggattcccatccgtcctggcgatcctgccagcagt

SEQ ID NO: 671223 - DNA, 241 bp, Homo sapiens
  misc_feature (33)..(33): n is a, c, g, or t
  misc_feature (149)..(149): n is a, c, g, or t
gaggatccgtagtatcgccacactacttcttantctgagcctgtaagtatatttagattataattccaacccagaaatgaagctatatgaatataagaccccaacagaaaaatctgtaaaacgatcagaccataaaatcacataccttnctatatggtcatgcagagacacagatctttgttccggagtttgaatttaaatgccaagcttcagagcctgaaaatgtctaaaatatagaccc

SEQ ID NO: 671224 - DNA, 120 bp, Homo sapiens
gtattaggaaatcaccagtggcaggctgttacctggctgcttcagtatcctgttattactgggagaccatcagtatatggctctgtccagggaccttcaatatcctgttggctggcgaca

SEQ ID NO: 671225 - DNA, 190 bp, Homo sapiens
ttttttgagatagggtcttggtcacctggttggagtgcagtggcatgatcatggctcactgtagccttgaactcctgggcttaagcaatccttccacgtcagcatcctgaatcactgcgattacaggtgtgtggcaccatgcctagctaattttaaaaatttttagtaggtagagacagggtcgtcgacg

SEQ ID NO: 671226 - DNA, 296 bp, Homo sapiens
cacaggggtccagtccctctcaaagcctgatccattcattcctgtactccatcttcctaaggccctctggcaccagccaggcaataactcccatcccattttacaaatgagaaagtagaggctcaggccaggtgctgtggttcacgcctgtaatcccagcactttgggaggccaaggtggttggatcacttgaagccaggagttcgagaccagcctggccaacaggcgaaaccccgtctctactaaaaatacaagaattaactgggcgtggtggtgcatgcctgtaatcccagcta

SEQ ID NO: 671227 - DNA, 367 bp, Homo sapiens
gagggataaaagccttggtgtttataaacttctttgggttggtccctttacttggcatttctttttggatataatggtcccgggacagtgtgctctttctgagatatttattgagtttttttttaaacaggctattttttatgccctggccgtatttcagtccctggcagagatagagtctacctataattcaaacatcttgtgaccccgtaaccgcaagtatcttcttgggatattgagctctttgtatattctggggtctcatctaatattgtagtcgtgagctggtgcagtgtatgggtattgaaacatggattccaaccccacagtctagtctaggacgggcagggcaggaagagtacactgt

SEQ ID NO: 671228 - DNA, 483 bp, Homo sapiens
  misc_feature (7)..(7): n is a, c, g, or t
  misc_feature (69)..(69): n is a, c, g, or t
  misc_feature (123)..(123): n is a, c, g, or t
  misc_feature (150)..(150): n is a, c, g, or t
  misc_feature (152)..(152): n is a, c, g, or t
  misc_feature (156)..(156): n is a, c, g, or t
  misc_feature (162)..(163): n is a, c, g, or t
  misc_feature (165)..(165): n is a, c, g, or t
  misc_feature (168)..(168): n is a, c, g, or t
  misc_feature (185)..(185): n is a, c, g, or t
  misc_feature (187)..(187): n is a, c, g, or t
  misc_feature (198)..(198): n is a, c, g, or t
  misc_feature (245)..(245): n is a, c, g, or t
  misc_feature (257)..(258): n is a, c, g, or t
  misc_feature (277)..(278): n is a, c, g, or t
  misc_feature (296)..(296): n is a, c, g, or t
  misc_feature (304)..(304): n is a, c, g, or t
  misc_feature (313)..(313): n is a, c, g, or t
  misc_feature (333)..(333): n is a, c, g, or t
  misc_feature (355)..(355): n is a, c, g, or t
  misc_feature (481)..(481): n is a, c, g, or t
agaggtnccccaaatacaactcatgagggtttcaatgtcaccctccacaccaccctggttgtcacgacnaaactggtgctcccgacccctggcaagcccatcctccccgtgcagacaggggancaggcccagacaagaggagcagtccancngcangaccanntnctncagcctccttgtcctancnatctgcatcanattggtgcatttactgatccgatacagattacatttcttgaccaganagagttgcagtnntatctataggtattctcannggagcagttataaaaaanaaagagtntaaaaaacnggcgaattggaaggaagaanaaatgtttcgtccaaacatgtntttcctcctcactgcttccccctattatctttgagtctgagatattcattacacaagggtaacttctttcaaaatattggttccatcaccctgatttgctgtttttgggacggcaaaccccgcacntg

SEQ ID NO: 671229 - DNA, 558 bp, Homo sapiens
aaataactcttgaattgaaaatatatggcagcaatatacgtgtactatagtcttaatgtaattagaataatatcatgagaacgacgatccacaatgatggacactcagaaaacacgtcctacctactcggaaggcagaagcagtagcatggcatatacccggaaggcggagcttgcctcgcgagccgcgatcgtgtaactgcactccaaactgggacaacagaaccagactccgtctcacaacaaacgaaagaaagaacacagtccaaggagagaattctaatgcctgacagaagtaatggttagaatgagggcttctaactgaagtcttcacagacataggatagaactcttagcaccagatatactgccaataatagagttagatgtgtgtcatttgctcattcaaatggaggtggcatcctgtcctctaaaattatatcatgatccgaagaaaatgaaactgtacccatttctactgcatggctgaaaatgatttgggctgattataaaaattaagttgtaatggcctgtatcagtatacttacacataaaaatg

SEQ ID NO: 671230 - DNA, 406 bp, Homo sapiens
  misc_feature (317)..(317): n is a, c, g, or t
gcgaggagtcccaggctttcagactgaactccattccgtgagcgagcccacgtaggtcttctttttatccacgggcatcacgtccacgagcacccccgactctcagttgctagatgactcccgacgtgcacggctagtcttgcagaatgctctgaggtatctagcataagatgttaggttccacaacaccggtagcccagatagggcaggttcgctctttgcacgtgtgccgagacaataggattcttagggcacgtgagttagctggcgttttcaaaccgggcacagcgtgagcaacgcgtcgtgtagcagcccanaatcctgcactttcacttttgacaccatgaatgagctggaaggtttgtattcgctgagggactgcacgccgtgtctctcagacttcacg

SEQ ID NO: 671231 - DNA, 417 bp, Homo sapiens
tgagtggcatgtgacctcgtgatgtatatgcccagctgtcgcaatatcagtgctatattatctcggaacatagaggctccttatactgtaatttaagagtgctatgtgctaaggatgaagatacaattcctcagctctatggtagactatagggaagctcagctagtggcatgtctcccagatgtggtacttcaggaactctttttcaaactcacatcacagtacatctggagatagtctaagaggcagcctcttttacaccacaccattgcgaacatcggaggatcttattctcctggtcattccttggtagatatttggaataaaataatcacactgactgtgatagggtagatcacattccatattctcctgtgagtctcagaagatgcttcatttagtagaacggtgtaagtg

SEQ ID NO: 671232 - DNA, 260 bp, Homo sapiens
atacacgatctgttaaaagatagcacagggccacgtgtgatttacgccaaaggcagcgccacgtccccagcaaggaggccacagtaacttcctcaccagtaccgggggtggcaagggtgaactctaggggagtggttcatcacttcggtgcagccattccatgatctgctttttattcgggtaaaagacatgtcttgcaatagttcgttttcctcaaccaagctaatcagctcacaaaacaacatcgtctccacgtgatc

SEQ ID NO: 671233 - DNA, 273 bp, Homo sapiens
ctgagggacggaatatggcgatcactgagaaagctatgggaccgtgcatggtggattatgcctgtaatctcagcacttcggaaggccaaggcaggaggattgctcgaggccaggagttcaagaccagcctgggcaacacagtgagacctcatcgctacaaaaaataaaaacataagccaagtgtggcggcgtgtgcctgtagtcccagctactcaggaggttaaggcaggaggattgcttgagcccaggagttcaagactgcagtgagctatg

SEQ ID NO: 671234 - DNA, 99 bp, Homo sapiens
agtagatacagcaattaggagttgcaacggtctaggcagatcattcaatctatgagcgtagccacatgtaggcatactattacaggcctagatttaagg

SEQ ID NO: 671235 - DNA, 154 bp, Homo sapiens
ttacgcgcagctgtcgaaaactgtataggcaaggggtacccgtcactctgaagaagaatatcaaacggaccatctaacagaactgtactgagcggctcctcttccccactacatcttaacttcacgtggctttacggtctggcaaactttccac

SEQ ID NO: 671236 - DNA, 429 bp, Homo sapiens
agactacgtacataacctatacctactccaatgctataactaatcgctctagcagttatattactaccactgacatgactgtccaaaggacacataattagaatcaacacaaccacacacagactaattattagcatcatacccctactatttcttaacctcaacaacaacctatttagctggtccacaaccttttcctacgaccccctaacaaccacgctcctaatactaactacctgactcctacccctcacaattatggcaagccaacgccacttatccagtgaaccactatcacgagatacactctacctctctatactaatctccctacagatctccttaattataacattcacagccacagaacttcatattttatgtctatttcgagaccacacttatgcccaccttggctatcatcacccg

SEQ ID NO: 671237 - DNA, 901 bp, Homo sapiens
ccatgtgcggcgcaagcaggcaagccccagcacctcaactccgattgtgagccggggctgcgcgccgggatgttgtgcggaggtggccccgcaggtggcggggagccgggtgagtagcgccgtggaagccccgcccgggggctggtggccggtgctcagagtgttctccgtgacccgcgcgggtgcgaggaccgtcgcagggggacctgaaatgggcgggcgaagcgtccggctgcagagtcctgggcactcggacctgggcttccccgccccccgcgctttgtaagttacactctccgtggagtccacctgtcccccttccccgccttggattccgtctagcgcagctcctctcgaaggagcttaagtcaacggagatttgcctcccaaaatagcgctggagggtatgctcaagatggacccctcgagaggcctgttcccggggaatgcgcgggcaccctgagtttccgggctccttggcgcctggggcttctgtgcgtgcgcgccgtggccaggtggctacttgcctttggggctcccgttacacatctgcgttgtccagggagggcctcaccgagtgagcgggacggttcggagccgaaagacccggaaaggattggggagcggcagccgagtcttgtgcatggcttcaggaacgttggattgatgagttgttcccagatgcaaacgtggctcttccagtgaaaaggcaatagaccacttcggtatggcccctgtatcattttcccttaagaggcaagggaacaaattgcgcccgttggagaaagaaggcggttcaacgtgttcctacccagggtgcgcccttccccaatggccatgggctaaaggagtgggagcgcccttaagatcccacgggggaaaagcggcgcagtttgagtct

SEQ ID NO: 671238 - DNA, 377 bp, Homo sapiens
  misc_feature (1)..(1): n is a, c, g, or t
  misc_feature (359)..(359): n is a, c, g, or t
natatatctttaagtggatggttgcatctgtcctgaacatgtatcgccttttttcttgtcattatttcctaaacaacacagtataataactatttatatagcatttacattgtattcattactgtaagtaatctggaaatgttttaaaatgtacgggaggatgtttgtaggttatatgcaaatactacatcatgttatatcagggacttgagcatccatgaattttggtcccccacggacactggaggttgactctctctaggctgtatctctgtcaaaggcccacctacagggacccatccacatgggctggacatagggaatgggcaatgttttctttaggaaaccacataggcctntgggaaagggacatgggt

SEQ ID NO: 671239 - DNA, 2601 bp, Homo sapiens
tacgggcctgcaccgccaccgcacaaagacgcctcgggagccgccgcctgcacccgggccgcagcagccacgccagccggagcccgagccgtagcccgagcccgagcccgagccgcagccagagccagagccggagccgcagccagagccagagccggagccgcagccggaaccggagccggagccgcggggcaggaggcggcgcccgcgggcggccgggcccggcatggagaagcgcgcggccgcggggctggagggcgcgccgggcgcccgggcgcagctggccgtcgtctgtctggtgaacatctttctcaccgggagactcagcagtgcggttcctgccttagcggcctgcagtgggaagctggagcagcacacagagcggcgtggggtcatctacagcccggcctggcccctcaactacccgccaggcaccaactgcagctggtacatccagggcgaccgtggtgacatgattaccatcagcttccgcaactttgacgtggaggagtcccaccagtgctccctggactggctcctgctgggcccagcagccccaccccgccaggaggccttccgcctctgtggctccgccatcccacctgccttcatctctgcccgcgaccatgtctggattttcttccactcagacgcctccagctccggccaggcccagggcttccgtctgtcttacatccgagggaagctgggccaggcatcctgccaggcagatgagttccgctgtgacaacggcaagtgcctgcccggcccgtggcagtgcaacacggtggacgagtgtggagacggctctgatgagggcaactgctcggcgcccgcctccgagcctccaggcagcctgtgccccggggggaccttcccatgcagcggggcgcgctccacgcgttgcctgcctgtggagcggcgctgtgacggcttgcaggactgcggcgacggctcggatgaggcgggctgccccgacctggcgtgcggccggcggctgggcagcttctacggctcctttgcctccccagacctgttcggcgccgctcgcgggccctcagaccttcactgcacgtggctggtggacacacaggactcccggcgggtgctgctgcagctggaactgcggctgggctatgacgactacgtgcaggtatacgagggcctgggtgagcgcggggaccgcctgctgcagacgctgtcctaccgcagcaaccaccggcccgtgagcctggaggccgcccagggccgcctcactgtggcctaccacgcgcgcgcccgcagcgccggccacggcttcaatgccacctaccaggtgaagggctattgcctcccctgggagcagccgtgcgggagcagtagtgacagtgacgggggcagcctgggcgaccagggctgcttctcagagccacagcgctgtgatggctggtggcattgtgccagcggccgagacgagcagggctgccctgcctgcccgcccgaccagtacccctgcgagggtggcagtggtctgtgctacacgcctgccgaccgctgcaacaaccagaaaagctgtcccgacggcgccgacgagaagaactgcttctcctgccagcccggcaccttccactgcggtaccaacctgtgcatcttcgagacgtggcgctgtgacggccaggaagactgccaggacggcagcgatgagcatgggtgcctggccgccgtgccccgcaaggtcatcacggcggcgctcattggcagcctggtgtgtggcctgctgctggtcatcgcgctgggctgcgccttcaagctctactcactgcgcacgcaggaatacagggccttcgagacccagatgacgcgcctggaggctgagtttgtgcggcgggaggcacccccatcctatggtcagctcatcgcccagggcctcattccacccgtggaggactttcctgtctacagtgcgtcccaggcctctgtgctgcagaatcttcgcacagccatgcggagacagatgcgtcggcacgcctcccgccgggggccctcccgccgccgcctcggccgcctctggaaccggctctttcaccggccgcgggcgccccgaggccagatcccactgctgaccgcagcacgcccctcacagaccgtgctgggcgatggcttcctccagcctgctccaggggctgcccccgaccccccagcaccgctcatggacacaggcagcaccagggcggccggagacaggccccccagtgcccccggccgtgcaccggaggtgggaccttcagggccacccttgccctcgggcctgcgagacccagagtgcaggcccgtggacaaggacagaaaggtctgcagggagccactggcagacggcccagctcctgcagatgcacctcgggagccctgctcagcccaggacccgcacccccaggtctccactgccagcagcaccctgggcccccactcgccagagccactgggggtctgcaggaaccccccgcccccctgctccccaatgctggaggccagcgatgatgaggccctgttggtctgttgaccgctgggctcgctggtgaccgccacagccccgctttgtaaccagggaatacacagtcattt

SEQ ID NO: 671240 - DNA, 100 bp, Homo sapiens
cccgctgcctgtcaccaacgggaagggccggcccgcctccctggccggggcgcagttcggaggttcaggcaagagcggtgagcggggcgcctatgcctcc

SEQ ID NO: 671241 - DNA, 161 bp, Homo sapiens
cacgaggaggtttcccgatgacaactccctcaaagactgactttcctgttcattgactctactgaaaccgtgtaaagattttgaagtggccaatcatatgaaagatttcgctgcgaagctgtctttaagacacatcccaccacctggaccgcaccatttgg

SEQ ID NO: 671242 - DNA, 199 bp, Homo sapiens
ggggggggggggggaaaggtttggggcaggggtcatttaagatattgggcaccagtttcctcctcatgtttatcctgttccctttgcttgaaaggttggtactccagatccttgtaaaaccgtttttccccctttgagtttcaggttaaatgtcccctccttggaggggttttccctgacaatgaagctccgcccgtca

SEQ ID NO: 671243 - DNA, 158 bp, Homo sapiens
cctgtggtaacacgcacctggccaggtcttcatgggcgatgtcggcgccctggccctcggcggtgccctgggcaccatcgcggtcatcacccggcaggatgatcctgctggccgtcatgggcggcgtcttcgttgccgaagcgctgtcggtaatggcg

SEQ ID NO: 671244 - DNA, 373 bp, Homo sapiens
  misc_feature (21)..(21): n is a, c, g, or t
  misc_feature (66)..(66): n is a, c, g, or t
  misc_feature (84)..(84): n is a, c, g, or t
  misc_feature (133)..(133): n is a, c, g, or t
  misc_feature (164)..(164): n is a, c, g, or t
  misc_feature (211)..(211): n is a, c, g, or t
  misc_feature (371)..(371): n is a, c, g, or t
cccaattgtgaaaaccccagntaacattttattagagctaccaggttatgtgaaactgttgatagntttatcactttcctttcnagatataggcaggggcagtggctcatgcctgtaattccagcactttggnaggccaaggtaggtggatggcttgagcccanaagttcaagaccagcctgggcaacaaggtgaaaccctatctctaccnaaaatacaaaaattagtggggcatgatagcatggacatgtagtcccagctacttgggaggctgaggtgggaggatggcttgaaccctggaggtggaggttgcagtgattggagatcgtgccactacattccagcctgggcgacagagcaagactctgtcncc

SEQ ID NO: 671245 - DNA, 320 bp, Homo sapiens
cggctacggagagtgtggtcacacagtcgtccggaacagctgatgctctcatgcatgtttcagtgttattttcctcaaagcgagcatataagtaatttagctcatctggtaggcttgtgtcactgggcagctttccgctgtcttcccgttgtagtctgtagtagtttgcaagccttttccaaaaacaagctcgaaatcatgtttgatgcactctggatgtatttatttttgctgtactgtttattcaggatgatatgaacattgtggacaatttcagcaaatttcaacattgaaatacagaaataaccacgtttccaaaa

SEQ ID NO: 671246 - DNA, 474 bp, Homo sapiens
gctaaagggcttgacctggctggttgaaaaagtgaaaaggaaataatccggtaagattaatttttcccttcctttggtaagatctccccagctttaaatgaaaattaaaatgggcaagagaaggaaacctctcttcccgtttgcctaaggtcttgcttgcctggctaaaatccttcattcacctttgagtttccatatccctgctgttaacaaataatgcaggtttgtttatacatgtggaactggtggattttcgtcattaaaactgttaccaattggtaacacaagaaaagcacaccacaattctccctatttaatggaggttgtttttttttttttgctttaattcactttttgtttttgtttttgttttttattttgtaggctttctgaaattcatggaagcctaggtgggctggggcaagcagaaataaaaatgagagaagggagatattgtttggatttcctttatac

SEQ ID NO: 671247 - DNA, 195 bp, Homo sapiens
gaggtagtgattgacgtgaatcgcatatgtcatccccttaaaggtcggtaattcactcaagtaacttgactaagtatacagaggcataagtgtgccaattctccggggcctttgatttacgggagagggcggattcaggacgggcgatagggcactgaacgtgcaccgaagagaggggagcagttccacttaggc

SEQ ID NO: 671248 - DNA, 1693 bp, Homo sapiens
  misc_feature (200)..(200): n is a, c, g, or t
  misc_feature (209)..(209): n is a, c, g, or t
  misc_feature (217)..(217): n is a, c, g, or t
  misc_feature (220)..(220): n is a, c, g, or t
  misc_feature (276)..(276): n is a, c, g, or t
  misc_feature (499)..(499): n is a, c, g, or t
cggggagtagggcataccgctgagtctcccctggatgctatctcgggtagcagcgaggcgatgatatgcctgcacgggcatggctgacctcggtatacatatgtaccgggcagatgatggcggcacggatagcgtgccatacgcttgtaatactcaggccatagaagaggcacagggtggtgtacacgcgtcttgtatgncctacacgnttctcaantcnctctattaccggatagacgcgttaagctagttgagcatgggcgccttttgtagaancgacacaccgaaaagcaacaaaaaacaagatgttagatacctggttgtcatatgcacgtcgtgaacacgggaaatagagaggacaagactggagattattgctaaggctaacgtgggtcgagttggcatggcctgcgctgaatagataaggttgatacttaaacagtatatgcacgacgtagaggcgtctagtttcaggataagcctccgtgtacgtaggacntaaattacatttgggtacttgggagggtttgcatagagatatgtacagatagagcgaaacacatagggaaaactattaaaggccataactgggcatatgtatccaaaagaagagccaagttcctagttttccgattccagatggagcccgagagttatgcccaagacttatggcatgcccacagaacaagtttctaaggttctcattggagacctatttcttataaccaaaacgagtttctagaacaagagccaaaagctatgttgtttaggaacaaagacaagcgttatggtgtagggcttaggggttaacttgtgagggaaccatctttgtgtttaatctagtcatagcacctttgcttcttaataaggcaatacttgaataactatattaacttacattactttggacaatgttttggcgataacattttttttttataccccctttatttttcgagggcttctatggcattgagatggccattacgggaattcataatggctttggtggaatttgtctcccgctacactaaacccaggtttaaggacaggcgtaaatgcgttcacattttctaatccttatataacacagggaatctccaacagaggggggacatatcgcgagtgcatgggtaaggggcaacaattatatatgggcaaccaattttctatgggtgttttagcgccgtatggggaaggggatttgtggtaagataatgataggcgagcaagagaatatatggggctgtgtgaaaggatgtttttttaccacacccggtaaaggagttccgtaacagtggttcttattttaattttcgccgctgcggcgaatttccccgttggcgtccgctgcaaaacaatgcgtggttggttttcactcccggaaggcgcctttggggcccattggggtgttaatcccactaaatcttatcctttcccccagatgttccgctttctctcatcttttcggacaccgttttgggaacctaaccgggttatacacgcgacagggaaaataggaggcggcgtgtctactgttcacagcgaggcgtagacacagcgaggaaggccaattatagatttttaacttcacccccctttaactagagaggctcgctggtaattacaggagcgtgtagcgcaccccttcacaacggccgcaggggctacacagcaaatcccattcggcacc

SEQ ID NO: 671249 - DNA, 1656 bp, Homo sapiens
tgtatcaatgctggtggacgggtagtgtgtggactctctcaccgcgtgcgggcgggttgtttctcccgacgacgctgcgtgtggcgtgcggtggctgactggcgttctctgggtgttagtcgagcgcgtgtttctgctctcgggcggtattgtcggtggcgctgcccctagttcttgtgtgtcgagcgtgcgggcccgtgcgcccgtaggtaggcgcgtcttcctgcgtggggtttctctcgtggtgaagctcgcgatgcttgttgggacgaccactctgtgtcgctcgtctggtctatctatagcgggattttttcctctgcccggcgggggctgctatatttatcttgtgggaattttttgcagggggagcccccttttgtggtgggtgggggccccagaagcgccttgtgggggggcccctttgtgcccttggcacccgttttggttattggcgcgacatgtggccctgtggggggccaccaccgtggtgttatttatgccccggcgaatttccaatggggggggccgacgatgaatgtgtgcccgcacctgtgggaggagatcaaagttgttggggttacaagctggtgtatcccttttgggggggacctgtgttcacaaaaggtcgggcgtttataaccggcccgggggatgttccccacacaggtagggtgtgggtggggtgggtagcgccctgacaagtgtgtgttcccacgggtgatatggaaaccccccgctgtgtggtgaagagcacccgctgttgggccttggggaagcctttccaccctggggggaggttttatgtcgaaagggttccccccctcggtggttgtgtttatagccgtgttggccgcgcgtggtggggccccccccgggcccccgcggtgcccgcttgcgggccgcctctctcgtggggcctggcgccacagtgttctctcggagaggagtttctttaaaggggactcacgcccgccagcgcccccctgggactgcctgggcgcaggtggagccccacgctcgcccccagggagctgcgggcgttttttctggagcgccctcttttctggggggcgtgtaaaatatgtggtgtattgcaagatgttacccacgttttctcagtgccaccacgtgtagtagctatgttaattctccttttgttaacttctttgtagattgtcacctttggggctattctgttgtgtattcttctttaaactcactatatttggtggttagacaattttagacggtaatttatattgctgctgttgctttggaaggtattgcccccaaaggttattggggcttggccaccccccacgggcacaccacgtttttgggagggttagggtggtcactaaagaggttgcgagttaaggtgcacccaaggactgctctttcctgactcggattaatgttcgttattcccgcgagtgggttatgttatacactaaagactgacttcgttacccaaaccctttggccccctcttgattcttttgctctcacataactttgttgccctttcacctctgccctgggatgatctgccccaaagtcctcatcccgatccctgctcttggactcctggcctgccagaaccccccgccccaattaatttctgttccattattaaacaaaaaaaaaaataaa

SEQ ID NO: 671250 - DNA, 102 bp, Homo sapiens
gacccactgtgtctgtggtactacctgtatggcccaccataattacccccatactccttacactattcctcatcacccaacctaaaaatattaaacatgtgt

SEQ ID NO: 671251 - DNA, 896 bp, Homo sapiens
  misc_feature (31)..(31): n is a, c, g, or t
  misc_feature (72)..(72): n is a, c, g, or t
  misc_feature (90)..(90): n is a, c, g, or t
  misc_feature (103)..(103): n is a, c, g, or t
  misc_feature (132)..(132): n is a, c, g, or t
  misc_feature (136)..(136): n is a, c, g, or t
  misc_feature (145)..(145): n is a, c, g, or t
  misc_feature (148)..(148): n is a, c, g, or t
  misc_feature (150)..(150): n is a, c, g, or t
  misc_feature (161)..(161): n is a, c, g, or t
  misc_feature (163)..(163): n is a, c, g, or t
  misc_feature (167)..(168): n is a, c, g, or t
  misc_feature (176)..(176): n is a, c, g, or t
  misc_feature (178)..(178): n is a, c, g, or t
  misc_feature (182)..(182): n is a, c, g, or t
  misc_feature (186)..(186): n is a, c, g, or t
  misc_feature (188)..(188): n is a, c, g, or t
  misc_feature (196)..(196): n is a, c, g, or t
  misc_feature (201)..(201): n is a, c, g, or t
  misc_feature (205)..(205): n is a, c, g, or t
  misc_feature (209)..(209): n is a, c, g, or t
  misc_feature (232)..(232): n is a, c, g, or t
  misc_feature (234)..(234): n is a, c, g, or t
  misc_feature (239)..(239): n is a, c, g, or t
  misc_feature (257)..(257): n is a, c, g, or t
  misc_feature (260)..(260): n is a, c, g, or t
  misc_feature (264)..(264): n is a, c, g, or t
  misc_feature (271)..(273): n is a, c, g, or t
  misc_feature (275)..(275): n is a, c, g, or t
  misc_feature (277)..(277): n is a, c, g, or t
  misc_feature (285)..(285): n is a, c, g, or t
  misc_feature (290)..(290): n is a, c, g, or t
  misc_feature (294)..(295): n is a, c, g, or t
  misc_feature (298)..(298): n is a, c, g, or t
  misc_feature (308)..(308): n is a, c, g, or t
  misc_feature (310)..(310): n is a, c, g, or t
  misc_feature (320)..(320): n is a, c, g, or t
  misc_feature (349)..(349): n is a, c, g, or t
  misc_feature (358)..(358): n is a, c, g, or t
  misc_feature (365)..(365): n is a, c, g, or t
  misc_feature (372)..(372): n is a, c, g, or t
  misc_feature (374)..(374): n is a, c, g, or t
  misc_feature (378)..(379): n is a, c, g, or t
  misc_feature (381)..(381): n is a, c, g, or t
  misc_feature (398)..(398): n is a, c, g, or t
  misc_feature (402)..(402): n is a, c, g, or t
  misc_feature (404)..(404): n is a, c, g, or t
  misc_feature (406)..(406): n is a, c, g, or t
  misc_feature (408)..(408): n is a, c, g, or t
  misc_feature (411)..(412): n is a, c, g, or t
  misc_feature (424)..(424): n is a, c, g, or t
  misc_feature (427)..(427): n is a, c, g, or t
  misc_feature (431)..(431): n is a, c, g, or t
  misc_feature (449)..(449): n is a, c, g, or t
  misc_feature (454)..(454): n is a, c, g, or t
  misc_feature (457)..(457): n is a, c, g, or t
  misc_feature (463)..(463): n is a, c, g, or t
  misc_feature (473)..(473): n is a, c, g, or t
  misc_feature (488)..(488): n is a, c, g, or t
  misc_feature (637)..(637): n is a, c, g, or t
acaaaatactaaaaacaaataaaaagacaanataaaaacattaaaaaataaagataaataaaaacaaataanaaaaaaataaacacacanaaaaaagaaaacnaaagttgtccacaaaacattctcctttcnttcnaaaggtttnacnangcattgtaatnanaaannaatctttnanaaanaaantnaaatagcnaattnaaanaaanagttctaaaaccattcttccacnantaatnaaaaatggggtggcaggnatnaggnaaaaaannnantnaaccttcnaaacnttcnnaanaaaattggtnancttgcaaacncaaaaagccttcttgtccactgctttaanaaaacccancgaaaanatatgtntnaaannanaaaaaaaaaagcaaccnaaangngnanaanntaaaaagctctnaanaaanatgggcttgcaaaaaacnatatnaanaatggnagcatacacnaaaattcaagaattnaaaaccatcttccagctttttaccagaacggcgatcaatcttttccttcagctcagcaaacttgcatgcaatgtgagccgtgtggcaatccaatacaggggcatagccggcgcttatttcgcctggatggttcaggataatcacctgancagtgaagccagctgcttccattggtgggtcatttttgctgtcaccagcaacgttgccacgacgaacatccttgacagacacattcttgacattgaagcccacattgtccccaggaagagcttcactcaaagcttcatggtgcatttcgacagattttacttccgttgtaacgttgactggagcaaaggtgaccaccataccgggtttgagaacaccagtctccactcggccaacaggaacagtaccaataccaccaat

SEQ ID NO: 671252 - DNA, 260 bp, Homo sapiens
ttcaaggacgactcagattgtcagaccctgatacagccgtcagaccccactcagacgcagttcggaccctgatacagccgtccaaaccgcgggcaagattctttcagaccttggatcagagacgtgcagactcctctcagagtctgttgcatgagccctggcttgaggcgtccagacgccactcagacgcagttcatgaccctggatcacagccgtccagaccccactcagacgcaggtcgccggcttagctgcagctcg

SEQ ID NO: 671253 - DNA, 208 bp, Homo sapiens
gtctagaggatcccgaaaatgacatagaggcaggtaactaaaacacctcttagtctaggtagacactttcactggataggtacaggcctttcctacagggtctgagaaggccaccacagtcatttcttccattcgttagatataattcctcagtttagccttcccgcctctatacagtctgataacagatgagcctttattcagtttt

SEQ ID NO: 671254 - DNA, 211 bp, Homo sapiens
aacgaacgtttagaggatcccgcactgtggctccaggactgtctccagttctgacctcatgatgtgtcacttcggccttccaaagtggccgctaagtggcccacttcgtgccaaagtgcacttcggccttccaaagtgcattaccggcgtgagccaccatgcccggcctggcctttttttttttttttttttttttttttttttttttttt

SEQ ID NO: 671255 - DNA, 165 bp, Homo sapiens
gcatcggctctactgccacaggaacagctcaccactgggcagttggcaccatagaggatcacctccgtccttatatgccagagtagagtactgactagcaaaatggagaagatcagagaatgcagcagcacgttttttatttcttggttttctgtaccacgttta

SEQ ID NO: 671256 - DNA, 674 bp, Homo sapiens
  misc_feature (427)..(427): n is a, c, g, or t
  misc_feature (433)..(434): n is a, c, g, or t
  misc_feature (439)..(440): n is a, c, g, or t
  misc_feature (509)..(509): n is a, c, g, or t
  misc_feature (586)..(586): n is a, c, g, or t
  misc_feature (674)..(674): n is a, c, g, or t
cattcttctaacatatatttgtagaaatctgatgattatgtccaagaatggattctaagggccttagaatttgatttgactgggccaaatttatcagtctaggtgcacttaagagaaactttgaattcagtggtttacctagagcagctggaagtggctctatttggttgaagaactaaaatcttggaccaaaaaaatggcctcctttaaacagaattgctttccagaatataaaagaaggaatccaaagtcttagataagaatgccagaatggatttattgtgacctgctcccccatcctctaactctagtttatgagattcctgaggatgctttgttatatcaggcatcgaaaaatacatttccaaggagagcaccagcatccttggaaggccctgctggcatcgtctgtaggctgggggtgtgnagcacnnacccnnctggtggaaaactgatcacagttgacccattccctcatggagtagtcagcaattttccatcacagtagnagatatttatttattctgtctatggatgtgtctccgaggcccacaaggcctttgctgctcatcacacaaaacttccncaaatgcctgattatcatcacaatgtttttgctttggcattacttcttacaaactgtataaaacgcgacagattaaaatgccacagcn

SEQ ID NO: 671257 - DNA, 1380 bp, Homo sapiens
  misc_feature (905)..(905): n is a, c, g, or t
gtctaggatacgacgtgcagaaatggcacctcgtaagaggggaaggacaagaacgaacaacacgcgtcatcagccgtctgacctcaggtggctagactcgagaaaatgtactctggtggtctgccatatcttattgcattccttcaatgtacactctatctgtccaatgatcactgactcgttatctggcagaggcacaactcatcgtgtcctgttgttgtacatggttgggattgaccgtaatagtgcatgaccgtatgactcgaattccgtcacctatatgcatgcgtatgttggcgtgcccgaggaatgtgcgtcgcaaagtgtgctagagggacgctggcgtatcaactctgaccgtactactagtcaagagcatcctgaggcctactaaggaatgcgataataaggaccgatacgagctgcatgtgtaaccctggggggggcctcaatgttcctgggccacattccaaaggcaggctccgcttcttgcacccggacttactgggccgttaattggacagggaagtccagtgtgccagagtagttgaggtaccggggaattagattcaacccccaaccaagttaccacgcattcgtgacactaggtcaagcgtacggtcgagggcaaaagaggaaacggtcccgcgctccgtgatggggaatcagaactccgagggctcttgagtggcaagaccttacagaataatctcccttctcaaaatggataactgaatatattcgctttggcttctagaataagaagacatttcggcgccatttttccagtggattcatcgacacaccaattaatccatagggacacacaaaatcgggcgaatgggtgggcacaattgcccaacactaaaagagtagatttatgttccctcacgtgcgaagagggnaggcgccaccccaagttgtccctttaaactgcgcgtgttctttccccacgaacggttgtctctagtggcgtgcggttaaccccaaacaaggctgaggaggttggcaccgcaaattatgtggacggaggtcggcaatgccgtacgggagatttagtatgggaattacagaccgccccacttaagtgacgctcgacacacttttgtcgggaccacttacacacatggtaatatcactttaccccaacagcagtgtacatgggttgcacgacccttggggtgaagcaactcaaccatcgtgttggccatcagcggcacccattatcggctggcgaacattgtccctcagagggcggcgtcacatttgtgtgagcactccgttctattaacattgctcccttggtgagagacagtcggaggacagccgacaaaaatactttgtgggcccaggcaaatactccatcacgcagtcaacaga

SEQ ID NO: 671258 - DNA, 1028 bp, Homo sapiens
gcactggtcttgtcctcttctccagacgatggctgtgtcttgaaagtctaccctgcgaggctcctgttttggcagcgtctgacagtgacattgacggtgctgagctccccactggcgtttggctggggacacccaagccacgtttgcttgagagcaggctaacgtgtgagtgtcatttcctcaactgggacggagcgagtgtggaactctgtatcatgatacatctataaccaacgaggagtacgcgctgcatagaacagtgacctgaggggagtacctagggcgagtgatcggagctggggctgtgcctgacgctgagtactggaacagccaaaagggaccttcctggagcggaggctgatccgaggctgtacacctactgtcagatacaactacggggttgtggagatcttcacagtgcattgcggctgattccaacctaacggtgactgtgtatccttcaaaagatccagaccctgtagcacgctagtaacctcctggtctgcgtctgtgaactggtttctatccaggcagcattagacgtcccggtggttcccggaacaggtcaggaatgagaaggctgcggtggtgtccacaggcctgagtccagaatggagcactggaccttccgagaccctggtgcatgctggaactcacgttcctcggagtgcagaggtttacagctgccaagtggtagcatccagtctttgatgagccctctcacggtgcaatggagttgacagactgaatctggccagcattcaagatgctcgagtaggagctcgggggctttgggctggggcctgcctttccttggcgacaggcctgttcatctacttccgaatccaaaggcccctctgggactttcagccacaggactcttgagcttgagtgcgataaccaattcaagaagaacttctgcccagtttgccgatgaaagttcccactgggtctatcttcccagaagttggcgcgaccggtgtacttggtagcatctcgaaatgtccccctgtggctctaagtcggtg

SEQ ID NO: 671259 - DNA, 105 bp, Homo sapiens
ggggggggggttttaacctgggcatttttcttgggtccccggggggccagggggggtctttgctccagaccccccagtttgggtaaaaaaaggccctcttgggta

SEQ ID NO: 671260 - DNA, 149 bp, Homo sapiens
tagacagtgggatgaagggtgcgcgactgatatacttacaacgatcgtcaacgatgtgatattggtgtttgatcccaaagagctcagcaaagattccacgaagtcagcctctcccttgtttgcatacagttgattgaacaggatcctgg

SEQ ID NO: 671261 - DNA, 153 bp, Homo sapiens
tgagaatccaaaagccctaacagactaaataggctgccaactaagccggtggttcttgccactctaaacggttcctatctggaatgcttaaggctcattgaggatccctcctaactctcttttccctctttttttccatttctcctgggatga

SEQ ID NO: 671262 - DNA, 270 bp, Homo sapiens
ggtaccctgatgttatcgccccacacagataatggaaaattactttgattcttcccgagtagatacattactgttaaatccctgggatagtttaattactgttaactatcttcctatcttaaaaatgtttacaggtgttagaagaaaattcttgccttcttgctagtgtttttacaggtattggtgcttctgccactcaaaagccttttttttttttctgagaagtgctttgaaaggtgtgttggggataacgtcacgtgaactctaagg

SEQ ID NO: 671263 - DNA, 186 bp, Homo sapiens
agcgcgaaggctccggtgtttatcagtgccaggctctccggttcagcgggcccggtcgtggtgatgcagcaccgttggccgcggatgccagaagcagaacgctacccatagcgtggcccaggcgtcttgtcccgccaggtggtactggtgtgtacaggccgcagatggggtactcggccgtgaacg

SEQ ID NO: 671264 - DNA, 243 bp, Homo sapiens
  misc_feature (2)..(2): n is a, c, g, or t
  misc_feature (68)..(68): n is a, c, g, or t
  misc_feature (75)..(75): n is a, c, g, or t
  misc_feature (79)..(79): n is a, c, g, or t
  misc_feature (91)..(91): n is a, c, g, or t
  misc_feature (99)..(99): n is a, c, g, or t
  misc_feature (102)..(103): n is a, c, g, or t
  misc_feature (106)..(106): n is a, c, g, or t
  misc_feature (115)..(115): n is a, c, g, or t
  misc_feature (117)..(117): n is a, c, g, or t
  misc_feature (120)..(120): n is a, c, g, or t
  misc_feature (130)..(131): n is a, c, g, or t
  misc_feature (136)..(136): n is a, c, g, or t
  misc_feature (139)..(139): n is a, c, g, or t
  misc_feature (142)..(142): n is a, c, g, or t
  misc_feature (144)..(144): n is a, c, g, or t
  misc_feature (150)..(150): n is a, c, g, or t
  misc_feature (153)..(153): n is a, c, g, or t
  misc_feature (157)..(157): n is a, c, g, or t
  misc_feature (165)..(165): n is a, c, g, or t
  misc_feature (169)..(170): n is a, c, g, or t
  misc_feature (210)..(210): n is a, c, g, or t
  misc_feature (216)..(216): n is a, c, g, or t
  misc_feature (232)..(232): n is a, c, g, or t
  misc_feature (235)..(235): n is a, c, g, or t
  misc_feature (239)..(239): n is a, c, g, or t
anaaaagggggcgcgctgctccatgatcgtgcacagagcgtgtggtactaataactctcgaacctacngagagangccnccccccccagcntcccaaantannggntacatacangngtnttcatcgcgnnccccnccntcncnatacanagngctntcagcccngganncgccggaccggccacgcagctctgcttttcctacaacccncgttcntgtctaatgctgccanctnacanaggc

SEQ ID NO: 671265 - DNA, 335 bp, Homo sapiens
  misc_feature (187)..(187): n is a, c, g, or t
ggtctgacctcccctgcagaattttttttccttcttaaatatcaggaatataggccgggtgcggtggctcacacctgtaatcccagcactttgggaggctgaggcgggcggaacacctgaggtcaggtgttcgagaccagccaggccaacatggtgaaaccccgtctctactaaaaatacaaaaaanaatgagccgggcatggtagcaggtgtctgttatcccagttaggaggctgaggcaagagaatctcttgaacctgagaggcggaggttgcagtgagccaagatcgcgccattgcactccagcctgggggacaagagtgagacttagtctc

SEQ ID NO: 671266 - DNA, 866 bp, Homo sapiens
gcccggtgggtgtggttcgccggtgtttaactttgggtggcaagggatgtgccgcgtcgtttgattttggcgccgacgttgtgttgtttggaccgagaggtgggtgcgcgggaggcactgttggtgggtgaagacgtgcgttccccgggggtgccgcccccccccgcaggtcgtttttgtcagggcgggttatggagcctcatgttcggcgtttccggcgcgacacgttggttgcctggtggtgttgcccctgggcccgcactttattcttctggcggggtgcccccccacggtgggccgggtttaaccagcccggggtgatttctctccatatgctcctccctccatagaacctactaagtttgaaattatttcaccacccccacgcatcagactcaagttcattcttcctttgatgggaacaaggggctactcacccagcctatctttgcccccaccgtgcaaaaccgaatatcatgtcaaaccaccacttcgtacgcagacaccatgtttgacgcataaggatactattctctgcgtcgtttgtaagacatatcctagttgttgctctggtccccgtgagaataaaaaaatgtatcttaatacacactatgtgttttccacaaccacataatgtccttgtagatgtttatcccacgttcctgtagtagaatatgaccctcccctctaaatcacagcgggtaacacacacattcttgcacaccacttcctgcttaagcactactgcccccctcctgataccctgacaaatgtttaataataatggacacccattttcactcaaactcaataaaaatgcacaaaatctttcacaggtgtaacctgttttctctttcaacaaaaca

SEQ ID NO: 671267 - DNA, 194 bp, Homo sapiens
  misc_feature (194)..(194): n is a, c, g, or t
agcgaggggtaccgaggccgcccctgaatgaaccggttcagccaaacccacggggtatgcggccggccccggacgggccgagacgcgcccgacaggcgaagccgcggacgcgcacacaggacggcaggccacgacacacaacgaaaccgggcaaaaccccagagggcgccgccgggtagcgcctcggcaacggn

SEQ ID NO: 671268 - DNA, 228 bp, Homo sapiens
  misc_feature (215)..(215): n is a, c, g, or t
gggacacttggagcaggaggacagcagttccaagaaaagaaagcttttataggaaaggcccagtacatgggccagcagccacagcatattgtaaactgaggatgaccagcttcgtgggaccatcttggataagcttgttttttgtaagggagtttttgtccttggaaaacatggaaaatgcatccttaacaccttagcctgctggtcatcttcantattttctgtcat

SEQ ID NO: 671269 - DNA, 125 bp, Homo sapiens
ccccactaatcgtggattgggtcagaaatcacagagggacttagtatcccattaatacaaatgggaaacattaagtccatcatcagatgataagagggaaaaaaaaaaaacctgtattactcttc

SEQ ID NO: 671270 - DNA, 274 bp, Homo sapiens
atttgccaacgttagctttgtggcgaaagacggcaaactgaacgaccttaaatcaaaggcgaaccggtcgatccggcgaaaacttaccgtatggcgacattaaacttcaatgccaccggggtgatggatatccgccgccttgataacaaacccgggctatgtgaataccggctttattgatgccgaagtgctgaaaggctatatcagaaaagctcgccgctggatgtgagtgtttatgaagcgaaaggtgaggtgagctggcagtaatccgaaa

SEQ ID NO: 671271 - DNA, 283 bp, Homo sapiens
ccttctccctcgtgggcagaagcatcagacttcgcagatcagtccgataagagggacactagaggaggcgaggaagacatactaacaaaagtagaattcagctgagagctagtaggagctctgaggtgtctcctcccctagatcacgcacacgagagagatgctaaagaaagcattaaattccccacagtgaggaggaccagacggggttggggggacactggacgggacggacaaagctcctaatggagagaagggtgcacgatacgagtttacaagtcctg

SEQ ID NO: 671272 - DNA, 817 bp, Homo sapiens
tgataagatgatttctggcattattgttggtagcgttttatttttcccaacattaatgtttcttaaaacacttttcctactatgtttgacatgggaactttcgcctgagtcactgtcatggttagctttgttgttgttgtttttgtttctgtttgtttaaacaatactaccttgccaaaaatagaagaatgtgatttggtagagtagggttgtttggtttgtgtttgaataagagtatcctacagaagccacttttttttttttggagatggagtttggctcttgtggcccaggctggagtgcaagggcgcaatctcggctgactgcaacctccacctcccgggtgcaagtgatttgtcctgcctcagcctcctgagtagctgggatatacaggtatgtgccatcacgccgggctaattggtataacaggggagatggggttctccatgtgggtcaggcgggtctcaaactcccgactcaggtgatccgcccgcctcggcctcccaaagtgctgggattacaggtgtgagccaccgaacctggccagaagccataactaaaataaggcacacttgacacacgcatgtggttaatagctgtgtctgtgaaattatcctctagattaacccaatttcagtggttgtatttcgcacaggatctgggccttcagaagctatcttatgatccctggcggatatactcttagggcgatcctgaaccaggaaaagaacacttgcgttggaacatggggtctattaccccaatgtgccgtcttttggatacagcttttgaagattacctcagctgaaagggaatg

SEQ ID NO: 671273 - DNA, 884 bp, Homo sapiens
  misc_feature (884)..(884): n is a, c, g, or t
gagcagtcctagaagctgtccaaggtgattgagagatgggcggttcctttgattcggcattacatgcgctctgtcacttaaagacagaacgaacgatcctgctgattaggcttcctggctattcatgactcactttgaggctgtaactaatgattaagtcatcacgacgactgagcaaggagactcagacgagacctcccgttcagaccacattggacagacaagggtggaagaccgcaacgtaaagtactcgatgccttgcgaactagtcagagattaacggcctgacaagagatccctattgccggcctcattatttactgtccaagtgacgccacgggaataaccgaaacaatgtcgatttactatagtgacactaagacccaagcgctttctatcaacgataactgagatctctaacacataaagggaacacaaaactagtgagtcgggcagctatgcgaacattcgcccactttggaagagcaatcgttaactaggcaacccgcattagtattgtctgtgcacaaccaggaagagaccccctaaattggtcgtaaatcccatggcgccgttgctggcgtttacttggagatctcccttacaataaggggaatattcaccctcctcagaattcacccggtatgagaacgaccccagagtaatcccattaaacaaggcgtactactttactgtggaattaggagagattcgtttgacacctaacacccatgggtgacaggcgcccgataaggtcacttcggaacctgtaatttaggtagatttaatctggtgcttaacctcatattgggtcccaaatataaacagaggtcttaccaagggcaattttccccgcccacttcaaaaatcgctaaaagaaactn

SEQ ID NO: 671274 - DNA, 509 bp, Homo sapiens
tcgaccctccagctccaaagtgctgggatataggctagacgcactgcacctgcagattgctttataattgtttgtttacacttctctattcttcccagaggctagaaaccatgtcttattcatttttaccttacctgtgtgaaacatttgagggaaggaaatcggtaggatgtgagggaataggtagggattgagtaaaaaatggcccagattttgagtttgagtgaccaggcgagtgatagtgtgttatatatacaaacatctgagttgcgggtttggggtgaagagtttaattttggacatgttggagtctatgacaatgtgggaagaccatcccagtcaacaaatggcattgggaggacattcgagtggctgttcaataggcagttagaagtggtgaattatatcctggagctgttgaaggatttgggcatcatcttcatgtgattcatcaggtgaatcagatctttgaaaaggaaagtaaaaaatgaagctaatgaggaatgcct

SEQ ID NO: 671275 - DNA, 1284 bp, Homo sapiens
cccacgcgtcgtgggaaggccgcccagggacgaggcggagtgccccgtgtggggatggcctgagcaatggatgggaccgacgaccatccatggcccactacaagagcgcccacttggaccacctggcacccaggagatgggctccatccatgatcagatggagaagcccgagcaacacctcaggaccagacgaccaatgggacacgatcccaaaccgcgatccaaaccaacaccacgaacaagacacagaagactaggagaaggtcagggaccaagtgcagatcccgacaagacggtacacgaggcagcatccaacctgagacggccaccccgcaagcggcagaacgccaacaacaagtccgcaacaaaacagcgcacaacacggcagagaccacatgggagccagaagcacacaacagacacacaaacgcaagcgctcacactcgcaccaaaaccaatcacgaacgaacacatcaacgcgaagatgcaggacacacacgaacgcaatgcgcaacgcaagcgaaaacgcatgacaacaaacacaacaaaaaaagagagaacaaccgactagagacccccagcaagaaagacaggccgcagacacacaaaacaaagcagaagacacagagcaacacaagagaaacacagacacaccaagagaagacacaacacagaagacaacaagaaagccaacaaaagacacaaaaaagacgaaaaagcccagaacaaaaaggaaccaaaaccgatcaccaaaaagaagacacaacacacacgaagaccagacgaaaaaaacaacatgaaacacaacaacaacaagacaccactacaaacaaaaacaccaagtgcgaaaacgacaggaaaaaaaagcacacaaaaaaacgaaacaaaaaaacaatgaaaaagcacagaagaaaaagaagacaagacgaacaaaaagcaacaccaaaaaaagggcaaacgacacaacaacccaaacaaacagcgaaccaaacaaacagaaacaacaacaaaaaccagacaaacacaaaaaaagagaaataaacgaacaaagagcaaagaacacagagaaaaacacaagcgacatcgagcagaaaaaacgaagaagcgggcggaagaagacaagaaacaaaatacaacacaaaaaaaacgaacacaccacgacacaagcagccccacacgacggacactacaaggaacgtacagcacacgaccaccacgccgacaaccaagcacagccgaccgcacagaaaaaatcaaacataaacaaaaacacgacacgaacat

SEQ ID NO: 671276 - DNA, 200 bp, Homo sapiens
atcatgtgcacacatctcgtcgtccacatttctgacgtggatgtccagagcgactcagacgcggcgtgtggctcctgtgcttcaaggatgtgactgtcatcatcttctgtggtggccaacaacaacttactacatgtgctcatcggtggaggaccagcataccaatctcggctggctggatcgctctggaacctcttcag

SEQ ID NO: 671277 - DNA, 218 bp, Homo sapiens
gccaatcttcacatcattcatttcgttcccaacatcttccacagccgtcaggtacacatctagtgcgtctcaaccaccaggctttgtcaaaccacagcagcactcatttcattttccacagggttttcatccagcatatttccacatcccagcacacatcacatgttccacagccatcacgcacatttcatcacctcacacacacacatcatgtcttg

SEQ ID NO: 671278 - DNA, 109 bp, Homo sapiens
  misc_feature (105)..(105): n is a, c, g, or t
agatacgacacacatttagcgacccctgttttttccacagagcttctgctgtatccctcctttactctgacagtgtcttcgtgtagctcatgtaaagtacttacntgcc

SEQ ID NO: 671279 - DNA, 738 bp, Homo sapiens
  misc_feature (488)..(488): n is a, c, g, or t
gcccgggggccgttggccgccgcggactgcggctgctgctgccgctcctgccgctcctgccgctgccgcaggtgggtcgggcggcgttctctctcggttcggccaccgcggggcgggtcctgctcgtgaccacgcccctcccgggctcacccttgtccccacaggtgtgcgctgggcttctgcggacggcagctgcgaccctcggaccagtaatgtcggggtgtgagggagccggggcctggccccgctcctatggggaggcacggggctgcgagtgtcgggcgtcccatgcctccgcctgctccatgtgccgccgtccccacaggtgcccgccccaggcccgctgtgagcatgctgtggcacgtggggtaagtggaggccgcggcggagccgtgcgtccgacggttctggggcgggggtcaccgtgggccatggtcccgtctaggccccttacctcatccagtgccgtgctccgcttgtcgccccangtcccggaccgtcttggccgggaactgaccttggagcaagctagtgaccttccctcccacctctcccgccttggtctccggcgggagtcccctacggatcccggctcagcatgttggggcacttcgctttgaggacaggaagtccgtgggaagttgagcctcgaagggcaccctggtcgagcccagtgagagatagccagggtaggcccagaatcccgaggccagggctctggccatggcggtcttacga

SEQ ID NO: 671280 - DNA, 405 bp, Homo sapiens
tcaacacccaaatagtacaggcagtgggaactcaccacctagcagcagtctgactcctcccagccatgtcaacttgtctccaaatacagtcccagagttctcttactctagcagtgaagatgagttctatgatgctgatgaattccatcaaagtggctcgtccccaaagcgcttaatagattcttctggatctgcctcagtcttgacacacagcagctccggaaatagcttaaaacgcccagataccacagagtctctgaattcctccatgtccaatggcacaagcgatgctgatctttttgactcacatgacgacagagatgatgatggggaggctgggtcagtggaggagcacaagagcgttatcatgcacctcttatcacaagtcaggctggggatggacct

SEQ ID NO: 671281 - DNA, 328 bp, Homo sapiens
cgtcgacggccagtcaggagcagtggagacaaaaggagagagggaaggggagaaaggagttagggagagaagggcggaaagtaagagaataagaaagagaggaggaacaaacagagacacaaacagagaaaggcagagagagagagaggcagagacacagacagacacacagagacagactgaaagagacagagacagacaaagagagacaaagacaaacagagacacaaacagagaaaggcagagagagagagaggcagaggaagagatggagagactgagagagagagacagagaggagaaagagagtcaggtctaaagtcgacgc

SEQ ID NO: 671282 - DNA, 203 bp, Homo sapiens
atcatttggatgtttcatgaaggttccattggattagtatttgatctggacctgcatagccggaatgtagccactcaaggtatatagaccacctacccatgattaaatagagtggactgtcttcactaacgtgaagggtatactacagaatagcgagaatggatcgaacgatcttcgaaaatccctattactaccgtccacat

SEQ ID NO: 671283 - DNA, 800 bp, Homo sapiens
tggaaaaagtcatggaggccagggggttggcttgaaaccagcttgggggggttcgattccttcctttttggtctaaattaatgtatacgggtccttcgaatgtgtggtagggtggggggctccatatgtcctccaggtttatggagggttcttctactattaggacttttcgcttcgaagcgaaggcttctcaaatcatgaaaattattaatattacggctgttagagaaatgaatgagcctacagatgataggatgtcccatgtggtgtactgcatcggggtagtccgagtaacgtcggggcatccggataggccgagaaagtgttgtgggaagaacgttagatttacgccgatgaatatgatagtgaacagggatttgggcgtaggtagggtctagggtgtacgcctgagaataggggaactcagtgaatgaagcctcctatgagggcaaatacaggtcctatggatcggacatcggggaacgtgagctacaacgtagtacgtgtcgttgtagtacgatgcgccaccgaggtcgccgcgtgagacttctccggcgcaaaagcgccgcgaatgcgctaaggtggctcctacctggtgggtgccctaagggggaatcctcccccgagggcaaggacctccagaagattggggaccagctgggtatcagaggggatgagacgggtcaaacagtatcagggggcgatggaaacttggaaagtcttgcccaggtatggagctgcagtcctgtggggggtgaccgcttgtgccagttgacccggtgtctgcctgtgaagaaaaa

SEQ ID NO: 671284 - DNA, 441 bp, Homo sapiens
ctggctcgtctgggttatggaagggtggaagtacccttccaattactttttctatgatcttagaatacagaaatccagcacagtagtattttatatgattaaacattagattattagctgagccaggctagtactccttttcctaagaagtgaatgaacacatgctaatcatttgcatagaaggcgttctgtggaatgggaagaggatatagaactcacatcagtttacttacaagtgtcctttcaggtcaacgtgttattattatgatgcttaagtgcttattacaaattgttgctatcatcttattatagcaacactttactagaaaaccacaaacaacaatgcagtgggacataatggaaagggtatcggcatcaaatgacctagttacctcccagctgtaccacttaactagttaattaggatggcactatgtccgt

SEQ ID NO: 671285 - DNA, 137 bp, Homo sapiens
gacagtgacccaggcatgcactgcattctctggatgtcgaggctggtattcaccactgaggtggatgcctccctgtaccaagttccgtcgagacgtgagcaccgtgctgacctccaaatatcgttcagctggagcct

SEQ ID NO: 671286 - DNA, 981 bp, Homo sapiens
  misc_feature (1)..(1): n is a, c, g, or t
  misc_feature (88)..(88): n is a, c, g, or t
  misc_feature (125)..(125): n is a, c, g, or t
  misc_feature (223)..(223): n is a, c, g, or t
  misc_feature (272)..(272): n is a, c, g, or t
  misc_feature (278)..(278): n is a, c, g, or t
  misc_feature (301)..(301): n is a, c, g, or t
  misc_feature (310)..(310): n is a, c, g, or t
  misc_feature (313)..(313): n is a, c, g, or t
  misc_feature (318)..(318): n is a, c, g, or t
  misc_feature (322)..(322): n is a, c, g, or t
  misc_feature (346)..(346): n is a, c, g, or t
  misc_feature (349)..(349): n is a, c, g, or t
  misc_feature (373)..(373): n is a, c, g, or t
  misc_feature (379)..(379): n is a, c, g, or t
  misc_feature (389)..(389): n is a, c, g, or t
  misc_feature (417)..(417): n is a, c, g, or t
  misc_feature (422)..(422): n is a, c, g, or t
  misc_feature (434)..(434): n is a, c, g, or t
  misc_feature (453)..(453): n is a, c, g, or t
  misc_feature (471)..(471): n is a, c, g, or t
  misc_feature (487)..(487): n is a, c, g, or t
  misc_feature (865)..(865): n is a, c, g, or t
  misc_feature (975)..(975): n is a, c, g, or t
naaaatataaaaaaagtttttaaaaaaaagaaggatggtaaaggtaaggaattaaagggatgaggtgaaaagatggagaggaaaaaanaggtgaggagaaggaagagggggaggatgtaaatgtnaggaaggatgaagagtggagaagtataagaagtaggttggaggatgtggggggtggaagggagaaaataaaaggaagaagaagtaaaatgaggtgganttaaataatagatgatggagaaaggagggagaaggttgatggaagggtnaaaatnaataaatatgattgaaggggatnaagggaaanaantatanggantaagtagtagaaaaggaataagtnaanaaaaaggtataaaaatataaaaanaaaatnaaaatataangaaaaggggaatggggataagatgagtngatangtgatggaaaangaggaagtagtgtttgaantggtgatgagaataaaanaaaaagtatgggaaanataatagtggtgagaagtggaaatagaagtgaaggaattataagtaaaataaaagtaggaaaggatgataaagaagggaagagaagtattaaagttaagaatgtaagaaaaaagtggaatattgaaagaataaatggtaatgaatttgattggaatagtaatgaaggagaggtgaaagaatgatgggaaaaagttatttgagagttttggaattgtggtggaagaaaatggaatggaagtggaaatattataataagtgttggagataggaataaatagaaaagtgaaaaaaaaaaattgtgtaatattgggattggatggaggtgttataatttatataatgaagaaatagttgagagtgggggaggtgatagaatnatggaagtaattatgatattagtttatataaaaatgataatgatgtaaatgatgaaaagatgattaaaaaatggtgaggaatgatggtattgggtggaataaatttgtantaaaaa

SEQ ID NO: 671287 - DNA, 546 bp, Homo sapiens
  misc_feature (14)..(14): n is a, c, g, or t
  misc_feature (23)..(23): n is a, c, g, or t
  misc_feature (27)..(27): n is a, c, g, or t
  misc_feature (46)..(46): n is a, c, g, or t
  misc_feature (107)..(107): n is a, c, g, or t
  misc_feature (178)..(178): n is a, c, g, or t
  misc_feature (204)..(204): n is a, c, g, or t
  misc_feature (260)..(260): n is a, c, g, or t
gaatgagagaaggncctgagccntggntgtcagatttcaaaacaanccaaaacctggtgacacgcagatccaccaggttgtctgggttgtctgtttatacaaagacnttctgtcaacaaaacaattcaactcttcctgcagctcaacatcctggtctgctgtgagacagggctttccnccatcgtgtttgggtatcagttaatnttagtcctacaaaaacaaaattacgtccctcagttcagcagcccaaaagcagatgntggccgggtgtggtggttcacgcctgtaatcccagcactttgggaggctgaggctgatggatcgcttgaggtcaggcattcgagaccagcctggcccacatggtgaaaccccgtccctactataaatacaaaaaaaattagccaggcatgctggtgtgcgcctctaaccccagctactcaggaggttgatgcggaagaactgcttgaacccagaaggcaggggttgcagtgagctgagatcgcgccactgcaccccagcctaggcaacagaatgatactttgtctt

SEQ ID NO: 671288 - DNA, 1660 bp, Homo sapiens
  misc_feature (1)..(1): n is a, c, g, or t
  misc_feature (191)..(191): n is a, c, g, or t
  misc_feature (363)..(363): n is a, c, g, or t
  misc_feature (624)..(624): n is a, c, g, or t
  misc_feature (1092)..(1092): n is a, c, g, or t
  misc_feature (1455)..(1455): n is a, c, g, or t
nacttttgcacacccattattttcttatcggccgcccctataattttcgggccgccgcccaatttctatagagaggttttccctttctccgtgctcctcctatagtattaataactccacaagctgtgtgtccacaacgcaaacccccccccttctccctagaagccccccaggaaaaggcccccacaagnggccccccctctccctaagaccttctcatagtatttcttccttaaggcgaatacactttttctgccgttaatatgtattatctcttcccccaccgacgcacctcccttgcttgtggggagaaaaccttgtcaatagttgtttttttgggctttggaaaagaaaaattaaggngaatatctcccgccgttttaaacacatataacgggagggttgcgcacaaaactgtggccaaaggatactttgagaacagaattataatgggcccccacacaaccagggttgtctggtgtccacccctggcggattgtcgttcccacaagagaagtgttgtggccacgaccccccgttgtgggagaccaccacttcaggggcgccacacactggagaacaaccccaaccaggaagtagatggggaagaaaaaaggggcgggngagaccaccaccacagttgttgtcgtggccgccaacacttgcggcggggagaagaagtagtttttgtggacgccaccccgtgggttgcacccacccccccccctgtggcacacctgttgtgtggtggcgtcgcgccgcaccatcttttgtggcgccccacacaaggcgctccgtgtggccacacacacaagggggggcgaccttgagaggccccccccacaactgttgagagacgcccctcttcaccctactggatagtagaggaagatatacacactcttatcacacgcggacaacactcacacagcgggtgtttgttgccccttgtgagaaacacacagagactgttttgtgaaaaaaactgttggagacacactctgcgagagagactcgggcacacacttctggagactctgttagagggtgtttgtgtgtgctctctgttggagaatataacacgcgagaagnctcacccaccagcttgagagagacacataaataggcccacagtttcgcgcacacaagaccacacattttctcacacagagagagacagattttgacacacagctatagaagagattatagctctcgcgcgaggttatatctctcttgaccacaggggccttgatagttggattatactcgtgtctctctccacagagagtgtgtcgcacacacaccacagagtgtgggacacacacagtgcacttaagcgcgtgcacagaattaagctcgttaaaagtgtggtggagcctcttcttggtgaacacatgggattcttgttaagccacactttcctttcctttgtaaccaaaacacatgaaaatncctatagaaatgtatatgaagaaagttcacaacacacattaaggcacataaaggaaaactcctttgcacaggctctctgtcccgaggctgcttccgcgtcctcggaggggcccctgaattttaggtatagtttacttcttattctcaccattgtgtttttttagaaaaatgaatggtccaataaatggcttatcctttcataata

SEQ ID NO: 671289 - DNA, 455 bp, Homo sapiens
  misc_feature (9)..(9): n is a, c, g, or t
  misc_feature (250)..(250): n is a, c, g, or t
agaagaggnaatgcgcttgttcatcgtgtgaggaaagaaggatgcttccactgagggcccacgttctgcatagcccaacaactataaagttggcgaggagggaccagcagagtcttgcataggagtggacctcatcttacagtatttctaagcgggtttcctttgatgaagtgcctaaacttgtgcttttgtatggtactctcatgatgtgctgctgttcacatctgtttctgctgttcataggttggangtcgctaaaagaacatttctatgaggatgccatttttaagaactcacattcttttaaaacctcagttgtggtttgaaattcgaaatagtacatgtacacgtacccggctagaaattgtcactgttaagagtgtcacagtgtgaagaattgccctaccctgctgccagtactttgtcccagtgaagctactgttggtcattggttt

SEQ ID NO: 671290 - DNA, 573 bp, Homo sapiens
  misc_feature (249)..(249): n is a, c, g, or t
ctagtggatccccctttctgcaggaattcggcacgagcattatcttgccaatttactacaacctaggcccaatcctcagtcttataggttcagaaatttatttttatcagcatcaacagggtagctacattgcttagaagcaaacaaaattaaccatgcttcaatagaaatcaggatatagatgtattaatacagaatgacaaatataactgtgacagaaataggaatgcctgtttatggtcatatacngccaatactttcattacagccaaactcatacatgcagccaaataagaggcccctggatacacagggaatcagaatgaagaactgaacatttaatagtcttctttcattcaatcaataattttttttaattaagcaactactatgtccgggtaaccttctaggtcctggggatacagaggtctctgcttacagaagtcatatgtaagtagcaggtgaagagtatgtgtttcacagaagtttattacaatatattaacaagagcaaaaaattttggaagcaatctaaatgttcaataatagagctccaattaaataacaataaatc

SEQ ID NO: 671291 - DNA, 187 bp, Homo sapiens
atgactgaagcagctcgaaagaaagctgtaacaaagtgacaagaatatgttcttccactttgagactgttcgattcaaacatgagtccaatggcacgtatccttaaggggagatgctctgctgctgtctcatttgccagattatccttcgttccaggctttcaacaggatatgactggttcatgctc

SEQ ID NO: 671292 - DNA, 734 bp, Homo sapiens
gcagcggtgtatgcggaactatataaagtgcagaaaagcaggtctcgaagatatgactccaggaccactatatgttctccagaaggtcgcttataccaagttgaatatgccatggaagctagtggacatgcaggcacctgttgcgggcaactgttagcaaactgatggtgtgtagcattggcagcggagagacgcaacatccacgagcgtcttgatgaagtctggtgtagctgaaaacatttataggactcaatgaggacatgggttgcagtgtggcaggcataacttcctgactgctacatgtactagagctaatgaactaaggctcatggctcaaaggtatttataacagtatcaggagccacattaccttgtgagcagatggttacagcgctgtgtggtatcaatcaggcttatacgcagatttggacgggagaaacgtcccttaggtgttgcatcgaagtacgattggctgggataagcgctatgggtacagctctatctagagtgaccctacgtgcgcaatattacgggtggatgggagaggccagatgccttggaaattaattagcgctgggctgtcgtcattgtttgaaacaagactatcgggaagggcgaaatgccttggagtgaggaccttgggtgggtatccagcactaatagagcttggtgttaagagctccctggggacaaggggaattggtccctgcccaaaaggggggcgaccgggttcc

SEQ ID NO: 671293 - DNA, 1010 bp, Homo sapiens
  misc_feature (8)..(8): n is a, c, g, or t
  misc_feature (54)..(54): n is a, c, g, or t
  misc_feature (69)..(69): n is a, c, g, or t
  misc_feature (129)..(129): n is a, c, g, or t
  misc_feature (244)..(244): n is a, c, g, or t
  misc_feature (389)..(389): n is a, c, g, or t
  misc_feature (391)..(391): n is a, c, g, or t
  misc_feature (397)..(397): n is a, c, g, or t
  misc_feature (569)..(569): n is a, c, g, or t
  misc_feature (598)..(598): n is a, c, g, or t
  misc_feature (601)..(601): n is a, c, g, or t
  misc_feature (617)..(618): n is a, c, g, or t
  misc_feature (626)..(626): n is a, c, g, or t
  misc_feature (919)..(919): n is a, c, g, or t
gtatgttntaactgccacacctgccatatttttacaaaacgtgtgctgtgaatntatcactcttctttntaattcacaggttgtttactattatatgtgactatttttgtaaatgggtttgtgtttggngagagggattaaagggagggaattctacatttctctattgtattgtataactggatatattttaaatggaggcatgctgcaattctcattcacacataaaaaaatcacatcacanaagggaagagtttacttcttgcttcaggatgtttttagatttttgaggtgcttaaatagctattcgtatttttaaggtgtctcatccagaaaaaatttaatgtgcctgtaaatgttccatagaatcacaagcattaaagagttgntntatttntacataacccattaaatgtacatgtatatatgtatatatgtatatgtgcgtgtatatacatatatatgtatacacacatcgcacacacagagatatacacataccattacattgtcattcacagtcccagcagcatgactatcacattcttgataagtggtctcttgcatanaataaaaatatcctatcagcgctttctangangcctgaattgaccaannaaccatcncaccaccactttataaagttgattctgctctatcctgcagtattgcttagccatcttctgctcttggtaaggctgacatagtatatgtcaatttaaaaaataaagtctgctttgttaatagtaattttacccagtgttgcatgtttgagcacacacaattgataacttaagcccactacttattgcatcaatatgacacaagtaggatagtttgcaactttcacacggatttgctcgaattggtccactttgcttgacctgcactgttgatgttatcttgctatgtgctgacntatccttcactgtacaagctaattggaagcctcttcagggtaaggaacaatgtttcccgacctatttgatggattatcataggttgcgaac

SEQ ID NO: 671294 - DNA, 182 bp, Homo sapiens
tcatccccggtacctgggtagaaccgcgctgtattgggtgtgaacagagtcatcctctgcaggcagggaagtgtagaagtttaggaggggacactgagtgggagtgtggtggtattgctgaaataccttctctggtacgtcaggctatgagcggttttagtttttatgtttggttcagttgc

SEQ ID NO: 671295 - DNA, 281 bp, Homo sapiens
  misc_feature (30)..(30): n is a, c, g, or t
caggtaacagagagcttcgccttccttcantggtgcttttcccccatcctgtatgccttttccagtccccgcttccgccagtacctgaaggcttttctggctcccgggcttggatggcccctggcccctggccctgcccaggcctcattatccagttgttttgagagcagcatactttctgcccaaaaggaaatggttggcatgaatgcccttggagaggggcagtttgagacctcccctaacaagggggatgtggggaataaatcagcctgggtgcccca

SEQ ID NO: 671296 - DNA, 209 bp, Homo sapiens
ctgcagaggagacagggtatcaccagtctcctgggacctccgcctcctgtgatggtctccatctcctgacctcgtgatccgcctgcctctgtctcccaaagtgctgggattacaggcctgagccaccgcgcccggccagatgggctcaaggacagcttgcctgactgcagccataagggtgaagcctcttcaggtagagaaggactcca

SEQ ID NO: 671297 - DNA, 203 bp, Homo sapiens
gtgaccctgcatgctgatgccattcaccggggaggtggccagatcatccccacagcacgccgctgcctgtatgccagtgtgctgaccgcacagccccgcctcatggagcctatctatctggtggagatccagtgtcctgagcaagtggtgggtggcatctacgtgtcctgaacaggaagcgtggccatgtgtttgaggagtcc

SEQ ID NO: 671298 - DNA, 200 bp, Homo sapiens
  misc_feature (128)..(128): n is a, c, g, or t
gagcttgctgagctccggggcccgcggagtcgcgccaggctcctgggaaaggacggggagtgttacctgggagcagctgctccattgtgcctcgaggccccgatcgggctaggccgacggctagcctncctatcaactttcctctactcggcggggttcgtgcgagcgggcgagtgtacttcggccacgcctctaaaagg

SEQ ID NO: 671299 - DNA, 830 bp, Homo sapiens
cttacccaccctccacctcactccttacaaactagctagcgcacttgttaagacccccacacatttattggcaggcacgaaacaggagagatgctgcattaaaagatgtcaccttgtggaacataaaaaggacatcagcaaacaggatcagttaactattgcatttatatgtaccgtaggctttgtattccaaaattatctatagctaagtacacattacgcaaaaacaaaacgaaaagaaaattctccgacgtaccgctatatcaaatgtatactatcataccagtaggcgcttataataaagaaatgagtctcttggccttaccggaggcagctctgcacgcacctccatatattgagggataatccatgaccccccttacctccactccaccgctcgtactctttgctcgcttcagtggcctcaccccattcaaatccttttatactgccatccacattattcaggcgataatccaagtaaaaacatgcatccaaaggccatctatacgccatcaacccctaacagtcctttttgtttgcccatacccataggcccagccccccccgacagccacccacctctccatccttctcttatcaggtcgccaaccctttcaagacttactttgcctcccttctcttaccccctcataactcctttcctcccctaccatctttcataccctcccgatactactataattgatcctacctttctccgttcatgacacagcactcgatatttgctctctatctctctccccccctccacaccgattaaccaccatcttcctacactccgaccaaaccgcactcactcctctata

SEQ ID NO: 671300 - DNA, 148 bp, Homo sapiens
cagtagcacctgggcgcggcgaccaaaaatctctagcaactgaccagcatatgcggtggaggttcgttggcacgggtcagcgcgtagagagtgatcggcagcggcggggtgagcgttcggatatgggtggtggccgtgccgcgcagag

SEQ ID NO: 671301 - DNA, 376 bp, Homo sapiens
cgttatagaggatccaggcacaaatttgtaagtagcatcccaccaatggtcatgagattttccccaaagttaaagcagagaggttgggcacgatggctcatgcctgtaatcccagcactttgggaggccaaggtgggcagatcacctgaggtcaggagttcaagaccagcctgggcaacatgacaaaaccctatctctactaaaaatacaaaaattagccagttgtgatgatgggtgtctgtaatcccagctacttgggaggctgaggcagggagaattgcttgaacccgggaggtggaggttgcggtgagccaagatcacaccactgcacttcagcctgggcgacagagctagactccgtctcccaaaaaaaaaa

SEQ ID NO: 671302 - DNA, 902 bp, Homo sapiens
ggtctgctcatcgccagcgtaggtgttacctacccgctgccgtcgccggcgacattatgatggcacggaacgtagtcctgcattctgggagcagctgcagacaatggtgatcactgtactaacttgccctacaggaaatctatttcgcgaactatcttctccagcggagatggccaatggtgcttagtagcagtaggaccagagcatggttaacctatctccccaggatttggctcttgggtcaaaagggttgtcatgtcccaaagccttttcgactgcgggatcactcaggtccggagtgagtcgtcactgtggctgttgctgacgtcctagatattgctctcgaacagttgttgcctggtgaaccctatgggacccttatgcactctcaagatcaagtagcgttaccagcttccgtggatacagtaggtatttgatggtcaacctcaatgggactgcttcatcagatgacctgcctggttcataaaactttgcctgatgttctagcagaacctttatcaagtgaaagacatgagtttgtgatggcaccatatgtgaatgaattccagggtattgatgcacctgttgaacaagaaattaacagtgcagaaccttacttttgaaagtgccacgagtagagtgtgcatacaaacctgtccagaaatggctggaaaagatttgaatcacctgttccagacattagctaatggaacctatgattctgactgtacccacaaacatagaatgttgctgttggcgtgcacacattgaattggagaaactgcctttcaaatctcccgggggcggaaaaagttgtctcacagaggattggcgcgcatggccccactgtggctttgggatacaaccctttttggcggccaccagatctctacaccgaaaca

SEQ ID NO: 671303 - DNA, 558 bp, Homo sapiens
taccggttccatgtttcccagtaaggaaaactaagaagcgtacagaaaaaaagatacaagggcaaaagttcaaagatttaaaagtaagtacagattgagctgacatggaggatgaccttgtttgagcataggagacttctcctgtgcctgatctctgcacctcatcctcccccattacccagtgtatgcattcacgggagactacacagataatagtgtacaagaagcatcagaatggggaaaagataagtaagatgaacttgcattgtggaaatatagtgatctattttaaaaacacgtgatgtgttagctcacgttatctcactcacgtgaggaggacatgaacatgaaatctctgtttttataacggagacgaatgagactttcaggtagatcaattacttcccagggttagtgctaagaggaggtagaactactcctagctctgaagatttgccagtactttgctgcactaatagataataacagtctattagaggagttctagtaggtaaggaagagcctatgttgggatactatccgggagaaaactcacca

SEQ ID NO: 671304 - DNA, 200 bp, Homo sapiens
ccgggggcccccccccggcctttcccccctttgggggcctttggggggggggggggggccccccccttcctttggttttttggtttttttttttgcctttggtttccccttttggccggggggttcctttttttcccccggggttttcccccccccccccggggggtgggggttttttcctgcctttccccttgggttta

SEQ ID NO: 671305 - DNA, 862 bp, Homo sapiens
  misc_feature (233)..(233): n is a, c, g, or t
tatccataggtttctctccctccttctccttctcacacacaactgtccatactaacaagtttggtgcatgtctgttcttctgtagggagaagctttagcttcattttactaaaaagattcctcgttattgttgttgccaaagagaaacaaaaatgattttgctttccaagcttggtttgtggcgtctccctcgcagagcccttctcgtttcttttttaaactaatcaccatantgtaaatttcagggttttttttttggtttaagctgactcttgggctctaatttgggaacaaaagagaaaggtgaagggtcaattccaaggtatgtgggttatctggtgaaagtggcacagcgggggcttttcctaaactgggtggtttttccccggcattggggggatttttaattattattcaaaaacataactggagttttttaaaagaggagaaaatttatatcggggtaaagggtttatcatatatatggggtacttggtaatatctaaaaatttagaaccggaaatgggaatcctggtcacaaaatcattttaagatctttgcgaagctgttaattttccttagtggtggtgggacatggcagactttgtccagggctcccagggcctgtacggacactgtgggaaggcttccctctgtcgggctttgtgccatctgtggatatgccaataggttggtgaacaaatccggagcaagggggagtcctttcaggcggggaagcacttggcgcgcatttcccctgcaattcctctatggtactcatgtatgtcatggatttccatcattattggcgtgccacaaggcgtttgcaggccccgttgtcgcggccacggggggttgcgca

SEQ ID NO: 671306 - DNA, 782 bp, Homo sapiens
ggcgcaggattgcccttgctgtagacagagcgcttggcagctgatgatcacgtgagattgcgcagcgacgcagtgatgagtcttcgaggacgactagatggaggccagtgtcacgaacctactagagacaccctcatgccagtcgcagatgtttccggtcgccaacatgccaggataagccagcccatcccgctaggtcgcgttcttgcctagcgtagtacgagtagattgagtcaggatggagctggtcggaagttgtcgcggtgaatcaacgcgacgcatacctggtctatatgccaggtccccgagcgcgggccttgtggtagagcgcgtgaaaggcgggcgatccctcttgagctcggcacggaactatccttcgcgtgacctcgctgacggtccgcttgtcagcttccaacatcgtcgcggctgcggacgaccatgtatgcaaatctgccgagaactacgatcatgagagcactcagctctttaacgccatgaatctgcttcatgggcgccgtgaacaagatggaccagacggtgatggtgcccaggcgttgcatgggcgacgtgcccctggctgagcccgggttagacaacgatgttggcgtggaggtaggcggcagtggcggctgctggaggagcgcacgcccccagtccccgactcgggaagcgccaatggcagctttttcgggccctctcgggaccatgtacagccactaccgtgcttctcaagtccatccgcaacgacatccgagtggggggggtcctgcaccaggcgcctc

SEQ ID NO: 671307 - DNA, 751 bp, Homo sapiens
  misc_feature (259)..(259): n is a, c, g, or t
agcggaaaacatcgtgcttcgcacagatcggttcatatatttgagaatacaaccttatgacctgcttgtctctgtactgtccgtagtgacttggaaggtaaatccagagtatacttagagcgatacaacgcaagtatgctatttcctcgtagaaggtgacattagtgtgatcactctactgctcaacagtagaattgctagtttgcatctgcgttcctctttcagttcctgtgtaagcactgatgtatgtacccgatantcaagacaggatgtgatatttatttctcaaatctactgggaaaaactagttggtactagatgagcaatatacatgcctttttactcctcactctagaaataggaaaattaagaccacttacaggggagagaatccttatgatgctgatgaattaatgaggagtgtaattatacaccttgctgtatcttgaaggtcgtagagcaagaggaggaaatgatatgacaaggtaatactaacatggtgtgcctgaagctgtttgtgacttaaatggtgtgtagttgactagaaggctgggagagagtgcacaacacttaggcatcatgtttatctttttataaagaaactgggtacacagcgttttgtaattggttttatgtatcacaggaaacattaggccaagatatacttgtaaattcgtaacgaatagttttagtgagatactctgataggcaagatataatatcccttcggtgaaatgtagaaggaaatcct

SEQ ID NO: 671308 - DNA, 275 bp, Homo sapiens
  misc_feature (7)..(7): n is a, c, g, or t
  misc_feature (9)..(9): n is a, c, g, or t
  misc_feature (32)..(32): n is a, c, g, or t
  misc_feature (70)..(70): n is a, c, g, or t
taaaggnangcttgcctgtgttgggaatctcnaggatcccccgcaaatttccttccactcgaggataggngttggagaccagcctggccaacatggcaaaaccccatctctatgaaaaatacaaaaattagccaggtgtgatggcacatgcctgtaatcccagctactcgggagcctgaggcacaagaatcacttgaccccaggaggcggaggttgcagtgagccgagatcaagccattgcactccagcctggcaacagagtgagactccatctt

SEQ ID NO: 671309 - DNA, 1223 bp, Homo sapiens
ctggtggctagtggagcgctttctcccgggaacctgcggctgtgacccaatgtgtgccctggaccatgttttgtgtgtgcttgctgtgctggcctgcctcaagtcaaccatgtgtactgtcaggtctgtgctgtgcccatgctctgtgctgctgctgtgtgtggagcctggagtggctgacagtcatgatgcctggtgtgtgccatgctgtgtgacagctgacctgccaagatccacttagtgacccctgtctgattcttgcgacagctgtgccactgtcttgagtccctggtggcctccatctggtgcttgcagatgtctgccgttaggacctctggccatgtgatacccatctgcccatggctcttgattgcttgccctgtgatcacctgacttgtgcccttgtaatgcaaccttctgcagcgaggaatgcccatgatgcttgcgccatgccctttcttgaagtgcttgatggacagaggtttggcacgttgtggtgctgcatcctatagcttgaccccatacacccattttgacgggtcttggtccggaacctgcccatatcagttgtttgacgcaatcccacaattggtgttacccctagacatctgggtgtgtcatgtggaaagccaaacccactttgggcaagtgaccccagcatctggtgggccccgggtggcctggaaagccagagccttctggcacaacacaatcttatccccagtgaaccgcccctgaagacctggcgtgccacggactccaaagacccttgatttccaaaaagtgcatgccgagtggcacccagccttggacccgcgggaaaacgtggcccaccagattccatctggggaacttgtgccgtgcgaacccaccggtggtgggactggagggccccatcaaaggacggcattgagaccaatgcacgaagggacccaccacagggccacgaagacgcccctgggggcaagtactgcagcaaacaccacctgcaagaccggccgttcaggcaatctccgtgggagcccccaaaactaggcagctgtgacccaaggcccaagaaggggccaagacgagagcaccaggcactcccacatggcagcagatacctggcacctccaagagcgagcacacagcgtgcacgaaaaccgcgccgaaacggcggggacgaagggcccacagggagcagcacacacggaccgacctggaccagcgacaaccacgcg

SEQ ID NO: 671310 - DNA, 726 bp, Homo sapiens
gagctggccgggggcatgtgagtgatggtgcaggaaggagagtcaagctgactgttggagtgagcgggagagctgagctcagctccaaccctgcctgctctgcgtgttggcatcgctggagccgccggcagctcctggcaccctggagaatgacaacccctgcctgtggtgctgaggggggatgctggtgctgcgtgtgccgtgggcgtgcagtgagtgggctctgtgcgcgttccctctgcgtgtgtgaggtggaagtggattttattggaagagcttgggttatggaacatgagaaaagaactctttagaagggctccaggagattgggaattaacatacgatagctttgtatgccccaaaaagatgactacaaacataggatgttttggcgagagatgtattcagtggaggaagcttgagcaagcttatgacgtctcatctcgtgctggagagagaaagtactggaggaagtaggacaataacacgtcctacatagcgaagccctccaagcccttgggcactttggggcgatccttcaaatatcgatacctataacgccaccaaacagggtacggatactccccaggaattcggacacacggtttaacaaaatggggagccaaggtggtatatctcagaaggcacggcgaagcggccgacattcaatatggggccacatggcttaatgtgcaatttcacgtataacgaccgattagctagtgg

SEQ ID NO: 671311 - DNA, 402 bp, Homo sapiens
  misc_feature (83)..(83): n is a, c, g, or t
  misc_feature (94)..(94): n is a, c, g, or t
  misc_feature (97)..(97): n is a, c, g, or t
  misc_feature (99)..(99): n is a, c, g, or t
  misc_feature (136)..(136): n is a, c, g, or t
  misc_feature (172)..(172): n is a, c, g, or t
  misc_feature (196)..(196): n is a, c, g, or t
  misc_feature (224)..(224): n is a, c, g, or t
  misc_feature (237)..(237): n is a, c, g, or t
  misc_feature (255)..(255): n is a, c, g, or t
  misc_feature (318)..(318): n is a, c, g, or t
  misc_feature (358)..(358): n is a, c, g, or t
  misc_feature (364)..(364): n is a, c, g, or t
  misc_feature (377)..(377): n is a, c, g, or t
  misc_feature (390)..(390): n is a, c, g, or t
gactttgccttggagagccagagcttccgcattttctttactattctttttaaaaaaagtttccctgtgtagagaacatatangcataaacatnggncnattatatgtctcccttagaaaaataataattggaaancatgttttagacctagttccaaaaataatttaaggngaaatctttaatttttataaaagnagcaaaataaaggcataattaaaatatntttggccataccngccttggaagcagatganccagccttctttttttcataaccgggttagggtaagaaattgccctttgaaccaatccctttnggaactgacccttatgaaatatatgtttttcatggggggntttttntagcccagtttgngcaattaaatagnttcataagcata

SEQ ID NO: 671312 - DNA, 198 bp, Homo sapiens
  misc_feature (1)..(1): n is a, c, g, or t
ntatctcatatagttcaacactgttactgtcgtcaatgcttcgactcggcgctctcgtctgacaccgtccgtaattggaaaacccctgcggggcaccatagtgatcttccccgatggtgggcacgctgtggaacgccttcttcctgggcggcctcaagtcaccgagatgcctggtgagcggtgagcagatcaacaaca

SEQ ID NO: 671313 - DNA, 848 bp, Homo sapiens
cttatgcgtttttctcgaccctgatcacatcacactcatagggcgatgttatagcacatgcatgatacctttttggtgctctcctcaccctccacttctcttcttaatgtgtgttttatcagcggccgtgtctttatgattgattttcccccgcgcattgttttttttttctcgccgcagattatttttggtgccccgttttctctcccctccctccgtctctctctctcccctccccccctcggtgtgggggtgctgtctcccccccctcctacgtggttgcttctcccgcctggtttcactctcattaagagtggaccctcccctctttaaacacatcatcactcctgttttttttgctctcaccgcggcggagtattatctactccctccgcggtggccctcctctttctctttcttttatagtatagtagactccacccccctcctcccctctcttgatttttttacgtactctcgctctcgtttgtatcactcacattcttacgggtggtgttttttggttctccccctccccctcctcctcccgtgtcgtgtttgtgatgtgctctccttcatctctcttcttcgtggggatgtttgtgggggggccctcactctttgttggtgctcaccacggcgtctctctcgcgtgtgtctctcctttcattctgtctgggtccaactgtttttctctcttgttgggttgtcccccccccccaatatgtttcgttcgtcatacccccccaaaaccctttgtgtgtagaccacccccccccgcggcccttttttgagagggaggggtgttttttttttgtttgtcccttttttgggggggggggtgttta

SEQ ID NO: 671314 - DNA, 91 bp, Homo sapiens
tgctcagataatcccgcaggtgtaatcacgaggattatgaagcaggagtttgagactggcctgggcattatagtagagactctgtcactat

SEQ ID NO: 671315 - DNA, 211 bp, Homo sapiens
aatataattcaagtatcacacaatatgtaccaaatacactctgtaactacatggccatttcttcccaagcccacagaccaagatgagtgtaaggctaacattcagagccctgtgctctatcctctagatgcagtggacaaacctgcgacatgcatagggccaggctcccaccttctcaacagggcttcctcccacctcatccccggctaat

SEQ ID NO: 671316 - DNA, 641 bp, Homo sapiens
gaaactaccttttattaaaccattttatcttgcgagacttattcactatcataagaatagcatggggaagacccgcctccatgattcaattacccccccactggattcctcccacaatacgtggtaattaagggagctacaagtcaaggtgagatttggatggtgacacagccaaaccatatcaccatgtaagagttatgaatcttgtctctaacttatttgggactcaaattataaattagtctttcactgggcatatgcatatatcagctagcttttactacgtgatgaattaccccatacttagaggattaaaacatcacacattcagattgttcattggtctgggactcgactatgtagttccctatgatttgtactggctctattagggttggatgatccatgatggtgccagatgggatgcttaggggctgaagtcttcttctctgcattgggtttaatccttgaacaggtcagctggggcttattcaccatgggagcaagtcttgtgtgcttaggcagtcttcacgttgtggcttgcataatatttgctagtatcctgttctttaacctagaattgatggttggcgaaaatgttcctatttcttgtatgtatggtccttcaatgccttatggtc

SEQ ID NO: 671317 - DNA, 249 bp, Homo sapiens
caggaaacgtgatttttgagagcctttggctatggtagaaaaaattaacaaacctgactcagtggcaaatcatcctgacttgactccgatcggcagcaggtgggttctcgagcaggaccccgtcgtccgtacacacaatcttattcagcaactcatgggcttccggaatgggagggccgatgtcctcaggatctgggctgaggaaggcctcctcgggtgtgagccccaggcgtggagggggccgcgcgg

SEQ ID NO: 671318 - DNA, 1317 bp, Homo sapiens
  misc_feature (1249)..(1249): n is a, c, g, or t
gctgcgcgcgggcgggcgggctatggcagcagtgcgggttgtagtgggccggcgctggtggcggggccctggtagcatggcaggtcatgtcggcggagtcgccctacggggtgctgtcagatttgtgacccagaaggaactctctgacctcagctgtggctctatggttgctaggccagaagccaaacttcatgtctgagtgcactgagcagcagtttgccatggcagagcttggggctagccacacggtgacccttagtgatgggacaacagcctacgtacagcacagcatgtcaaaggagagcacgcttcttgccacgggcaggtgatccagctacgaggatgggaccaccgcatacattcaccaggtgacggtaccgacaagaagctctctcctttgaggatggtcagcctgtgcagactggacagatggcagccatggcttacatacaccgggacacccagcgccggctatgaccccaggcaacctggcaagccggccaaactggcagatggctccactagactacatacaccaccctgtggctagtgccatcggaggagcaccatcctgggcgacagacagaggtgggctaggaggacatggccaggaacgaggatgctgcggggctccagaagcagacgcagaggtggcacggcagcggaatgccagcaagggagcgacaatgaacaggcgcgcaaacccggcaacgggcacacacggacaagagagtgggcagcacagatgcaatttcagacgtcagcggcatcaactgggatagtaggggccgagtacatacgcgaccgagcgtctcatctcgctttaacgtgtgcctcttgaacgacgccatccaccacggtggtacacggcagcaaacagaatgtgacctatcccccaccagtgtgccacacggccccctggccccacgggcagacgaccctggagcgcgcttgcgtcacacaatgagagcaagagcaccgacagggcccagcggaacagcgccacgacgggcaaaccagacgagggagacgacgagacgagatcgaaacgcacacgggaacgacacgcacacagcaccacaggacacggcaagcaacacacgacaccaccagccatcggacccaccgcagctgcacaacacacgacaccacggggcgatacggagccagaaagaggcacgagagacagacggcggcgggcacacacggatacatagacgcaagaagacagacgcatgggcggtcctcnaggcagcacaggccgatacgcagaacacagacacgcgcacacgaccggaaagaccgcacgccggagca

SEQ ID NO: 671319 - DNA, 471 bp, Homo sapiens
  misc_feature (203)..(203): n is a, c, g, or t
  misc_feature (264)..(264): n is a, c, g, or t
  misc_feature (311)..(311): n is a, c, g, or t
  misc_feature (470)..(470): n is a, c, g, or t
attacgctcctagacgggttgtgtttcaggatgactctttagagttaaaatgggacagtgataatgatgaagaaaatgaggatgtccctatttcaatgaaagaactaaaaccctttacagagaaaaacagataaaaagttggatgacataagttctaactacacagaatctttcagcacactagatgaaaatgaccttttaantccatcagaagatataattgcagttcagttaaaatttagagcatgtttaaagattctcacngtagaacttcgtactttatctactggctatgaaatagatggtggaanattgcgttaccaactataccactggcttgaaaaagaggtgatagctcttcagaggacttgtgacttttgctcagatgctgaagaactacagtctgcatttggcagaaatgaagatgaatttggattaaatgaggatgctgaagatttgcctcaccaaanc

SEQ ID NO: 671320 - DNA, 656 bp, Homo sapiens
gtcggccgcctactactactaaattcgcggccgcgtcgacgcgagaaaactgaaaatcacagaaaattagaaatacacactttaggacgtgaaatatggcgaggaaaactgaaaaaggtggaaaatttagaaatgtccactgtaggacgtggaatatggcaagaaaactgaaaatcacggaaaatgagtaatacccactttagtacgtgaaatatggcgaggaaaactgaaaaaggtggaaaatttagaaatgtccactgtaggacgtggaatatggcaagaaaactgaaaatcatggaaaatgagaaacatccacttgacgacttgaaaaatgacgaaatcactgaaaaacgtgaaaaatgagaaatgcacactgtaggacctggaatatggcgagaaaactgaaaatcacggaaaatgagaaatacacactttaggacgtgaaatatggcgaggaaaactgaaaaaggtggaaaatttagaaatgtccactgtaggacgtggaatatggcaagaaaactgaaaatcatggaaaatgagaaacatccacttgacgacttgaaaaatgacgaaatcactgaaaaacgtgaaaaatgagaaatgcacactgtaggaaggtcgacgcggccgcgaatttagtagtagtaggcggccgc

SEQ ID NO: 671321 - DNA, 310 bp, Homo sapiens
tgtggtcttgcagaacaataataaatctttgcaatctttccctaatgaacacatctcacattctagaaattctgatcattctaaattctggagattaacattatggtcccataacttacatgacagcacgctgataggtcccagatgaaaaggaaacagccaggaaattaaatggctgagttaggtggcaaccagagaattagaagtcccagaaaaactccagattcttggcacccatggttaagtttcagaaggtccaaggtctggtcctgtcaggatattcccttccaactggaaagaggtaccgagc

SEQ ID NO: 671322 - DNA, 814 bp, Homo sapiens
  misc_feature (687)..(687): n is a, c, g, or t
  misc_feature (736)..(737): n is a, c, g, or t
  misc_feature (748)..(748): n is a, c, g, or t
  misc_feature (751)..(751): n is a, c, g, or t
  misc_feature (765)..(765): n is a, c, g, or t
gtcggccgcctactactactaaattcgcggccgcgtcgacgcgagaaaactgaaaatcacagaaaattagaaatacacactttaggacgtgaaatatggcgaggaaaactgaaaaaggtggaaaatttagaaatgtccactgtaggacgtggaatatggcaagaaaactgaaaatcacggaaaatgagtaatacccactttagtacgtgaaatatggcgaggaaaactgaaaaaggtggaaaatttagaaatgtccactgtaggacgtggaatatggcaagaaaactgaaaatcatggaaaatgagaaacatccacttgacgacttgaaaaatgacgaaatcactgaaaaacgtgaaaaatgagaaatgcacactgtaggacctggaatatggcgagaaaactgaaaatcacggaaaatgagaaatacacactttaggacgtgaaatatggcgaggaaaactgaaaaaggtggaaaatttagaaatgtccactgtaggacgtggaatatggcaagaaaactgaaaatcatggaaaatgagaaacatccacttgacgacttgaaaaatgacgaaatcactgaaaaacgtgaaaaatgagaaatgcacactgtaggacctggaatatggcgagaaaactgaaaatcacggaaaatgagaaatacacactttaggacgtgaaatgatggngaggaaaactgaaaaaggtggaaaatttagaaatgtccactgtaggacnnggaatatggcnagnaaactgaaaatcanggaaaatgaggtcgacgcggccgcgaatttagtagtagtaggcggccgc

SEQ ID NO: 671323 - DNA, 1300 bp, Homo sapiens
  misc_feature (415)..(415): n is a, c, g, or t
cagcacttccgggggccaaggcaggaggattgtttgagcccaagagtttgagaccagcctgggcaacatggcaaaaccccatctctacaaaaagtacaaaaaattagccaggtgtggtgccatgtccctatagtctcagctactagggaggctgaggtaggaggattgcttgagcctgggagcggggggttgcagtgagctaaaatcatgccactgcattccaacctggggaacagagtgagaccctgtctcaaaaaaaaaaaaaaaaaaaaaaaaaatccaaattcggggtgcgggaaagatgggaaaaaaaaaaaccttttttggggtgtgatgggaccccatttgtgttgaaaattttttttctcccgtgcaggtgctggtggttcccacccattcttatttaccccctccnctattctttctctcatttctcatctcattatttttctttataaaacacccttataccttatgtggtgctataggcgcaccaggttctcttaaaagagaccttggagagaatccccgcggggagagaactaagaagccccctgtgtctgtgtctccgtgtgggagccccttttgtttgttctcttagccgggggggggcacacccacgtgggagacccgattttacaccttttgtgttcacccttctgtgtgctccgcctctgtgtctctcacacgggcgcgttctccgcagggtggccctttctcgccccaccgcctgttttagcccacacgcgggcggggcacccgcacgcggggcgcaactcgtggcgtctctctgcgcggggcgccccgcgtgttgtctcccccccgagatgcttgggccatctgcggcattcacacctctgcgcctctatttgtagcaccccccagggagatctttctccgagacaaaatttcttttggtggaccgccccccatcttgtgcccttttccagcacgcgccttttttggaggtgtcttccacaccaacacactgttcacacccccacttctcctgtgggggaaagcgacacctctctctttgagcaacgccctattttggcactccttgttgaacctcctaagacaacaaagcgccctcttgcaacattgtgcggctcacaaccacggcgcgcacacacaactacatcaacgagcggcccctccccacaaaggggcccgtgggagagggacataaaaaccccctctgcgttcctacaacctgttccttcatacacatgtggcggcgccccaacattatacgtaccagccggcagcgagcgaagcaaactgccgcagacctacc

SEQ ID NO: 671324 - DNA, 364 bp, Homo sapiens
gtgcaaatacggcattcaatgtcttcagaattgccgtccctcagaactctgtcaccacgaggtggcagcactcccagtgtctgggtgtcttctgagacactgtcgaccatgttgcattatgtatatgttgtaacttacttgaccacttctactgttgtgcattaatctttttctttccttatgtcctgtaaaatgctgtgacatccttttaacctttgcctcctcatctcctattaatttcttaggctatgtttctctgtgtgggcttaaaagctggtcactagatactatcgtactttcaggctcgactatacactgctgttaaactgttttccagactttctgttttcatttgccagctgtc

SEQ ID NO: 671325 - DNA, 207 bp, Homo sapiens
ttagcctactatatggaaactttttattggcactaactttgaaccattttgagacattggtagggtctgagctatgacctcaattgtcttcctagggcctatcgtgtgagcacaccatatattgacagcacaaagagctgtaaacacaggtgcgagcaccgcgtccggtagccacgactttgatggcgcctctcgtgtatagatata

SEQ ID NO: 671326 - DNA, 896 bp, Homo sapiens
  misc_feature (619)..(619): n is a, c, g, or t
gtcggccgcctactactactaaattcgcggccgcgtcgacgcgagaaaactgaaaatcacagaaaattagaaatacacactttaggacgtgaaatatggcgaggaaaactgaaaaaggtggaaaatttagaaatgtccactgtaggacgtggaatatggcaagaaaactgaaaatcacggaaaatgagtaatacccactttagtacgtgaaatatggcgaggaaaactgaaaaaggtggaaaatttagaaatgtccactgtaggacgtggaatatggcaagaaaactgaaaatcatggaaaatgagaaacatccacttgacgacttgaaaaatgacgaaatcactgaaaaacgtgaaaaatgagaaatgcacactgtaggacctggaatatggcgagaaaactgaaaatcacggaaaatgagaaatacacactttaggacgtgaaatatggcgaggaaaactgaaaaaggtggaaaatttagaaatgtccactgtaggacgtggaatatggcaagaaaactgaaaatcatggaaaatgagaaacatccacttgacgacttgaaaaatgacgaaatcactgaaaaacgtgaaaaatgagaaatgcacactgtaggaaagnacctggaatatggcgagaaaactgaaaatcacggaaaatgagaaatacacacttaggacgaaatatggcgaggaaaactgaaaaaggtggaaaatttagaaatgtccactgtaggacgtggaatatggcaagaaaactgaaaatcatggaaaatgagaaacatccacttgacgacttgaaaatttacaaatcactaaaaatttaaaaaatgagaaatgcacactgaagggcctggaatatggcgagaaaactgaaaatcacggaaaatgaggtcgac

SEQ ID NO: 671327 - DNA, 696 bp, Homo sapiens
gtcggccgcctactactactaaattcgcggccgcgtcgacgcgagaaaactgaaaatcacagaaaattagaaatacacactgtaggacgtggaatatggcaagaaaactgaaaatcatggaaaatgagaaacatccacttgacgacttgaaaaatgacgaaatcactgaaaaacgtgaaaaatgagaaatgcacactggaaaactgaaaatcacggaaaatgagaaatacacactttaggacgtgaaatatggcgaggaaaactgaaaaaggtggaaaatttagaaatgtccactgtaggacgtggaatatggcaagaaaactgaaaatcatggaaaatgagaaacatccacttgacgacttgaaaaatgacgaaatcactgaaaaacgtgaaaaatgagaaatgcacactgtaggacctggaatatggcgagaaaactgaaaatcacggaaaatgagaaatacacactttaggacgtgaaatatggcgaggaaaactgaaaaaggtggaaaatttagaaatgtccactgtaggacgtggaatatggcaagaaaactgaaaatcatggaaaatgagaaacatccacttgacgacttgaaaatttacaaatcactaaaaatttaaaaaatgagaaatgcacactgaagggcctggaatatggcgagaaaactgaaaatcacggaaaatgaggtcgac

SEQ ID NO: 671328 - DNA, 130 bp, Homo sapiens
  misc_feature (51)..(51): n is a, c, g, or t
aaatttaatagcaacggcctccagctctctctgaactggactgagtccccnaggggactggtgggcaatggcttctgatgacccgagggaagggtaggtttataggaagggtattcgagattccatgatc

SEQ ID NO: 671329 - DNA, 612 bp, Homo sapiens
  misc_feature (224)..(224): n is a, c, g, or t
  misc_feature (226)..(226): n is a, c, g, or t
  misc_feature (230)..(233): n is a, c, g, or t
  misc_feature (265)..(265): n is a, c, g, or t
gtcggccgcctactactactaaattcgcggccgcgtcgacgcgagaaaactgaaaatcacagaaaattagaaatacacactgtaggacgtggaatatggcaagaaaactgaaaatcatggaaaatgagaaacatccacttgacgacttgaaaaatgacgaaatcactgaaaaacgtgaaaaatgagaaatgcacactgtaggacctggaatatggcgagaaaangnaaannnnggaaatttagaaatgtccactgtaggacgtgnaatatggcaggaaaactgaaaatcacggaaaatgagaaatacacactttaggacgtgaaatatggcgaggaaaactgaaaaaggtggaaaatttagaaatgtccactgtaggacgtggaatatggcaagaaaactgaaaatcatggaaaatgagaaacatccacttgacgacttgaaaaatgacgaaatcactgaaaaacgtgaaaaatgagaaatgcacactgtaggacctggaatatggcgagaaaactgaaaatcacggaaaatgagaaatacacactttaggacgtgaaatggcgaggaaaactggaaaaggtggaatatttgtcgacgcggccgcgaattta

SEQ ID NO: 671330 - DNA, 437 bp, Homo sapiens
aactgagggtagtaaactacatcagttctcccaagcactcgagtcccagcttcacccactgtgtgtgcttatgtttgaactgttcaagccttttatagccttaccataagtatttagatatggtgtcctttactgtttaaggggggggagtaatgtcgtgtttttgcaaagtaagtgcttacgtattaacttagggtatgtcccctctgtatgtatcgaaggggttatggctcttttatgcttctagttttctataaacatgttttccactcccacttggccattttggaagctggtcagctagcaggttttctgagatgtcgggagcactagatgaccttatcgggtgcaatcactagctaaggtaaagctagaaacctacactgtcactttactggagatatctgagtatactttacatattggcttcatgtagc

SEQ ID NO: 671331 - DNA, 521 bp, Homo sapiens
  misc_feature (394)..(394): n is a, c, g, or t
  misc_feature (443)..(444): n is a, c, g, or t
  misc_feature (455)..(455): n is a, c, g, or t
  misc_feature (458)..(458): n is a, c, g, or t
  misc_feature (472)..(472): n is a, c, g, or t
gtcggccgcctactactactaaattcgcggccgcgtcgacgacgaaatcactaaaaaacgtgaaaaatgagaaatgcacactgaaggacctggaatatggcgagaaaactgaaaatcacggaaaatgagaaatacacactttaggacgtgaaatatggcgaggaaaactgaaaaaggtggaaaatttagaaatgtccactgtaggacgtggaatatggcaagaaaactgaaaatcatggaaaatgagaaacatccacttgacgacttgaaaaatgacgaaatcactgaaaaacgtgaaaaatgagaaatgcacactgtaggacctggaatatggcgagaaaactgaaaatcacggaaaatgagaaatacacactttaggacgtgaaatgatggngaggaaaactgaaaaaggtggaaaatttagaaatgtccactgtaggacnnggaatatggcnagnaaactgaaaatcanggaaaatgaggtcgacgcggccgcgaatttagtagtagtaggcggccgc

SEQ ID NO: 671332 - DNA, 130 bp, Homo sapiens
gtctgactctagatggatcccctagttttaattgggaacatacgatgatggagcaaccaaactacaatgatgatgtgcactggtgtgctcatatggtggtacctgatgctctgaattctgtaaatccatt

SEQ ID NO: 671333 - DNA, 503 bp, Homo sapiens
  misc_feature (333)..(333): n is a, c, g, or t
  misc_feature (335)..(335): n is a, c, g, or t
  misc_feature (339)..(339): n is a, c, g, or t
gtcggccgcctactactactaaattcgcggccgcgtcgacgcgagaaaactgaaaatcacagaaaattagaaatacacactttaggacgtgaaatatggcgaggaaaactgaaaaaggtggaaaatttagaaatgtccactgtaggacgtggaatatggcaagaaaactgaaaatcacggaaaatgagaatcatggaaaatgagaaacatccacttgacgacttgaaaaatgacgaaatcactgaaaaacgtgaaaaatgagaaatgcacactgtaggacctggaatatggcgagaaaactgaaaatcacggaaaatgagaaatacacacttnangacntgaaaaatgacgaaatcactgaaaaacgtgaaaaatgagaaatgcacactgtaggacctggaatatggcgagaaaactgaaaatcacggaaaatgagaaatacacactttaggacgtgaaatgaggtcgacgcggccgcgaatttagtagtagtaggcggccgc

SEQ ID NO: 671334 - DNA, 634 bp, Homo sapiens
gtcggccgcctactactactaaattcgcggccgcgtcgacgcgagaaaactgaaaatcacagaaaattagaaatacacactgtaggacgtggaatatggcaagaaaactgaaaatcatggaaaatgagaaacatccacttgacgacttgaaaaatgacgaaatcactgaaaaacgtgaaaaatgagaaatgcacactggaaaactgaaaatcacggaaaatgagaaatacacactttaggacgtgaaatatggcgaggaaaactgaaaaaggtggaaaatttagaaatgtccactgtaggacgtggaatatggcaagaaaactgaaaatcatggaaaatgagaaacatccacttgacgacttgaaaaatgacgaaatcactgaaaaacgtgaaaaatgagaaatgcacactgtaggaaaatatggcgaggaaaactgaaaaaggtggaaaatttagaaatgtccactgtaggacgtggaatatggcaagaaaactgaaaatcatggaaaatgagaaacatccacttgacgacttgaaaatttacaaatcactaaaaatttaaaaaatgagaaatgcacactgaagggcctggaatatggcgagaaaactgaaaatcacggaaaatgaggtcgac

SEQ ID NO: 671335 - DNA, 435 bp, Homo sapiens
  misc_feature (201)..(201): n is a, c, g, or t
  misc_feature (203)..(203): n is a, c, g, or t
  misc_feature (207)..(207): n is a, c, g, or t
  misc_feature (267)..(267): n is a, c, g, or t
gtcggccgcctactactactaaattcgcggccgcgtcgacgcgagaaaactaaaaatcacggaaaatgagaaatacacactttaggacgtgaaatatggcgaggaaaactgaaaaaggtggaaaatttagaaatgtccactgtaggacgtggaatatggcaagaaaactgaaaatcacggaaaatgagaaatacacacttnangacntgaaaaatgacgaaatcactgaaaaacgtgaaaaatgagaaatgcacactgtaggaaagnacctggaatatggcgagaaaactgaaaatcacggaaaatgagaaatacacacttaggacgcctggaatatggcgagaaaactgaaaatcacggaaaatgagaaatacacactttaggacgtgaaatgaggtcgacgcggccgcgaatttagtagtagtaggcggccgc

SEQ ID NO: 671336 - DNA, 598 bp, Homo sapiens
taatccaatccgaaggttcccaaatcgccccgcacatccggtttaggcttttagggatactttctcgtccattgtctcttgtcttcgcggggcccctataaggggggacgcggttgttcccggtctacgaggaaaaagggtaaaaccttcgagagttgcgaagccgagtgccgaatgataaggccgagcgacgaatccttggcttctctccgataagctccctactttacctgctctctgacggctagcttaaaaggatttttgggtaatagagatatatctctaaaaacggccgttaggggaggagctctagtgtattaaggcggatggaaagtttaggtagggtgcgctgttgtgtcttgtgtattgacttaggccgagggggattagcgtttttatgaatcgggggcggttagacgtcggtttcgtgtaattcggcctcgtgtgtagtgctgtacttttcttctgtcgataggggtatcgtcgtcggttccgttatcggcgttgatgaccttggggcggtggcgtggtggtggtagtagtggtagtgcttgtgactgtcgtctgttgggtacctgtatttcgaacgtagtgctga

SEQ ID NO: 671337 - DNA, 601 bp, Homo sapiens
aagtgcctgtgtggtctgtttacagtgcagaaggcggctcagcagtgcaatggctgacagccttggaccgggagtcagaagcctgggttctggttgtagctctggcccctccctgtgatcttcaacaagccacttgctttctctcgtcttcagtttcctcaactagaaaatgaacagcagctgaaattatgttgaagatccttttatacctgaaagagtttcttcatagaaatttctgtgtggcagagagaggcaggaagctggcagtggcagcttctggcaggcaagggcttccaactgaggcagtgcatgtgtggctccctccttccctgtcagggaggttggagggaagaatctaggccttagcttgccctcctgccacccttccccttgtagatactgccttaacactccctcctctctcagctgtggctgccacccagccaggtttctccgtgctcactaatttatttccaggaaggtgtgtggaagacatgagccgtgtataatattttttttaacattttcattgcagtattgaccatcatccttggttgtgtatcgtgtaacacaaataatgatattaaaagcatcaaacaaa

SEQ ID NO: 671338 - DNA, 255 bp, Homo sapiens
cgactctgcctccttggttcaagtgattgtccgtgcctcagccttgtgagtagctgggactacaggcatgtgccaccaggtcgggctgatttcgtatttttatgaatagtaggatggggttttaacatgttggtcaggctggtctcgaactcctgacctcaagtgatccgtccacctcgccctcccaaagagttgggattacaggcatgagccaccgccctggccctcaaaaaaacgctttcatctgaccttgat

SEQ ID NO: 671339 - DNA, 173 bp, Homo sapiens
ataaagtcagttagaaggacttccttaacaatgactatcataatgtcttacttaaaatacagtttcgtattctgtcaatgcacatataagacaggttgagccttcatcacgtaacaacatattttgtagatcacatattgatttttcacacatcaacaatgtatttcaaactc

SEQ ID NO: 671340 - DNA, 367 bp, Homo sapiens
  misc_feature (335)..(335): n is a, c, g, or t
  misc_feature (341)..(341): n is a, c, g, or t
gatttcggcacaggaattcctgacctcaggtgatccacctgcttcggcctcccaaagtgctaggattacaggtgtgagccaccacgcctggctaattttgtatttttagtagagatggggtttctccaaaggctggtcttgaactcccgacctcaggtgatccgcccaccttggcctcccgaagtgctgggattacagggcgtgacacacgtgcccggcctggatgtttttgaatgattatggaaaatggggtattacagcatttaaaacttagacttgatttttaaatatattaatttcctttttaaactcaatataatggttaataatacctntaggcnattaccaggcactttcctgaaaggtt

SEQ ID NO: 671341 - DNA, 237 bp, Homo sapiens
caatgttggactcagatctccaatgtgatattagttccattttgcactacaaaaagaaccaaaatggtaaagggtgtgtgaggaccaaccctcatttctgccagctcatggatgtccaacattttggcttgcctgggtcacatttaacgaacagaaattgtcttgagccacgtatatgtaaactgctccaaaagtaatgttttccgcggaaaagtaatttatttccttggtcgacgc

SEQ ID NO: 671342 - DNA, 1107 bp, Homo sapiens
gacaagcaccaaaagcaccacaagtaccacaagcatggcaagcattcctcattttcttctgcatcttcttgtatactatcactgctggtccaagcattgggagccgcaaaacaagtcacaacagaagcaaatgcaacgacacagagtcaaaaacaccaagatgccacgatagacaacagaagcgaaaagaaagacaaaagaaagacacaaacaaaccacaataaaacaccaaacaagcaggcacaacaacaccagaacagaaagacagcacacagaagaagacatcaaagcaaacactgacgaccagaaagaataggacaacagaccacaagaaaccaacaaagaaagacagccaacgagaaacagaaaacacaacatagacataaaacgacaaaccaagaaaagagaaacaaacacaaaaaaaccagaaaagaagaacaccaaacaaccaagagacagaaaaaaaacaaaaaaaagaaaaaaacaagaaagaaacaaggaagaacaaacaacacaacaaaaacaaaaacaaatagaaagatacgacaagcaaagcacagcacaaggcacgaagaaaacagaacatagcgagacgagagaaagaagccaaacaaacccaaacacacaccaaacaaacccaaacgcaaacgacaaacaccaagacaaaaacggatccacaaaacaggaggcaagcggaacacgacgaaaacagcaagccaacagtgcaacagaacgacgaaacacacacaggcaaaagacaaaagaaagacagaaaagaaacaagcagacaaagacacagaacaagaggagacagaagaagagaaatggaactagaagagcaaaagaaaaaaaaaaaaaaacacccaaacaaagacaaaacaaacagaaaaggaaaaaacggaaaaagaaaaagaagcagaagaaagagcgaagacaaaacaacaaaaaaagaacagaaaaaaaacacagaaaaacataacaagagaaagaaaagaaaggaacagaatagaagacaaagaagacaaaacaaacgaagaaacaacaaaaacgaaaacaaagcaagatgacagagacagcatacagaccaaaacaacgaaaccgacaaga

SEQ ID NO: 671343 - DNA, 91 bp, Homo sapiens
tgacacggctgctactgtgagaagtaaaattctctctaaaaatcataaatcagatcacgccactgcactcgtctgggtgagaccctgtctc

SEQ ID NO: 671344 - DNA, 327 bp, Homo sapiens
  misc_feature (15)..(15): n is a, c, g, or t
tctcacgtcaccagntgcacatatgagccccatagggaaacatggcccctcaggtaggtggctggggattctgaaataggcttaagcaacattggtttggaggttgattagtccttggccagtctgtgctgactagtgactggtattctccgctcctgcttcactcttccctccgcccccgaccgcgcccaccgcaggtcaccacctatttgcagcaggactacaacaaccgtgtggatcatcaagaaccgtaacataaactcaggtaatgtggtcagagactgatgctgcttgtgctgttactccctcggagaccccgtctccaca

SEQ ID NO: 671345 - DNA, 391 bp, Homo sapiens
cttctcttcttcctctccttcctcctcctcctcctcgtcctcgtcatcacggagggacgccagcacctgggccaggtggaagccctccagcacctccggaagcggttcacagccttcttctcccaggtggtggccattcaggtccagcttctccagctcagcttggtcggccagggcctcagcaacagccagggcagcatccctctggatttcacagaaggacaagttcagctcctttagctggggcaggccgccgcggatggcatctgcaagggcaacggcaccctgggagcgcaccaggcagtccccaaaattaatcacctccaccggccgcaaggtcttcaaggtctcggccagggccacggcgcccttctcagggaaggtgtggtca

SEQ ID NO: 671346 - DNA, 262 bp, Homo sapiens
ggtgactctacccgatcctaacggtctgttacctctcgccccttcaagtatgtcatccgtcaaattactagcctccattgtcgcatcagtgtggataggtgcgtggcggcgattgtgataacatccggcggtttccaggcctgccccgaggtggttgcctaataacgtgcagatccgtgtcataactcgttgatttgtcgtaatgtcgtttgtcatgtgcacctgttgcctgtgcagcatgctgagacttacgttctgtccc

SEQ ID NO: 671347 - DNA, 215 bp, Homo sapiens
tctcaggatcccccgtgtcatctgttgcggtatactgtttgcggttgctggcaccatatgaccaatccctggccttagtctagcttcatctcccttgcgtttattgctatggttcttcaccgcttttcccgttcggctgtggcttggctacccgttgtgagctgcattgcttcctgcttaatgcttgtccctttcgatcgtcgtgatttccaggg

SEQ ID NO: 671348 - DNA, 107 bp, Homo sapiens
gctagattttaatatccttgaagccctgggcaagtgcacacgtctttttaaaagaaacatggtttacttgcacacaaactgatcagttttgatgagatctgttaatt

SEQ ID NO: 671349 - DNA, 344 bp, Homo sapiens
  misc_feature (9)..(9): n is a, c, g, or t
  misc_feature (182)..(182): n is a, c, g, or t
gagacagantcctcactctgttgcaaaggctggaagtgcaatggcgtgaatcttggttcactgcaacctccacctccctggattcaagcaattgtcgtgcctcagcctcctgagtagctgggattataggcacgcaccaccgtgcccagctaatttttgtatttttagtaaagatggtgttncactacgttggccaggctggtctcgaactcctgacctcacgtgattggctgccttggcctcccaaagtgctgggattacaggcgtgagccactgtgcccagaccagaactattttcaatttaaacttcctgaagtcttggtactcatggatttaaaaaaaaa

SEQ ID NO: 671350 - DNA, 398 bp, Homo sapiens
cgctgtgaaatttggggtctcaaggaaaataataattgccagtacttgccaatatcagaaaaacggcgaaagacagaattatttatttatttagagaaagagtcttgctatagacgcccaggctagcagtgcagtggcgtgatctcagctcacagcaacctccgcctcctgagttcaagcgattctcctgcctcagcctcctcgagtagctgggattacaggtagccgacaccacgcccggctaatttttatatttttagtagagacagggtttcacccatgttggccaagctggtcttgaatgcctgacctcaagtgaacatgccgcctcgggctcccaaagtgttgggattacaggcgtgagccaccgtgcccggcctagaaagccagaatttaaa

SEQ ID NO: 671351 - DNA, 361 bp, Homo sapiens
cggtaggcggaggcctagtgcgtcacccacgtagaagttggtcagtaagagattctcttgtgcacagctgacatctatatatatgtggtgcaaagagatctctcagaagctgtccagatggaccttctctatatggcaacagcgcggctgtatctttggccacagcccatccatcgggcacagccattgaagggtagtatggccggcctgggccactccgaaatctctgtcagttctctctcagcctccatgttttaccgcagggtctggtgggaatgacccctcctcttccccacctcccaaggttctctacacccgccggcatgggtccgcgttaagagagcctcccgtatcagggtct

SEQ ID NO: 671352 - DNA, 158 bp, Homo sapiens
ttttttttttgggggcggggggaaaaaaggccctcccaacctaaatggggccccggccttttttgccccattaaaaacttttttggaagaaaaagggggccccccctggggggttttttttttcccccccccccccccttttttggaaaaaattttta

SEQ ID NO: 671353 - DNA, 287 bp, Homo sapiens
  misc_feature (48)..(48): n is a, c, g, or t
  misc_feature (89)..(89): n is a, c, g, or t
  misc_feature (130)..(130): n is a, c, g, or t
  misc_feature (183)..(183): n is a, c, g, or t
  misc_feature (210)..(210): n is a, c, g, or t
  misc_feature (252)..(252): n is a, c, g, or t
  misc_feature (260)..(260): n is a, c, g, or t
ttttttattttttgagacagagtcttatccagcctgggaaacagagtnagaccctgtctcagtaaataaatatataaatacgataaatntagatatgaaagcagactacagtataaaacactgctcaganacattttgcgaccgggcgcagtggctcaggcctgtatcccagcactttgggangccgaggcagcgaatcacctgaggtcnggagttcgaggggctgaccaacatggtgaaaccctgtctgtnacttaagnatggcaaaattgggctggggcatgggt

SEQ ID NO: 671354 - DNA, 1497 bp, Homo sapiens
  misc_feature (220)..(220): n is a, c, g, or t
  misc_feature (398)..(398): n is a, c, g, or t
gatcgtctgtagagctctcgtctttctgcggatctcggtgccctctccttttcgttacctggaaacatggcctccgcgtgtgcctgtctctgagtggtgtcatcaaggggtgcttcaagcgactagtgaagcgatgccggtaaagtacatatcatagcgtccatgtagtgaggctagataggaaggccgtcataggaacaggcaggtggctctttcttgnctactgtacgttgacgggacagaggaacacgaaatcactcccattcacgtggtggatgtgtattgggccacaaggaaggagttccttggaggtaagagcgtccagagtttgttgcgaggcactaagtaaccgtagtttgctggaagcaagtaagcgcacactattgaccaggcgctanacgcaatttttttggttccacatggaagtttgggctttggaacccaaggaattcactacgggggaaccattgtggtcaaccagggcaatatatttggttctggccaccttttccgtttaaccttgttaacattgggtggccaaaacgcccccttaaccttgcaacggtaaagccccacaagggtggacaatggcaccgcgccaaaatggataagatgtaacagcgtgacattctcgtgtgagatgaatttcttacttaactttcgcatgtggtaggcacacccctgcgggaaatgaggttccttttgtcggcagccacccagttattatacggaaaggccaaaaaacacaagtggtaggttattatactttaggacgagcaaagaggcggttctccaaaaaggggctgaaaattctgggccccttagggttccaaccaccgagaacaacacggagaatagagcgccgttatagaatccaaaggttggggccaattgtccgaaaatattggccgacggtttggaattaagttttcgggaccaaatgagagggactttacgcattaattccttagggggcattaaagtcccgggaaatgtgcgagaaccgagccggttcccacacacaatgtgtgtgagagccaccgggtgctgtataaggccaatacaacagcccttgggatggacccaaagagtaaaggaaaaaaatagcgccatttgggtggagtgtggcggcacggccctaactggggtttaagagccccactggcatttcccgagaagattcatgtttaccaccatcctgttggaggagaaaaggggagggtccaactttaaggggccccattattaatctcggctttgggacagggtactcacgccgcactttattcctctttgggggtcggccagcagcctccttttcagaacttctgtgtgcgggagaactatggccttaattcttgccatctttttgggtgtaccgaacatagggggggcaacacgccacccagaagaagagaaggacgaaccttctttgggcacgcacgccctctttatttaggtgtgagaagctggagaaagagttttatttttgagacc

SEQ ID NO: 671355 - DNA, 535 bp, Homo sapiens
  misc_feature (385)..(385): n is a, c, g, or t
  misc_feature (391)..(391): n is a, c, g, or t
  misc_feature (424)..(424): n is a, c, g, or t
  misc_feature (429)..(429): n is a, c, g, or t
  misc_feature (443)..(443): n is a, c, g, or t
  misc_feature (453)..(453): n is a, c, g, or t
  misc_feature (490)..(490): n is a, c, g, or t
  misc_feature (525)..(525): n is a, c, g, or t
  misc_feature (532)..(532): n is a, c, g, or t
agggtcttactcccactgtgaaaccttccccagttattctcaccccttcttctcactcctcatgagctttatcttggcagtcttacggctcttatgcctagcaaatctccagcctaattttatatatttttttgagaaagggtcttgctctgtcacccaggctagagtgcggtggtgtgatcttggctcactgcaacctccccctcctgggttcaagcgattctcctccttcagactctcgaatagctgggattacaggcacgcctcaccacgcccagctaatttctgtatttttagaagagatggggtttcgccatcttggccagggctggtcttcaaacacctgacctcaagtgatccgcctgccttgggccccccaaagtgntggggnttacagggagtgagccactgtggcccaggcttncaacntaatttggagtttnatttgtattnttttttcatcacctttacagtgttaacagctgttttnaacattaaattccattataaattataatacatttnaaggacntgt

SEQ ID NO: 671356 - DNA, 248 bp, Homo sapiens
tctaaggatccagtgttcttcagacacagcaaaattttaagggtcgcctggtaactcaactcgtttgaagactggaaggcaagagagagatgaacaaggaagcagaagaagaagcagaaggagatagaggaagaaaagaaggcgtatgctgaagcacggagaaatatggtagtagattgatgactcccccgaagatgtataagacaatctctccagaatatcttacaccgggaaaacagggaaataat

SEQ ID NO: 671357 - DNA, 186 bp, Homo sapiens
aatggtgtacctaaatggctgtgatcgtacactgcactctagcctggacaacagagcaagatcctctctcttaaaaccaccaacaatgacaacaacaaaacaacatttttatttctcaatgtaagctccatcaaggtcaagatacttttgtaagctgtgacaccagccattagtccacctcaactg

SEQ ID NO: 671358 - DNA, 312 bp, Homo sapiens
cgcaatgtcaaaacctggagggagaatcgtttacctgtgtacagaacaaggcagaagaaccatggtagctggactcttatagttctcctgtataaacaagaatgaaaaacagtataatcaatcggatcaacatgcaaagagtgatgattgaaatgtaataacaatgtggtctttaattataatgtgaggagttgaatggaatagaggaccaattatctattcaatagagtagtataaaatgtcaagcttcgaagaggaagagaatttaagtctcataaaaagaagaaagtgatgaggagtgagacatacact

SEQ ID NO: 671359 - DNA, 1234 bp, Homo sapiens
cgcagcccttgaccctgtgccccggactggagctgcctggcctgcacggcacctggcctctgtgcctgtatgcctcacctgtgctctggcaagatgtctggtgaatggacgggctgcacagcgcaatgtgggcagcgctgaaggagaagctggtgtgccacaggattcggaccccacggaggccaagcctggagatgcgctggaccctgagctgtgcatcctggctgctccagatgccctctgtggtcaactactccgtgcctgctgcaagctgccttggagggcagcagacgtgcggctggatggttgcagttcctggagcagagacggcagttgcacagtatctaccgacgccgctgcttgcagggtcaccctgccgtcagacttgctgtagcgcgccggtcaatgaactcagctggcaagggacaatcggagtaccatcctacagcaaccagtggctactgtgcgcacagactcatcccaagggcccttgggaaaacattccgaacgtgactggtgacaagaacagcagggatgtaagaagcctacttggcgtgcaccttgtgacatcgtaactctcaccgagtggccaacagattgcatgaacccactgggaacagaccccattggaccaaacttacaacaggaccgggtgatgcaggcacaagacaagtacccggcacatacaagaacttaggatacaatggcaaacagaaagctcctcccggcggccaaggcgaacaacacagtgaccccaatagcgttggggtaccagacccacttggaataaaagccggtgaattccaaaaggcaccggaacgatcacattagggaggcccacccagggaaggaaaccactgaaagacaggatggacagaaaaaccacagagaatggcagggaagaccgtcaagataaaactacagggggaaatgcgaggataggatagggaacaggggacccatacgggagagccaaaccaattgacgaagggaaagacagagtccaccccaccaaagagtgaaacaagggagatacccgatgtcaccaagggacaatcgcacacacaacaacagtggaaacacaaagaggggcacaaggggccccaagacatatgaaccaaaagggggcaaaccccacgagcaacacgacacacaaaaagaacaagaaacccaacacaagaagtagaacgaggaagtgaggggaagacccaaggaaagaaaaaccacacaaggg

SEQ ID NO: 671360 - DNA, 343 bp, Homo sapiens
tgagacagagtcctgctctgattcccagggtggagtgcagtggcttgatcttgactcactgcaacctccgcctcccaggttcaagcaattatcctgcctcagcctcctgagtagctgggattacaggcatgcaccaccatgttcggctaatttttgtatttttagtagagacaagggttcaccatgttggccaggctggtctcgaactcctgacctcaggtgatccgcccgcctcggcctcccaaagtgctgggattacaggcgtgtgccaccatgcccagcctctcagtgaatttttcttggttaagcacctatgtcgacgcggccgcgaatttagttagta

SEQ ID NO: 671361 - DNA, 518 bp, Homo sapiens
gaagcgaggtgactgacaaggccctgtggagcgtccctggcagaggactccggccagcctgagtgacgcaatccaaagaggcgctcccgggtaggaaatggccccggtggaatgccttgccagagcagcgcatagcaggctcccgagaaggattaacactggctgaacaccgggaaggaactggcacttgaagtccagacatctgaagcttgtcaagactagtcttgggaacttgccccactccatgtgagtggaagcatggcctgatcacccacggtgtgcctgtatggacatctttgttctggtttggactgggcttgacttggtaagactagtcttgggaacttgccccactccacgtgagtggaagcgtggcctgatcacccacggtgtgcctgtatgggcactttggttctggtttggactgggcttgactaggtacgactagtctttggaacttgtcccagtccatctgagtggaaacgtggcctgatcacccacagcaatgcctgcatggg

SEQ ID NO: 671362 - DNA, 716 bp, Homo sapiens
atgaatggcactagttatccagcttatacgaagctacttaaagtcgagaatgcgtcccaaggctctgggctccaaagaaataccaaagggagctgaaaattgcttggaaggccttatatttgtacatcacaggcgtgcgtggagtctattgaacgagatgaggccaagtctctaattgaacgttcaatgggggaaaagtaacaggcaaatgtcagcgagaaaacaaattatcttgtcatgggtcgtgactagtggcacagtccaagagtgataaggccgctagccttggggacaaaaattacttgatgaagatggcctgcttgaatctgattcggacgtatgccaggcaacaaagtccaagtagtgaaactagcagttgaaactgagactgaagaaagagtccaaactggagagaacagcccataaaaaatgtccaaggaaacaagaaagaaattagtccatctaaacaaggaatcagaatctaaaaagagcaggccgacttccaaacatgggacagttttggcaaagacaataaacgaaggacagcagatgtgttctggaaaagcctggtacttccaggagcaggtgggctgagggagacaagtggtgacagcaggctaggaatctggctgactgacagcggtgaaaacaagtggacattgcccgggtggtaaaaatagcaactcgttcaagacctatggaagcacgtgccgagg

SEQ ID NO: 671363 - DNA, 409 bp, Homo sapiens
gaaatcactcttcgtcacggctgagagcagttgcccaggcacatcatcacgcaaggtgcaccctgactttctgactggcacagaggcacatgttggctgtgaatgtgaccaatagaaagaagcccgtatttctcagtcagtcctagcaccccggtaagtaattaacagagaataaaaatgtgtttgttacatgacaaagcagcagtttatcaattgtaaggtctgcttgagagcctttgatgtgcgttacttttcctgacttatcctttctttaaaattgtagatggtctcacctggtgagtgcggcttacagggtatgcccacaatgtacatttctcggcatctgtgcctcagtatcctcatttataaaatccctatgatctctgtctcacctactttacagggttgc

SEQ ID NO: 671364 - DNA, 244 bp, Homo sapiens
  misc_feature (148)..(148): n is a, c, g, or t
  misc_feature (243)..(243): n is a, c, g, or t
gctgagtcggtcaatagtccaatttgtctattttttgttgtgcccctatgaaaatatcttgaggtctatctaaaatatatttgcctattcttctgaagtgttcccctatgttttcctgcagtagttttataagtttggggtcttatangttaagtatttacattcattttgagtttatttttgtatatggtgagagatacagtctagtttcattcttcactatatggataaccagtttttccnc

SEQ ID NO: 671365 - DNA, 859 bp, Homo sapiens
  misc_feature (296)..(296): n is a, c, g, or t
  misc_feature (322)..(322): n is a, c, g, or t
  misc_feature (430)..(430): n is a, c, g, or t
tatcttgcactggcctcaggggccgactggctgttcataccccggaggctccacccgaggactggctggtgagaacttcatgtgtgagaggctgggtgagactcggagcctgtgggtccctgactgaacatcatcatcatcgctgagggtgccatttgacctgcaacgggaagcccatctcgtccagctacgtgaagtgacctggtggttcagaggctgggcttcgacacccgtgtaactgtgctgggccacgtgcagctggggagggacgccctctgccttcgaccgtgatcctngagcagcaatgatgggcatggaggcnggtgatgtgctgctgctggaagccacgcctgacactgccggcctgcgttggtcacccctctcgtgggaaccagtcagtgcggctgcacccatcatggagtgcgtgcangatgaccaaggaagtgcaagaaagccatggatgacaagaggtttgacgaggccacccagctccgtggctgggagcttcgagaacaactggaacatttacaagctcctcgcccaccagaagccccccaatggagaagtctaacttctccctggccatcctgaatgtgggggccccggcggctggcatgaatgcaggccagtgcagctcggcggtgcggaccggcatctcacatggacacacagtactacgatggtgcacgactggcttcagaaggcctagcccaagggtcaggtgcaagaagtagctggcacgacgtggccggctggttagggacgtgctggctcatgatggagaccaagaggacctgccaggccagctgatccatgtggagaaatccgcttatggatcacgccctgctgcggcgagcac

SEQ ID NO: 671366 - DNA, 439 bp, Homo sapiens
ctcagatcactcagaaaaactctggtattggccgggtgcggtggctcacgcctgtaatcccagcacttagggaggccgaggcgggcggatcacaagttcaggagattgaggccatcctggctaacatggtgaaaccccgtctctaccaaaaatacaaaaattagctgggcatggtggcacatgcctgtaatcccagctactcaggaggctgaggcaggagaatcgcttgaacccaggaggtggaggttgcagtgagtcaagatcgcggcactgcactccagcctggtagacagacccagacactgtcaaaaaaaaaaaaaaggaaaaaaaattcccatttccccttccccctctttcttttttattccaaaatgatcgtgtactttattgggccccataatattatccggaagggtcctgtggcccaaaacacacaaaa

SEQ ID NO: 671367 - DNA, 413 bp, Homo sapiens
  misc_feature (27)..(27): n is a, c, g, or t
  misc_feature (61)..(61): n is a, c, g, or t
  misc_feature (116)..(116): n is a, c, g, or t
  misc_feature (121)..(121): n is a, c, g, or t
  misc_feature (142)..(142): n is a, c, g, or t
  misc_feature (171)..(171): n is a, c, g, or t
  misc_feature (226)..(226): n is a, c, g, or t
ttgtggagggccttgaaagccaaggantgcctaacattgcctggcctttggaaaggaaggnaggaaggggcccaccaagcccaaggaattccaaggtctggaaaaggttaggaccngcccntcctctttaggtaaaggaatngaattaatatatttgcacagttcggttgncccaaggtttaaattccctttcccaaatggcctccgaaatgaacctgtcctgctncatttgcattaagaagatgtgtttctgtttctcacagaagctattgacctaatctacgctgctccactaaattgacttggatcttgacgttcataatgttgagtgactgcagaacttaatttagccacaagatggagacttcatcctagtcctggaaaacatctcagcacctggggtttctgtgtaa

SEQ ID NO: 671368 - DNA, 175 bp, Homo sapiens
ttcccgtctctgaggaacacctgccatcaatggctatacatatccaaaccaatctaaacgctattaacctataaaggtagtagagtaaaggtaaaagtaacataattgaaagtacacttaaagaacactagagataccgtaacactactagatctactggcaagtgtactcagta

SEQ ID NO: 671369 - DNA, 258 bp, Homo sapiens
  misc_feature (2)..(2): n is a, c, g, or t
  misc_feature (142)..(142): n is a, c, g, or t
  misc_feature (201)..(201): n is a, c, g, or t
gngggttgagggcggtggctcaggttcctggaaaggacggtccacccttccgcgctgggggtgtggacgcggaattcagcggagaaacgcgattgagaaatggaaaagaaaatgaaataaataagcagttatgagggagagntaagagaattatgggaaaatcaggtgattgttccagaagtgaattgcagggagaagagnttgctgagtggagtgagggcggtctcctgaaggagggagtaaagcaagaggagtttg

SEQ ID NO: 671370 - DNA, 816 bp, Homo sapiens
ggtggactggaacggggcggaggtaaccagaagcggctagtggcggctgcctgcgtccccaaccccctccgcgcagcgctcgcgactacgcgtgtccatggagtggtgagcgagcggtcggggccagctgactgttctgatgcctgggcgcagctgccatctgctctgggaaggcaccagggtgtccccgctcgacccatcagctcgaagtcagacaccatggaggcgcatgcacaaggttcgttggagactgaaccgtctgcgaaggaacagactgaagatgcagtagccagtgctgacttctctagcgatgctctctggaggaggaaaaggacatgagttagaagcagagttagttcaagcgtagaaggactgaaattgcacgagacgacgtagtgacaagtggtggtcaggggaaaggaccgggcatctagtgggagataaatagcgagtagagtcgaggttgaacctgatgagtgagacttaaataccagaaccttcagacgactcagcgtgggcgatggagcatttgcagaaatctaccaacttgctcgtaccaaggaaaaatccaccattgaaagccgcttgtagtcagcgcaagggcaggacagggaccaccgtgtcagtctttttgcacgacaatagatttgggcatagaccgggtactcattccaaggccactagcaaagggtacggggaagaaatcgattgcacgaaacgaaaacatggtaaaggccgggtttaccgagaagccgcgtaaaagttgggagcggcgaggtctgttgaagtggcacggatccccttcaagcttcctca

SEQ ID NO: 671371 - DNA, 1435 bp, Homo sapiens
gacgaaaggtgagagtggtagagggcgtgtatgtcgtactgcagcgagccgtctagtcccgcatcccacctagatcgatgaaagataggcactactacgagtatgtctgtgataatgggccacaaagtgtagagctgtgtagaagagagtgtgatgactggtgagtgaatgctcaagattgtatgtgatcgatctgcctaccacaattatttgtctcatgcaatcgtcgtctgtgcgtgagtcacaccaggttgggttcatcattctcgtattattggtccaacaaagaagtttgagatgagttggtcgacaagtgttgaaggtgagtgacaattgtctagattcataggtcagatgtaagggtctgactgtatactactgcggttatcgagcaagttgtccgtacatttgggggagtggcctgatctacacaatagtgtgggtgatattaattattgggtgttatttagtctcacctaatttctaagggtgttgtgttcacctcggggggcacaaatatgattttgttgccagtatataggagagtgttgtctcagaagtttagctcgggtcgccagaaaatgggctttgtggtggggtgggctatattctagttgcaaatgaagtgtgctgcaaaagctcttgtgcgcgtctgtgaccaactgggagaggtggtgtgtctgtgagatactctttgtgtaagtgatatgatttgtgtagagtttccacgtatagtgggtgcgtaccactgggttgggcacatactggtaggggaagtctccactgcgcaggtctcaacaagggggttgtggccacaactgtgttgatagtttactgcggtattgcgttgcctgttcatcactcatagagctgtgctgcgattggagggtgttgccaagtgggctatatctcctgtatgggtaaaatgtgtactctttggggtgtcttggcttgtaaggtggccaccagtgagggtagaccctgtgtgtccacgctgtgttgcagagctcgcgatgcccgtcctgtgtgccgctcacacgtgctatgctagtccaatcatggctagatggatggacagaggaccacttggggaaatccttaagggggcatccagtgacaacacgttaccctgccaagaccccagacgttgggccccgttgcgtcgtgacaatggacacaagctcaggacaaactgctctagacctacttccattgggagggggtgacggaaaccagcacatgtgtggagaccagcttcaaggagcggaagagctggcttgaggcacacacagctgggtcaggggacattctgtctgcacatgtgcatccatggggggacggctcctcacccagcctgcgccactgtgttctttttttaagaggcttccagagaaaacggcaccaccaatccaataaagcaactgagccagaaata

SEQ ID NO: 671372 - DNA, 966 bp, Homo sapiens
  misc_feature (1)..(1): n is a, c, g, or t
  misc_feature (255)..(255): n is a, c, g, or t
  misc_feature (315)..(315): n is a, c, g, or t
  misc_feature (345)..(345): n is a, c, g, or t
  misc_feature (510)..(510): n is a, c, g, or t
  misc_feature (516)..(516): n is a, c, g, or t
  misc_feature (526)..(526): n is a, c, g, or t
  misc_feature (530)..(530): n is a, c, g, or t
  misc_feature (558)..(558): n is a, c, g, or t
  misc_feature (721)..(721): n is a, c, g, or t
  misc_feature (729)..(729): n is a, c, g, or t
  misc_feature (747)..(747): n is a, c, g, or t
  misc_feature (751)..(751): n is a, c, g, or t
  misc_feature (766)..(766): n is a, c, g, or t
  misc_feature (768)..(768): n is a, c, g, or t
  misc_feature (795)..(795): n is a, c, g, or t
  misc_feature (807)..(807): n is a, c, g, or t
  misc_feature (831)..(831): n is a, c, g, or t
  misc_feature (860)..(860): n is a, c, g, or t
  misc_feature (869)..(869): n is a, c, g, or t
  misc_feature (895)..(895): n is a, c, g, or t
  misc_feature (946)..(946): n is a, c, g, or t
nagcaggaaacaagcttggctgagatgcctcaggcctggtaacctgaggtgtagagcacccggatggaagggtaaaagccgggggcaaagcggtggccctccctttctgggggtcacttctgggctggggccagcggacacctgtgtccaagtggctttcagggctggccacaccctaagccttgcgaaggggcctcctgcaagggctggcccatggggtcccccccttcccagccagtgaggttagcctggttnggggtccccatgtgtgcgagtgcttgtgtgggggctcctgtctgcctgtgtgtttttgcnaagctgctcatgtcaatgtgcttgccagtnccgagttagatgttcctttgccgttgccctccagcgaagggtcatttttgggaacaagggtggctcttaacttgttagcgtgcctgtgggcctgtctgtttctggggcctgaggtggtggggggtgggtgttggggtggggctggccttcggggcatttgccggnggcggngtgggtgggngggngaggctgggcagaacaggggaaggagtnaaaaccaggcaggaaagtggaagaacaggagaagctcatgtaatggattaccctccacaggattatgttccttgattcctgagagttttttctcttgattttaccccctcagtctatcactgcgagagaaagaggtagaaaagacaaacagaccacaaaaganagaacccngacatatagacagacgcncctnttgcatgtacataancnagaacctgggagagaagagagaacgtncaaaaaagaacncagagcaggcaggcagcccacccnctgcagcagttctgggcttcactggagcncctacaggnatgtccagcagccctgtatgccactnctctggtttgtccaggtaacaggggtgcccgcccccttcatgatcagcacncggtggttggggcgctgctt

SEQ ID NO: 671373 - DNA, 499 bp, Homo sapiens
tctggggcaaggtcctcggggtggtaactgggatgcaaacaacacaaaagtagtatttttctttaccatataccaagtatgagcctgcttgatatgactttaaaaggcacagtaatgaggacacattaagagcaattctgtcatacaatctaaatcatattctcaacatggaagagggagcagaaaactggtgaaatggtttctagggccatcattactggtaatgaagacgtcagaagatccaactgtgcctgtgtaattattacatgaaatagtcactttcagactgcaatgaattccaggccattcaggtttcccaatcagtatcatatttctatcccattacaagtagattcacgtacatccatccatacatacatatacacacacacacagaaacatacccacacactcgcccctgctgtgaacaatctgtgcacaaggggtgaagagagctaacacctggagacactacagtttcctttcaactcagaggtgt

SEQ ID NO: 671374 - DNA, 693 bp, Homo sapiens
tctcaggctacaccggatgcatacaccacatgaaacatcctatcatctgtaggctcattcattctctctaacagcagtaatattaataattttcatgatttgagaagccttcgcttcgaacgcgaaaagttcctaattatctagaaccaaatccctccatataacctggcatctgactatatggatgccccctcaccctaccatctacatttcgaagcaatcccgtatacataaaatctagcatcaaataaaatggaatggaatctaaccccccaaagctggttttcaactcccatccccaatgtggccgtccactggcacttctttttcaacgagaatagaaaagatagacataaaatgatgatcatgacaaatagagatagataacctagaaaagagaacgatacatgatgaaccgtgtggcccttttttgtgtggcgcgcggtggtgcaacaacctggctttgtcaaagaggcctagtcgtcggtctctagaatggttgtgcctcctgtccactgcccctttctgttgtcaagtactccggtggcgcgctatctcatctggtcggcgcctcccacctatttcttgggaggcggtgtaccttccctctgtccatcccatggcttgagttgacctcctgcccattttatccggggcccggttccttagttttccctggcctttctgtacccc

SEQ ID NO: 671375 - DNA, 108 bp, Homo sapiens
tggtctcatacatttccaactaaaaacactgcatggctttcaggttgcgtagaatctctgccccagtgtttctttcttccctccggcatctagcctctgcaattgtct

SEQ ID NO: 671376 - DNA, 168 bp, Homo sapiens
agagtccctgtggtagcagactttgtgagttcacttgtaattttccatctgaaagcctgttcttgtttttcgtgatgcagtcttgctctgtcgcccaggctggaggttgcagtgagctgagattgtgacactgcactccagtctggtgacagagcgagaccctctcaa

SEQ ID NO: 671377 - DNA, 119 bp, Homo sapiens
ccacctcagcctcccgagtagctaggactacaggcgtgagccactgcgcccggccgagtttagatgattctaatttctagatgcactgcaagtccttgtccgtgttcagtactactacc

SEQ ID NO: 671378 - DNA, 141 bp, Homo sapiens
gttcaagggcagacggagtttttgaggaagactcacaaattgacatcgctacagtacaggatatgctgagcagccaccattataagtcattcaaagtcagcatgatccacagacttcggttcacaactgatgtgcagttag

SEQ ID NO: 671379 - DNA, 907 bp, Homo sapiens
  misc_feature (424)..(424): n is a, c, g, or t
  misc_feature (466)..(466): n is a, c, g, or t
  misc_feature (474)..(474): n is a, c, g, or t
  misc_feature (479)..(479): n is a, c, g, or t
  misc_feature (482)..(482): n is a, c, g, or t
gacgggtcctccctgcctgccgatgtgcatcggtacatgaagatgatccagctggggaaaaccgtgcattacctgcccatcctgttcatcgaccagctcagcaaccgcgtgaaggacctgatggtcataaaccgctccaccaccgagctgcccctcaccgtgtcctacgacaaggtctcactggggcggctgcgcttctggatccacatgcaggacgccgtgtactccctgcagcagttcgggttttcagagaaagatgctgatgaggtgaaacggaatttttgtagataccaacttatacttcctggcgctgaccttctttgtcgcagcgttccatcttctctttgatttcctggcctttaaaaatgacatcagtttctggaagaagaagaagagcatgatcggcatgtccaccaaggcagtnctctggcgctgcttcagcaccgtggtcatctttctgttcctnctggacgngcagncgngcctgctggtgctggtcccggcgggtgttggagccgccattgagctgtggaacacgtgaagcaaggcattgcacgatgacctatttttcggacgacggcctgactgcccgaacttcagtatggcacttacagcgaatctgacaggaaaaccgaggagtacgatactcaggcccatgaacgtacttgtcatacctgctgtaccctctctgtgttcggggtagctgtctatccacctcctgaaatatcccattataagaagctggtactcctggttaatcaacagcttcgtcaaccggggtctatgccttggggtatcctcttcatgctgacccaagtcttagtgaactaacaggtggacgtccgtgtggacattctgacctggaaggcttcacctaacagggcttttcaaccaccttcttggctgc

SEQ ID NO: 671380 - DNA, 563 bp, Homo sapiens
  misc_feature (424)..(424): n is a, c, g, or t
  misc_feature (466)..(466): n is a, c, g, or t
  misc_feature (474)..(474): n is a, c, g, or t
  misc_feature (479)..(479): n is a, c, g, or t
  misc_feature (482)..(482): n is a, c, g, or t
gacgggtcctccctgcctgccgatgtgcatcggtacatgaagatgatccagctggggaaaaccgtgcattacctgcccatcctgttcatcgaccagctcagcaaccgcgtgaaggacctgatggtcataaaccgctccaccaccgagctgcccctcaccgtgtcctacgacaaggtctcactggggcggctgcgcttctggatccacatgcaggacgccgtgtactccctgcagcagttcgggttttcagagaaagatgctgatgaggtgaaacggaatttttgtagataccaacttatacttcctggcgctgaccttctttgtcgcagcgttccatcttctctttgatttcctggcctttaaaaatgacatcagtttctggaagaagaagaagagcatgatcggcatgtccaccaaggcagtnctctggcgctgcttcagcaccgtggtcatctttctgttcctnctggacgngcagncgngcctttcttggtcttggggcccgcggggggtttggggcccccaatttagctttggaaagagtaaggaggcactttagggtg

SEQ ID NO: 671381 - DNA, 392 bp, Homo sapiens
ctgcatcaagaagcatacttttccacgctggtccttgcaatgcgcagcagtctgccatcacgccatagcatcaacgaacaggctctgccgcacatgatccgttcccttaagcgtatacagtgatttgtcacaatctccagtggctgcctccatcaggcatgagcagctggttcagtgcacagtgtcacatattccctaccctcctaagatgtacgattaggcatctccttagcaggtatgatcagcaccagacctagatctgtgtctgcttgcccatcatgtaagcatattcctatcctcattcttgtgtgactctctcctagtgacgtgcgtaaaataagctgagcttgagataaatagaatggtaactcacgtttggtactacattgcac

SEQ ID NO: 671382 - DNA, 191 bp, Homo sapiens
  misc_feature (38)..(38): n is a, c, g, or t
  misc_feature (41)..(41): n is a, c, g, or t
ttttattggaaaatgtgctgattttttgaatgttttanccnccagatttatgaatttttttcttcagcaattggtaaagtatacttttgtaaacaaaaattgaaacatttgcttttgctctctgagtgccccagaattgggaatctattcatgaatattcatatgtttatggtaataaagttatttgcaca

SEQ ID NO: 671383 - DNA, 155 bp, Homo sapiens
cagccgatggcagatgccagtgacagaccatggggaggagatgactactacacacctaatacagtgagacgggcgatggcaagacgtgccacgggctatgtttgtagactaggaccacgtcatgatgagttacgactgacctacgcgctctacac

SEQ ID NO: 671384 - DNA, 166 bp, Homo sapiens
aagcagttcaaacttgcacttcgtgttccatttccagtaagtaacacctggaacaggtcttgtatgtaacttgtgaagcatgtgctggtggtcattggtaacagtcatgtatgtcaacaattgtggcaggcatgccattgtgggtaccgaagctctgaaattacgt

SEQ ID NO: 671385 - DNA, 409 bp, Homo sapiens
tgcctttcggagggcgacttgacactagtacactgtggacgtctgggacccttcccgactagacttaggaccgtcgtttgagttggagaagaaaacgaaccccccgaacacaaattatgtccagtaacgctaccttcttcagagtctcagagagagtgtagttctcctgtctacccctgtccctaggacctcgaaaagaagaggacacaagaccaacgtatgaacttagggtcctttgtcacactgtgccacggttaaatgacggtttgtacgggccaaacagttgtctcggtctgttcctcctctcctctctaagtacggggtttgtgtccggtcgactcctcccgaagcaggaggaaggaaaccgggtctactccctcgcggaagggtcttcagtgtactccttttt

SEQ ID NO: 671386 - DNA, 1890 bp, Homo sapiens
  misc_feature (1536)..(1536): n is a, c, g, or t
  misc_feature (1542)..(1542): n is a, c, g, or t
  misc_feature (1595)..(1595): n is a, c, g, or t
  misc_feature (1598)..(1598): n is a, c, g, or t
cctggcttcggggaagtgccgccgaggcgcctgcgcactgcgcccccgcgccccctccccgactgtcgggccggaccttggagcgcgcgggccggcggcggcgcgagtggctcgggagcgcggctgacccccaggctgtggtgagggtctgagagctggtaccacggagcctgggcaacctcctccgcccacccatgcccaccccgcatgaggctgagaagcagatcacagggccagaggaggcggaccggcccccttcaatgtccagtcatgatacagcctctccagcggcccccagccgcaacccctgctgcctgtgctggtgctgctgctgtagctgctcctggaaccaagagcggcggcgcgcgtggcaggcctcccgggagagcaagctgcagcccctccccagctgtgaagtatgtgccacgccaagtcctgaggaggtgcagagctgggcgcagtcttttgacaagctgatgcacagcccagcgggacgcagcgtgttccgggcgttcctgcggacagagtacagcgaggagaacatgctcttctggttggcctgcgaggagctgaaggccgaggccaaccagcatgtggtagacgagaaggcgaggctcatctacgaggactacgtatccatcctgtcccccaaggaggtgagcctggactcccgtgtgcgggagggcatcaacaagaagatgcaggagccgtccgcacacacgttcgacgacgcgcagctgcagatctacacgctcatgcaccgggactcctacccccgcttcctcagctctcccacctaccgtgccctgctgctgcaggggccatcacagtcctcctccgaggcctaggccgcccccagcagcacagaccccgccgcctcctacggccgactctgggttcccttcaggtgttggtgtcggcagggctgtcagggcacatgcctggccggctggggtccccacccgcggagacggtcctagacccagtggggagtgctgtgtctcctgggtctgcccacccgtggccaagcaggaactccaggtgcagggcgggcctccaggtgcagggcgggccagaagccccctcatcggcccgcagctggctggcccagtgctcctggctgggggctcttgcgtggtgagagtaggggtccccccaggagccatgctggacccatgagcctcgctggggcctcctccccaggcagccaatgggccccagacaagcctttggtggggaacagaacctccgcatcgtgtagttttgtgacataaggagacctcctacttgagctgtctgtaccccagaatcaaacacagaacctcagaaccagatttaggacctcagaatcctgcactcaaggtggcaggacccaatttctgttttatatgttcatgaactttaaacctggaaacatgtccttactaggtgttttatcaaaaaaaagttttcatatttatctctatccctaaccccccaaaaataggatgtcttattattgaagatatttttaaagcaaaaaaaaaaaaaaaaaanaaaaanaaaaaaaaaaaaaaaaaaaaaaaaaaaaaaaaaaaaaaaaaaaaaaaaaaaanaanaaaaaaaaaaaaaaaaaaaaaaaaaaaagcagggaggaggcgcgaccacagacgcacccggacggggcacacactcaagacaacaacagcaaaagagacagaggggcgaccaacagcagagagcgcgcgcaccagcaccccgcgcgcgaggcgccgaccccgccaacacacacagagcggaagggaggagcgcaaccccaacagccacagaaccggacccgccgagaggcacccacaaacgccagccgcggcggaaggaaacaccaaagccgagaacacacacacggaaaga

SEQ ID NO: 671387 - DNA, 2275 bp, Homo sapiens
  misc_feature (1921)..(1921): n is a, c, g, or t
  misc_feature (1927)..(1927): n is a, c, g, or t
  misc_feature (1980)..(1980): n is a, c, g, or t
  misc_feature (1983)..(1983): n is a, c, g, or t
cagcggccctgcccctcccggcccgggcccggggaccgtgctgggcgggagcttcgggagccggcgcacgggactcgaaccccaagggctcccgccgccaggtccacgtggaccctgggccgcagtggaagtggagcccgccccccgctcgtgggggagggggcgccgcagccgggttcccctttttctggagctcaaagcctggggaagtgattgctcaaaggtgggggccggaagaacccaggtttccgcgtctccctccccctctcagcccggtgaggaggggccggggcgggacaccctgtccgcccccgcccccaccccgctggatctggcagccactcagcccttcgagctgtaggggaggcgctgcgcccccggccccagccgatcgggggctcctggcgctagcctccctccagagcgccgcaggagtccctcctgccgtctgacttgagtccctgctgctgcagtgcacgccccttcggcagccagggtggggcccagacccaacctggcccctcctgcccccaccccgcctttgggtcgctgacccccaggctgtggtgagggtctgagagctggtaccacggagcctgggcaacctcctccgcccacccatgcccaccccgcatgaggctgagaagcagatcacagggccagaggaggcggaccggcccccttcaatgtccagtcatgatacagcctctccagcggcccccagccgcaacccctgctgcctgtgctggtgctgctgctgtagctgctcctggaaccaagagcggcggcgcgcgtggcaggcctcccgggagagcaagctgcagcccctccccagctgtgaagtatgtgccacgccaagtcctgaggaggtgcagagctgggcgcagtcttttgacaagctgatgcacagcccagcgggacgcagcgtgttccgggcgttcctgcggacagagtacagcgaggagaacatgctcttctggttggcctgcgaggagctgaaggccgaggccaaccagcatgtggtagacgagaaggcgaggctcatctacgaggactacgtatccatcctgtcccccaaggaggtgagcctggactcccgtgtgcgggagggcatcaacaagaagatgcaggagccgtccgcacacacgttcgacgacgcgcagctgcagatctacacgctcatgcaccgggactcctacccccgcttcctcagctctcccacctaccgtgccctgctgctgcaggggccatcacagtcctcctccgaggcctaggccgcccccagcagcacagaccccgccgcctcctacggccgactctgggttcccttcaggtgttggtgtcggcagggctgtcagggcacatgcctggccggctggggtccccacccgcggagacggtcctagacccagtggggagtgctgtgtctcctgggtctgcccacccgtggccaagcaggaactccaggtgcagggcgggcctccaggtgcagggcgggccagaagccccctcatcggcccgcagctggctggcccagtgctcctggctgggggctcttgcgtggtgagagtaggggtccccccaggagccatgctggacccatgagcctcgctggggcctcctccccaggcagccaatgggccccagacaagcctttggtggggaacagaacctccgcatcgtgtagttttgtgacataaggagacctcctacttgagctgtctgtaccccagaatcaaacacagaacctcagaaccagatttaggacctcagaatcctgcactcaaggtggcaggacccaatttctgttttatatgttcatgaactttaaacctggaaacatgtccttactaggtgttttatcaaaaaaaagttttttattattgaagatatttttaaagcaaaaaaaaaaaaaaaaaanaaaaanaaaaaaaaaaaaaaaaaaaaaaaaaaaaaaaaaaaaaaaaaaaaaaaaaaaanaanaaaaaaaaaaaaaaaaaaaaaaaaaaaagcagggaggaggcgcgaccacagacgcacccggacggggcacacactcaagacaacaacagcaaaagagacagaggggcgaccaacagcagagagcgcgcgcaccagcaccccgcgcgcgaggcgccgaccccgccaacacacacagagcggaagggaggagcgcaaccccaacagccacagaaccggacccgccgagaggcacccacaaacgccagccgcggcggaaggaaacaccaaagccgagaacacacacacggaaaga

SEQ ID NO: 671388 - DNA, 84 bp, Homo sapiens
aaggtaaggcagcaggcgcgcaaattgacagcctatataactcttatatatcttactgagagagcgagtgtctagttcggagac

SEQ ID NO: 671389 - DNA, 534 bp, Homo sapiens
  misc_feature (180)..(180): n is a, c, g, or t
  misc_feature (186)..(186): n is a, c, g, or t
  misc_feature (239)..(239): n is a, c, g, or t
  misc_feature (242)..(242): n is a, c, g, or t
tagcggccgcctactactactactgctcgaattcaagcttctaacgatgtacgggggacatgtccttactaggtgttttatcaaaaaaaagttttcatatttatctctatccctaaccccccaaaaataggatgtcttattattgaagatatttttaaagcaaaaaaaaaaaaaaaaaanaaaaanaaaaaaaaaaaaaaaaaaaaaaaaaaaaaaaaaaaaaaaaaaaaaaaaaaaanaanaaaaaaaaaaaaaaaaaaaaaaaaaaaagcagggaggaggcgcgaccacagacgcacccggacggggcacacactcaagacaacaacagcaaaagagacagaggggcgaccaacagcagagagcgcgcgcaccagcaccccgcgcgcgaggcgccgaccccgccaacacacacagagcggaagggaggagcgcaaccccaacagccacagaaccggacccgccgagaggcacccacaaacgccagccgcggcggaaggaaacaccaaagccgagaacacacacacggaaaga

SEQ ID NO: 671390 - DNA, 2316 bp, Homo sapiens
  misc_feature (1962)..(1962): n is a, c, g, or t
  misc_feature (1968)..(1968): n is a, c, g, or t
  misc_feature (2021)..(2021): n is a, c, g, or t
  misc_feature (2024)..(2024): n is a, c, g, or t
cagcggccctgcccctcccggcccgggcccggggaccgtgctgggcgggagcttcgggagccggcgcacgggactcgaaccccaagggctcccgccgccaggtccacgtggaccctgggccgcagtggaagtggagcccgccccccgctcgtgggggagggggcgccgcagccgggttcccctttttctggagctcaaagcctggggaagtgattgctcaaaggtgggggccggaagaacccaggtttccgcgtctccctccccctctcagcccggtgaggaggggccggggcgggacaccctgtccgcccccgcccccaccccgctggatctggcagccactcagcccttcgagctgtaggggaggcgctgcgcccccggccccagccgatcgggggctcctggcgctagcctccctccagagcgccgcaggagtccctcctgccgtctgacttgagtccctgctgctgcagtgcacgccccttcggcagccagggtggggcccagacccaacctggcccctcctgcccccaccccgcctttgggtcgctgacccccaggctgtggtgagggtctgagagctggtaccacggagcctgggcaacctcctccgcccacccatgcccaccccgcatgaggctgagaagcagatcacagggccagaggaggcggaccggcccccttcaatgtccagtcatgatacagcctctccagcggcccccagccgcaacccctgctgcctgtgctggtgctgctgctgtagctgctcctggaaccaagagcggcggcgcgcgtggcaggcctcccgggagagcaagctgcagcccctccccagctgtgaagtatgtgccacgccaagtcctgaggaggtgcagagctgggcgcagtcttttgacaagctgatgcacagcccagcgggacgcagcgtgttccgggcgttcctgcggacagagtacagcgaggagaacatgctcttctggttggcctgcgaggagctgaaggccgaggccaaccagcatgtggtagacgagaaggcgaggctcatctacgaggactacgtatccatcctgtcccccaaggaggtgagcctggactcccgtgtgcgggagggcatcaacaagaagatgcaggagccgtccgcacacacgttcgacgacgcgcagctgcagatctacacgctcatgcaccgggactcctacccccgcttcctcagctctcccacctaccgtgccctgctgctgcaggggccatcacagtcctcctccgaggcctaggccgcccccagcagcacagaccccgccgcctcctacggccgactctgggttcccttcaggtgttggtgtcggcagggctgtcagggcacatgcctggccggctggggtccccacccgcggagacggtcctagacccagtggggagtgctgtgtctcctgggtctgcccacccgtggccaagcaggaactccaggtgcagggcgggcctccaggtgcagggcgggccagaagccccctcatcggcccgcagctggctggcccagtgctcctggctgggggctcttgcgtggtgagagtaggggtccccccaggagccatgctggacccatgagcctcgctggggcctcctccccaggcagccaatgggccccagacaagcctttggtggggaacagaacctccgcatcgtgtagttttgtgacataaggagacctcctacttgagctgtctgtaccccagaatcaaacacagaacctcagaaccagatttaggacctcagaatcctgcactcaaggtggcaggacccaatttctgttttatatgttcatgaactttaaacctggaaacatgtccttactaggtgttttatcaaaaaaaagttttcatatttatctctatccctaaccccccaaaaataggatgtcttattattgaagatatttttaaagcaaaaaaaaaaaaaaaaaanaaaaanaaaaaaaaaaaaaaaaaaaaaaaaaaaaaaaaaaaaaaaaaaaaaaaaaaaanaanaaaaaaaaaaaaaaaaaaaaaaaaaaaagcagggaggaggcgcgaccacagacgcacccggacggggcacacactcaagacaacaacagcaaaagagacagaggggcgaccaacagcagagagcgcgcgcaccagcaccccgcgcgcgaggcgccgaccccgccaacacacacagagcggaagggaggagcgcaaccccaacagccacagaaccggacccgccgagaggcacccacaaacgccagccgcggcggaaggaaacaccaaagccgagaacacacacacggaaaga

SEQ ID NO: 671391 - DNA, 2215 bp, Homo sapiens
  misc_feature (1861)..(1861): n is a, c, g, or t
  misc_feature (1867)..(1867): n is a, c, g, or t
  misc_feature (1920)..(1920): n is a, c, g, or t
  misc_feature (1923)..(1923): n is a, c, g, or t
cagcggccctgcccctcccggcccgggcccggggaccgtgctgggcgggagcttcgggagccggcgcacgggactcgaaccccaagggctcccgccgccaggtccacgtggaccctgggccgcagtggaagtggagcccgccccccgctcgtgggggagggggcgccgcagccgggttcccctttttctggagctcaaagcctggggaagtgattgctcaaaggtgggggccggaagaacccaggtttccgcgtctccctccccctctcagcccggtgaggaggggccggggcgggacaccctgtccgcccccgcccccaccccgctggatctggcagccactcagcccttcgagctgtaggggaggcgctgcgcccccggccccagccgatcgggggctcctggcgctagcctccctccagagcgccgcaggagtccctcctgccgtctgacttgagtccctgctgctgcagtgcacgccccttcggcagccagggtggggcccagacccaacctggcccctcctgcccccaccccgcctttgggtcgatcacagggccagaggaggcggaccggcccccttcaatgtccagtcatgatacagcctctccagcggcccccagccgcaacccctgctgcctgtgctggtgctgctgctgtagctgctcctggaaccaagagcggcggcgcgcgtggcaggcctcccgggagagcaagctgcagcccctccccagctgtgaagtatgtgccacgccaagtcctgaggaggtgcagagctgggcgcagtcttttgacaagctgatgcacagcccagcgggacgcagcgtgttccgggcgttcctgcggacagagtacagcgaggagaacatgctcttctggttggcctgcgaggagctgaaggccgaggccaaccagcatgtggtagacgagaaggcgaggctcatctacgaggactacgtatccatcctgtcccccaaggaggtgagcctggactcccgtgtgcgggagggcatcaacaagaagatgcaggagccgtccgcacacacgttcgacgacgcgcagctgcagatctacacgctcatgcaccgggactcctacccccgcttcctcagctctcccacctaccgtgccctgctgctgcaggggccatcacagtcctcctccgaggcctaggccgcccccagcagcacagaccccgccgcctcctacggccgactctgggttcccttcaggtgttggtgtcggcagggctgtcagggcacatgcctggccggctggggtccccacccgcggagacggtcctagacccagtggggagtgctgtgtctcctgggtctgcccacccgtggccaagcaggaactccaggtgcagggcgggcctccaggtgcagggcgggccagaagccccctcatcggcccgcagctggctggcccagtgctcctggctgggggctcttgcgtggtgagagtaggggtccccccaggagccatgctggacccatgagcctcgctggggcctcctccccaggcagccaatgggccccagacaagcctttggtggggaacagaacctccgcatcgtgtagttttgtgacataaggagacctcctacttgagctgtctgtaccccagaatcaaacacagaacctcagaaccagatttaggacctcagaatcctgcactcaaggtggcaggacccaatttctgttttatatgttcatgaactttaaacctggaaacatgtccttactaggtgttttatcaaaaaaaagttttcatatttatctctatccctaaccccccaaaaataggatgtcttattattgaagatatttttaaagcaaaaaaaaaaaaaaaaaanaaaaanaaaaaaaaaaaaaaaaaaaaaaaaaaaaaaaaaaaaaaaaaaaaaaaaaaaanaanaaaaaaaaaaaaaaaaaaaaaaaaaaaagcagggaggaggcgcgaccacagacgcacccggacggggcacacactcaagacaacaacagcaaaagagacagaggggcgaccaacagcagagagcgcgcgcaccagcaccccgcgcgcgaggcgccgaccccgccaacacacacagagcggaagggaggagcgcaaccccaacagccacagaaccggacccgccgagaggcacccacaaacgccagccgcggcggaaggaaacaccaaagccgagaacacacacacggaaaga

SEQ ID NO: 671392 - DNA, 128 bp, Homo sapiens
gctccaggtggtcaccagcagctgtgtcttctgagcttactttccttgtgttaacatcattcttaaggacgtgagaactccagatgattacctttccatttagcaacattggcacctgggaggcatca

SEQ ID NO: 671393 - DNA, 2230 bp, Homo sapiens
  misc_feature (1876)..(1876): n is a, c, g, or t
  misc_feature (1882)..(1882): n is a, c, g, or t
  misc_feature (1935)..(1935): n is a, c, g, or t
  misc_feature (1938)..(1938): n is a, c, g, or t
cagcggccctgcccctcccggcccgggcccggggaccgtgctgggcgggagcttcgggagccggcgcacgggactcgaaccccaagggctcccgccgccaggtccacgtggaccctgggccgcagtggaagtggagcccgccccccgctcgtgggggagggggcgccgcagccgggttcccctttttctggagctcaaagcctggggaagtgattgctcaaaggtgggggccggaagaacccaggtttccgcgtctccctccccctctcagcccggtgaggaggggccggggcgggacaccctgtccgcccccgcccccaccccgctggatctggcagccactcagcccttcgagctgtaggggaggcgctgcgcccccggccccagccgatcgggggctcctggcgctagcctccctccagagcgccgcaggagtccctcctgccgtctgacttgagtccctgctgctgcagtgcacgccccttcggcagccagggtggggcccagacccaacctggcccctcctgcccccaccccgcctttgggtcgctgacccccaggctgtggtgagggtctgagagctggtaccacggagcctgggcaacctcctccgcccacccatgcccaccccgcatgaggctgagaagcagatcacagggccagaggaggcggaccggcccccttcaatgtccagtcatgatacagcctctccagcggcccccagccgcaacccctgctgcctgtgctggtgctgctgctgtagctgctcctggaaccaagagcggcggcgcgcgtggcaggcctcccgggagagcaagctgcagcccctccccagctgtgaagtatgtgccacgccaagtcctgaggaggtgcagagctgggcgcagtcttttgacaagctgatgcacagcccagcgggacgcagcgtgttccgggcgttcctgcggacagagtacagcgaggagaacatgctcttctggttggcctgcgaggagctgaaggccgaggccaaccagcatgtggtagacgagaaggcgaggctcatctacgaggactacgtatccatcctgtcccccaaggaggtgagcctggactcccgtgtgcgggagggcatcaacaagaagatgcaggagccgtccgcacacacgttcgacgacgcgcagctgcagatctacacgctcatgcaccgggactcctacccccgcttcctcagctctcccctacggccgactctgggttcccttcaggtgttggtgtcggcagggctgtcagggcacatgcctggccggctggggtccccacccgcggagacggtcctagacccagtggggagtgctgtgtctcctgggtctgcccacccgtggccaagcaggaactccaggtgcagggcgggcctccaggtgcagggcgggccagaagccccctcatcggcccgcagctggctggcccagtgctcctggctgggggctcttgcgtggtgagagtaggggtccccccaggagccatgctggacccatgagcctcgctggggcctcctccccaggcagccaatgggccccagacaagcctttggtggggaacagaacctccgcatcgtgtagttttgtgacataaggagacctcctacttgagctgtctgtaccccagaatcaaacacagaacctcagaaccagatttaggacctcagaatcctgcactcaaggtggcaggacccaatttctgttttatatgttcatgaactttaaacctggaaacatgtccttactaggtgttttatcaaaaaaaagttttcatatttatctctatccctaaccccccaaaaataggatgtcttattattgaagatatttttaaagcaaaaaaaaaaaaaaaaaanaaaaanaaaaaaaaaaaaaaaaaaaaaaaaaaaaaaaaaaaaaaaaaaaaaaaaaaaanaanaaaaaaaaaaaaaaaaaaaaaaaaaaaagcagggaggaggcgcgaccacagacgcacccggacggggcacacactcaagacaacaacagcaaaagagacagaggggcgaccaacagcagagagcgcgcgcaccagcaccccgcgcgcgaggcgccgaccccgccaacacacacagagcggaagggaggagcgcaaccccaacagccacagaaccggacccgccgagaggcacccacaaacgccagccgcggcggaaggaaacaccaaagccgagaacacacacacggaaaga

SEQ ID NO: 671394 - DNA, 1051 bp, Homo sapiens
cagcggccctgcccctcccggcccgggcccggggaccgtgctgggcgggagcttcgggagccggcgcacgggactcgaaccccaagggctcccgccgccaggtccacgtggaccctgggccgcagtggaagtggagcccgccccccgctcgtgggggagggggcgccgcagccgggttcccctttttctggagctcaaagcctggggaagtgattgctcaaaggtgggggccggaagaacccaggtttccgcgtctccctccccctctcagcccggtgaggaggggccggggcgggacaccctgtccgcccccgcccccaccccgctggatctggcagccactcagcccttcgagctgtaggggaggcgctgcgcccccggccccagccgatcgggggctcctggcgctagcctccctccagagcgccgcaggagtccctcctgccgtctgacttgagtccctgctgctgcagtgcacgccccttcggcagccagggtggggcccagacccaacctggcccctcctgcccccaccccgcctttgggtcgctgacccccaggctgtggtgagggtctgagagctggtaccacggagcctgggcaacctcctccgcccacccatgcccaccccgcatgaggctgagaagcagatcacagggccagaggaggcggaccggcccccttcaatgtccagtcatgatacagcctctccagcggcccccagccgcaacccctgctgcctgtgctggtgctgctgctgtagctgctcctggaaccaagagcggcggcgcgcgtggcaggcctcccgggagagcaagctgcagcccctccccagctgtgaagtatgtgccacgccaagtcctgaggaggtgcagagctgggcgcagtcttttgacaagctgatgcacagcccagcgggacgcagcgtgttccgggcgttcctgcggacagagtacacacgagacacatcttttcgttggcgtcgagagttcagacgccgcgacacattatgtgagacgagagacgttattacgacgattacgattcatca

SEQ ID NO: 671395 - DNA, 480 bp, Homo sapiens
  misc_feature (7)..(7): n is a, c, g, or t
  misc_feature (31)..(31): n is a, c, g, or t
  misc_feature (62)..(62): n is a, c, g, or t
  misc_feature (74)..(74): n is a, c, g, or t
  misc_feature (436)..(436): n is a, c, g, or t
  misc_feature (439)..(439): n is a, c, g, or t
ctggctnaacatggagacaaaaggcccatgnctgattccctcccctctgaccctattggttncacctaaagccnaaactaagggtagaaagtggcgggcctactcctagggccacccccacatgtagattgtgtttttgggtgaaaggctggctgatcagagactcaaaagaatgcaaacatttgtctccttacttaccctatgaccccagaagtcctttaccccactttgagttgtcccacctttctggaccgaaccaatgtataccttacacatattgatgatgtctcatgtctccctaaaatgtataaaaccaagctgtgccccagccaccttggacacgtgtcgtgaggatcttctgaagctgtgtcatgggtgtgtccttaatcttgggaaaataatctttctaaattgattgagatctgtctcagagacnttnttggttcacacccatatcctgaaaactacaaaacactgctt

SEQ ID NO: 671396 - DNA, 150 bp, Homo sapiens
ggcctcatttttatcttcaggaagcgttgagacgttcagcaagtgagagagagacagaagccgagagcgaagaagatctcgcaacgtagagacaggagacgctcaacggagtagaatgcctggggccggcgatcccgatcctccagtcct

SEQ ID NO: 671397 - DNA, 468 bp, Homo sapiens
atgaagggtggacgctggaatgaatttatctccatcatggcttttactgctaaaatagaggccatgaaaactgatccaaatggctagatacgaagatgcaacagatgaaaacaaactggcccacgatggaatggaactaaaaaacgtagaataataatccataccttcaagcaccgatagccagaaagtgtgccagataagttttaaggtaaaaggatcatacataattaaaatattgggactatttttgtttagcagatcttttcccatatttatacactgcccaggtaaatataagccttgcctctgccaagtctgaaataatatgtaccagatattcaggacaaaatgtcctccttagcataaacaagttaatttttttaaatccaaaatgaatttatttctgaaggtacaaactactttgttcagcatacctcctgtcctgactaaataaaacaaattttatgg

SEQ ID NO: 671398 - DNA, 271 bp, Homo sapiens
agtgctgtatcacacccggtccatattgggagtcccatagggcagcgcacatttgtggccagcgtcattcgggtttggccatgcagaggccgtccttgtacataacaatttgttgcttaacagacttgccaggttaaatcatggtcatatcaatatacattagtgacaccagtcgaagatgcatctaaatatctacaccatggcttgagtagaggcctagcaaatagtggcaaaaccatcagcattgtctagagctatgagtaggggccta

SEQ ID NO: 671399 - DNA, 346 bp, Homo sapiens
gctaacgatggtgggtgggaacatgtgacaggaactcctattaacaatacagtagagggcccagatgcaaagaatcaggttaaccccgattacagtaaacagcttacactaacgtatacaggtatttcatacccatctaaacacacaagggtaagttgtgaactgctacacatagggtctaacgtggtgtaatcgtgatttacctgtgatactcccctgacaactataaataagtgaaccccatgcaagtacagggaagcactagtcttttatcacaggttgaacctgaggaggtataactcttgacattcgtatctgtaaagagcgtacggatctaaaagctatg

SEQ ID NO: 671400 - DNA, 531 bp, Homo sapiens
tgagattctctatatagactcacaaatgacattggaacaccgtaccttattattcgagcgcatgagactgtgagttcctagtgcacagcactatgcttccttattcgagccgagctgggccagaccaggcaaccttctgggtaacggaccacatctacaacgttatcgtcatagctcttgcctttgttataaccttcttcatagttaatacccatcataatcggagtgctatggcaatgtgactagttcccctaataatcggtgcccccgatatggcgtttccccgcataaacaacataagcttctgactcttacctccctctctcctactcctgctcgcttctgctatagtgtaggccggagcaagaacagtgttgaacagtctaccctcccttagcagggaactactcccaccctggcagcctccgtagacctaaccatcttctccttacacctagcaggtgtctcctctatcttatgggccatcaatttcatcacaacaattatcaatataaaaccccctgccataac

SEQ ID NO: 671401 - DNA, 336 bp, Homo sapiens
gaacctcattttggagcctaaaatcatgcttgttgccattgacaaccgctatatccgcgcggtgggggtcccagttttagggttctcacccataacccgacaacttgtgttgttgcacgaccacaataacagggtggcataaggctgtgttcctccgtggggtggacatatatacacgcctgttgcctgcccttgccagtgtgcctgccctgcccagtgacagttaagccctggaattcttaaacctttgcccctggggtttccatcccaaccagtgccaaggacctctttttcccccttccaaataataaagtctatggacagggctgtttttga

SEQ ID NO: 671402 - DNA, 165 bp, Homo sapiens
gggaagcacggtacgcttatctgtcttcccggatgtcaaccttagtgaatggaacgaggaacccaccctatcgacattcttcacagaactgaatgattgcagttgtctggctagccaacgccatcctgactgggtatactgctcaaaagagaaggccccaacttc

SEQ ID NO: 671403 - DNA, 435 bp, Homo sapiens
  misc_feature (429)..(429): n is a, c, g, or t
gttaaaattttttattgtatttccttaacagacattaaaatgcaaaaatcttaaaaataaaaattaaagtcagtattcatactacagtttcataacagaactccccccccccataatatttaggtattcaatttagaaatggttaactgaaggcaacccaaaattttaatactgctggatattgggtaaaaagactgcaaaaatgaaagtgatatatacttacacttggtccttgggtttcctgcagccatttaagaatgtgggtcaaagagaaagttttaaaataattaaataattttgtttgtctgagagtacattaaatagttaaattttacacaatttaatactgaaataactccattctaattatcttaagtaggctgtttagaagttcttaagttttcaacttaattattttccttttttttnaaaaaa

SEQ ID NO: 671404 - DNA, 128 bp, Homo sapiens
tctattgttccagattaaaatactggttgaatcacagcctcactcagtctttttctttctttttttggtttttctgttcttttttgttttttgtgttttttggagacgaattcccactctgtcgccag

SEQ ID NO: 671405 - DNA, 315 bp, Homo sapiens
  misc_feature (45)..(45): n is a, c, g, or t
  misc_feature (95)..(95): n is a, c, g, or t
  misc_feature (99)..(99): n is a, c, g, or t
  misc_feature (141)..(141): n is a, c, g, or t
  misc_feature (187)..(187): n is a, c, g, or t
  misc_feature (191)..(191): n is a, c, g, or t
  misc_feature (233)..(233): n is a, c, g, or t
  misc_feature (283)..(283): n is a, c, g, or t
gtgacatggagggctctggaatcctgcagtgtgtggtcctttgtnagtaacacgtttccaaggctctggagtcctgcagtgtgtagtcctttgtnagtnacatggagggctgtggagtcctgcagtgtgtggtcctttgtnagtaacatggacggctgtggagttgtgcagtgtgtagtcctttgtnagtnacatggagggctgtggagttgtgcagtgtgtagttctttgtnagtaacatggagggctctggaatcctgcagtttgtggtcctttgtaagtnacacgtttccaaggcttctggagtcctgcagt

SEQ ID NO: 671406 - DNA, 184 bp, Homo sapiens
taccgggtatcattgaccggacatgcttctctcgccaccttgccactcttgtgactcctgtcatcatgccccgtcgtgcgtgccctgccatgtacggtcagcgtgctcttcggcatggtccccccagtcaggtctgcccctggggggaggaggcagcccccggactgtcaatgggtcccggcct

SEQ ID NO: 671407 - DNA, 971 bp, Homo sapiens
tgggcaaaggggaaccggggggggggcccgaaaaaacccggggggtttccgggtttggccccccgaggggcggggggggaaaaccccccgcggggggggccccccaaaacccgggttctcgccgagaagaaacgagggagagggtgtactaaccccgagcgcgcccaccaaactcacgcgcccgagcgcgccaccgagtggcggcctcctacaacccgttacagacccggggagacacagcactagagaagcagctccgacggtctcccccctcagcgtggtggtaaaaccccgcggtccgggggcccctcgcggggtgctccgataaggcccccttcaccaccccgagaaaaaccccgggggggcgcggagcggaaattaccacgcagaggaggctctcacccaatctctttcccagcaataaattaattctctaacgccgcgaggaggacgcggcgagtagtatgttccccaggagaggaaaccaatcggcgctctccagcgagaaagaagcagcagaggtatttcccacagcggccccacacgctcacgggggccctccgagacgaagccccacaaaagcgccattatatcaacggggggagcaacacgagggccgaggagggggggggaacgcctctcataatattgagaaacccccgggcggaggacgccgacgcccccgaggggagccacacggagaccacgtctgcgagcagccccccccgggagaggctgccaggagaggagaacagcgttgggaacccaccccacggctctctttggtgtcccccaaagaaaccgggaggaggaagaagcccgtgcttcgtgccacagaaccttacaccgttgtggggctgcacacaaatcggggacaaccgggcgggaccccccgtgggccccaagaaaacccgaggttctgcttagaggggccaactgcacaagaaaaagtctcctggaaacaagacagc

SEQ ID NO: 671408 - DNA, 737 bp, Homo sapiens
gtgttttgttttttggttttttttttggtgtttggggggtggtcgtgtttttttttttcgtcgtgttggtttttgtcgctcgtgcgggcgcgatgttctttcgttttttttgtggtcgtcgtcgttgtttagtttttggtgctgttgtgtgtgtgctttgttgggttgtttgtttgtcctcgcccgtctgtgtctcttcgtggggtggctgattcgagctgattggcctcgctcgtttgctgtgctctgctttgctggggggggtgtggtcgccgcattatatttattgtctgtggtggctgctttgttctttgcttggttgctattttttctgctggctgcggtctgtgccgtctcgctgggttttttttgttgtttctggtggggttggtccctgcgtgttttttttgtgttctggtgggcgccgctccgccccgtgtctgtttttttggtggtgcggagcatttcttgtgctgcgttgtttggctgctggtgggtggtgtccgcggaatggtttttgttgtcctgcgcaggctttttttgtctttcgacgcccgctgtcttttttcttgctggctggtgcgccgggtgtgccgggggtgttggttggtcggtgggggggctcctccggccggtccgttgtgctggggtgatttgtttcccccccccccccctttttttttttttttttttttcccccccccccgtccttttcccccttctccccccccccacta

SEQ ID NO: 671409 - DNA, 253 bp, Homo sapiens
  misc_feature (13)..(13): n is a, c, g, or t
tcagacgctgaanctatgtgcactcatcctgcaagtacaacctgcttcgagaagctgccacaatgaacatgtcttgtacacctgtccccctgcttcagtggactgtccagatctggtgacatctgtcacatgtgggctgagtgcctggcctctgagcaagacagtgctgcttcaacgtgctcaattgtcaccaatgcttgcctgtgcaccaagaatgcatgttccacatatgttcatgctgtcttgactgtgt

SEQ ID NO: 671410 - DNA, 912 bp, Homo sapiens
cctgtgtgttcccgggcggtgtactttttgccgcggtgtgtgagtttgccgggaggtcggggatggtttgtccgccgtctgtgaagtttctggctgctctgggtttttgtgccggagcccgtgtttgcaggtgccccgttggcccctctaagcggaaacagccggggggctactcgaggagaacgtggtgagcgcacccgggagcccgaattggtgtgcggcccatacggcagataatagttcttccccgcgtttgtttggccaaataaattaggggctgtgtgccctgcccccgcccccagggtttgtgtgcccttttgaataagcgcgacgcatattgcatgtattgtccaacttggcctcaaaaaatcgcccgcgataggccctcgctttccaattggggacggctttataatgggcccccaaattattcagaaattctttggagatccaacacgggtttctcccgaccgcttttggaaaaccccttttccgctgttccgccccctattaacaaacttctggcaccccgttaaagtgttattcaggcacccaccgcgagattccattttgttctcttttacacgcccccgtttaatcatgagcaaaagaccagctattctgtcttcacatcatcaaagtgataaaagtacgttcttgcccttgcctccccctccagcggctcctttttgtcttttgtttcgccccccagagacaactttttctcatctagatctctcccacaagctcatcttcagttgtctcctccaatatactcacacatgttgtgggatgaataaaataacaccaaaaccacagtggaatcaaaagaaaaacacaccgttgtcgaatccacaaaaatcctggcggccacaaaattcggaaataaatcccatcaacccacataacaaa

SEQ ID NO: 671411 - DNA, 128 bp, Homo sapiens
tcgccgtagcagccagctatcatgagcagcgccggtacaatgaagttatggtcgagtgtttgggacggggtgagcggatacgggagtgccggcacggtgggccacgctaccatctatcttccattgat

SEQ ID NO: 671412 - DNA, 279 bp, Homo sapiens
tggatttttagtatagacgtggtttcactgtgttagccaggacggtctcgatctcatgacgtcgtgatctgcccgccttggcctcccaaagtactggctgggattacaggcgtgacgactgcgcccggccttccttccccaattctttgatagatgctcaattcacaggtacaattggtgcctgccgaccttgcagggtggatattagttttcatctgaggcttcagaatacccaagtggcacaacaccaggtcaaatgattttagtggtttgcaagtc

SEQ ID NO: 671413 - DNA, 258 bp, Homo sapiens
  misc_feature (249)..(249): n is a, c, g, or t
gcactatttctatttggagcagattattctctgatgtggcggctggcctgtactttgtaggatgtttatcagcatccctggcctctactcactaggtgccaagtggcagaactcttcccacccaccccaatggtctgattacccacgtattctctccacgatatgactaaacggatctacgttacctgggacactactactacaagaatgctctcaaatagctcaaacagctaaattaagaaacagagnccaactttt

SEQ ID NO: 671414 - DNA, 154 bp, Homo sapiens
ggggttggatagattcagcaacgcttcatgttcaactctcaacaagctaggtattgaaggaacatacctcaaaataataagacccatctatgacaaacccacagccaacatgtgggtgggctgaatgggaaaatgctggatcagcggatcgagt

SEQ ID NO: 671415 - DNA, 650 bp, Homo sapiens
atatgtctctcagtgtgtgaaggattgttacaccatcctctgtgtgccgcctgatgtatgaagcttgtgtaaatcaatgggttctggtttttagctgcgagtagtggttcgagggatatctgctgatggacttacactgtgttgtgtttgatttatttattgcatgtccgttcttttgactgatggttgtctataaaacaagctctcctgtatgatttcttcttcatctcctcttcttcctcttcgttggtcttctcctccagagtcgcgtcgccatcattcttatactactctgcgactctcataagaatacaacatagttgtggttctttctagtttattattatatatatcagagcgcttatacagctaggcatcacatacttattctagtattactctttattgtactgatctactgtctttaatacacctatatctttctctcacctcgtataaccaacacacacacacacacacacacacacacacacactctctctctctctctctctctttccttataggggaacggctttagcctcaggttataaatataaggattccatttccttctataggttttgtactattcatctcttttcattcatgtattaatatgtaaacctccagcgtaagagaactttaac

SEQ ID NO: 671416 - DNA, 411 bp, Homo sapiens
  misc_feature (232)..(232): n is a, c, g, or t
gttatgtctggggatggtcgcacaactttgtgaatatactaaaattcactcacccatacacttttttttttctttttctttggagacggggtctcgctctgttgcccaggctggggtgcagtggctcaatctcggctcactgcaccctctgcctgccggattcaggcggttctcctgcttcagcctccacctccctagtagctgggattataggcacctgtctaatttttgnatttttagtagagatggggtttcaccgtgttggccaggctggtctcgacctcctgacctcaggtgatcactggcctcggcctcccagagtgttgggattgcgggcgtgagccactgtgcctggcctgaaccatatatttttaatagagtgaatggtatactatgtaaatgacatctcaa

SEQ ID NO: 671417 - DNA, 787 bp, Homo sapiens
atttgtataccttggcctttcacaaattcctctctgggtgggtgtcaaagcccaactctgttggtgtaacttcaagaatttccccctcttagcacagattgagtgccatattggcccgtgatcccacaaaggaatcctgcacccctcgtcctattgaactgtggcatagtgttccagaagcttccaagagcaacaccaagctgggcaactttaagattttttttaaaccacaaaaaccccggttagccatctcatggtcacgcttatccctttcctccccttagaaactctctccctgctgtaattaaagggagcaggtggagagtccttttccttcgtcctgcatgtctctaaccttaattgaagggatgggtccttctgcaacccctgttaatgcttcttaaaacccccctctatggggatggctattttatttttgagaaggaaaaaaaaagtcctgtttatattcccattaaggcatatagctatatataaagagataagggtgtttattaaattagaaaattattgggccattcaggctttactaaagcacagttaaaccccaggcctatgcttaggtctaaacctctgaaaaaagtatagtatcgagttcccgttcccccccaaaggtgggagtaactgctggtagtgccctctttgggtgtgttgctcagtgtgtaaatgtttgtttccaggaaaatttccttttaaaagtccctcttatatgggtttttaaagaaagttataaaaggctgttgcgaaaatgggaaatacatatgtaaga

SEQ ID NO: 671418 - DNA, 175 bp, Homo sapiens
taactgcaaaatctttttaatcttcgccttaatacttatttatgacgttgcagggcggacatgatgcgccttcgtgcccacccttccccctttttagtcccccaacttgagatgtatgaaggcttttggtctccctgggagtgggtggaggcagccagggcttcactgtaacact

SEQ ID NO: 671419 - DNA, 759 bp, Homo sapiens
  misc_feature (441)..(441): n is a, c, g, or t
  misc_feature (449)..(449): n is a, c, g, or t
attcggcactgagggggagtaattaattgaatcaaaccttgctgttaggtcaagtaaaacattcaacagacatcactggtgacttgcaaaagctatttcagaggaatgaatggtcggaggaaaggatcactgcagtgaatttaagagagaatgggaggagaagagttaaagaaaagagacacagacaattcttccagcaattctatttataaagggaagcagagaaatcagggtgtatgtgctagaatgggatggggggagtcgagagagggttttttctgaacttggaagaaataacagtataaatgttttacactgatgggaatgactaggtagacaggcagaaactgataatccaggaaagggcaagaggacaactatagaagcaataactgaaaagctgttcatctaatacacccaagtctgtgaaactaacagtancagcttancttctttgaaatgtcttctagtttataaaataattttataatatgttcacatctttttatcataatcctctaatataggtattacccccacttatttagagaaaagcaaaatgcagttcagaagtcaggtaacttggccaaagtcacactgatactgaacaaaggcagaatacaaaacctaagtcttcctactctaaattcctctttagccctactttagtggatggtttagaatgaaaatatactgaggaaacccaccttatctattaatttagcatcttatttttaaaagtagtatcaaaattacatt

SEQ ID NO: 671420 - DNA, 155 bp, Homo sapiens
  misc_feature (130)..(130): n is a, c, g, or t
cttgaggatcttgcacaccgctacggctgatccattcaccgactcggaagaccgggccgcgcgcgtggcgtactgactcacacgtcacggctggctcgatcagaggcttgcgccccccgtagctggtgtngcggtacgagctcgaatcgtatcat

SEQ ID NO: 671421 - DNA, 339 bp, Homo sapiens
cgtcgactctaaaactgaataatgtggttcaattagtttactttgcaaccatgcaaagtaggggtgctttattatctttagtgttaatgattgggttttatagtttctttattaacaggggcaagttagctaagcgatttctaatctttattgtttctgctttacttgtttctgctactaacatcggattgagttatgtaacttctatttacatatcttcggggaaagcgactgtattagacttaaataaaggacaatcttatgcagaaacagattcttcagttataaaaaaaacaggcgaacttcatctaatagaaacaacacctagtgggtcgacgc

SEQ ID NO: 671422 - DNA, 424 bp, Homo sapiens
  misc_feature (71)..(71): n is a, c, g, or t
acagagtctcgctctgtctcccaggctggagtgcagtggcgtgatctttgctcactgcaagctccgcctcncaggttcacgccattctcctgctcagcctcctgagtagctgggactacaggcacccaccgccatgcccagctaatttttttgtacttttagtagagatggggtttcaccatgttggctaggatggtctcgatctcctgacctcgtgatctggcagcctcggcctcccatagtgctaggattacaggcgtgagccaccacgcctggccagagtgatatttatattaatgggaaggatgcctctgatgggcagtcaagggtctgggtgaggaaagattttcttttcactgtatactgttttgtattgttgggaaaatgtctaacgatttgcataaatattaaattttttaattaa

SEQ ID NO: 671423 - DNA, 505 bp, Homo sapiens
aaatatggtacataaacacaatggagtactattcagccataaaaaagaatgagatcctgtcatttgcaacattatagatggaactagagatcattaagtgaaataagccaggcacagcaagacagacatcacatgttctgacgtatttgttggagctaaagatgaaaacaactgaacttatagagggtagaaggatgtttaccagaggcgggaaaggcagtgagggcatggtgagggggaagtggggaatgttaacgggcacaaaatgtagaatgactaagacctagtatttgatatcacaaggttactacagtcaataataattgtgcattttaaaggtataattgaattgtaacacaaaggataaatgcttgaggttatggataccccatttaccctgatgtgattattagacattgcatgcctatatcaaaatatttcatgtcccccatagatttatccacctaagttgttccccccaaaaatttaaaatctaggaaaattt

SEQ ID NO: 671424 - DNA, 339 bp, Homo sapiens
tgaattaacctggcccaaaaccaaaaagaaaaaaaaaacctgccctttgtcctgtaaaacttttttttatccctatggggcttgagggacagaatcaggacttcagtttttgtaaatagtgaggtaaacccccaatttttatccccccgttgcccctttcatgaactaaacaattatttgggtgattgggatgtttcccccgggccctggtcatgtataacaggactctttttttggagaacccctttttggatatatttattattgtaaatcatgggctgccccccccagtttgtaagtttaaactattaaatgacccctttatatttgggattttta

SEQ ID NO: 671425 - DNA, 243 bp, Homo sapiens
  misc_feature (188)..(188): n is a, c, g, or t
tacttctcgagctgtacatttcgcggtcgcgacgtcgcgtctcgattgtgcctgctgttggcgtgcgccatatgcatcctaggcctattaatattcctggagtatacgtatccggctatcgttaacaatccgtttacctctatgaactatagtctagcattgcgcaaactttcaatagtcgctgagtnatctattcgctgcggcacgatctagtccattgattgactcatctgccaagttagg

SEQ ID NO: 671426 - DNA, 217 bp, Homo sapiens
ggcagcccggagtaaggctgttgaggacgctggtggcagcggatgtatgacggtgtcggctggccatgccgcgctcttgttggcccaggggcgtggtcgtctcatccgtcgtgctgacgatcgcggggtggtcgccgttctcgacccacggctggtgactgccaggtacggcaattttctgcgggcgtcgatgccgcccttctggactacgaccgat

SEQ ID NO: 671427 - DNA, 157 bp, Homo sapiens
gctcggacctccttttattccaaggcagtcgcacaatcatagctcgcctgagctcgaactcctgggctcaagcaatcctcctgcctcagtctctcgagtagctgggactatacatgtgtgccaccatgcccagtttattttattttttttttttgga

SEQ ID NO: 671428 - DNA, 87 bp, Homo sapiens
ttatgtgttcttcattttacaatgaaggggtagtaattggcccactctcttcttactggaggctatttaaataaaatgtaagacttc

SEQ ID NO: 671429 - DNA, 1197 bp, Homo sapiens
agcctgcagcagtgcaggatgggcaggagagcagagccgctggagtctgcggatgcagggtgaagagctggcgctgtaattccctgccagcaagatttgttcctgctgccctgcagaccctggactagcagtgatcctgaacccctggctgtgctgcgtgcttatagtgcgcagactgtcagagagccctgcggcttaaagcgcgtctgcctgtgctagcgccagccccatagccttcttcaatgtgcctccagggctgggcccaatgcgcccgtcagacaggcacacctggtgcccatgaggacatcgctgggcctcatctccaatgattcagaactcacgtccgtcgctgctgcaaccccaagatgtcggagacacggtggaaacgcttatgttacatccggtgatcaaggcttacctgtgtggctccatcagttgggacctgctctaccctccttttccaacctctggatctccttaaaacacgcctgcaaaccctccagccctcagatcatgggtctagacgtgtcgggatgttggctgtcactcttgcaaggtggttcgcacaggagagtcttttgggcctttggccagtggatgtccccttccatggtgagatgtgtccctggagttggaatctactttggcactctctactctttgaagcagcattactttgaactggacagtcccccaaactggccctggatgtcagagtcacatgcttgggaggtggggcctcagcaccaggagcagagagacatggcattgtaccatatcagttggacaacacaaagaccatctcagaccttggcaaatctgcaccagaacgtatctagaacgcacgtgagggaaccatagaaacgacacagcgtgcccccgcggccacaccaacgggaacggcacacgcactcccaagcggaaagggcacgaagcacggagaaccatccgcggcgttgatcaccggagccgagggagcaggggcgcgtgcaacgggtgcgcacgactggcagacggaacgaagtgagtcgagacacgcggagcagcgacgcggaggaaagagcgggggaggaggaggagcggacgataggaggagttcgacgacgaggccaccttcgagatggggtggcgccagtgttggggatgaggagacacagcgaggcggggagggtcgcgccggatgaaggaggatgagac

SEQ ID NO: 671430 - DNA, 438 bp, Homo sapiens
  misc_feature (36)..(37): n is a, c, g, or t
gatccccccgctctgcacccaccccggggaggcggnntctcacattgagagagggagggaggtgctggggggtaaacacggagctcttacctaaactcagagggagaactcattactacggggaagaagccaagccactcacgcaaggtctgcccccgtgacccagacgcctcccactgagctccacctctagtgctggaacactgggaatcacgttttttattttttgagacagtctcactctgtcgccctggctgaagtgcaatggcatgatctcagctcactgcaacctccacctcccaggttcaagcgattcttgtgcctcagcttcccaagtagctgggattgcgggtgtgtgccaccgagcctagctaattttttgtgtgtgtgtgtgtatatttagtaggggtgggtggagagcgggggtaccgagcttga

SEQ ID NO: 671431 - DNA, 320 bp, Homo sapiens
cgcgtgtcgcctccacagagcgacattgaccatgctgcagggaatgttccaccttgttacgtgctccctgtcctgcagctgtagagctagccggtagttcttgagcagtgcgttatgattgtgcgagtttgtgtcacacttgctgtaggtcttgcttgaggatctgcccagtccggcggatgccgtcttccagcctccccatcagcgttgggatgccttcctctaggtactttaggaagtgatagtcatcgctgtcccagggtgtcaatacacccagggttgttagcgaaaaatctcctaaagggaaacccggacgggct

SEQ ID NO: 671432 - DNA, 144 bp, Homo sapiens
gctcgcacccaccaattaggactgaggtctctggaggaggagggacagaagctgccgcacactgcagacgagcagaggtgggaagatacggtggagaaggaccaagaactgactcaggaaagccctcctgccatgactagagag

SEQ ID NO: 671433 - DNA, 122 bp, Homo sapiens
ggtcgtctctagcacggatccccccctcgaaacccagtcaccaacttcactatttgggttgacttacgccattctgatctttgcgtgttttgtgagcaatttgcagtgtgacagggaactcg

SEQ ID NO: 671434 - DNA, 410 bp, Homo sapiens
acgtgtagccttcatcacagtttgctgaagatggcggatataggctgagacaagaggtggtgagcgttgatcggggtttatcgattacacaacaggctcctctacgagggatatgaagcaccgccaggtcctttgagttatatgctgtggctcgtagtgttctggcgagcagcctagtacgatacaactgttgcacgagtatagggctaaccatagctggggtatctaatcccagtttgggtcttagctatagtgtgtacaagatatgtaacagccacttacgcactctatcccgtgtcaactggagtcctctacaactcaggtgagtatcagctttattggggagggggtgatctaaaacactcattacgccggctactattgactagggttaatcgtgtgaccgcgaa

SEQ ID NO: 671435 - DNA, 345 bp, Homo sapiens
gccatggacatttgctcgaatgtgctgatgacagggcggaccttgccaagtctatctgtgaaaatcaagattcgatctaccagtaaactgaaggaatgctgtgaacctctgttgcatcccactgcattgccgaaccgggtacggatgttcgcaacaactatgctgaggcacaggatgacgacctgggcatgactctgtatgaatatgcaagagcgcatcttgattactctgtctggctgctgatgacacttgcctggacatatgacgccactctagacaagtgctgagccgctgcacatcctcatgagtgctatgccacagagtgctatgaattctccttcgcgg

SEQ ID NO: 671436 - DNA, 369 bp, Homo sapiens
ccgactatctgttctgtgtcactgtcatccacactttatgtcttcaagccaggatggctcagagctgtccttccacggagttcactgagtcactgtcgggagaaggcgtctcagaaaattctgtactctgcagtggtctatacagcgcatactcatctctgaaaagctggtcgtgatgactaacacaatccagccaacgtccatcaaccattgcttgtccaattgctatagcttgtgcccttgtggcaatatgcccatttcggattagccagtcgactaattcctttcctacaatgcagttgggatgcgttctcaaccagtagcggtgatcctgaaactccattccactgctgtgatggcagatttttt

SEQ ID NO: 671437 - DNA, 553 bp, Homo sapiens
aatccacagtgtggtgaatctctacccgccgcagctcaatcaatgcgcgtgaccgctaaccataacgacggaggtacctttacgcgcacgcacagtacctgtgcgcagcgggaagctgacgtatcggtcagcgcgggatgctcaggcgtgtgacacgctgctgtaagagacctgccgtgactgcattagctgccgagctggtgctcagacggatggcaggtcgaattaggcgctagtccaggcagcccagatgacgagaatgatgacggactgcgaccacgatggggctggcttaagagcgatatcagacagtcagaaggtagcacacagcccttacacaggcaccagagtcagagagagtgctgactgactagaacgctgatgggggtagcttacgcaagatgaacgtgtgtattagctgcccagtgctagcgacgagactctagtgtgatgacggagccagctcatgtatctagatacctagttagctatagcgcgctgtctggcctgagctaagaagcatgctctgatgtcgcctgtgtcctgtgtcggc

SEQ ID NO: 671438 - DNA, 482 bp, Homo sapiens
  misc_feature (262)..(262): n is a, c, g, or t
  misc_feature (346)..(346): n is a, c, g, or t
  misc_feature (398)..(398): n is a, c, g, or t
  misc_feature (413)..(413): n is a, c, g, or t
  misc_feature (429)..(429): n is a, c, g, or t
atttaactatgtaatagcttaccattgaccggaagcttatctggtctgtagattaacacatattttgtatatgtattatatacggtattcttacaatatagtaagctagaggaaagaaaatgttaagaatcatgaggaagagaaaatatatttactattcattaagtggaagtggatcatcataaaggtgttcatcttcatgttgagttaggctgagaaaagagggattggtcttgctgtcttaggggtggcagaagaggangaaaatcttcatataagtggatctgtgaagttcaaacctgtgttgttcaagggtcaattgtctattttgataatatgtataccntttgttgttttcctattgctaatgcaacaaattagcacaattttgtgggctnaaagcatgcacatanttgtctggatagttcngggaggtcagaagtacaaaatgagttttcactgctaaagtccaggtgtagggc

SEQ ID NO: 671439 - DNA, 387 bp, Homo sapiens
tatcagatcacagcttataatcataccattacctatgcagaaagacggaggaagcagtataatgatgctcagaggtgttataggattgttgaaaaaaaattgccattcagaattgcatttagtgtaataggaactgaggagtggaaaacggagttccacctttgcataggagtctgctttcatttctttctcaagtctttgaagccatcaaatcatgctaccatccagagtatagtgagagctgtgggggtcgttcctgggattcctgagccttgctgtgtaccagaaaagatgtcctcactcagtattttattcctggatgagaatcggaatgtggttctgaaggtataccccaacatgacagtagacacctgtgcctgcagataa

SEQ ID NO: 671440 - DNA, 412 bp, Homo sapiens
  misc_feature (3)..(3): n is a, c, g, or t
  misc_feature (96)..(96): n is a, c, g, or t
  misc_feature (107)..(107): n is a, c, g, or t
  misc_feature (148)..(148): n is a, c, g, or t
  misc_feature (151)..(151): n is a, c, g, or t
  misc_feature (248)..(248): n is a, c, g, or t
  misc_feature (411)..(411): n is a, c, g, or t
ganaactttgggggaactgttggggaaaggccatgaactggttttgaaaatgtgaaagatatgaaaactgggaggggccccaggggtggaatgaanatggtttggcnctgtgtcccctaccccaaaactcatccttgtagctccccanaantctcacatgtgggagggaccctggtaggaaatgactgaatcatggggatgggtctttcctatgctgttctcatgatagtgaatgggtctcatgaganctgatgattttaaaaaacgggagtttctctgtaaaagctcttttgttttgcctgccaccattcacgtaagatgtgacttgctcctcctgccttccaccatgattgtgaaccctctccagccatgtggaactgtaagtccaattaaacctttcttttgtaaatna

SEQ ID NO: 671441 - DNA, 573 bp, Homo sapiens
  misc_feature (267)..(267): n is a, c, g, or t
  misc_feature (306)..(306): n is a, c, g, or t
  misc_feature (404)..(404): n is a, c, g, or t
  misc_feature (463)..(463): n is a, c, g, or t
  misc_feature (514)..(514): n is a, c, g, or t
  misc_feature (572)..(572): n is a, c, g, or t
gctcggtaccctccccgtacgcccaaatggaatattatttagtcatagtaaagaacaaaatcctgttgtttgtggcaacaagaatgcaagtggagggcattatgttaggtgaaataagcctggcatagaaatataaacaccacataactacgtgttctcacttatgtatggaagctaaaatttttaatctcgtagaagtagatagtagagttttggttaccatatcctggaaagagtaggagaaagaagagtataagaaaaatgtgnttaatacatacaaaattacagctggagagaaggaagaanttctagttctctacagcactgttgggtgactgtagttaacgggaatttattgtgtgttttcaaataactaaaataaaagattttgaatattctcactncaaagaaataatacatgatttagggtaatgggatatggataatgactctgacttgatcnttacgcattgcataaatatatccaaaatatcactctgtacccccttaaccngtaccattattatatggtccatttaaaggtaaattttaaagggggaaaattgagggtna

SEQ ID NO: 671442 - DNA, 206 bp, Homo sapiens
cattttccagctagccttggtaacctcccatctagttctgtctctgtgaatttgactgtgtaccccgtgtaagtggtatcatacagtatttgtatttttgtgactggcatatttcacatagcataatctccttgtggtttatccatcttgtagcatgtgtcagaatttccttcccttttaagactaaataatattccattgtgtgt

SEQ ID NO: 671443 - DNA, 126 bp, Homo sapiens
ggcggagtagagcagtcatacgggagcagatatgctgaaaggacacgtgacaagttgaaggagtcgcttaaagaagttcagctggagagagatcaatatgctgaacaaataaaacggagagcaggg

SEQ ID NO: 671444 - DNA, 116 bp, Homo sapiens
  misc_feature (80)..(80): n is a, c, g, or t
gaggtgagctggatgtccagtggagggagaatgcagaggatggggagactgaggccgtggctgtgtgtccctcagagagnttgagcggggctgggcccgaattcgaccgcagcagg

SEQ ID NO: 671445 - DNA, 316 bp, Homo sapiens
  misc_feature (290)..(290): n is a, c, g, or t
ttttgagacggagtttcactcctgttgcccaggctggtttcgggctcccggcctcgggtggtccgcccgcctcggccttccggggtgctgggattgcaggcatgggccactgcgtctggccttctataattttctggtagtcacgatggaaacaaacaaaacaccttagaaccagagatcgaccccctcaagcaatacatcaattcccttcacaagaaacgtcggggctacatgagtatcctgtgttgaatcaggtctgaaatgatcctatgattttcccgtgttgccanctactgtacacattcggcaacatcgc

SEQ ID NO: 671446 - DNA, 425 bp, Homo sapiens
ggagcatgcatggacacactggccagtgtctatgaagtggtgctgctcttatcttcgtgtacgcactccatggaaacgacagactgtgacacaggcggaagcctaggagagccgtatcatcgttggggctgagccagaactggccaaagtgactgacatactgtcagacagtaggctcatcgagaaggcacgtcaggtgtgaggtgagatggtgctgtttcaactcttggacacaactgatgtaactattgagtcctgctccaagggctctgctgaggatgagatactgggagtcagggcacctgtatatctgactacagttgtactcgcattactcgtgctagatattgctctacttagactgcatgaggcctggcaccagctttgagagagtgcttactgacctgaatgatgataccatgctt

SEQ ID NO: 671447 - DNA, 184 bp, Homo sapiens
  misc_feature (68)..(68): n is a, c, g, or t
  misc_feature (79)..(80): n is a, c, g, or t
  misc_feature (104)..(104): n is a, c, g, or t
  misc_feature (135)..(135): n is a, c, g, or t
ccttccaaccttttaaaaggcaattagatttaatgcagattatggagtttttaaagtagctaatgatnctccacaattnntggaaaaacaactgaaaaaaattntacaaaaccagcaacctcgaaatcccatttntaatgttgtaaggaaaggaaagattgaggttaaacctgttcaaatgatt

SEQ ID NO: 671448 - DNA, 1144 bp, Homo sapiens
  misc_feature (593)..(593): n is a, c, g, or t
  misc_feature (1144)..(1144): n is a, c, g, or t
agcggggaacgtactcgtccccttggtgcttctctccaatggtacgctgacgagtcccgggccccacaaagtgcgtcctttgacggaaagattactggcgtaccttctgcgggggccggcaagggccactccgcgacgtgcgtgaccagactggcctgggagagtggcttcacgggtatgagaccgcgtgccagtgcactgctgacctgtggctgcgctactgtgggtactctagcagatgaggcgcgccaaggttgctatcttcagtactactgagaggggcatacccagagggcacctcggttgaggacagcgagggcttctaacacagtccagacagcgagggcgccgatcctggtagagcgatgctcgatctccacaggcgagtctcgtgcgaaaggtcgaggcgcgagagaacggagctctagattgcgccaaagtgctgctgagtcgctcccatgcccatctcgccgcaccggcagaggagacggctcggacgtagagagagagcggtagggtctcgacagacctcatagccctagcgaggaccgcagtgtctaactccagcgccaaagccctaggtgtttggcgantccgttgcagggggaacagcgccgacgtccctcgagcccgtggcgccagatcttcgtctacccggggcacaaccggagggtggggacgcttgggcgggctggccatggggcaatttgtacgcccttgggcggcgaggtgcacagcctgcggcgccacgcactacagaacttaggggcgattgtgccaccggttgggcggaatcaccacgataacccgccacctatcgccgtgctagatcgggtagcgattgaggggccagttgcgccttgtgtcgccttcacctaggttcttgaacgaggatttggaactgtgttcttgaactggccggaatcccggtaacatacttgtatcccaattgcggcggcaaactgtgggagcttgccgcgggaaccccccttgaccaacaaagggtaagtgcccatttccggaagagtcttgggctgcttgaaacgccccggaattcggagtggaaacccaaacggtgggggccgcatagtaagtggggcaacaccaagcgaggaagtaaacgcctgttccggatatccttgtn

SEQ ID NO: 671449 - DNA, 429 bp, Homo sapiens
  misc_feature (408)..(408): n is a, c, g, or t
  misc_feature (425)..(425): n is a, c, g, or t
cagagtctcactctgtcacctaggttggagtgcagtggtgtgatgtcggctcactgcaacctctgcctcccgggttcaaacgattctcctgccccagccactctagtagctggaactgcaggtgtgcaccaccacgccgggctagtttttgtattttaagtagagacggcatttcaccatattggtcaggctggtctcgaactcctgaccccaagtgttccgcccgcctctgcctcccatagtgctagaattacaggcctgagctactgcgcttggccccttgcggtacttttggcccaacctcctccaatggctggggacgcggaggccgagagaagaagtcacttgccctggctctaccttgaaagtggttctcaagggttgggggcgagaatcggggtggggacngagatgcagctctatcntgtt

SEQ ID NO: 671450 - DNA, 167 bp, Homo sapiens
ttagaggctgttgtaggttattaattttcctaatctcaatattgttgtgtctcggggaacagaaaagcctgaggagaaggagagatagtgggaatgtctagttgttggagcagtcagaacacacatatttattgatgaaattcaccatcttatataggggcagcttg

SEQ ID NO: 671451 - DNA, 358 bp, Homo sapiens
tctactattgtagcgccaaccccggctggtcaagtcaccgggcagtgctgcgaggagtggctctgcgacgaggacggtgccaaggaccccatggacgacagggacggcctcccgggcaaggcgctggccttcgatgcctccgaggtggagttaacgagaaacaacgaattaattgcctttggaaaaggcggctccctgaagcggctcccgggtaagtgaagacggaggttctgaaaaatctagtcctagtcggaagcctcagagagatgagcacttccttgcacgtgtgtcccgtgcctctgagaaatctcttctgtgtctctagttttccgagcggagcctcgcgttctctacaccc

SEQ ID NO: 671452 - DNA, 990 bp, Homo sapiens
  misc_feature (162)..(162): n is a, c, g, or t
aggaaagacaagagcagagacagacagaaagagagcagagaaagaaaaacagacacagaaagcacaacagaacagaacagaacagaacagcaacagacaacgacaagcagacacacacacagacaaagaaagaaagaaagagaacagaaagaaatgcgactngaactttgcccagtggaaaacgaccagtgccttgtggctgttgggcccagtttttgcgtcagtttgtcaacgcatttccagtttccccgtttgccttgcgcacacagttctttggaactccttttgaatggtttttaaccaatcgctgtttcccctgttaaacaaactgagttaataaaacctttcacatgttgttcaccgtaatgcaacaacaacaggccggctgccagttggcatcgcggcctggtaatcccagcacttgggggggcccgaaggagggtgggatcatgagggtcaggagtttccaagaaccagacttggttaccatggctgaaaaccccgtctctgctaaaaattgcagcacgggtcgggtcccaaggttgtcgttggcatgttggttgcctggttgggttccttaagctggcttcaagggaggcttgatggccaggcaaccttggctttgaaccccgggaagggcgcggaggttgcagttggagcccgaaatccgtgccatttgtaccttcctgaccggggtcggtacacaagtgcacactccgcgtctcaaagaaaacaacagcaaccaaacaagaaagagcgcaaaaaagggggaatacgccctttctccagagaccctgttaatttagacattagcctattacgaatcttgtgacacggaattgggccacttaggcccaggaagctgaactggtagaatatggcagccagtcgagcaacgagtgacacacggcggcgagtctaacaacaagaaaatcgagcaacatcatgtgtagatgggagtgcaggaagacacacagacaagagatgagg

SEQ ID NO: 671453 - DNA, 911 bp, Homo sapiens
ggttccgccgggagcgggcgctggcgccagagcagggttcagtttctggcgcgaacttccgccgtatccgaagtagcacggtgaatggcgctagtgtcgggggacagcagcggtcgcgggccgagagggccggggccggggccggggacgccgcatcgggatcggcaacccggatcagggatcaccgcatcgcaggtcaacccttgtcgccccagggtcccgcccgggctctgcgcggggaggcgaaaagagggccccaagagcgccggagctgggaggaacacagaagccggtagggattccggggggacgaagatggctggacccccgggcaagcttggaagggcggagggcgcgaaccaaggggccttgtgcccggcaaaagaatccagacaatcagtaccaggggcgcacatcaaactcccgtccaacaaaaacgcggggaggaaaataactggaatggcccggttgaccacattaaacaggagcgcccctggacggaggataaccactctggtcaactgcgagggggtcccgagacaagaagaagcaggcctggatgcccacttcgtggtcggggctacagattgtggggcaaagagaaaggcaaaggaaggtgggataaagagctggaggtccttgtgacagttgtacggcattggtggcaactcctactccaccacatagtggggggtcaaaccgcgagcaggcgtgaaaaccaccgggagaagaaagtctgattcggatcagtcggcagactctgagaaaacggccgacgcggaaaccttaagagaaccaaaactcactttcggggtccaactggaagtccggccaccaggtgacgccaaagtcgtggcaggggggaccctccgtagaaggactcacagcgagaagacgtgggacaggaacgc

SEQ ID NO: 671454 - DNA, 672 bp, Homo sapiens
cacgatggtgaggaggtaagtgacagggtgctctttgatacctcagatgatgaggagctgagagaagagcgggatatgcactcaatcatcgttgctcgtgggtaatgatgaaccccgttcttcactggaagagcaggtcatgaatgatatcggggacttgctgcaggaagtcaccggaccatgaagatgatgataacccctagacaggcagatcggctttcaatgctttcccaggaaattcaaactctcaagaggtctagtaccggcagttatgaagagagagtgaaaaggctctcaggtctgagttaaatgaaatcctggaagaaattgagactgccattaaggagtactctgaggagctggtgcagcagttggctttacgagatgaactggagttgaaaaggaagtgaaaaacagctttatttctgttcttatgtgaagtgcaaaacaaacagaaagagcacaaagaaacaggaaaaaaagaaaaagaaactaaaaaatggcagtctcagaatgggacgaatgagagaagtcatatggccggacatatttgactacagtcattccttatgagaaaaaaaaggaacacgtctgtggaagatcttcaaatattacaaaaattcttgtgcatgaggggccagcggaaaagttcgagctgtaatgatatttcgg

SEQ ID NO: 671455 - DNA, 143 bp, Homo sapiens
cagaacacgatcactggcagattttgaaagaggctctgacagattaccggtgcagagctccgggatgacccaatcatcagcacacacttggtccagttgtatgattacttcactagaacagaatctgatccaagttgcatgcc

SEQ ID NO: 671456 - DNA, 273 bp, Homo sapiens
  misc_feature (46)..(46): n is a, c, g, or t
  misc_feature (83)..(83): n is a, c, g, or t
tatatatatgtgtgtgtgtgtgtgtgtatatatatatatatatgtntgtgtgtgtgtatatatatatatacacatatacatanatatgtatgggtagggaagggcattaaagagggccagaatgaggaacaccagaagatggcagagctgcatatgcagtagagagatgtgagttaagctgggttacaaccaaagaaggaaagagaatacaaagagtaagtagataaataagaactggtgtcatgaggaagtgccatctgggaatctttgctt

SEQ ID NO: 671457 - DNA, 212 bp, Homo sapiens
  misc_feature (14)..(14): n is a, c, g, or t
  misc_feature (17)..(17): n is a, c, g, or t
  misc_feature (39)..(39): n is a, c, g, or t
  misc_feature (84)..(84): n is a, c, g, or t
  misc_feature (207)..(207): n is a, c, g, or t
cgcaggcctgcgangcnctatggcgcccatgttgaatgnattggtcttgaagccccacttccacaaggactggcagcggcggtnggccacgtggttcaaccagccggcccgtaagatccgcagacgtaaggcccggcaagccaaggcgcgccgcattcgccccgcgccccggtcggttcccatccggcccatcgtgcgctgccccanggttc

SEQ ID NO: 671458 - DNA, 185 bp, Homo sapiens
atgctgggaagacgtgtatgagccctcacctggctggcctggtgctcaggaagctgcagtatggacagcagtctacctggacgggaacatatgtggccgtggacgaagtgtccggccggatgggacccaccatcacatcgtcctttggatgcagcactggcccgcccccactcctttttttattt

SEQ ID NO: 671459 - DNA, 160 bp, Homo sapiens
gtgatgtatcccacacttgacttgttagctcacgtctgaccactgcagtctgttccttctctgagctcactttctcatctggtactcagagctccttgttagaaactccagagcacgagccagaagggtggtgtggagggtgttgggcgataacatcacg

SEQ ID NO: 671460 - DNA, 370 bp, Homo sapiens
aagtgtacatctagtatcacatcggaaacatcgattccgctaagtagcaagggatgaaagcggtcgcgaatgtatgtggtcactgtgtgcatgcatgcagtgtgcattttgccgatcctgcataataagtgcggacatgtaagcactaaaaatatcattactgaaacaccataatgttaaagctgattgagagtgaaggatgagtcagtgattatcttggcgattaggactctggttgtatgtgccaatgaaacaaccattgtatgattaactctgcgatttgggttgatctatagacttcccctatgataatatctgactgcttgatagtcttatgcctcatttatgtagctaattccagtttagctac

SEQ ID NO: 671461 - DNA, 464 bp, Homo sapiens
aacagtagtggcagaactaggataacagtgactacgatgtattaagaggtctaagaacttaccatatttaagatctcataatggcggtgaagtaggtgggattattagttaccatattacagatgaggcggttttctagctgtcatgctacttcctcggtctatgctgttcttctcccttgtatctttcgcctgcttggaggctttactacaagactacttctcctgagtcttcttaagtacgcttgtaagtttgaccgtatttcagaacgtgggtcttgggtatatctggaattaattttatatactagtataagatacggacatctagttctatttggccccatatatggaaagacatttactttcaacagcttaaatttattgtcactgtctattcttctgcaacttctgcaggtatgagattggtgtcagattcgctgtttgctttgagttctgcttccc

SEQ ID NO: 671462 - DNA, 1014 bp, Homo sapiens
ggtgcataaagaaatagcaattgaacaataaatttatggaggggaggccatttttacttcctgcagaaagggtacactcagccagcagttttggcacgagagtacacaactaaggagatagggtcatttataacctgacgcgtccaccctactgctatgtccggtttccactggctgggatggggggggaattctgtattctgtcccgattggcgagcaacttagaattttttttttttttttgagatggagtctcactctgtcgcccaggctggcagtgcagtggccaggttctcagcttactgacaaggctccacctcccgggttcacgccatatcttctgcttcagcctcccaagtagctgggactacaggctccgccactatgcctggctaatcttggtatttttcctagagacggggctttacatgtgttagccacatggtctgtgatatcctgacctcgttacccgccccgcttgtggcgctcccaaagtgcgcggcattaccggcgtgagccaccagcccccgcaacgggccagccaatttacaaaccttttaaaccgacgcacaggtagcatcgagaacacaaggcgcggagcaagtacctcgtggaatgctgacaaaggtgaacaacttgtaacctcaggaacgcggcaaccagcgatatgaccctactgcatggctcggccccagtactaagcatgaccacgccaaataatatacggcaaaaggggggacgctaacacataaacgcacgtagacagctacatgcaggcacgcacaattttccgcatgctcaccacacgctgcgaccaacatcgcgcatagacaagtcaggtacatcccaagtcagcgccgagcttgaaggcgcccagtacgagaacaaggagcccaccatacagcgctcaacccagcacggccacggtagtcatgtgacacgacacctgacgcgcggcgcggacatagccaatcccactgagccctgcccagcgaccaacgcacacaacagagc

SEQ ID NO: 671463 - DNA, 1319 bp, Homo sapiens
gcgcccacctcaggactgcagctgccggtccagctgctcccgctgggcccacagccgcgctgtggaaatggagcggacagtgccagatggctctctctgtggcctacaatgtctatgtgctagtgcatgtgtttcctgagtcccagtgtgccttccagagtgcctgagctcacagctgctggcccacccatgcatcctgtggtggctgctgtgagtgggcagctctgcccaagcagcggtgaacaggccattctgctgtggcgcgtgtgatgcgctgtggccctggcctgccttgtggctgttgtcccttttctgctgtgaacttgacgctcacttggcttcctctcttccagactggcagcggcactgtgtggcctggctcagcaaagccatcatagccaactgctggtcccattcggatgcgctgtggcaggtgctccatcttatggcctagcacgccatatacttttcattgccctatcatttcacaagatcatccatggtgacgacttaccgatagagttgactcatagcacggacgtgaagcatgtttgcactgcacatatccagctcctagtgcgtattccacatgtgccccaaccattgcttttggctaggtgcaacgggacacgggacaactcgcgataccagcacactcaccattggttgtgcacggcaggatcaacacaatcacacggtgttcattcgacacactaccttcttgcgcacttcacataacccaccagcctgcggtctttccgtgaaccgtttaccccatctgcaaactgcacagaaaatgcccgcaccacaaccaacaccctatttccacgcctacaccgataactttctaacagttgacctttacccacaattgcctaaccgaatgacggagagccacttgccagatccaggccaaccaggcaaagtgggggtccatgaaatgtagaatcccacgataactccccatcttcctgtggtcacttacgctggggggcagaggaacattccctgccaccctcattcgagaaccgcaagtaccaccattcccgttgtatcaacttacaacatgtactaacttgtcgatcactcagccagcaccgacaaagagcgcgccagcagatgaaattccattcggggcccgcgaatcctgagcaccgcctttatgaaggtgcccccaacgagcgcagcaacgtcaggagtgagtcgagctcatctcagagcagccatcgcggctgcctgcccgcacactcctcgtgacatcgtctccccgagtcgcctgcagctctcatctcctgcttttattagtcttcagagtacgg

SEQ ID NO: 671464 - DNA, 137 bp, Homo sapiens
ctacctttacgggttggaaaagacgacagaagggtcaaaaagctccaccccaaaaggcccctgttccaaaggcttttggcagaaaaccttaagtggcattcttaaaaggtattaagggtctttttggccctgctgcc

SEQ ID NO: 671465 - DNA, 560 bp, Homo sapiens
acgtgtacctcgccctcacggggcacaccgctgaagagtccagcaaccaggaagaggtgccggcatgagcgcggccacgggtgccattgccatcgaccgcgcggtccccaagccccagggcgcgagccggctgcggcagatcaccacgctcgttcggcgcaacctgacccacatcaaacgccagcccgagatgctcaccgacgtgacggtccaaccgatcatgttcgtgctgctcttcgcctatgtcttcgggcggctccatcaccatccccggagtcgactacaagccgtggctgctgcccgggatcatggcgcagaccatcgccttcagcgcgttcatcgttgcgatcggcctcaacaccgacatcggcaaagggatggtggaccggttgcgctccctgccgatctcgcgctcctcgatcctcatctcccgctccgtcgctgcgctcttccactccagcatcggggttccggtgatgttggtgaccgggctcttcatcggttggcgcatccacgaggggctgctcaagggtctgcctcggaaatgggctgctctcctg

SEQ ID NO: 671466 - DNA, 547 bp, Homo sapiens
tctggatgcaaagtgtctggagaaaggaatagcaggaccctatcaatgtgaaatacgggaccgatatggtgggatccgtcagatgacccagtcaccctgaatgtcctctatggtcgagacctccccagaatttggccttcattcatctattaccgtgcaggagaagtcctctacttgtccttgttctgcggactctaacccaccggtacagtattcttggacaattgaatgaacagtatcagctcacaggacaacagcgtctttatccgccatatcactacaaagcatagcgggctctatgttcgctctgttcgtaactcagccactggcaaggacagctccaagtccatgacagtgcgaagtctctgactggacagttccctgaattctactagtatctccaattccattttctcccatggaatcactatgagcgagatccactctgtaccagaagccctatcagctggaggtggacaactcaatgtaaatttcatgggaaaagccgtgtacgtgacgcatgagccactcagaagtcagcaatgta

SEQ ID NO: 671467 - DNA, 466 bp, Homo sapiens
  misc_feature (29)..(29): n is a, c, g, or t
  misc_feature (125)..(125): n is a, c, g, or t
  misc_feature (128)..(129): n is a, c, g, or t
  misc_feature (133)..(134): n is a, c, g, or t
  misc_feature (142)..(142): n is a, c, g, or t
  misc_feature (150)..(150): n is a, c, g, or t
  misc_feature (189)..(190): n is a, c, g, or t
  misc_feature (194)..(194): n is a, c, g, or t
  misc_feature (201)..(201): n is a, c, g, or t
  misc_feature (203)..(204): n is a, c, g, or t
  misc_feature (208)..(208): n is a, c, g, or t
  misc_feature (211)..(211): n is a, c, g, or t
  misc_feature (219)..(219): n is a, c, g, or t
  misc_feature (223)..(223): n is a, c, g, or t
  misc_feature (225)..(226): n is a, c, g, or t
  misc_feature (262)..(262): n is a, c, g, or t
  misc_feature (268)..(268): n is a, c, g, or t
  misc_feature (274)..(275): n is a, c, g, or t
  misc_feature (277)..(278): n is a, c, g, or t
  misc_feature (288)..(288): n is a, c, g, or t
  misc_feature (294)..(295): n is a, c, g, or t
  misc_feature (335)..(336): n is a, c, g, or t
  misc_feature (338)..(338): n is a, c, g, or t
  misc_feature (340)..(340): n is a, c, g, or t
  misc_feature (345)..(345): n is a, c, g, or t
  misc_feature (366)..(366): n is a, c, g, or t
  misc_feature (405)..(405): n is a, c, g, or t
  misc_feature (441)..(441): n is a, c, g, or t
gaacactctacaagaatgtaaacccctgntttaattccatgattttatcatgccagaagcatggttggttttagttttttaaaacagatattggtatcataacacattggcttattaataattanggnntttnncatacacngtatctcngtgtgaacaaaaaatgtttaatattgatttttttcaggnnttanactttcngnntttncancataaganaatngnngcgcacatttaagtgttttttttttttaataaaacncaatcntaaaanngnnaaggggggtnggggcnngggggggccggggggggggggggggggtattttttcccanngnanaaatnatatttttatgcggggttgcnttaaaatccagtagttcttaatgttaccaaataaccatntaactcccaaatgcagcaaaggtgaacaatcttcanagtgcactttcacctcaatgaaatt

SEQ ID NO: 671468 - DNA, 813 bp, Homo sapiens
acccacgtcgtacggtttaggaaacaagtttgcctgccattggtactgtaattaagagtcatccggaatatggagaagtaattcacactacacgggtgaccacacgcgaagaacatatgccagttcctcgtagagtattggactggctaagggaccgatcagctggagagggttcaatggtggtcttctaaagtgctgtgtggcctcactgatacgcttaaggtgaggattctcccttgcaaatgacgtacgaactttccccttctctcccttgctacacagggtttaacaaaactcacagcttgtataatgtaaccagtttggggtccaggcgttctgtaagcttgggactatgtgtgagatcatcgcctcttcaattgcaattaaaacctgaagaggaagcaggccagtaatacagataatacacagaaaacatagatagaacataaaaaaaggacatgatcattgcatgagacatagagaaattagaatagaactgactaacaggcgtgcgaggcccgtgcggacttgactatcttgcccaaccgctgggccacactgttccgccgaagggccccaccccgttttgagttgccccagtttcgtagaggagccctacaaatgcggtacgcgtgactctctctctgtaacctcatggaagaggaggacctgctatttcactcaaaaggttcgtccccgtatgtcgagggaagatttccagctgaaccgagccgtcgttccaagaaccccagcgaccccagtagatcttccggtgcgaggcgggaacatcaagggcgtccaagcctgtgcgct

SEQ ID NO: 671469 - DNA, 450 bp, Homo sapiens
  misc_feature (208)..(208): n is a, c, g, or t
  misc_feature (274)..(274): n is a, c, g, or t
atagatatatttaaaaattatatgtttataaagttattaatttgtaaaggcagtgttacaaaatgttcagtttatattgttttagattgttttgtaatttttaaaggtgtaaaatagcatattttttctttatggaaatctataaaactttctgtgataaaaagttttcattttactggtaagatcatgcttacagttttgtgacctncagaatatttgtggcatattttttgcacacaaactactattgtctgagactaatgaagacatgtanaaaagttgtttaccaatgaaacaacagcggaatccagtatcggaataaacacagtcttattcacagactgtgaggactaaaaaaaccacatagaatggagctgtaacttaaattccaaactatggatgttgacatatccaaaaaaacagttgtattgggctatttcgtatgaagaa

SEQ ID NO: 671470 - DNA, 123 bp, Homo sapiens
ggtcggtacctgcacgtttcgccacatgaccaacgtgcgggtgcactggatgaccagcatgttcgaagggctggacgacgatgcggagacccgcaaaatggtcggcgccaacatcgccatgga

SEQ ID NO: 671471 - DNA, 966 bp, Homo sapiens
  misc_feature (817)..(817): n is a, c, g, or t
gactaacaaaagtaatctagcaaccatgaacgtgggtgagaagtcgaattgtttttaattgttcctactaaagtctgactgaagtccgagagacactgcatagaaatgaatatggaatagcttcctagtatcggattcttaccaatgtactgcagagataagtttagctgacctgagctaccatacttgtattcgcgccacgttgggttcaaggaaggccagcgttagcagatggagatgtagaggcagacagagtggtggacatacgatggctatgatctgcaagttcgaggaaagccacgtggagatgaacagtcttcgagggtggtttaggaagaacgcagctacgctgctctttgctgggaaagcaagctgttcggccattgaggacagaggaaattttctgggaggaacgtagcgtgcactacttcatgactgcatgcaggcgcacacacggtcgaacgagggacacgacataacacctggtctgaatctctggctacctatcagaagagagtctcccacctctcagtcactccgaatgcacgcaacgtgttgtcccaaagccttgctcagtagacgctgttcccacatgaggcgtgatggaaagcgcaataatgcagatgcaagaaccaggggcatgaccagtttcactgcaaaccatactgtttcagtttctaggtgaaggaactacgttccaacgaaagggggcactcccccttacccgtggtattggcgaccttagcaatgtttcgtgtcctctttgggggcgtgcctcggcggtatgaccgagaaatctaaaggtgtccacctcatntgctgtgcgagacagcatggacaacactgccacggtttgacactgcgttcccaagagcacacatggcatggcaaacagtttacgcgcagaacggtaagacgaagagccagcctgggttaaactcaaacgatgcactgtgcacgcaattg

SEQ ID NO: 671472 - DNA, 1059 bp, Homo sapiens
ggaggaactgctgcgggtgtcccagtgacctgctgctgtctgcccactccacgctgcagctggccctgggcccggggccagtgagggccctggagacgtggacagtgacagcccaaggtgggagctgggtgaagggtgtgtggtgcctcagaacgtgtgtgagaagatgtgaagacggaagaagaggatgacagaagagagtgtgcagaagagcatgcctgggggctcagtggctgtgccagtgtgggccccgagggttgtggcagtgcctggctggtggtaccagctcatgcagagctcccagagtctacatcgattgtgctccattgaagggttccagtgttccctcgtggtagcagcaacaagacagcagcagaagaaaaagaaatggggcatggaggtgcggtggaccatcccgcaggactccaacagacccgagagggcacgttaagtgggagcgctcgggctggacgggccttgcagcactgcccctcttgaacgacgtgccacttgggagaccagagagacacggcggcctggagacctctcctgcgtccttggggcgacagccccccccaatgagcatcatgatcgcatgagccgcgacgacttgaagtggccccaccaaccgtgagccagaagggcgacaagggggcccacgcgcaagtgcaccagacgacgcgaagcgaacgacagaggagatggacgcggaagcacggggcacgtaacagaaaggagctacgcgccatggaggggagcagaccaggcatgggcagggacacgacgtactaatggagactctcgcagagcagagggagcacagggaggcgaacggcggccgaggaagcaaacgaagacgtagcggggcaaccacaatcagggcaaaaagggacagcgaagaacactcggggacaagagagtcacaactaggcacccaccagcacggtagaccagggcagacaaagcagagcgacagcacccagagaacaggggagagacgagaacgagcccagaaagggaggcagaccataggacagagaacccaccagaagtgacgcc

SEQ ID NO: 671473 - DNA, 428 bp, Homo sapiens
atctctgctcccagattccagacaactgcctacatttctgtttcatttggatgtcaaatgggctttcacaattaacaagtgtgagaagaaacccttgattttacagctcaagtcctacctgtttctaccctaggatccacatctcagcaaagattcctcccaggtcaaaaattctggggtcattttggctccctcccttttcctttccttcagttggggtcagcaaatacagcccatgggacacatacagttttcttggaacacaaccaacccgttcctttacatatcgcctgctacaagggcagagtagagtagtggggacagagactgtagggcccacaaagcctaacatgtctaccctttgtctctttatagaaaaagtgtgtccccccactttacagtcaacctgtggagtcctgctgactatt

SEQ ID NO: 671474 - DNA, 119 bp, Homo sapiens
atcagacagaacattaatctatacttccctaaacaatgataatgcgagcagtacacagagcctccaatggtgaacttcaaattttacatcacaattctattgtccaaatatatactggt

SEQ ID NO: 671475 - DNA, 536 bp, Homo sapiens
gagagatggaagataagtgggggaggggagcaccggctctgacaagaggattaggtggggaagttgagtggtggatcagtgagtggaagagggagaagctggtggaaagagaacaggcctgtgaagcagaggggttgggggcagaacatcgtggcccagtatgggggtggtgggtgtagctatgtcttctctttcctcttcccaccgactttactctttggtcccctctggcctgggctgttgagttggggctcagtgaacggatggggacgacctcaggtgctgaagcaggtgctgaagcagggtctgccgtggggggaaggtggagtgggcagggcttctccatccctgggggaagaggcaaagcagacgcagaggccagggctggccaacaccctggttcaaagatgctcccaccccaggtctggggagaggaggggagaggctggggctaagatctccctttctgcacctggatcccctccacagcctgggccattctgtctttgtttctgcaggaacactgccctgaaact

SEQ ID NO: 671476 - DNA, 1020 bp, Homo sapiens
ggaagactgaagagtcgaggcgcgggagatctggaacacggtcatgtaccatgcactggcggctggtgcccaatgcacgaggaggaggctcttcacccgcgttcacgccggcgccggaagacagactggactccgtgccgtacccgacctctcctccgggccatgattatcgcagaacgacaggaagaatggagacaacaagctccgaggtagcccatgctgaatgtgcgagaggatacgcatggaatccctgggattacctcatgcaacaacaggaagacaatcaggacagggccgaagggcacactcctcgtctaatgaatgccagaaccagtcgggatgtgccttagtgggcgtgtgaggcagtggtggtaccttgattgatgagaaggaaaacgtctttgccattacacctcgatgtctgcctctcggagcaggagctcaccttccgcgagcgtgttctagagggtcctgcatcttagtccggtgagagggctggtggccaatcagtctacctgttgcctttcctctggcccttggatgcccccatatcccaactccgaaggggccaaccgcctggggaaaagccgggaagcgctcgttcacttatcccccattagtgctctctctgctctggcatccgggcagacagctatgaaaggcacatataagaggaaaccgaacgttcccagaacatcatcaattcgaatgccaccaactcactaaataacaaaccgataatccggcggcgaccgtaaagcttacatcacgaggggccccccaaatcgtctggctaccgcgcctttgtagaaccgggccataaacgagtgccaattctcaacacagcgcggcgatacataacatccctgactggacctgtctaccgcggagcttgagagacactcaatcggggggcatacatgccactatcatacatctttcacagtgtcataacctatgtcgttgatccacgcctcctgcgaatcgctagcataataaaatttcgaggcttatctataa

SEQ ID NO: 671477 - DNA, 702 bp, Homo sapiens
cagtggcctcgaggctgtggagatcctgcaggagcgcgagaacatgctgcttgctcgcatcgcacaccgaattcagcactgtggaaaccttcccgggtccctggccggggatttgcgaaccaaagcgaccattgagctcaaggccctcaggctgctgaacttccagaggcagctgcgccaggaggtggtggtgtgcatgcggagggacacagcgctggacacggccctcaatgctaaggcctacaagcgcagcaagcgccagaccctgcgcgaggcccgcatcactgagaagctggagaggcagcacaagatcgagcaggagcgcaagcgccggcagaagcaccaggactacctcactagcattctcccgcatgcccaggatttcaaggaatatcacagatcccgtccaggcaaaatccagaagctgacccaaggcactggccaactaccatgccacaacggaacgggagcacagaaacaaaacgaccgctcaaaaacgagccgatgcgaaggccatggctagaaatgagaacgagacccccagctcatcgccccagaaaacgccagcgcgtggcctacatccgccaccacacgacgccgacccgggctacccccaccgggccgctcccgcatcaacaacgatccccaggaccggcagaggacaaacgaccccacgaaccccccacgacgccgcaccaggcc

SEQ ID NO: 671478 - DNA, 845 bp, Homo sapiens
  misc_feature (20)..(20): n is a, c, g, or t
  misc_feature (33)..(33): n is a, c, g, or t
  misc_feature (41)..(41): n is a, c, g, or t
  misc_feature (211)..(211): n is a, c, g, or t
  misc_feature (219)..(219): n is a, c, g, or t
  misc_feature (221)..(221): n is a, c, g, or t
  misc_feature (231)..(231): n is a, c, g, or t
  misc_feature (257)..(257): n is a, c, g, or t
  misc_feature (261)..(261): n is a, c, g, or t
  misc_feature (267)..(267): n is a, c, g, or t
  misc_feature (284)..(284): n is a, c, g, or t
  misc_feature (307)..(307): n is a, c, g, or t
  misc_feature (370)..(370): n is a, c, g, or t
  misc_feature (399)..(399): n is a, c, g, or t
  misc_feature (417)..(417): n is a, c, g, or t
  misc_feature (420)..(420): n is a, c, g, or t
  misc_feature (467)..(467): n is a, c, g, or t
  misc_feature (474)..(474): n is a, c, g, or t
  misc_feature (514)..(514): n is a, c, g, or t
  misc_feature (522)..(522): n is a, c, g, or t
  misc_feature (524)..(524): n is a, c, g, or t
  misc_feature (562)..(562): n is a, c, g, or t
  misc_feature (569)..(569): n is a, c, g, or t
  misc_feature (581)..(581): n is a, c, g, or t
  misc_feature (597)..(597): n is a, c, g, or t
  misc_feature (618)..(618): n is a, c, g, or t
  misc_feature (632)..(633): n is a, c, g, or t
  misc_feature (665)..(666): n is a, c, g, or t
  misc_feature (674)..(674): n is a, c, g, or t
  misc_feature (677)..(677): n is a, c, g, or t
  misc_feature (716)..(716): n is a, c, g, or t
  misc_feature (743)..(743): n is a, c, g, or t
  misc_feature (747)..(747): n is a, c, g, or t
  misc_feature (749)..(749): n is a, c, g, or t
  misc_feature (788)..(788): n is a, c, g, or t
  misc_feature (790)..(790): n is a, c, g, or t
  misc_feature (806)..(806): n is a, c, g, or t
cctccataacggaggaatgnagccaagagtgangaaagaanctgtatctactccatcacgaatggcccacagggatcaggaatggtatgatgctgaaattgccagaaaactgcaagaagaagaacttttggctacccaggtggacatgagagccgctcaagtagctcaagatgaagaaatcgctcgacttctaatggctgaagaaaagaangcttacananaagccaaggngcgggagaaatcatctttggacaaangaangcaagnccccgagtggaagccanagacagctaaagcagcaaattcnaagtcaaaagagagtgatgaacctcaccattctaagaatgaaaggccagcacggccaccaccncctatcatgacagatggtgaagatgcggnttacactcattttacaanccngcagggttccacacggcatttctcaaaatcagagtcctctcataaangttttcnttacaaacattaaaaacctaggaatctgccttgaaaatgnactcactntngcaaatattactgggtgatacagaatgaattctacacntactttntttctcctgtgnttgcattcctgggatntatcctcaagtgcatttctgnccataagtaatttnnattcatttcaaatgttttggttattcatgttnncttgggcngtntaagaaaatgtagcttctgaatattggccacctctatgntgcatatatatcttgggatatagtatntaananctttgtaaactgccattttgttaggtatggagtttggtntntagggagtaggccttntttagcaattcataacttcataggggatgaatgatacaa

SEQ ID NO: 671479 - DNA, 301 bp, Homo sapiens
cttcctgaacaagtgcgacacggtggacgacgccgagctgctggagctcgtcgagatggaagtgcgcgaactgctgagcaagtacgacttcccgggcgacgacacgccgatcgtgaagggttcggccaagctggcgctggaaggcgacaagggcgacctgggcgagcaggccatcatgcgcctggctgacgcgctggacacgtacatcccccagccggaccgtgccgttgacggcgcgttcctgctgccggtggaagacgtgttctcgatctcgggccgtggcaccgtggtgaccggtcgc

SEQ ID NO: 671480 - DNA, 316 bp, Homo sapiens
tgctgtcagtttggtgtggaggcctatgttttgccccataccccccccaggccctggttatgggaaggaacccaggcctccagcccaaaggactgtgcccccctgtttttggccgtccacgtttcctctccctttagccccagcaatacatttccctggcatggacagaaaagccagagagggcttgtccaaaggctttgtaaaacccaaggctagcttctatctttgtttactgttatttcagcccagggcgggtaattaacctccttggaactagcttttaggaaaaaaaaaaaacttggttttttttccccca

SEQ ID NO: 671481 - DNA, 549 bp, Homo sapiens
tgggatgaggcaggaatcaaagacagatacggcgacatagggtgccccggctccaggggtctcgcaagtgctatcgggtgtgcattaccccccagaacgaaaataccaaatgtgctgtggagagctcccgttgaggtggttaataggggtgatagaccgtggtgatccatcggtgagtgctcttattataaggggaacgtgtgtgggctattataggcttatagttggccctgaagttaggaaccagatgttcggatacagtttcacttatagctacccccaaggtgttagtgggcccggagcgaggagagttagcactctggtgtgcgggatatggatttcacggaggagtgggtggtcaagggacccctatcgtgagggggggtcatcacatggggggaccgaaagaggggatttggagcgtggtaatgtggtggcatatgtgttagcggtgtaaatgtgggcttttagtgtgtaccatagtgtgtagcgtgggtaaagggggtggggataagcgattgggagtggggatattccataggtggggtg

SEQ ID NO: 671482 - DNA, 127 bp, Homo sapiens
gaagaggtagatatgggggcggagaatgctagaaatactttgagccatggccttgccagtgtccgtgccctccagttgtcaaatgatttggggcactgcccgtcgaaatggaaaggttggtgctcag

SEQ ID NO: 671483 - DNA, 316 bp, Homo sapiens
  misc_feature (93)..(93): n is a, c, g, or t
  misc_feature (104)..(104): n is a, c, g, or t
  misc_feature (110)..(112): n is a, c, g, or t
gggcccagccccacggccacgggcaccctgggccgcatgcactattaatgatgggccccggctcccgctgcaaggcgctcggggtaccggacntgcacattagntaaaannncccccacacctttggaatgcctcggcccccacagctcccaggtggtactgggggtggaccgccaccccctgaaaggctcccttccccagtcctgccaaaagaccccgggggcggggagggggcagcatgcagggtccccactccctttttggggtcgatgaaaaggtgaagtgaccaaatgaaagaaagctgcattttcagtga

SEQ ID NO: 671484 - DNA, 1015 bp, Homo sapiens
agaagatttcataatgtccattctcttgtcattcaggtccagaaccatcaagattattagactgagtgagagtctatagaatccatactgcacatgggtcagtgaaatgtgtacctacacatgctgcttgcaagacaatattgaattgcgctggtattttacccgtgctcatgggtatgtgtggcgtataggatggcgtatgagctagagtatatgcgccaagaatatgagtgtgcgagtacaattcattggtgtcctagctcatttcataagcaataatcaaggaggttatcgaattgtgatacaaagataaatggatgcttcgaagtgcgtatgtatgatccggtttcatggtgccttgagccgtagttcttaggtcatccttgtttttattttgctcggctaggtctttatcgacttggtgggtgacctcctggtgattaaaacactacgagcttgctgttcttgggactattttgtcatttctctttgtttttaactctgcctcggattaccttgttgagcccgtgtaattgggtttattctcttcctctgagagcgggccttgtcagtggtcttggtctttagggtttgtgtgtcagaggggcttgattggatttatgccggcttctgattgttgtgcgttgttgtccatgttctccatggtggttcactttgaggatagccccgtgggaatcctatggtttctacctgcgtgtggttcctcataagcattaacatttcatttccaaggcatacacacttggttgtgacacagcatgttctttaggcgcagaggatcccaaattaggggcatatggcttagcaagaccggttctataaatccaactcactgaaagggatttttcagaaggtctgactaggaaatcgaaccaatgtttgtaccagggcaaagggtcccttacacggtctataacaaggaacgacgttatgaaccacaggttaaacacgataacgtcagaataagctcggcacaacattacccagatgtggc

SEQ ID NO: 671485 - DNA, 479 bp, Homo sapiens
  misc_feature (25)..(25): n is a, c, g, or t
  misc_feature (36)..(36): n is a, c, g, or t
  misc_feature (167)..(167): n is a, c, g, or t
  misc_feature (189)..(189): n is a, c, g, or t
  misc_feature (206)..(206): n is a, c, g, or t
gagccggatgaagtttttacttggnaggtctcatangttttttatagataactcgtgttaatttacacttcctaaaatatcaattttacttccacttaatatttgatttctcatttttggcagagtaaacaactttttgaagctatgctaatgctgtttgtatcatnatattcaactcctatcacctanctaatagatggggatancttacagtattcaagtatacttggctttagggtccatttttatacttacattcaaatatgggtatatgccatactgcatcacatcaaataattaagcaacaccataatgaccagacccaggaaattctgtaaagctccccaactttcttgctctctacaatgcatgcgtaagtactctgcgcttcccaccctatgcaggggataaactcagtaactttcaggctgaaatcctactgttccctcttcatcctccccaaatccttccccccagtc

SEQ ID NO: 671486 - DNA, 392 bp, Homo sapiens
ggggattggtaaaaggtctgaatttggtttaaggtctggattaagaagctttaccaataggaatggatcgatggttgaataaggatttttaatccatagatttataaaatccagccaggaaaacttaaattacttttcttttaaaatatctaacaattaatggggaatttttaaagactgatcttagaccaagtcaaattcccattaatcatttagttattttttgaggttagagaataattggtccatattaatttagaccttggatattaattaaagcaattactcacaatggaagtgaaggaatcaggagaaaagccttttaaaaggtattctccaggtttgtcagggtcactttaaggatacagatggtggtgacacaggttaattct

SEQ ID NO: 671487 - DNA, 387 bp, Homo sapiens
cctggaggccttcggcctgcctgcctgcctgccttaggtcccccctgccagtcccgggccctggaaagcagattctgtcttgttatgtacaggaggaccttttaaaaaaatccagtttttattttttgctggtagtccgcatacccatcccctctgttttttaaggcaaaggccaatcagtccccctttgtagcatggccccagggttttaggcctagtcctttcattcctccccccctccgaaatggtcagtgtgtcatgggaagcccccccccagctttgccagtgctttttgggcctggctcccagtcagtggtggccccgattcgggacagggcatccctccttcccatttacgggtgttttcaataaacaatgttcagttta

SEQ ID NO: 671488 - DNA, 1049 bp, Homo sapiens
  misc_feature (1)..(1): n is a, c, g, or t
nggcctccccccaagggcgcctcccgccggcaatctacggtgaaatcctccctgagtccctgaacgcaatacggcactctctccaactcccggacacgcccatgtcaaagtaagggttagactccgaaaacgcgtaaagcgggcccacccgtcccagttcgggagggcagcagcgacccccatctaggcccagactccaagccggccgccagtatcattcagaggcctcccctgcattccccgccagtcacgtgaccagcccgccgcaggaacgccgggctcacggtgtggtccccgaccagagggagcatcttgccaaggctcaggaggggccagaggacccccggagccctagtacccactagacggtaagactaccagatggccctgtcccaacccctttgcaaccggtcccccctcaacggccaggctcgagagaggcaggggacgatacgggggagcagacccctgagatctgggcataggcaccgcattctgatcttggacaaagtcggcacagcaccatcccagcccacgaagcccaggcgccatgccagcaggccccaccacggaaatcacacacaccgcaccagaccagcacgcatggtacattctgacatgcgccacccgacggacctgaatcttggtgcacgcaccaaccgcgagcctgcatggcgggactggagggcacagtagaggaaggagggtgggttaagaaatacagtcggggccctctcggctgtcccttgcccagcggcatcttgcattccagcctgcgcggcatttgctctatcgattcccctttcctcctcactgcggtcctcaagcccaaccgatactccaaaataatgtggtgcacttgacttgtggaactatctacacagcagtaaatagtaaatgaatcccgacctgtgtgattcaaacactttgctctgaaaccccccttgcccctcactgatctgtgcttttcactggtctcaagtgcagtagtggtcaatatttgtggtaatcgctaattgtactgaatttccaagtgtgcattgtacaga

SEQ ID NO: 671489 - DNA, 480 bp, Homo sapiens
  misc_feature (409)..(409): n is a, c, g, or t
gcgaattcactagtgattgtgagctgagatcgcacccggtccaagcactggctttgagataagcaatattaaaaacattttcagcttcatcagatgctgactaactgacctccaaccactgttccaccagccataactacagctttggttggacaagtgactgatttcagtaactttttcctgacaaggtgactacccatcatggactggttctggctggcttacagagctcctgcacttgcatgtctttgtgtcctgaaaagaccttttgccatatagggcctaattataatacatttaaatgttaagtctccaccccaaagtgaccatgggttgtatgttgcatgcatgtttgttcaatatgcatgtgtcagaaccactttcatgaatattcatagctcctcatgtnacctgttgaatgtgtatgtttagtccatccattgagcatgaagctcctaccctaaaccctccttctttgaa

SEQ ID NO: 671490 - DNA, 347 bp, Homo sapiens
tgcttgctccttctggaatgttctggaaaataggtttcggggctggatgttttccgggatgctgactcacacgcaaatcatagggtgacataatgtgtgcatgtgtgtgtgtgcacagatatgcataggtacgcatttatgtggatgtgtgtgtacttgtgggtagatgtgtattgtatgattgtatgtgcatgtctgtatgtatatgtatatgtatgtgcacgtgcatgaatgcacacgttaatgggtacgtgtgtgtattcatgcatgtgtctggataaatatatgtgcttgcatgtgtgtggaggcgcaaatgtgcgggtatgggcctgcgtgtgttagacatg

SEQ ID NO: 671491 - DNA, 1005 bp, Homo sapiens
gagttattcagaatctaggattcagatccatctagttcttctctagaatatacgtagtgtgtgctagacgagtatgatttgaacacatcttctcattacaccgcccactgggagcagccttggaggaatgcctagacctttggggactcgccaggcaggattagtggcaggaagttgaggagaacagaggccccacagagactcctcggggaccgtcccccagtcacaagagttatctcaaggaatgtagtctttctcccacatgcctcctaaagataactaccagacgggtcacgtctctactgagcccttctcatgtgtaggaaagagacaagtcgtcacaagtcttccgccaactcaacacctgacgtttagcctttctatgagcacatacgatctgttatgggcctcagctgtacgtgctgacgtcagagcgatgctggtacctcccaggcatattattgggtcaccatgaagcaggatgaaaccacaagtacacttagcgtggcagacagctggatgactctagactgagaatcagcctgagtcttaacacagctggggtctgctactcgcgttaggtaggacttttgtgtaactatttgtacccgctaggacagaatgtgacgggcaggatgtaacacacactagaggagcgatgtgtgtcgtgtgcatgtgtgttgcattctgcagggacagaccatgattccatctttgaagctttcttcctatagatcattcagctcatgatcggtgttacttactcaatctcttgatgcttctgatgtccctcgagaacaaccttgctttgcaacctctgcgcaggtgttctcaattttctagagagtgcccagagcggggacgagacgcacgagcccacgcggtgtcgatcacgatttgccgaaacgcggcctgtaggtacacaaagggaggacacagtcgcagggggctccccaattagagactggcgtgcagatgccgctaaccaccggccccctgatgaag

SEQ ID NO: 671492 - DNA, 340 bp, Homo sapiens
  misc_feature (5)..(5): n is a, c, g, or t
aagtngtcatgctatttcttggcctgtgatctaaagacaagcacctagtctccttgttctctgtatatctccattgcccagctagaagggtggaaacagttgtgcctgttcctgggttgaagggtggcaaataggttggctgggagttggtattctgttcccctcattcccgggcagccagtggatgcttcattcctgaactttctcccctgaaacccagtttaagcatcagaaatccttactggacaccagtgcctaagacagctggtaccaaaccagtgtggaaatttgggacatcaaaataaaacctatttgccatcgctgggtagtccggcgttcc

SEQ ID NO: 671493 - DNA, 883 bp, Homo sapiens
ggagacggtatctcctggatgccagtgagcggctgagagctgaagctccctggacactcaaggctcttgtggtgacagtctgacgtaaaggcgtgcagggaggcctagctctgtctcctggacttagagatttcagatcgcagaagtctgtccatggctccttgtctcgtccgctagtataccaggtagtagtcgaccgccagtgggttgtgggcttgctctcccgggggatggccgagcatgccccaggccagccttccggcaattgccggttgaagctgtgctcgtaacccgctcatagctccttacttggggggcccctcgccctactcctggtctctggatcctggcttctacccctcttgtacagcattcagcctcgttccctgtccctggtgggttcctatgtccaaaaaatcctggacggagtatgtggacatgacatgtgcacagacatgtctgacattaccaagatcctacctgaggtgagcgtggctcctgcttctgggtggctggagtctgaagagaaggtggtgggcatggtaggagctctgcctgtggatgatcccactctgtgagggagaggcggttgcgcgctgttctcatgctcgttgtggaccgtgagcacccgtccgtccggggagatagcaaaagcctgggtcgggactgatctcccagtttcgcccgggcacgtggtaccgtgaagttatcctgggagagcggacaaccaacttccctgggtatgggcccttaccagagctgggttccgcaaacgggccagtcctctttctgtgtgggccggcagggcttcgacaggctggcttccgctcccttctaggggggggcgggccctctggtgtggcgaaacactcccggggcgccg

SEQ ID NO: 671494 - DNA, 144 bp, Homo sapiens
tcacgtactccgcatcaacaagatgttgtctgtgctggggctgacaggctccaaacaggcatgcgaggtgcctttggaaagcccaggcactgtggcaggttacacttggcagtatactgtcatcgcacagctgcagacagagca

SEQ ID NO: 671495 - DNA, 361 bp, Homo sapiens
  misc_feature (19)..(19): n is a, c, g, or t
  misc_feature (71)..(72): n is a, c, g, or t
aagagatggggtctcactntgttgcccaggctggagtgcagtcacatgaccctagctcaccgtaacttcgnnctcatgggttcaggcgatctttggcctcatcctcctgagtagctgggactgctggtatgtaccaccatgcccagttaatttttaaaaattttatgtagagatgaggtcttgctatgttttccaagcctgtaaataaagctttattagaacacatccatgcccatacatttacctagttgctatgggtggttcgggggaccgcgagggggcagcgagggggctgggagcagggcgctgttcgtccgtcgggagcctgaaagatgttccaaatggtgtctttccagaaaaa

SEQ ID NO: 671496 - DNA, 108 bp, Homo sapiens
agtgcggatatgagtgtgagcgatatactagttattcctatgaagtgagatggtacaatgctagtataatatttatgtaaatgaggggcaacaacatagtcagcagca

SEQ ID NO: 671497 - DNA, 1918 bp, Homo sapiens
  misc_feature (1)..(2): n is a, c, g, or t
  misc_feature (309)..(309): n is a, c, g, or t
  misc_feature (1295)..(1295): n is a, c, g, or t
  misc_feature (1411)..(1411): n is a, c, g, or t
  misc_feature (1442)..(1442): n is a, c, g, or t
  misc_feature (1475)..(1475): n is a, c, g, or t
nncgtattatactcagttgttgattgggtggcgtctgatcgcgatcaactactgtgtgtgggcgtgtacttcactcaggtgctcgcttgctcgtcggtttttcgcctcttttttactcgtggtggggttgcctacaatgttgttttgtcggcgtcctctcctcgtcgtggggtgcctcatttttgtgggtggctccccccgtggtttgatctcccccgtggggtcactaaattttttccccgccatttcgtgggtggtggcatcttgatgcgtggcccccgcacatatattttgtggtggcactaccgnggttgtttcacgccgctcggcggttataatttcctgccgccccgacacagaaaagtatgtgttttgttaaaagggacctccacatcggggcgtttctttggtagttccctccaatgtagtatgtgtgtttcggatgggtgtcccacgcacccctttgttgagtgtgttattaatgttggtaattgtgtagtggccctgtttcttatttggggacctccatttttgatgtgcccagatacatctgttatttggcgccccccccgcctcacatacgttggttgtgaccgcccctcttttttcggccccataattagtgttgggccctctcttttgtacctccctcggagtttgtggggggaatgttagtatttattgttcgtactccccccgaccaataatttgtggcgggaccacaccaccaacaacagcggtgggagtggggcccccctctccgcacattctccgccggagattttgtttttgtgagggcccgccgcttgtgtgtggagaccctcccgcgcctcctcgtgagaagagtaggcgacaacatcatcgtcgcgtcggtgagtacatttggtgggaggtggacgcttcctcttcttgtggtgaagagaaacacaacatggggggggccgcgcctcataaacacaatcgtgtggtgttgcgtctgtccgtcgtgcaacgtctcttcaacaccgtgttgtcaacaatagggcgttttctccacaacaacgggggggcgtctccgactcgtcgattgtctttacactactatagtagtgtgatatttttttccacaagggggggcacttctggtcggttgggggcgacacactactccacagtgcacgcgcacactagtgtccgctccgcgatgatccctccccgagctgttgtccctctacccccccgagatagtgtatagagagggagacaccgcgagatgttccacgccaccccctcgcccctcgctgtttctcttgtgngcactctcgcggagagagagttttggggagtgttgagatacacgccccccccacgcagagccacagcccctctcgtgatctctttcgcgcgctatagatatatatatagatagtgngttatagagatatacacacactctctcgggngataggctcgcttataactcgcgcgcgaggttntatggctctgtagaattataaggggagatatttgtgggggacgcaccacatcggagaactctataatgtatacctcgcgctataaattttgtgaaaatgttgtctcttgtttataagagagatatagggttggcgccacacatcgagataccacgcgccacatattgtgagagagactatgagagatatatgggtgccaccacacctatattctgtgttttccctcatatggagaaactatatttgagaaatatgttgttttaatatatggagatttttatattcacctctctttacgaccaccgcctaactccaagagagtgccccccagactgctggcaacagacacattgtgagcttggcacccataggccagaaatgggccccaagacttaagatgttgtgacccgttttttaaataaagatattcttgaaataaatta

SEQ ID NO: 671498 - DNA, 208 bp, Homo sapiens
gagggcatgtcttaacacacatggatacatcctagagcttctcagcaaagaatggaatatttattgattcacagaatttaaggaaatgtctgtcgaatcattagctgaccactaagttaacctgagcagagactttattggttgtacagtacagggaataaagactattgagttagtcctggaaagtcactatgccaacaaatagtca

SEQ ID NO: 671499 - DNA, 527 bp, Homo sapiens
  misc_feature (2)..(2): n is a, c, g, or t
  misc_feature (109)..(109): n is a, c, g, or t
  misc_feature (118)..(118): n is a, c, g, or t
  misc_feature (136)..(136): n is a, c, g, or t
  misc_feature (149)..(149): n is a, c, g, or t
  misc_feature (151)..(152): n is a, c, g, or t
  misc_feature (154)..(154): n is a, c, g, or t
  misc_feature (158)..(159): n is a, c, g, or t
  misc_feature (161)..(161): n is a, c, g, or t
  misc_feature (182)..(182): n is a, c, g, or t
  misc_feature (189)..(190): n is a, c, g, or t
  misc_feature (192)..(194): n is a, c, g, or t
  misc_feature (206)..(206): n is a, c, g, or t
  misc_feature (219)..(219): n is a, c, g, or t
  misc_feature (221)..(221): n is a, c, g, or t
  misc_feature (226)..(226): n is a, c, g, or t
  misc_feature (230)..(230): n is a, c, g, or t
  misc_feature (232)..(233): n is a, c, g, or t
  misc_feature (299)..(299): n is a, c, g, or t
  misc_feature (301)..(301): n is a, c, g, or t
  misc_feature (304)..(304): n is a, c, g, or t
  misc_feature (306)..(306): n is a, c, g, or t
  misc_feature (312)..(312): n is a, c, g, or t
  misc_feature (314)..(314): n is a, c, g, or t
  misc_feature (403)..(403): n is a, c, g, or t
  misc_feature (443)..(443): n is a, c, g, or t
  misc_feature (445)..(445): n is a, c, g, or t
  misc_feature (474)..(474): n is a, c, g, or t
  misc_feature (481)..(481): n is a, c, g, or t
tncctcccattttcctgctagcagggcttaaagcgggttcctcctttgtctctgatgcaagatacagtgacaaggccactgcctgccctcatgtatgctgcggcaaganagggaagcncaccctggagggcgggangcttggatgccananncngggnngncttcaagctcccaggcctggnggcagcnngnnncccccacctganctcaccaccttcnangggtnacangnntccccccgcttccttcccagctgtgacctttccctgaaggcataccgaagctggggggacaaactncngangnggcttntntgggtccctcctccccagcaggcagggtggcttcctgtgctctggctggtgatgtcccaatcgccctgctctgagaagttaccatcaanaaaataaatcacagaagccaccgcccggtgtttcccagtnancctctaacccgtgtgacacggcacctcangtggggntccatcccctccagctccaaccctggctggccacctctcaggccct

SEQ ID NO: 671500 - DNA, 399 bp, Homo sapiens
  misc_feature (106)..(106): n is a, c, g, or t
  misc_feature (122)..(122): n is a, c, g, or t
  misc_feature (259)..(259): n is a, c, g, or t
  misc_feature (315)..(315): n is a, c, g, or t
  misc_feature (324)..(324): n is a, c, g, or t
agctctgaagtcccacaattcatgtatgtacagggctcggaggaggaaactgcccagctttcccccgcacagctgcaggggtaggggtatagataagaggagcagncttggccaggcgtggntgcacgcctgtaatcccagcactttgggagggggaggcaggcagatcacgatgtcaggagatcgaaatcagcctggccaagatgatgaagccccgtctgtactaaaaatacaaaaattagccggacgtggtagcgtncacctgtaatcctagctacccggaaggctgaggcaggagaatggcgtgaaaccggngggaagagnttgcagtgagccaagatcgcaccactgcactccagcctgggcgacagagcaagactcggtctcaaaaaaaaaaaa

SEQ ID NO: 671501 - DNA, 250 bp, Homo sapiens
gaccaggaagagggagaaacttctgctcagaccgagcgtgtgccacatggacctcacgtcctcgccctggcaggagaccgctggactatcggcgcaggtggaacgtggagcccagctgaggtggaagacttcgaggctcgtggaagccgcttctccaagtctgctgatgagagacagcgcatgctggtgcagcgtagggacgaactcctccagcaagctcgcaaacgtatcttgaacaaaagttctgaag

SEQ ID NO: 671502 - DNA, 137 bp, Homo sapiens
gagaaaacagaagtgaattctggctttttttacaagagtgcagaagagagagaaaaactcgtgaaagctgaagaaattcattaaggttagggttaaaaaattattagactctgaaaaggaaagtctgtggcgttaca

SEQ ID NO: 671503 - DNA, 708 bp, Homo sapiens
gcagaggcagtgggagctgttggggagccgtggtcccagtcagcggtggcttgtatgagggctgctcccacttcatccgcgaggattccagccgcatgctaccccacacccgagctgtcccgtagtcgcaccagccgcggacgtgacaaagcctccagcagccaaggatgctccgtggggagggtttcttgggtttcttgaagccagtatttccactatagtatcttacgtcccagtcagaggcctccgactgtgccctggaccagtcggtccactcatgctgagtcgagtgtgcatcctggcgacccctcgtttctgggaagatccacgaacaatgggctcccagcagaggactgaggctgagcagggcccactttcccttggaagcttgaaccccaaaagcttgtgttaggtccagggtggccgtgaacacttagggctctctcgggctgtgcgctctcttgttcatctgcaaggagcagggtgtcggctcctgaccaagccctgtcactgctgcccagccacacgtggggccccttcaccacccggaaccagctcatgcaggtgaaagccactgtggaaacagccttggcagtcccttgaacacgttgaaagtcattaaatcccgagcaattgcactcctggtgcctcttgacagagcttggcacgttccccttccaagagcttcgtgttaagcttgtgagcacc

SEQ ID NO: 671504 - DNA, 389 bp, Homo sapiens
tggagacggggttagtccactaaggaacatgtagaaggtaaccaccgggtgacaggaagcggcggtatttactacctagcccccatcttcacgggttattccacttatttaaaatgtccagaataagcaaatctccatatagaggaagtagattaggggtggcttcgggatgggaggaaggggaagatggaggtctttctttggcagtgataaaaatgtcctaaaatggacggtagcgatggtcacacaactctgaatatgcttaagaccatggaattacacactttacgtgggtgaatggtatggtatgtaaattatagttcaataacatagttacaaaagataatcaaaagcatgaaagcactatggaggtggttgggatctgtgtc

SEQ ID NO: 671505 - DNA, 619 bp, Homo sapiens
  misc_feature (22)..(22): n is a, c, g, or t
  misc_feature (27)..(27): n is a, c, g, or t
  misc_feature (203)..(204): n is a, c, g, or t
  misc_feature (619)..(619): n is a, c, g, or t
tgctggttttatctcactaccntagtnatctcctgggcctccccgggggggagacatgaggctttacttttataaaggtacatttgaacgctaagccttacaataaacagcggaaagactgagcacagattacccacatctcagttaaaataaaagatgccctggccaagtcccaaagggttttgtctaagaaatacgttgcnnttaaaggtcccacgcgtgcacccacagtccgtgggaccttgctatggtgcaccgtggcaggacgctttgttctttccctaggggtctacagcaaactgcaagggctacaatatgatatttagagttaaaaaccaatcccaaggccttagaaccatgcccgggagttgggagcctttttcttggaggcagctgctccgggccttggaagtttcttcctactctgacgcaggctgggaattctagaggccttgtaggaaggtcaaacggacgagaagactgaggtcagaggctttcggagcattggccgggctctctaagctcgctcacttgttttggggggtgcgagtcgacggttcaaaagtttcctccttttccctcacgcggcccctcacggcagaattggcaggctcagaan

SEQ ID NO: 671506 - DNA, 181 bp, Homo sapiens
ccccctaatagaatactcccaggtctccagtgtgatgaggctaggacactggtacatggtagctgctggcagacagagtgtgagtgcataccactacacagtttgcccacacactctggctgcaaagggccagggtaccgtgtggtctccagctcgctacctggcattcgtccaacccata

SEQ ID NO: 671507 - DNA, 240 bp, Homo sapiens
cgtagattacagtcgttatgagttccgtggatttgtgttatgccaatgaccagatacataagtctgtctctctggtacgttgccgggcatgtcagcatgtctttattgcatcacccctttcgtggggcagctggactgcttcctgatgaccaatggcccccgaggtgtggtccacttctatgggtactcggtggtcagcaccctggccttactggtgagcattgcctttcccattcccat

SEQ ID NO: 671508 - DNA, 191 bp, Homo sapiens
gcaggtgctatatgcagcatctctacaaagacaggcactataagacttgttgagggtctgcgtgtctttgagagaaggcactggcacagtcatgggtgctgaactccgccatgttctagccaccctgggtgaacagatgaaagaggacgaagtggaagccctgatggcaggtcaagaagactccaatggct

SEQ ID NO: 671509 - DNA, 164 bp, Homo sapiens
attcgcggccgcgtcgactaattagccaggcattgtgacacatacctataggtccaactacttaagaggttaaggcaagtgaattgcttgagcccaggaagttgagggtaaagtgagccacgatcactctactgcactccaacctgggtgacagaaggggccct

SEQ ID NO: 671510 - DNA, 1236 bp, Homo sapiens
tttttagtgggacccgttctcagattcgccccttggggggactcgcgcattcgccacgcgccgcgtgttgggaccgctctcccttttgggatgaatccaccccgggggcccgggattggcaccgggccctcttcgggagttttctttggcccttagggcgcccccgggggcacggggatttaaccccaggtggtccaccaccacgggggtaaccagtcgttatggacgcccaccttatgggcgcctaattcttaaggggtgggaccacccctatataagaaagccacacggtttttggcaacccacatggaatacgcactggcctttggggtaaacccggggttccccggggaaagttgtccccccgggggagtaaatttcgtccgaggcccccaaacgcggttgtcccgcctataattcccgcacggcttgctccccgcgctctagctgagatccccaccggggcaaagccgcgtctatggcgcccacaaccccacgtttgtagacgcccccgacagttataaacgtaatatataagcgccccatatattagaagaaatttggaaaagcccctggggcgcgcgcaaatatggagatatttatggtttcctctcgcaacacagggggagaaaagagtatgtgagacagacgtgtatatatacgcgcgccagggcgacattataataaatatcgacacacagggagctctatatccccccgcttagatacccccttcttggcgaaatatacgtgagagatttataccctatgagagattatacccttgtcgcacaaagggaggagagccccaagaggcgctatatgagcccctccccgagataccctcacgagcgcgaggcgctacacctatagagagacaaacgcggtataaaaagagggcaccaccccggcttctaatgtagccccacaaataagctgggaaagagatttatataaggtaagagaggcgaccacaaactctatcccgagagcctcggtgaataagctcggttgttcccaagaatatagaattcttagtgtcacaactttaaaatttgcgccaccacgaaaccctcttaaatcccccttgtaaaatttaaactgttagtccacaaagaggggacacgcttctttggagacacactaaggagaaaaaaccttgtagagagagtaaaaaatttaacacccatagtaggcctaaaagcagccccccattaagaaagcgttcaagctcca

SEQ ID NO: 671511 - DNA, 783 bp, Homo sapiens
  misc_feature (160)..(160): n is a, c, g, or t
tatccgtgattaggggtgccatcttggtagtggagaatgacaaggggatagacatggtggaccacaatgtatggaaggtcccgaggatcatctaagggtgtggtcatgcacatgggtgatctactaggggatgtgctaggtttgcgtgtgtgactccacntgttctcacttggtggagtcatcgcataacattcacgtagactgcaatgacagtactccgtttttgttcgcgcttattgccattgtcccaaaaatgtaactgggtggatcaacatggggttccgtagtgtggcttaccacgtgggccccaaataagaggtgagacgactctaacacgcaggtgtgtaccacacgtttgttcgaaacaaaataggatcactgtagtaacacacatttgaacttcggggagataccactaatagatcgggctgcgtataaaaaactggacttcgttaagagaaaagctgaccctgtggtcggacttgggccaaaggaacattcgcgctcatgagatttggcgacagagaataacacgccataccagaatctctctccgtggggagcaactttagaagcagaccgcattagggattcgtcgccctgtagcacccgcccttttgggaccggaacacccccacggttgatgaaaacccatacatagggaggcagcgcgcggattactatactgaaaacattttcggccccactttttcaccattacaaaacatttttaccaccgttgggggaattcacattagggcgtcacaagcacgaggatatatc

SEQ ID NO: 671512 - DNA, 299 bp, Homo sapiens
  misc_feature (183)..(183): n is a, c, g, or t
  misc_feature (288)..(288): n is a, c, g, or t
  misc_feature (296)..(296): n is a, c, g, or t
agtcatcatcactgcagctgcctgctgcctgaggctgagctccctaagaagggacagcagccatcactgtggctgctagctgcctaagacactgaactcctggggaggaagggcggcagccatttctacagatccaggctgctgttttcctttgctgatgccaggaagactggacggcttggncccaagaggtattcccacagcgcaacatactggctgtggcagcatggccagactgcctctttaggctgccctgaccatccttctcactgggtggggcctcctgangactcagnctt

SEQ ID NO: 671513 - DNA, 610 bp, Homo sapiens
  misc_feature (317)..(317): n is a, c, g, or t
tgatctttctccaactcggattattgtaaaaaacggagataatgatattcctgtactgattgattctacggtgcctctctgtctgggccccgaagtgagctagcatactccgtagaactctgcatatctctgctataatgaagtagtgattgatccgccgaatactgattgttgataaatgccctttgttgatgaaggtatgaatagctaggatcgtaggcatcctagattcgccgtcgttgtaactccacgtgttctgctgctctaaacatgcgtgtgtagttagactctgagatgcaagagagacagtatccgtnattatagaagggaaaaaacacatgaaccaaagtaattgtgatacacacttcaagagaacactagcctacatgagtacttggcatacacactcgtgggattccagttattatggagtgcttccatccctctccaccccttgccccccaaaaggtttactttgcagagtgcttttggaactaagagctagtatctgtggattaactgatgcctgcatagtgcttcatgagttactcgcattctgttctgtgctttaaaagaagagtcccagacaagagtgttggaccagtattga

SEQ ID NO: 671514 - DNA, 704 bp, Homo sapiens
agcgtgggtctctgctacctgtagctgagggtgctgttgatgggcagcgcggcgcgctgggaaggctcgtctcgcgagagttcagctcccttcttttccgtggctgcctcagcaactcgaggatcgacatggacgctctcgaggactacgtttgtgccgttttttaacctcggagcttatactcctcccagtgacgggtctggagtgcgtgggggacccggcatgttggcgggtgagggtcccgatgtgctgggtgtacagcattggactattggtgggcatctgctggatgataaaggcgaagtgcaagaaggcctgattggccaactatcttatccatggcttaccgggtacggccaggagcctaatgggagaccttgactttgaggaggccatggtggctagtgtagggaaggcaagggacctccgcagtttgtgagacaattaagctggagtgacaggaggccactttcatgagggaagcattgggagagctcatgcgccttgtggatgacatgtcatggactgagattttggggatggcaccgacttggccttggaaggggaccatagtaggcctttggacccctgtggaccaccagagtcaatgggtgctattcttgaaccctggtcgtagaggtgcattcactgacaaagaggttgccctgtcaagagaacaggtgcaaccctctcttagagactgc

SEQ ID NO: 671515 - DNA, 817 bp, Homo sapiens
agcggcgaggttgaggcgcaagaatcgcttgaacccggaaggcagaggttgcagtgagccaagattgccccactgcactccaggccttgggcgagctgagcgagactcttatatctcaaagaaaaaaaaaaaaaaaaggtctcaagaaacctgtgaaattccccatttataagttctcctcaaattcaggtgactcgtgctcaaaattaggcctggttaccctgaaattacctttacaaagccagttctctaacttaatgtgcaatggtggtttttttaacaaattttttaattggaccctttactttggctgaccattaatttggcaaccattgtttttaaggacaaaccaggtattttaatccctttgaaagacctggtctggatattgtctccctcaatttggctcaggacattttaatcatactcggcttttcccacatttttctgcaaaattaagcagctttttcccaggggtccattagggatactccttggctttaacagatttttcaccacgattgagcgtttggaaaagccctcagaagggttttggctcaacaggacctatctgtgcttaatacactgtgcacaccctttgtttcacccagattttcaccactttttacacagttagcgcacagttttaacccacggagatgggcgttgtgaattgctaccaaaacagctcacgcaaagaggaactccatgttggccttgttgacacctctcaagaggtaccccttgagaattcattttccataaagcttagtgcattgtgaactcttttgctctttggaaattgtgggccccaata

SEQ ID NO: 671516 - DNA, 495 bp, Homo sapiens
  misc_feature (132)..(132): n is a, c, g, or t
tttgtgcacccacgggtccgatccccaggacccccgaaatggtttagggtcggcttcctcccctgagcgggaaagtttccccatgaagatgggggggatttttggttggttcgttttgtttggctcgggggntgttgtttgtttttttccccctaattttggtattcctttcgcctgggtaaaaaaaagcggaggttcctttaggtttgttttttaaaggccccatccaaaatccaccttgggagttgagcggggggtttggtttgctttggtttaaatttttcccggggtttgttttggcttgttatattaacccgaattcccccaatgaaggggtctatttttggtagcctttagccaagattttggccataaaagaatttttttgtttttaaaaagaaccaaatgtttttcccctttaacccggttgtaattttttttgaagcccattttgatccataataaaaaatttttgcccaatgtccacaaaaccca

SEQ ID NO: 671517 - DNA, 239 bp, Homo sapiens
agtgagcgagatcgtgcactgtaccccagctgggggacaagagcgagacttcatctcaaaaaaaaaaaaaactcagttgggcgtgttgttgcacttctatagtcccagctatgtgggaggctgaaacaggaagattgtttaaccccaggagtccaaagtaccaggaagttaggatcacacaactgcaccccagcctgggtgacagaatgagacactgtcctcaaacaaaaaaaacaggt

SEQ ID NO: 671518 - DNA, 121 bp, Homo sapiens
aaaagtgagaggtcagactcctagtatggccaaacaggagaacgaagaagaagaagacaggtcgggctaagcggcggatgctgtacaaccggcgctttgtcaacgttgtgcccacctttgg

SEQ ID NO: 671519 - DNA, 582 bp, Homo sapiens
  misc_feature (80)..(80): n is a, c, g, or t
atcttaggaacccacttaggagaggtggccaggcatcctgtccaacgaggagttcaagacatacaactaccccaagtacngagccgaggcccttttgagccacgcaccccgacttgatagggacggggccgacctcctcaccaagctgttgcagtttgagggtcgaaatcggatttccgcagaggatgccatgaaacatccatttttcctcagtttgggggagcggatccacaaacttcctgacactacttccatatttgcactaaaggagattcagctacaaaaggaggccagccttcggtttttgtcaatgcctgattcaggcaggccagctttccgcgtggtggaccccgagttttaagccacagaccgagggcccaagcaggcagcgggtggagggatgccacacccctcacagggcagcccccaaataaattttccctggttactttttgcctacctgcctgagccatgttcacctgcccacttgtcccctggtgcctgcccaaacaccccaccattggcctgtcaacccacccattggcctgtttgttgggggctaacaaagctttcttccctcca

SEQ ID NO: 671520 - DNA, 786 bp, Homo sapiens
  misc_feature (229)..(229): n is a, c, g, or t
tggctagtacgagctgggtttgaatcggagaggcactcgccgccgacgaactgtctcgccgagcgcacgcctgccgcgcccgcagaaatgcttcggttacccacagtctttcgccagatgagaccggtgtccaggtactggctcctcatctcactcgggcttatgccaaagatgtaaaattgggtgcagatgcccgagccttaatgcttcaaggtgtatgaccttttangccgatgctgtggcgcgttacaatggggccaacagggaagaacagtgattattgagcagagttggggacgtcccaaagtaacaagaagatggtgtgactgtcgcgaatgtcaattgacttaaaagatagaataccacgaacattggagctaaacttgttcaagtatgttgccaataacacaaatgaagaagctggggatggcactaccactgctactgtagctggcacgctctatagccaaggaaggcttcgagaagattagcaccaggtgctaattccagtggaaattcaggagaggtgtgatgttagctgttgatgctgtacattgctgaagcttaaaaagcagtctaaagcctgtgaccacccctgaagaaatggtcactaggttgctgacgattgtctgtcacatacggtaggaccacagaacattcggcaatgatcatctctgatgtcaatgaaccaagttcggacgaacgggtgtcatccacagtgaaggatggccacaacactggatgatgaattagaaattattgaaggcatgaagttgatcgaggcta

SEQ ID NO: 671521 - DNA, 784 bp, Homo sapiens
  misc_feature (223)..(223): n is a, c, g, or t
  misc_feature (250)..(251): n is a, c, g, or t
  misc_feature (277)..(277): n is a, c, g, or t
  misc_feature (293)..(293): n is a, c, g, or t
agcgggtcgccgacgccatccacgacccgactcctatcgcgatcctatccccggccccgctcgggccgtttcccattgcgccctggctcggttggctctgactgagcagtaagttcgtagccgggcctccgaaggcgggcgtgcgatgggatggcgagagttggcgtgcgtgcgtgagtcacacagtgtggtgtgggcatgtaaggtgcgcggagggactgcnccttctccatcaggtgcagaaggccanntcatgctgaacaagagccgagaagtngaatcgccagtgtcangccgtcacgttgtgggatgcccagcgtgttctcgccgcgaggatgcactcgagagacccgtgtgaacttgttgtgtgcgactgatggagtggtaccagagtgataggttggactacgctggtgtataaaagcgagagagtccataactgggaggaggacctaggtggccacgagccctttacttgactgaacaagcatagagttggcctcttgagtgaggtgtacaggacacgacgtcttcaagacgccccgagtagtaccaggtgcagagtcgctgttcgagtggcgacggagaaccgggttgaaggaagcatgcgaagcgcgattctgcttgcgcgttctggcgacaagcttggtagctgccgagagatactgccatgccactagcgctctgtctggcattatggttcctggtgtgcgcaaagagtggctcacagctgggggctgaatgtgcccgtctaacgtcatcgtattccacttctggcagggta

SEQ ID NO: 671522 - DNA, 481 bp, Homo sapiens
  misc_feature (10)..(10): n is a, c, g, or t
  misc_feature (21)..(21): n is a, c, g, or t
aacctataancaattcttaangggattttaacctattaaccaattctaaaagggatgtaattccaagtggggggctgtcgtcccaaaggctagtggcatgttccccagggagcaggttaataaatctttaacagtcagtgctcttaaccactgaactaactttccagccccatggtcagttattacttaccatctagtgcctgatgttttataaatcttcaatgtatcaatttaaactattttaattctttctaattaaggctttcttgaccatataccaaaatccacttcagatgacacacgtgtagccatacgaaattttattgttgggaaagtttttatcataatagttttgtaaatgatttagaatgtaaagtgtaggtttccccagggacaaggtcatgttagtggccccttctttagggatggtttcttacccattgttctcacttaagatcttggcctaggctaccaggaacat

SEQ ID NO: 671523 - DNA, 948 bp, Homo sapiens
atgacccaccaatcacatgtcctatcatatagtaaaacccagcccatgaccccataacagggagcccgtctcagccctcctaatgacctccggcctagccatgtgatttcacttccatctccataacgcgtcctcatacgtaggccgtagctaaccaacgacactaaccatataccgaatgatggcggcgatgtagcgactgagaaagccactataccaaggcctaccaactactacctacctgttccataaaaggccgttctgatacggggtataatccgtagttgtattatctctaggaagtggggtttcgtctcgcaggatttgtgcctgagccctgtgttaccagtccagccctagccacataaccccccaattagggaggggcacaggctcccacaagagggcagtctaggcgcgctgataagatccccgttagtaagtccgcaggtcacttaatacaacgattcagaataacaccaggttcgatggagtatctaatcaccgtgtgcggcaccctgttggtcgtacttaggaaagtctagtcgcgaaaatcggaagtaaggtgcagcgcgctggccctagtgacgaaggttagaggtagggtgctcttatctagaccctccctatgagcctcagagtagttcgaggatcgcattgcaccatttacgacggtgtctacagatgcaacattttgtgtagccaaaggcttccacggtactacacgtcagtaatgagggtcaatttttctcactatctggtccagcgcaaatgagttttcagtttgctccaacatcactttgggttgcaagccgccggctgatactgcagttcggggatgggtgcgaatgcgaatatccccctagggtgggttcacacgaaaaagaacaagaattgggcgtcccaagaatttaaattttgggcgccaaaaaagggcccagaaaggag

SEQ ID NO: 671524 - DNA, 436 bp, Homo sapiens
  misc_feature (55)..(56): n is a, c, g, or t
  misc_feature (144)..(144): n is a, c, g, or t
  misc_feature (206)..(206): n is a, c, g, or t
  misc_feature (310)..(310): n is a, c, g, or t
ctagacaccctggccctgagctcaatgggggccggtggggtactgacctctccanntgttggatcggtgccctccagcttaccgcgcgcattgggggccgctgggggggcctttattggcaacagattattccagttctggaangatcagctgcttcttgattcaaaaatcaacatcaggtcggctactgacctggtgcgtccagntcgaatgctggtgggctatacgactgacactggtaaccctgtccatattccagatgaagatctgatgcgacatgggttcatccttggccagtccggggtcggcnagaccgtcttgggcaaattattgatgttccaacagatccagcgcggtggaggattaacgttcatcgacggcaaaatgaacgctgatgatcttcagactatctatcagtactgctgctgggccggcc

SEQ ID NO: 671525 - DNA, 425 bp, Homo sapiens
gtttttggtcaaaatatttatttctaaacatgttagaacgttccaaagtgaaagcatcagtgatgtattgaaatcttagtcttgatatgttaaggaaatgtctttttagattaaaaaaatcggtttgtagcattttaaacttagtgatgatttgggtcatttcatcatccatttaatatgtgcgattatacatgcctccttgtgctggtgtactgtaaaataatgtaactaatgtatttataaatatgtataactatgatgtaaaataccgtgtgtatatgtatgtatgtgtgtttttgtatatgcacacacataaacggctttgctgagcgcaaggatgtggtttatcctgtataaaacttgttgtataaaggttgcctccaataaccgtaatgtttaataaaaccatgtaaagttttgttgta

SEQ ID NO: 671526 - DNA, 165 bp, Homo sapiens
  misc_feature (16)..(18): n is a, c, g, or t
  misc_feature (156)..(156): n is a, c, g, or t
ccagtgagcgcttggnnngatgctgggcagcccgctagctcgccttccctcctgctttgcgtgcccggggagcagcagccctgccccacacctcctctcactccccagactggttggttttgccattttgttgtgtgtatgctgcttttcttttcnaaccaagag

SEQ ID NO: 671527 - DNA, 271 bp, Homo sapiens
agataaatcacttaaccttccatctatcacagtggacgagctaacatagatagaccgtttgtaaaatctggatacctgtatagtaagacacttcctctgcgtgctccgttacccttttcacatgcatgtgccaccatatcctcttattttttttgttttatgttcagaccgcgttttcgccatgttgcctatcgctggtctatatcttctggttctccagcaatctaatcacctcaagcctccctcagtgcttacatgtcaggcatgccat

SEQ ID NO: 671528 - DNA, 143 bp, Homo sapiens
cgggcagtacggattgtgaacatacaaggaaaaacaacggcctgatcggggagggtgacagtactaccttcttctagaaaacaaagatggctcaaccaccaccatgagaacaggtggaaaatatctctatagacccaaccggg

SEQ ID NO: 671529 - DNA, 472 bp, Homo sapiens
tttcctatgtctttatttctcagctggccaacacttatggaaaatagaaagaacctacattgaaatattgggggcaggttaccctgataatcaggtagtgttctttcatttccatgtttagaactcctttaaagacctcttgtaaggctggtctaatggtatcaacttcccatagcattgcttttctggaaaagattttatttttccttcacttatgaaacttagtttggcagcatatgaaactcttggttgaaatttctttcaataaagatgctgaatataggtccccagtctcttctagcttgtagcctttctgctaagtctgctgttagccttatgggtttccctttgtaaatggcctgccccttttctctagcttcctttaataattttttctttctcattgaccttggagaatctgatgactatgtgtctttaaatgaatcattttatgcaatatctcccaggagtt

SEQ ID NO: 671530 - DNA, 1268 bp, Homo sapiens
catcgcctccagacccggacctagacgaggtgaggaaggaagagtggaccgatggatggacgacgtgcactgggagtcaccggctaccatgagcagcttaccatccacggcaaggaccacgagagtgtgttcaccgtgtcccatgtgggactgcgaccgcgaagttcaggggtcacgatcagaggcattgatatccccgtcgctgcctcggaacaccgatcctcacagatattagtagaggcacacataccagcatgggcaacaagtcctttgccaaacggagaaccagccccaaacccttacacagaggaggtgctgtggaatagtgtggcttgagttcagtatcaaaatcacaagacttgcccacaaggggctctactgaacctccagcatctactgcggtaaagctccagcactgtccagcaaggacctctgcagagtacccccagttactgagatccaacgggcacagttcagctatactctatatatgtgaacctgctgctgcactagaccaacgcttccctcctgcgaccagtggagaactacgtacctccacaatgtggcaagataatacatgcgagaacagcggcagacagacccaaggcacgccttcacacgcgtgacaaactcacgacacgcacactaaccaaagaaacggagcaacaacaacagacccactctccacaccaacaggacacacacctgcacaaccgacatagacctagacgtacaggactccagaccaaaacgcaggaacccgcacacggggaccgcgagtacagaggcacgaaactagccacaccacgaatagcgcaacgacaaatcggacagacaccgtcacacacacaggaacaccacacagccaccaaacaaggcaaccgccacaagcatcgcacgcgacaacaaccacacaacagcccacacgcacccaaccagcccacacgcaggaccaaacgcacacgcaccgcgcacagcacacgcacacaggctccccaccaacaaacaacaaactcagcaaccacctacgcacaaaaatagaccaccagcacagaacacacagacactccacgaccgacacccacaccaaccactacgcattctgctacactcgttatctcgcacaaccgcaacatcactaccactcacactcccattcacgacccctcactcccagccgaaacaaccaaagaagtacagtacaatctactacacctagatcacaacaccgaccaacacacccaactaacacaacaaaacccagaacc

SEQ ID NO: 671531 - DNA, 374 bp, Homo sapiens
  misc_feature (17)..(17): n is a, c, g, or t
cgcgccgccgacacggngcgagaagacgacagagggactgatgaacccctctctatcaaaaacacaaatctctggatgtggtggtgggtgcctgtaatatagctactcaggaggcgacgccggagatcgcgaaccgggaggcagaggttgcagtgagcagagattgtgccattgcactccagccctgggcaacaagagcgaaatccgtctcaaaacaaaaaaaacgaaaacaaaaattggcgtggtggcgggggcctgtagtcccagctagtctggaggctgaggcaggagaatcgcttgaacctgggaggcggagattacaagctgaggtcgcgccgctacactccaacctgtgacagagcaagattcgtccc

SEQ ID NO: 671532 - DNA, 305 bp, Homo sapiens
ggataccccacacttcgatcgcggagaataagcagaccttgctcagacatgaatcatgctgcttagtgtactgcacgatccaaatctgctatacccacaacccaccacgctacaccgcacacagaggctgtaacttgatttttacatgattcagttcattgaagggagtgcttaggggcttaagcctaactctctgtggtgctgtgcttgttgtatactggctactcaaactgttgctgctgctgctgcttcctggatgtcgccttcttggcgaggtcctttgtcttctccgcgatcgaattgtg

SEQ ID NO: 671533 - DNA, 291 bp, Homo sapiens
gggaagggggggccctccttcctaaaggcccttggggccaggcttactttgggggcaaactttaccctaggcccccctccatcaaaagtccttaaattcccccccgggggtccccctgggggggtaaggacctattttttaccctaagggggtgggcccctaagaagggtggcccttaaaatcaggccccccccactcccccaagcggggaggagatatttattttggggagagtttggaggggagggagaatttattaataaaagcctctttaactttaaaaaaaaaaaa

SEQ ID NO: 671534 - DNA, 771 bp, Homo sapiens
ctgctctcggacggccgcggctgctacagctcccgagccagtcctgcaacgaggtcatcccgaggatctacgtgggcaactgcgtctgtggctcaggaccatcgcccgaagctgcagaaactagggcatcagccatgtgctggaacgcgggtgagggcaggtccttcatgcacgtcaacagcaaggccaacttctacaaggactccggcgtcacatacctgggcatcaaggccaacgacacacaggagtgcaagcctcagcgctctacgttggaaagggctgccgacttcatgaccaggcttggctcaaaagacttggccgggtgctcgtccactgccgggaaggttatacgccgctccccaacgctagttatcggcctacctcatgatgcggcatgaagatggacgtcaagtctgcctgagcatcgtgaggcagaaccgtgagatcggcccaagatggcttcctgggccagttctgccagctcaatgagcagactaagccaacggaggggaagttgacaaccctaggggaacccccaacggctctgctcgacgaggtccgtgggggaggcgtgggcaaaggtgtcccgagctgccatgtctcaggaaacgacactgtaccctgctacccaagatgcacaaacggcacttgtctacaagtggagtcccaaaacaagcctgggcactttgtcccaccctgggggagcccataaagaagcttgcaacggcgggcgtccttgattcccaagtggccggctcggaaattacgacg

SEQ ID NO: 671535 - DNA, 289 bp, Homo sapiens
  misc_feature (29)..(29): n is a, c, g, or t
  misc_feature (167)..(167): n is a, c, g, or t
  misc_feature (183)..(183): n is a, c, g, or t
ccagaccagtttggcccggtttgtgcatnacatgctgtgcccctgacctcagcagccacaggctccgccgaagccccatttgctgccagagggattactcggaggagatgccgtcggtggcccggcctcggctgtcgggggtacacaggtcccagatccagacctgnacagtggggattgcanagattggagctcagcagtggaaatcccgccaagcagaggagcagtatggggggcaggtggcttcgtacggggagacgagcggggcgaagagaggccgtgcaagact

SEQ ID NO: 671536 - DNA, 695 bp, Homo sapiens
agcgggccggaggaggaagtggtgaggttgttgctccttcagcgcctatcgctggctcttggggcgcagagaggggccgcagtctccgcggctgcgtcgagctcccttgcagtcccctccatgttccccggcgccactactccccttcctaagggcgcgcttaccccggggtctatggaagtatggaaggacccttcaactggtcatcaacagagcagaagagcagaacggttattagctgcacgcaatacgaagaggctatttcttgtcccaaagagctgcggcatatctttctgaagccatgaaagctgacacagtcagagcgaggctccatctttcactgggaattgcgaaggggatatgccattatgaaaacaggtccctccctcattccaaggagagatgggcaaaaggggcccagccgtgaaagaaagggtgtgcaaagcccagccagaacaccagacaagggatgcagctgcccatcttcagacatctcacaaaccctctgcagaggatgcagagggccagagtcccctttctcagaagtacagcccttccacagagaaatgcctggctgagattcaggggatctttgacagggatccagacacactactttatttacttcagcgaaagagtgagccagcagagccatgtattggaagcaaagcccaaaagatgatagaacaattata

SEQ ID NO: 671537 - DNA, 796 bp, Homo sapiens
  misc_feature (36)..(36): n is a, c, g, or t
  misc_feature (97)..(97): n is a, c, g, or t
  misc_feature (120)..(120): n is a, c, g, or t
  misc_feature (125)..(125): n is a, c, g, or t
  misc_feature (133)..(133): n is a, c, g, or t
  misc_feature (140)..(140): n is a, c, g, or t
  misc_feature (214)..(214): n is a, c, g, or t
  misc_feature (256)..(256): n is a, c, g, or t
  misc_feature (291)..(291): n is a, c, g, or t
  misc_feature (314)..(314): n is a, c, g, or t
  misc_feature (364)..(364): n is a, c, g, or t
  misc_feature (386)..(386): n is a, c, g, or t
  misc_feature (417)..(417): n is a, c, g, or t
  misc_feature (524)..(524): n is a, c, g, or t
  misc_feature (528)..(528): n is a, c, g, or t
  misc_feature (533)..(533): n is a, c, g, or t
  misc_feature (563)..(563): n is a, c, g, or t
  misc_feature (589)..(589): n is a, c, g, or t
  misc_feature (593)..(593): n is a, c, g, or t
  misc_feature (605)..(605): n is a, c, g, or t
  misc_feature (609)..(609): n is a, c, g, or t
  misc_feature (671)..(671): n is a, c, g, or t
  misc_feature (705)..(705): n is a, c, g, or t
  misc_feature (758)..(758): n is a, c, g, or t
gtcactttcaacttaaaattcagagacattgatgcngcaactgaagcaaggcacaggcttgagaaagacacagggcagaagcccgagaaaggaaggngaagggaattcagtgggagacanggttntttcatgnagatggngaatgctgggtttttggtgaaccattactgaaacgtcttggggctgccaagcattaggttgggagatgcaaagnttatacctgatgatcagggcagtaggcataattcagcaacanacattcttcctttgggagaaacctgttcattccantcttctaattacagtggttcctntctcagggatactggactttctgacgcagatcggacaattaaggggaaangcttcccttttccctctgtggnagttacgattttgacttcagtcctgagaaanacttcaggttttgagaatcagatgatgtcttctccttttccaaaccccacacgttgaaggcatttataaatccaagtctgaaactctgggctctgggacggctgttnaganacacnacttgtttttgtatcatataatctcggganacacacacacacacacatatatatanacanacatacgtatanacanacatacatatatataaatatacctgatgccagattgttttcataaatattctgcctactgtnaatatgggttcctctgagttgttttagaaaattngcgcaatgtattaaaatcaagtgttaggaaatttcatggtcttacctacaatnacttttattatcgcaatgtactatgataattacatctg

SEQ ID NO: 671538 - DNA, 414 bp, Homo sapiens
agccggaggctcctcgcgtccgggagcagcatctgtgcgggctagcttaagcacacggcgaaagacgcgtctcagttacgggacgcttaagaagcacccttctgtccgtggtcgggcgcttcaggcgcacgtgatcggcgggtgctctgtgacggctctgcgtggtgagatactgagtctagtgcggagcgtccgggccagacgtccatgcccaaagcacaagaaaaagtgcgagggaaagtctcatccttagtagaaaaggtatacgagagaggccaacgagaagggcggtcgctggggttcacttggtggaatgaggttcgatcattgacccagaagaattcagaagatgtgtgacttgaagcttatcatcgcagtgactggcgatggttctaacgatcggacagccggagg

SEQ ID NO: 671539 - DNA, 561 bp, Homo sapiens
tcatcttctgaatcctaatgagccttctggcttagttaaacacataccagtggacaaagctggttttcttctttcttactcaggatcagctatgcctatgcccagagctgacaccattaactacggcagagttggttcattttgaatcaggtgttaaaagttgcttttttaaacaaacaagccctgtaaaaatcctaactcaaataaagggcagctccaacaggtgagatgttacaaacacctcccctggtccacctgattccaaccaagcagtcccctctttaccagaatgactttgctccaaagtatggtcccagcttccaaaagcacgtgttcctggggatcggtacttgcttcacactagtggttaggtatttgcctagtttggaagccttccatgctgggtctttattaagctttgcctttgatagggcttgggtttgtgtccctgcccaaaaaccatcctgaattgtaatcgccaatgttggaggaggggcttgttgggaggtgactggatcatgggggcagacttctcccatgttgttctcatgatagtgagtt

SEQ ID NO: 671540 - DNA, 573 bp, Homo sapiens
gcgaattcactagtgattgtgagctgagatcgcacccggtccaagcactggctttgagataagcaatattaaaaacattttcagcttcatcagacgctgactaactgacctccaaccactgttccaccagccataactacagctttgattggacaagtgactgatttcagtaactttttcctgacaagggtgactacccatcatggactggttctggctggcttacagagctcctgcacttgcatgtctttgtgtcctgaaaagaccttttgccatatagggcctaattataatacatttaaatgttaagtctccaccccaaagtgaccatgggttgtatgttgcatgcatgtttgttcaatatgcatgtgtcagaaccactttcatgaatattcatagctcctcatgtaacctgttgaatgtgtttgtttagtcaatccattgagcatgaagctcctaccctaaaccctccttctttgacgttgctgtctcttgtcttggctgggggacttgtttcccagcaggtctcactccctttctgaggcttggtggagtggtgcgatctcagtccac

SEQ ID NO: 671541 - DNA, 286 bp, Homo sapiens
ctattttctaccaataccaactacagtttaggtaactcagaaatatgatgattaagtcaggccaggatgttgcaaaaagagattaacatttgagtcagtgggctagggaaggcagacccacccttaatctggtgagcacaatctaatcagctgccagtgaatataaagcaggcagaaaaatgtgaaaaggagagacttgtctagcctcccagcctacgtcgttctcccgtgctgggtgcttcctgccctcaaacatcggactccaagtcgaagggtgatctgtggg

SEQ ID NO: 671542 - DNA, 335 bp, Homo sapiens
ctggccttgcaccaaaacgtcagagccatgtggtaattcggatcaacccaaggttcccaatttgtcgaatgggcctcggcaagaaacctcaaaccggtgtgggcgaacaagggctgcccccgggccttggaccaagaagcccaaggggcaagcccaaaactggggcttcgaatggcccggaccaaagccctgtggcttcctaatggggaattaagccttaagcccccctaatgccatttggaccccttcccaccaagggaaaatgccccccccaaacacttggacctttccccttctggttcctgtgtctcccaataaactctctgaccaaccct

SEQ ID NO: 671543 - DNA, 837 bp, Homo sapiens
  misc_feature (159)..(159): n is a, c, g, or t
ggttcccccccgtgttgttcccccgccactggcgagaaaccacctgtcttgttcacccaaagcgcgggcgcccccgccataattgtcgccgtgcgcaagagtggcgtccactggctgttttcttttagtgaacagactatctcgcctcactccccctcnataggtgtccccgccgacataccggaataaagtttgctcccctcaacagagtggatatcctgcttccttccataatggacccccacacgctgcgccgtcggtagcagaagttagagatactttaatttacgcactgagagcggtactcacactctaatatgagcgcgggcgttttccactacaaattcgttgaggaacccccactcaccgcgggccggttgccacccaatggccgttcgtatgtggttatgtatatgtcccgccacaattgtctatacatgaagaggttatttccgcacggcggtcgcctgttcttgagggaaggacacgttcacgaggtggttttctccgagatagtgcgaatactaaataacattgtggcataatcgcgtgctacaggcgatgtgattgcgagagagatagacgctactcacttgctatgcttacaccacgaccacacccgttgtgccaccacgcacgtctaagcgagagaaataatcttctcctcgtaatgtcaatcgccatcccctgctctttcttcttcctcgtgctctcatctcccacacgtattgtagttccatgttcagttcggcgatagtagagaacaccgccacgatgtggattgtttctcccccgtcacaaaaaaaccctctttaaactccccgccccaacaaaaca

SEQ ID NO: 671544 - DNA, 132 bp, Homo sapiens
tctagaggatcccggacgagcatcttacaaattctaaaatactacccccagcggctacatccagggtcactagcatcatggtgcagcatttcaggtaccatatcaaccagagcaacatacatgaataagcca

SEQ ID NO: 671545 - DNA, 542 bp, Homo sapiens
tctcccagtaggctggtactataagattcgtgtaccacaactggctaactttttaattttttgtagagacggggtctcactttgttgcccaggttggtctccaacttctgggctcaagccatcctcctgccttggcctcccaaagtgctgatactacaggcatgagacaccatgcccagccaagaaatactttacttttttttttttgagacagagtttcactctgtcgccccggctgctttgtagtggcatgatctcagctaactgcaacctccacctcccaggttcaagtgatttccctgtctcagcctctcaagtagctggggctacaggcacccaccccaatgcccaactatttttggtattttcagtagagatggggtttcaccatgttggccaggctggtctcgaactcctgacctcaggtgatccacccgttttggcctctcaaggtgctgggattacaggtttgagccaccgcgcccggcctgctttgaacatctcttcatgtgcttttttaccatctgcagagcctcttcagt

SEQ ID NO: 671546 - DNA, 204 bp, Homo sapiens
aagggcaagcagacgaatcttctattgatacttggaggggacgcatcatgtcgagacctcttcttctgccatttcgagttctactctgattgcccatgaagccgaactgtcccccaccaaaaatgtgagagaaaatatcatccatgccaccacctccgccgctgccttcccgaagaccttgctctccaatcagtcaatcataat

SEQ ID NO: 671547 - DNA, 362 bp, Homo sapiens
  misc_feature (124)..(124): n is a, c, g, or t
  misc_feature (216)..(216): n is a, c, g, or t
atccttatcctacgagcgcaacaaaacaagagataggaatgtccagtaaccacatgaatagatgatcagtgatctgggaaatgcaaattaaaatctcagtgagattctgctttacctctgctgnaagggctaaaataaaaatggctaacaggccagacgcagtggctcatgcctataatcccagcactttgggagaccaagacaggcggattgctncagctcacaagtttgagaccatgcctggctaattgtttttggtagagatggggtgtcgccatgttgcccgggaggcggaggttgcagtgagctgagatcacgtcactgcattccagcctgggcaatagagccagaccttgtcacca

SEQ ID NO: 671548 - DNA, 107 bp, Homo sapiens
gaggtgatattttagagattattgcatgtggtatgatatctgtgcttcatatatgctcgtgcaggcataaaagttggaagggtggtacttgctatacagaggtggat

SEQ ID NO: 671549 - DNA, 196 bp, Homo sapiens
acatcaagcacatgggaagcacatggctaggtttatagatagttgggtggttgttgtaaatgagtgaggcaggagtccgaggaggtgggttgtggcaataaaaatgattaaagatactagtataagagatctggttcgtcctttagtgttgcgtatggttattatttgttttgaagttagtttgattagtcattgt

SEQ ID NO: 671550 - DNA, 463 bp, Homo sapiens
aggagttcaagaccagcccagccaacatagcaagaccccgtctctaaaaaaaaaaaaaaaaaaattttttttttttaaataagccgggcatgggtgggcacatggcctggtaaggcaggagagagatcgcttaaaggcccaggaagttaggaggagctgcagtggacgctatggattggtggccactgggactcaagcctgtgcaaccatgtggagaacctggtctctaaaaaataaaaaccacgggccggggacgcgggggcgggtcaccgtggtaattccagcgccacttgggggagggccagaggccaggacggcgatcacctggtagggtatggagtctcggagacccagcctggggcacgattgggggaaccccttatctccaggtgggaaattcacaaacatttgcgccggggcatgggtgggttgtgcccctggtaaatcacacgctaatcagggg

SEQ ID NO: 671551 - DNA, 140 bp, Homo sapiens
atagagctcggtccagcggccgcctttttttggttttacctccaggagctctaccaggttctcacagtaaagatcaagccagtgtggtggctcactcctgtaatcccagcactttgagaggccgaggcaggtggatcact

SEQ ID NO: 671552 - DNA, 217 bp, Homo sapiens
ggtggggttaggtagggggaaagttgagggagagcgctttgaggccctttgagatgtcgaggcgggcgtcggtttttatggtagcatgtgcagggctgggggaggggagtggattctcagggaaggcctgggttggtgtgtatgggtttgatatggagccttcccctgccccctcccgtatttaccttatagcaccccctttaccccctttagagcc

SEQ ID NO: 671553 - DNA, 172 bp, Homo sapiens
ggggttggggggccttaaaaaagggggttttttttttttagggggggaagtttcccccccaattaattagcttttaaaatttgggggcccccctgggcaatatggcccccattgggggccccttaaattttttttaaaggggggggttcctttttgggttttttccccccca

SEQ ID NO: 671554 - DNA, 172 bp, Homo sapiens
  misc_feature (70)..(70): n is a, c, g, or t
ttggtgtagatgtggtgaaaagagaaccattttacactgccgtgtgaaatctcgcgcgatactccaccgngaacacgtagatggctgacagctgatctctacctccgtcagagtactcctcgttccgtgcactcttcctccgtcgtagtcctaggtgccgcctggaaaatca

SEQ ID NO: 671555 - DNA, 256 bp, Homo sapiens
gatttttgcatcaatattcatcagagatctttgcctgtagttttcttttttggatgtctctttgtctgtttttggtatcagggtaatacttgcatcatagaatgagttttgaagtattgcttcctcctctgtttttcagattagtttttgtaggtttggtcgtagttctttaaatgtttactagattttagcaattaggtcccgggcttcctctctactgagaattttcccttattatggcttctatctcattact

SEQ ID NO: 671556 - DNA, 423 bp, Homo sapiens
ggacctagtttcgagtttttttggtattatttagtattaactcacacgatcagaggtcccacaataggccatctgcaggctgaggagcaaggagagccagtccaagctccaaacttgaagaattcagagtccgatgttcaagggcaggaagcattcagcatgggagaaagatgtaggctgggaggctaggccagtctctcttttcacatttttctgcctgcttacattctagccatgctggcagctgattagattgtgcccattcgggttaagggcgggtcttcctttcccagcccactgactctgttaatctcctttggcagcaccctcacagacacacccaggatcaatactttgtatccttcagtccaatcaagttgacactcagtattaaccatcacagtaacgtacagccatatattg

SEQ ID NO: 671557 - DNA, 119 bp, Homo sapiens
gacgactcctctgaccacccagagtcctcctctagccagcctccattataccaactttctgaattatgctgacataggcatatgctttgtcacactgagtgagagacacaggttttctc

SEQ ID NO: 671558 - DNA, 491 bp, Homo sapiens
  misc_feature (482)..(482): n is a, c, g, or t
tagtaaccccatgacaattaagctaactggtctggggcctttcctggtcaaagggaaaaaacaccggctatggatataaaagtgctttttaaaaaacattaatatgaatccctgtgcttggggaggctgaggcgcgaggatggcttgaggccaggagttcaagaccagcctgggcaacatagtgagacccctctctacaaaaaattaaaacatcatcggggggtgggggcatgcatctgtagtccgggttaatggggaggctgaggcaggaggacggcttgagcctaggagtgggaaatggcagtgagctatgactgcatcatggcattccagccggggcaacacagagggactcgggtctctataaaaacataaaattaaaaaaaattaggagggggcgcaggggctcacgccttaatccaggtacttggggaggccgaggggggttggatcacaaggtcaggagatcaagaccatccggnttaacatgg

SEQ ID NO: 671559 - DNA, 138 bp, Homo sapiens
cacgcgtcgtgggtccccaggtggccccctgcggcctgggcccccctgcccacggcagcttcctgctgatgaacatgctgttgtatgttttaggaaaccaggctgtttgtgaataaaacgaatgcatgttgtgtcacg

SEQ ID NO: 671560 - DNA, 203 bp, Homo sapiens
ggggggggggtcccccctggccccggtccacctttttagcggcgaatttaattttttggcccccccaaggggtttttgggtaccccctaggagggggtttcccccccccaaaggggggggttttttttttttttgggggggggttttttttgtttttcccccccgggtttttggggtttgaaggggggcccttggggggccca

SEQ ID NO: 671561 - DNA, 650 bp, Homo sapiens
gagtaatacgcagtcacatcaggtcataacaacagtagtaaggacttactatgtgcccagtactgtgctttgcaggttacagatcatatcatataacctataacctaacatgaggaaagagcttttgttattcccttcagagagatgagcaacttgcccaaggccacacagccagtgctaagaggctagtgcctggtgatgaatccacatctctattgtaccaggaacagggcaaggacattgccttggtcatgactgtacatcattcctgcagagcctacttcattggtggcacatggtaggcacccacatgtgttagtttagaacctgattaggcaccttgagatgacatgctggtcactggtagacagaaactgacaaagaatgctctgagatgtatgattcttcatggcatctactgatcactcagagccattaggcacaccagtcatgcttgctatcttggacctcaggatcgccaagctgaagatgcagctgaccaagcttgacagtgaggccatgcctggggagctggactcagacagggaccgaatgatgcttatcaacgggagaatgagctgctgatgcaatgcgcttattagcccccgcagtgtactcgtgcttggagcttgacaggacccgtagccgtg

SEQ ID NO: 671562 - DNA, 298 bp, Homo sapiens
  misc_feature (52)..(52): n is a, c, g, or t
  misc_feature (95)..(96): n is a, c, g, or t
  misc_feature (98)..(98): n is a, c, g, or t
  misc_feature (101)..(101): n is a, c, g, or t
  misc_feature (104)..(105): n is a, c, g, or t
  misc_feature (213)..(213): n is a, c, g, or t
  misc_feature (233)..(233): n is a, c, g, or t
  misc_feature (245)..(245): n is a, c, g, or t
  misc_feature (258)..(258): n is a, c, g, or t
  misc_feature (286)..(286): n is a, c, g, or t
  misc_feature (292)..(294): n is a, c, g, or t
  misc_feature (297)..(297): n is a, c, g, or t
cgcgctcactgcaacctccacctcccgcattcaagcgattctcgtgcctcangcccccaagtagctgggactataggcatgcaccatcatgcccnncnaanttnntattttagtagagacagggtttcaccatattggccaggatggtctcgatcttttgacctatgatccacctgcctcggcctcccaaagtgctgggattacaggcgtgancaccatgcccggccccaggntattcttttgtncaaagtttaggcnactccatgcccttctcaaaacatcagangctggnnnctng

SEQ ID NO: 671563 - DNA, 425 bp, Homo sapiens
tcatacgcactatcctgaagactgagataggctaactaggataataagtactacctacaagagccttatgtcaacagacataaagagagcagcagcaatagtaggggccccaggtcataggtgaagcaggtcaagatcatcagctggcagtaggcacacgcaggaataatgccctcagaggtggcacctcgcaagaagcagcacataccacacatagttctcccgaaacaagcctgtactagcatcctacaggcattacaataacctcatacttgatggaataggtaacaatgtaccaccaggatgtcttgctcaaagtcctatgactccaatacacaaccttatacagcttaaagcgaaactacctccagggtcaagggtgcatactagtaaaacgaaaatttgttggtttgtagctaggtcag

SEQ ID NO: 671564 - DNA, 572 bp, Homo sapiens
tcgtccgtctaatgtcccgttgtcttgattgccgagtgcctgtccgctcagtccttggctttgcctgtcctctggtccctcaatccagatgtcccttcactcgttcgcctctccgcatcgccatggtgtttctttcacacggtgccaacgtccggcacgcgtggatcgtgcccacgcttgatccggagcttttacggctatcctaggtcgggcgccacgtgcccacgactagcaggtcctgcaggaccgggagctggtctgtggtagtcatgcagaggacggcaccacctccaaatactttgtgagcacgtcggttctcatgcgcagtgaacgccgactcttcggtgcagttgttggccgaagaaggcctgtgacgctggacatgttggacctgggggcagcacaaggcaaacttggagaaggcccaggcaggagctggtggggacagctgacgaggccacgcgagtcagagatccagatctgaatacgaggccaacgaggacatggatgaaggacctggagtaggcgagccagccagccaacggttacctcagcggcgagcatcctacctg

SEQ ID NO: 671565 - DNA, 792 bp, Homo sapiens
  misc_feature (416)..(416): n is a, c, g, or t
  misc_feature (418)..(418): n is a, c, g, or t
  misc_feature (488)..(488): n is a, c, g, or t
  misc_feature (513)..(515): n is a, c, g, or t
  misc_feature (558)..(558): n is a, c, g, or t
  misc_feature (639)..(639): n is a, c, g, or t
  misc_feature (659)..(659): n is a, c, g, or t
  misc_feature (726)..(726): n is a, c, g, or t
  misc_feature (733)..(733): n is a, c, g, or t
cccaacccgtcatctactctaccatctttgcaggcagactcatcacagcgactgagctcgtagctgattttttacctgagctaggcctagacatataaagcatgctagcttttattccagttctacccaaagaaatagtaaaccctcgttccacaggaagctgccatcaacgtatttccttcatcggcaaggaacaaacctgctattcctattagatccgttactaaatagactattccctctatcaagctaattactacgtcatccgggcacagagtgaacgcactcaaccatagtaacttacctagagtctaaatacttgcgatcagttaaactagattcaataaatggactgatatgccaatagaaagcaataggtaatatgaccaccacattctagcactatacttgcagtntnaccctagtgatggttaaaccacataagagtcgatccgccttcttgaatcgattcacgtggccctgtctgnacttctctaaacacaattgtgacgnnnaaaatctcagatcccccgccaatgcctcaaagttccattattnacacataaattctactaacgcctgcaacgtacaagcgtctagagtcacgtgtacctccttctattctctgtctctaagtcnttattccatgtctagtaggncaggtgcatgcttgaagtcgatgtggattataacccataacaccctagtcttaacgggcaagatatntcttagncatgtatcttacctctaagcttatcctcaagcatagggattgcggataactaggcaatt

SEQ ID NO: 671566 - DNA, 795 bp, Homo sapiens
gaccagcaccatggcggtgggtaagaacaagcgccttacgaaagggcggcgtacaaaggtgagccaataacgaaagtggttgatccatttcctaagaaagatccggtatgatgtgaaagcaccatgctatgttcacactataacgaatatatttggaaaagacagctcgtcactcaggacccacagggaacctaaacatttgctatcatgatcgtgtactcacaggagtcgtagtgattgtgaacgtgacgtctctgtctggatttcgcagatactgatgaaccttggcatttgagaatacactgcaatgctgattgacttgacagatggtacacgggttaacaaagctggccttgacgtaaccttcgcatggcgatggactcttaccgcagagacagaaatgtgttccagtggtcatgaatgatggcagacagatgatcgaaggctcacgttgatgtcgaaggacttatccgactggttaccttgcatacgatcttgattcatgatgtggggattgactgtgaaagaaccgctaaacaactcaagataccggaaatgaccatcgttagtgcgtcagtcgagcgaattcaggtgcagcacaaaagtcccggagagaaccactggagtgggaaatccattggatcgccggaagaggttgccagaccaaaatggaactttggaagcgggactgttggtgccaattaaatttgggactttcccggaacagacattgtgggaaaaagtagcaattaggaaaacgggttggcccagtctatttattcctactgccgtgag

SEQ ID NO: 671567 - DNA, 106 bp, Homo sapiens
acgggcctccttagctcccgagcctcctctacttcatccgactctgggaggctttcaagcagaacactcctttcctcacctggaatgcacttattgcggcggcggg

SEQ ID NO: 671568 - DNA, 509 bp, Homo sapiens
ccttcgacgggtctgtgaatgtgactgttgtataagggatgctgtgaggcattaaataagctattctcaactgttcatgacacacagtttttctctccttagcagaggatacacatagctccaattatcaaagggtatgacacttgtttttaaaaggtggggaagcagacagtattttcacataatatcatttgagcaaataaattcttccttaatatttttgagtcatgatatgccagcactgctgttccttaacctaatacaattatacttaggtctgcattgtaaatggaaaactggtcttctacatgacaagatttactctaactaaactacaggctggaggtgggggacctcccatttcaactaaaagaatccatgtcacaccttaagtgtgataaaaatttagtgactaaaaaaataccctaaactaattgtaacttcacttcttctcattccatcagtaacttttagaacaccgaactgctaaaaaatacacatcagcatta

SEQ ID NO: 671569 - DNA, 690 bp, Homo sapiens
  misc_feature (656)..(656): n is a, c, g, or t
gggcttgaggaatttggcaccgggcgggatcggtgctgttgccttttatactgaagatgccgccccaccccaagcagatgtttccgtcagcgctgccctgagtcagtcggtccccccgttctgctctcctcccttttggggttctgctcacttcaagcttcttccatggacttttcagggcacagtcatctctagcccccaaatcatctcttcatcctctgtgtggggcattttttaacccaatgagacaagaaagtcatactttggggcagcagaatttctaatttagtagaatcactgtatagagatagatgctgatatataatgtttgtgcacataaatcaaacccaattcggatagggggaagagtcgctttaacagatgcggccgaagagagctttttagaggtccggtgtctaagactgctcgccctggccgcaccctggcgttcggtacccttgccacccctgaacaccattccgccctgggtccgaatgccccgcgcctcttgatctctccgtccgcacccgttactccacttattccctgaacaccttgggccagctaattctcccattcttgacgtctcccacccctcgcgggttgactttgtgatggtccagagcgactcccaccgcctgcgctgccctcgctgntcctcctccccttcccttgctctccgtcctctcc

SEQ ID NO: 671570 - DNA, 95 bp, Homo sapiens
gcggccgcctactactactactactactgctcgaattcaagcttctaacgatgtacggggacatgctgggttaataaattgcctcattcgtaaac

SEQ ID NO: 671571 - DNA, 574 bp, Homo sapiens
  misc_feature (60)..(61): n is a, c, g, or t
  misc_feature (108)..(108): n is a, c, g, or t
  misc_feature (110)..(110): n is a, c, g, or t
  misc_feature (117)..(117): n is a, c, g, or t
  misc_feature (130)..(130): n is a, c, g, or t
  misc_feature (135)..(135): n is a, c, g, or t
  misc_feature (151)..(152): n is a, c, g, or t
  misc_feature (155)..(158): n is a, c, g, or t
  misc_feature (168)..(168): n is a, c, g, or t
  misc_feature (193)..(193): n is a, c, g, or t
  misc_feature (204)..(204): n is a, c, g, or t
  misc_feature (223)..(223): n is a, c, g, or t
  misc_feature (241)..(241): n is a, c, g, or t
  misc_feature (244)..(244): n is a, c, g, or t
  misc_feature (256)..(256): n is a, c, g, or t
  misc_feature (293)..(293): n is a, c, g, or t
  misc_feature (327)..(327): n is a, c, g, or t
  misc_feature (363)..(363): n is a, c, g, or t
  misc_feature (373)..(373): n is a, c, g, or t
  misc_feature (419)..(419): n is a, c, g, or t
  misc_feature (425)..(425): n is a, c, g, or t
  misc_feature (474)..(474): n is a, c, g, or t
  misc_feature (486)..(486): n is a, c, g, or t
  misc_feature (540)..(540): n is a, c, g, or t
tgttgattcttactattctctggctaatcagagacttccaaccttttttcttcaaaaagnncatttttaatagactaaatactggttatcactgcctttttgtttaangnacaacanccgcatggctcanatgtnacttgtcgttctcggnnggnnnnggggttttgngtgatgaatacagagaaggtagggngcgcctttggntgttttgggtgccactgtnctcttgggagggtattcnagncttctaggatgncagagttaagaaccatttccaaggggcgggggagatncagggtcacaacataacttctgaacaagtgtgtncgcgtatatatatatgtatatagatgtattaagatnggtgcaaaantaattgcaggttttgccataaaagtcatggcaaaaaccacaattanttatgnaccaacctaatatatgtgtgaaacagagaaaaggatgtcaaactacttnatttatttctgntaaattaacttctggaatttgaagcaaacattttgcttgatcaaaatgtgttcntcttcggggtgtttgatcccaattccatgctaaa

SEQ ID NO: 671572 - DNA, 101 bp, Homo sapiens
ccggctggaaagagaggtaggtcgttctctctgtttacaacatttattggcgcatcatcaattccagggcccgaggacacagctgcgtcaacgaactcgaa

SEQ ID NO: 671573 - DNA, 119 bp, Homo sapiens
tggatcttagacattcaagactcaatgctttaaagacatatatatatgtatatatatactgtctaacattttatggaacgttaaaaatcagaggcttttccctgatgatggctctgggg

SEQ ID NO: 671574 - DNA, 493 bp, Homo sapiens
tcacgggattactcaaagctgcatcttaggtctttgccggtgcaattctgtctttccagttacctagcgttaaaaccttgcagttcttgactcatctttctctctagtaccacgtatctcaattctctctgcataaaaattgtctgttctcccttcataatatagtcatcgtgtcattttattatggggatacattcagaaatgcgtcattaggatattatcatggctgtgtgaacatcagagtatacatagacaaacctagattgtatagcctactacacatctaggctatatggtgtggccaattactatgatgaatactgtaggttattgtaacataaaggtaggtatttttatctaaacgtattgaaacatagaaaaagtacagtaaaaaatatggtatcaaaaataaaaaatggtacaactgtataaggcagttgtgatgaatggagcttgcaggatatgttgctctgggtgagtcagcgagtgacga

SEQ ID NO: 671575 - DNA, 960 bp, Homo sapiens
cttttgtcaggctcactcatcacagcgcttagctcgacactgattgtttacactgaataggcctagaaataagacttggctaccttttgttccagtgtctaaccaagaaagataaacctcgctgccacagaaggctgtcggtcagagtattatctcgtacaccgctaaagactaagacgcctactccataaatcgcgtttctaaataggtctcatccctctgtactaaccaaatcactatcgtctcacggtacaattggacaccagtaaacacgagatagctaaccagagtcaatatctgcatcattaagtaaatctttacatggctattagtcacataagaagctgaaggaactacgtcccacctttcaacttgcgtggaggtactcgcaggagggtctagccgcaacggtcagccgcgctgctgaacatgccggatcctgtcattccatctcatcggacatgagcggaagaaaacgtagtcactcccgatacgtgcagagtgcagtactaaccagaagtttctcccccttcatgtaaacggtaagccgtttgtcctccaactgctctgcaaatttggttgatgttcatcactagggcaggccagtttgaggatgggattaaaaacgccaaaactccagactattgccaacacattctttaagacaatactctcgtctaatataccccactgtagggatgacatacctatacagtatctaccgtatcaatgctaagataacacgttcttagatttaagctactttaatagttatcctaactaatagcgaatggcctactactcgaaattagaagctccagcaagcacgagcctacttaatatatcgataacttgaaaacaaggctaagagtgacttaacaacctgtaaatccatgcaacccttcttttcctaagagggcctgcccccggtaagccgggtttttgtcccaatgggcattt

SEQ ID NO: 671576 - DNA, 159 bp, Homo sapiens
ccgttgttaggctctcagagagaccttcccctgcacacaccatcacctagcgtgtaattctccacattatagctgccatgatcttggtttacagtcagtctcctttctctaaatgtaagctgctggagagcagggatcttgtctatcatgtcaaggagt

SEQ ID NO: 671577 - DNA, 254 bp, Homo sapiens
  misc_feature (128)..(128): n is a, c, g, or t
  misc_feature (146)..(146): n is a, c, g, or t
  misc_feature (171)..(171): n is a, c, g, or t
  misc_feature (173)..(173): n is a, c, g, or t
  misc_feature (219)..(219): n is a, c, g, or t
  misc_feature (223)..(223): n is a, c, g, or t
ttggcagagggctagaagtaaaaaatgtaaagaaagaattggacagaatggggttgcgtgacgtatagttttgatttggtgaaatgcaactgaaggtggtgagcttgataaagggccacatggagggnaggggagatagtgagtgntttttggatgtgttttttgggtgananttaatgtggagtgggtggttggagttaaaaagaggggttgaggaanatgnaaatgaaaaaagatttatgaagtgatttgtt

SEQ ID NO: 671578 - DNA, 331 bp, Homo sapiens
tctttttttttaaccatagttcatcgaaaagcagctttttttgaacttcaaagatagaatcccctttttaatggactgaaggagcaaaatcatctttttccttttttagggaaaagctattgcccaagggaaggggtagataatacctagtcttgttacataaaggggatgtgggttgcagaaaaattttttttataaaattgaagttttaaggggcggcaggggttatgccctttttccagttccaaaatgattcccttcccttttagaaatttgaaggatgtaacctgaaatccttaataaaatttgggtttaattttataaaatggga

SEQ ID NO: 671579 - DNA, 545 bp, Homo sapiens
tgtctcagttcgggacgccagatctggagcaagaagatctcaggcagtgaccctctagatggaagcactgtctgtggtctaagaaaagatcgtgcatccttttagaggtgtactgttgtgagaaaatcaacgttgaagatgctgctgatcttggtaacacattggcagagcgtgcttatcatcagacttgcatgatgtgggggttctgttggtttggttttttttttccaagacagtgtctctgtggcccagactagagtgggtggcacctccaaccgagatctctggggctcaagtggtcctcttttaatttttggatttttggagacccactcgggtttcacggggagtgcagtagcagaatctctgtggacgggaaattccacctctcagtgtccagtgtttctaccacctcagccggccgaatcatggggaatccagtggcttgccatcaggtctggctactcattatggtttttctggttatttttttagggggggggagatccgctcttgttgcccgggtgggggggattagggcgatc

SEQ ID NO: 671580 - DNA, 329 bp, Homo sapiens
tacttaaaaagggtatttttttcctaattataaaactgatgtgtcagttacggaaaaatcagaaatgcagcactttgggaggctgaggcgggtggatcacgaggtcaggagttcaaaaccagcctggccaagatggtgaaatcccgtctctactaaaaatacaaaaattagccgggcgtggtggcgggcgcctgtaatcccagctacttgggaggctgaggcagagaattgcttgaacccaggaggcggaggttgcagtgagccaagatcgcgccactgcactccagcctgggtgacagagtgagactccgtctcaaataaaaaacaac

SEQ ID NO: 671581 - DNA, 118 bp, Homo sapiens
aaccgaatgccgtgccttctggtccgaatcggaggtgggctcttcggtcatacacgaggggggacggtgtactcacttcccagcccccagcatatcttctcaaagacctcatagttgg

SEQ ID NO: 671582 - DNA, 137 bp, Homo sapiens
cgctgcaggctcagtgccagagttctctccatgtcctcaaactcttccatgcagcacatggtcaggaaggctagctccatgtcaatgttcatccaacatgcaggcctccaccttgttgaatttgcactcctcttccc

SEQ ID NO: 671583 - DNA, 289 bp, Homo sapiens
tcgagctggacccctttcctctctacgatccatccctctctcacggagaactgaaaacgtgctcatattaaaacttgtacacaaataccgataacagcattattaatagccaaaaagtggaaacgactgccgatgctcattaatcagagtagataaaatgtgtatctctatacaatggaatattggttggcaataaaaaggaatgaaatgctgatacatgctacaacataggtgaaccttgaaaacattgtaataagtgaaagaagccaggcgtgaaagaaggaaggat

SEQ ID NO: 671584 - DNA, 1247 bp, Homo sapiens
gcttcgatgccaactaacattgatggctgtctgtgacccccgtcatggccgatacctcaccgtggctgctgtcttccgtgttctgtactgtccaatgaatggaggtcagatgagtcaagatagtcttaacagtgcatgaatcagtgaacatgcagctactttgtgcgacatgagatcccataacaatgtccacgactgtccgtcttgtcgacatccgcgatcgtcgtggtcgtctgatgatggcaagtcacctttctagttggcaagtagtacagccgatccaggtgagctcttcaagcgcattcttcggagcaggtctacgtgccaatgttcgcgggcggatagggggcgttccctccgaaatgggtaacacgaggcagcagtggcattaggacctgatgagtggactttcagcctgaggggctgtaagagctagacaatgatagcgaacccctcgttcttcgttgaagcctaattcagtgcacagctatgcctatgaggaattgcccatgcggcacgaaacgcacgggaaggaagggagtcttcctgcgtggagcgcagggcccgggaaagcattcgcaagtgccccttacaggagccagtagaccgcctcagtattaaaccactttagcggctttcttcaagggtgtcccactcaagtcgcggatacttttcattgtcaaaatgcgtggtggcccgcccttgtacgcgatccttcacgctacccaggaaaagtaacgcgagggttttggggcatgccccatccttaattccgtgggtacggtcgtgggctgaacaaataacagtacatcattgacagagagtcgtgggtccactagttaactcacggtgtgcccttgtggtcagagcacatatgttcaaggccggacgatcgaaatttaagactctaaaccttttgggctctatgcgcgatccggtacacctaaaagaccaccatttggaataacgcttgcccacttatgaccactatacagtacacgcacccaagagacaagatgcaccacagcaagttcctagtcacaaatttacacaatccggtcacatattatccaattgagaacagcagcgtgaatgccttcgcaggcgctgcaacacttagctatattggacgccaagagattgaaatcactcagtccgtcctaagttggccagtaggacagtaatgggggactcagaaccctcctatagactatggtatgtgccacgttacagatgtagcaccgccc

SEQ ID NO: 671585 - DNA, 359 bp, Homo sapiens
  misc_feature (11)..(11): n is a, c, g, or t
  misc_feature (31)..(31): n is a, c, g, or t
  misc_feature (42)..(42): n is a, c, g, or t
  misc_feature (66)..(66): n is a, c, g, or t
  misc_feature (72)..(72): n is a, c, g, or t
  misc_feature (101)..(101): n is a, c, g, or t
  misc_feature (112)..(112): n is a, c, g, or t
  misc_feature (137)..(137): n is a, c, g, or t
  misc_feature (269)..(269): n is a, c, g, or t
  misc_feature (305)..(305): n is a, c, g, or t
  misc_feature (321)..(321): n is a, c, g, or t
ctcccctgaanagtggaaatgtctggacccncccagcagaanttgtatagagatgtgatgttgganaactanaggaacctggtctccctgggttttgtganctctaacccanacctggtcacctgtctggagcaaanaaaagaccctgcaatttgaagatacatgagacagcagccaaacccccagttgttcagcacttctggtctcttcagttctgatatgattttagattgctcctttttttttttgaggcggagtggagtgagtgngccatctcgtttattgaagtccgcctcccatgtcanaccattgcctcctcanccttccctagtagctgggctacaggtcccgccaccacg

SEQ ID NO: 671586 - DNA, 243 bp, Homo sapiens
aaggatttcttttttgggtacagaatctcactccatcacccaggctggagtgctatgacaagatcatggctcgctggagcctcaatatcctgggctcaagcaatcctcccacctcagattctccagtagctgggactacttaggggcatgacaccatgtctggttaattttttttttttttttggaatttttcctccaccgggacggggagggggatcctttagaggcaacctagaggcttcc

SEQ ID NO: 671587 - DNA, 653 bp, Homo sapiens
cggactgcggcagcgcctctgtctcgctttatctgatttttcccccctttcccctttctttttattttattctcttttcttttctcccactcccccccttaacaaatttcccctacggaggcgctaacccctgggaagggtgaaagccggtcctcaaccccacagcgatgactgacacggacaacacagccagacggaacacgacccacacgggaacccacacgcacacaaaacacgcggcccacacaacccgcacacacacacaaaacgaaagcaacgcaaacgacgcagatccgacgaactacacgcacagacaagaaacagaaacaagccgaccaacaaacgacgacacacaagaagcaaaaacagcagagaccaagaacacacgacaaacaccacgacgactaccaaacacacacaccaacaaccccacctacaaaagaagcagagcaagacagaacagagcaagacaccatcaagagcgaaacaccaggaacgcgagaccaacgagcaacaacaagacgacaacagaacaacagaccacacagagaacacacaacgaacatcagagaaacgtcgaaacaacagagatcacgacagaagcgaacaaagacaaagccaacgaagaggcagaaaacaaaagcgacgacaga

SEQ ID NO: 671588 - DNA, 1558 bp, Homo sapiens
  misc_feature (252)..(252): n is a, c, g, or t
  misc_feature (348)..(348): n is a, c, g, or t
  misc_feature (461)..(461): n is a, c, g, or t
  misc_feature (629)..(629): n is a, c, g, or t
  misc_feature (719)..(719): n is a, c, g, or t
gcgcgattgcatcggtgggcgtcatgtctgtggtcgtgctcgggtgagcattcgttggggtacactgggggtgacgcatggacacgtgcatgctcccgggccgggttactaggcttcagaccgggaggcagcacgctctgtagggaactatcccgcgcgccatcgcatggctcgcaagtttcgactagcgcgtataccgtagggacattgagcgaaggacgttggtgccatgcaagtcctccgtgcagattnctgcgcgtacactgcggacctgtgggctgtgggagtacacgaatgggtggaagcacatgggacgagagagctgcgttgtgcaggtgcgtgaagaanccagatggggtgagaaccatggactccccacagagggcgtgggttcgcgcgccagtgggagagcggcgtacagtgcgcatatacaacgcagtgcaggcgttagttggagcgtnctctcaatgcatactcgctggtttgggcagtatagcaccacgtccacgtcgtgtcgcgatgtgtgggagtacgtggcgcgtcttatactagatgacttctgcgcaaataaatgtgatcaattcaaggcacgggcggatcgtcattacccacgagaacctcgatacatngagacactccggcaaggcgtactttacgcgcagtcgagacgttaagtaaaccagagacttgggcaccccaagtggggtgtccaatcttcnttgtagaggacacagggcttgtgcggggcctgtcggagctattcccttgtgaaactccacatgtgccaacgagcgcttcaatccttaggaacaggatggcccacgacgcgaacttgcaaggttcatgggtgggtggtctggaaggacgcatggagagtctggcctaaggccctaggagcctcttgtctaaatctttgtcaggaactaggatcactggtggcctgaagggccttcccagcgttccttgacggggtctgaagggcccagtcaagccgctcgtatgaaagagttagggcctccgtgggtgttttggtggcctccccacgtacaagattgggcttctgggggcgaataaactttcctatgaatttaattcccctgggaatgggcccagggggaagggctcgtccctgggtctacaaggcaagggttgagttgaaccgggggggttccccagagggattgccctccttggaagagaccacagtctctgtgggtgagtttacccccgtggtttgtgttccccctttttggccctgtgagtggtgcagaagaaagagacttctggggtttcatatgcgcagaagtccgcccgtaatggtagtgctacagggtaaagggttcttttctccccccttttgaagactcggaggggcgttagaaactcacaactggtgtgtagaccacgcctgtgtagggtgatcaacacgccaatattagacgagtcgcaagagtaaagaacgaaaccaaacgagtagtagttgagcaacagagggcgtgtctactctacaaaagtgatctctgcgcgacaacagacaaagagcgccttctctgcgaca

SEQ ID NO: 671589 - DNA, 173 bp, Homo sapiens
agggactctatattaaaacatactaaacaaatggggcctcgtggaggaaggtggagagaagagagcctttaggattccttttgctttgaagatagaataatcattacttccttctccaaatatcttttggcccttcctagaaccacgatggcggatgttcggaatttttaata

SEQ ID NO: 671590 - DNA, 294 bp, Homo sapiens
  misc_feature (7)..(7): n is a, c, g, or t
  misc_feature (11)..(11): n is a, c, g, or t
  misc_feature (29)..(29): n is a, c, g, or t
  misc_feature (173)..(173): n is a, c, g, or t
  misc_feature (175)..(175): n is a, c, g, or t
  misc_feature (269)..(269): n is a, c, g, or t
ggggaanccantggacgcgcagattgtcnggtctcccaacattcacatggttttctctccagagatcattcttagaagccaggctaaatcagagtagtctgtttttaaagaagatattggatgatggctatagggacttaatgctgtgttgaaattggagagctgctcttcananacatatactcaactgaagtagagcagactgagcgagggagtagtaaatgctgtggatatttcatgtctgttgtaatgctctcttgggagttctngggtgcattaaatagattattaggt

SEQ ID NO: 671591 - DNA, 335 bp, Homo sapiens
actgagtacacaacctgcaccatgtgaaaaatacaagggctcactaagtatgacaactacatcatcggccgggcacgagggcacacacctgtcatcctagcgcttagggcagctgaggtgggtggatctcaaagtgctgagataataggcatgagccaccacatccgtccttatatacatgtataagagattgtgtctcattctgtcaccccaataggagtgtagcagaagtgatcacagctaaactgcacccttaaataaacaggacttaagtgattctcctgcctcaaactcctgagtaagctaggataaaacgcgcctgccaccacacttgg

SEQ ID NO: 671592 - DNA, 347 bp, Homo sapiens
  misc_feature (303)..(303): n is a, c, g, or t
ggagtttgagaccagcctgggcaacatagcaaatgttatgttgccacctctacaaataattagccaagtgtggtggcatgcacctgtagtcccagatactcaggaggctgaggcaggagaatcacaggtcgaggttgtagtgagctgtgatggcactgcactccagccttggcaacacagtaagaccccgtctctaaaaaagcaaaaagggctgggtgcactggctcacacctataatcccagcactttgggaggccaagacgggtggatcacctgaggtcaggagttcaagataagcctggncaacatggtgataccctgtctttaattagccaggtgtagtagta

SEQ ID NO: 671593 - DNA, 310 bp, Homo sapiens
tagtgtttctatgttcttctgcctacttttattctggccacactgggcagtgagtagattgtgctctcccagattgagggtgggtctgcctttcccagtccactgactcaaatgttaatctcccttggcaaccccttcatagtcacatccaggaatgatattttgcatccttcaatccaatcaagttaacattcaatattaaccatcaagagtccaccccttgtcaacctgaacccacacacatctcctgaagtcatacatgattttcaaataaagaaaataaagacaaaaggccaaaattatgcctaaa

SEQ ID NO: 671594 - DNA, 1528 bp, Homo sapiens
  misc_feature (734)..(734): n is a, c, g, or t
ccaggtgggcccgcagttggaaccattcttggtccctggcaactggcgcaccatggagttcaagtagattctccagcgccctctcccgagtagctgcgattacaggcttccaccaccacgccgggccaattttttggtattctcagtaaaaagtggggctttcaccacgtttgttccaggccggttcttcaaactctcccgacctctcaagtgtgactccacccacctctcggcctctcccaaagtgtgccgggatctcacaggcattgtagccaccgagccccagcccgggaaacccaacaggttttttgtggatgtgtttcttcttgaaattgttcatgtgtataactctcttttatatttttttatattctaacaaacaacttttttgtgtgaccccagtatattcttgtgcgtggtgtgatgtgcccaaagacactgtgggagttgcccagcgtggcaaagatatccacagcggtctcacatgtgtcaagctttctccaaactctcccgcgtgtctctccagagtgtgaaatcttataccgtggtcaaacatgtgaagtatctttcgccaagagtgtcagtatgtgtgaacacacaacacagggtgttgccgcaaagaccacacacaaacacacactgtgggctttaaatatatagtgggaatatgtggggcttatgtagtggatatatatatatctaagcaaaaaagtgggggggctctctatctcgcngctattaacaggagttgtggccctgattatattacctggtggggtgctctcttcgagacaactgttgggatgtggaggacccttcatacaaaggaggaccaaaacatctctcttctcgccgcccccttttggtgtggacccccagccccccaacaaaaaagtggtgttcctattgggagacatattttaccccaggaggcgcccagccaagaaggctcctcccatcctgtttgttgtggtgccaaccatgaggagtctgtttgtcaacgacgcaatcgttctttttttcatggtgggcaagcgtattattaagagacatccatataatacatgtaggaggttagtacacccaatgttgtggctgaccacattaatgattgtagtatcaaaagtatatcttgccaagtcattaaggaggaaagaatcttccccccaatattaaaaatcgatgttgtggcaacacaacagtggggagcaacaacaacagttcttccccgatagagcacggagctttaccacaggaacaagcgccgaccaatcacttaacccctgctatttatgtttcgtgcaatgtagccgaacaaaccaagccacgctatttgtgcaacattacgcatatatcttagtcaagcacgtcctatcaaacgaacacaagggctattgtatacgtgatttagatatagcgccccgagatcaaatacacgtatgttaaaaagagatgggttgagccacactagtagtgcatcattattcaaagcgcgacaataaacacactcaccacacatggtgatgaa

SEQ ID NO: 671595 - DNA, 326 bp, Homo sapiens
cctcaagtgatccacctgccttggcctcccaaagtgctgggattaacaggcgtgagccacgcacctggcctatttttatttttaatcaagttgtgggcctagcttaatactggtttgtgtaatttgctccaagcactagaatatatctaaagaaaataggctataataaggaatatttttaaaaagatagaagtggccaggtgtgacagctcatgcctgtaatcctagcactttaggaggccgagatgggtggaccacttgagctcaggagttggagaccagcctggccaacaggtcaaaaccctgtctctaccaagaatacacat

SEQ ID NO: 671596 - DNA, 326 bp, Homo sapiens
tttgctctacatgcgccgggcttgatggcctcgggacagcacagatatgcataggtcaggtccttcatggcctctgcaccatctgcaggtgccacctgccccttttggcgttggccttgtcaacagaggccacactcgcagatgagctgctcacgggccttggtgttgactgcaatggtgaatctcacgtgtgtcaccagcgagcttgaaactggggttcacagcaggcagctggtggtacattgcaatgggcaaacactcagacaccagcatgtgttcgccgcaaggtgggtgatgagctggtggacgtggaagtcactaggaac

SEQ ID NO: 671597 - DNA, 136 bp, Homo sapiens
tatgagtgctggagaccaggccgtgggtcactaaccattcagtgccagacttgtcttgcagtcactgtgccgcagaaatgcatacttgtgcttatggcagcagcattgagcatgcacttaatccattatccagtgt

SEQ ID NO: 671598 - DNA, 192 bp, Homo sapiens
tgagctggtccgcgaggtcgttggcgcgcgcaccgcattgcgcaggtcatcggcggtcaggccgagcgcgttcatcaggcgcaggttgacgtccacgcgcaccgccggcgtcgaggcaccggcaatgtcgaccgaagcaacgccgctgatctggcggaggcgctgggccagcagcgaatcggcgacgttgta

SEQ ID NO: 671599 - DNA, 103 bp, Homo sapiens
gaggtgggtgatatagacagcaggacgggggccattcaacgcctccgggccattcaacgcctccgtgccattcaacgacctgggtacctgagactcgaagggg

SEQ ID NO: 671600 - DNA, 158 bp, Homo sapiens
gccgcttggacctttgacttctaagatttggtctacatcgtaaagtgtccacaggcagactcacagctgccaagcgttgatgatcatcagactaacgtaccgcctatgcttgtacatttacaaatactaggcatagtgccaagctgtaacatggacat

SEQ ID NO: 671601 - DNA, 685 bp, Homo sapiens
gcagggtgtaggcagcatggcgcccagccggaatggcatggtcttgaagccccacttccacaaggactggcagcggcgcgtggcacgtggttcaaccagccggcccgtaagatccgcagacgtaaggcccggcaagccaaggcgcgccgatcgccccgcgccccgcgtcgggtcccatcctggcccatcgtgctgctgccccacggttcgggtaccacactgaaggtgcgcgcctggccggcggcttcagccttggaggaagctccagggttggccggggcatttcaaccaaggacacgggtggcccgggaccaatcggcatttctgtggatccgaggaggcggacacaagtccactggagtccctgcaggccaacgtgcagcgcgctgaaggagtacccgctccaaactcatcctcttccccaggaagccctcgggcccccccaagaacggggagcaccagttcgtgctgacagaacctgaaaccttggccacccaggttgacccgggacccggggtccaattgccccggtccggacacggtctatacaggacggagaaaagctcgagttcatcacctgagggaagagaccgaatttcaaaagcctctcgcctaggtcatccgggttaatgggcccgttgccaactgccccgggcttcttcggcgcataccggggcaacaacag

SEQ ID NO: 671602 - DNA, 1500 bp, Homo sapiens
  misc_feature (1098)..(1098): n is a, c, g, or t
ctactgaacgtttcccgtaacagtactagcacaccatactcactttctctcacccagctgcttcacagacccaaacttcttaaactaagtgactggccactaacccacttaactgcaaacacaagctgttctgactatacatcttgccttctctcctctacaacacactggcacacactcctgcaagctgctcgccctgcacaaccactgctactcttgccctccacctgcagcagcccttctcatcaagctacacggttccccctctcagccccactctctcctccacacacgcgacacgcagcttaacacacactgctgcctgcctgcacctcttctgcctaactgcacgcgcttctctaaacgcttgcctgccaccactcggacacgaactctagccctcaaacccccaagcgcacacctgcacaccgccactcttgccaccgtcttaccgcatacttcctctctccgcactgcacgcacacatcaacactctcgtgcacgcttacttacccgagacaccacgctgcacaaaacccctgtctctctgcaggcgaagcacccacttcctacccacgcactacacctacactctggcctcgcttaaaggcccaaaaccgttgaactagcccgtggacttgcttagcgcccaccctaaaacgcgccggggaacgccgaactccaaaaccggaactctctccaacgcggaacgccttcctcatcataagctcctccaacttctgacttccacagaccttaacaccttcctcgtcggcccacgacacactacggctagcaaccgaagcacccccttaacgttggtacacggcggcccacacccgtggcacccctttttctcccccccggccccacgccaaagcctttcccaacccaccgcaaccctttctgcaacgcccaacacgcggaacgaaaaaatttccgcggccaagccgtggggttccccttgtcaacttggggcgcccgaccttggagcccccccacgaacactggcaacacgcggaagctcccatttggcgcacgcaaatatagcgcgacaccccccctggcgacacaacttgcgccttcacactgtcgacntccctcccccaggcttcatctaggcctttaaggcccccacacggcttctcccttacgttgaccgcaaaggctcaaccccccgcaatgtaggcgcctttcacgcggcaacgcagcccccttgggcccgccttggaccttcggcccgcttgtggcgcccccccggcccgcttcgccgtgtctttcccccactcctgggcgccgccaacttctcttccacgcacagcgcccctggcggccaccggctgcgtcctcatcgtgctcctccctgctctggtcccggcgctccctactctcttgcgccgccgacgacgtgtcctcctccccactctgccctccagcaccacccttatttgtgccgtaacagcgcgcacgtcttcacccgcgccctcgatcgcgcgtcct

SEQ ID NO: 671603 - DNA, 111 bp, Homo sapiens
aaacaatcacttaattggttattagaggggttagaacctttctcaaattattattgaaatgtggaacattgctgtctttgtaaagtaagctaagaaaatgtattgtgattg

SEQ ID NO: 671604 - DNA, 545 bp, Homo sapiens
aaacaggctaggtacgaggcctgggttgcgggcatctacgcctatggtctggagacgccctctggcatccagcagcgaggccattctacctggtactcgaagggttatgatgtgatggctcaagcccgatctgggactgggaagacgggcacattgccatatcgattctgcagcagatggaattagatctaaaagccacccaggcctgggtcctagcgagcccactcgagaacttggctcagcagcatatcagaaggtggtcactgtgcacataggaggactactagtggtgcgcctcctgttcacgcctgtatcgggggcgaccaaacgtgcgtgctgaggtgcggaaacgtgcagatggaagctccccacatcatcgtgggtacccccggggcgtgtgttggatatgcttgaatcggagatacctgtgcccccaagactacatcgaacgatgttctgtacatggatgaagctgacgaaatgttaagccgtggattcggggatgcagatctaatgacatattccaaaagctcaagagcaagcac

SEQ ID NO: 671605 - DNA, 115 bp, Homo sapiens
  misc_feature (74)..(74): n is a, c, g, or t
agatgtggctgagtcacccctcgagagaagggaaattctactcatggcaaggaaatcctcagttaagcttcagntgagccacaagcacttaaaacccatgaaccttcagctgatc

SEQ ID NO: 671606 - DNA, 1268 bp, Homo sapiens
ggctgaattgggccagagaggtctcattggctgaattcctagccccggctcgtcggagtgcgggaccctgagtagcgctaagcctacggaagctgggtctccgttgcgtgttgatgcgctggatggtcgcgtgcgggtagtggcggtcggtctgcgttgcgtgccgtcagtccacgtcggcgtccgtcgcttaggctccatgtggacgcttgaccctcccagtgtgcagtgggacggcttgcgtcgggggtattgcttgcatgattcgttccgggcacggggtgctgggcctgggtcttcggacctaaccggcaaggcaaggtgcctgaggttcgcctggtcggagagatggcagacgacgtgtcgatcctgagaagcaccggtagcagggtggctgaagtctgacgggtcattccctggcatactccggtgcctagcttcacacagttcgatgctcctcgcgtagcgccgagcgtcactcgtagctccctcatgagtgtcacgtgcctgggatcagagtttcccttggacgtgggtttcgcacgctagggacgcgcgattgtggttgctggggccgtacgctggcgagcctccgactggttgttcagccggcccggtgccctaggcttggagcgattaactgacacccaggtgtatgctagtggtggccatgacaggacacgttcaaggagcaagttagctgtactgccgatagtaccataggacgaggagcccgcagtgctgctgggtgccgtgatgccgcccggaatggcccttgtgtcccgccatgacaagtgcacttggggcagtgggccacggtaccttgggtcggcgctattccttgctcttgcccgccttctcgtgccgagcgtaagtgaaggggtgtttgcaccagtgggcccccccggaggggccgcgaccagagcttatctgcgttaacagttggctttgccccattgaaaggttgcggcgcctgcctgggggtcttcagagttggccacttggacccggtgtcaataggcctaggcgccccggggaagctggaaccttcgtcagccatttcactcggggaacttccccttaagaaaagctttggcccagacccggaaggaacctcacgagttaaaccttgacacacagaaggatctggcgggcactaaacccggccggttgggggggggactctcgtaacttccttccttgggaagtttaatacacacacgacaggaagaatatgccacaaatagcttcgcggggaggggcaaccc

SEQ ID NO: 671607 - DNA, 394 bp, Homo sapiens
gtacaggaaagctatccaggaacagctataccaggaacagctgtaccaggaatctgtctatagccgtcaacctgctcttcggggaggccgatataccggagtcatcagctcttctcaggaaacctagatatatcggggtaatccgtcctgcttgcgaataatggcatcagccttcataggctatgtcctcccgtgaggcctaatatcattctgagggtccacagtaattacaaatttactatccgccatcccatacatcgggacagacctagttcaatgaatctgaggaggctcctcagtagacagtcccaccctcacacgattctttacctttcacttcatcttgcccttcattattgcagccctagcagaactccacctcctattcttgcac

SEQ ID NO: 671608 - DNA, 1077 bp, Homo sapiens
tgtgtgttattggattagggatgggccttgtgaagcgtttttttgtgtgtgtatttataatgtgggtctttagtgaagaaacttgcccgtaaagcgcacagtgtatattgtcatatcttatagcatagggttctagcgataatgtgtgtccaggtttccctggtaatgagtcattacgtggttgaacattatacaccggttattttcatagttaggatttgtcaggtgagggcattgttgtggcctacagtttcacatgtaccttttgtctgtcttgaaagctagccggtatctaccgtagatatgttttggaagtttatcagaaactaaatgtactgtttaaaactgtatagggtcagggttgggggtaaaattacaggtatagtaagtaagaaagagtgactcctatgaatgaaagcagtcgtgagtttgtatgttgcttgactgtgattaatatgcggggctggtgtaagttgtaatgtggtgggctgacttgctcgtgtaactatgtacatgacttgttagggatggctgtcccatattttgtatattcggaatcatcagttctataaattgattgtaactagaatgtaatatattctaaattaagtcccacttcttaagtcacatggtttctgtcttggaaattttacctgtaaaagattatttaaagacaggaaccaggatggctttgggaacagggaaagacgggaaatgttgtattatgtgggtcattggggcctctaaccatcagtatagggtttatttcatcttccttgatggcagtagaaagacgctcattcgtcataacagtaactactcgttgatacctttcgtttacagacactttttattgaagattctatcatgaggtatttggctgggagatgggaggctaaagcgctcatgtcctggctcttcagtgtatttaactgtgtgaccttgggcaagtcacctaaccatctccgtgtattctagtctccctgtccttgtatatatgggagtaatacctacctcacagggttgttgtggggattaattagagataatgtctgtataacatcagagggtctgaag

SEQ ID NO: 671609 - DNA, 925 bp, Homo sapiens
tctgttctagccatacattaatttccaagcttctcgggacaaccctgtaacagcccctctgcctcttctttttccaggttcaataaccatgccttgaacaagccctgagacaacaaatgtttctctggaaaaatcctccactttttacagcgtcccaaacctcaacgttccgccgtgaccccctaccaagttttgccaagtctttctttcccacacagcccagttggtccctccacccctcgataaaaccctgggacaacccatcccaaataacccggtcgcagcaccgcggcacaccgtggccacaccataacccctcaatcatctgtgtgagccctccgtcacaccacctctaatgtatgacgctttatccccatgttgcacccgggcctctctcaaccacctgttgcccccacatgcatttcacaccacttttcagggcttgtctcccacgacgtgcttaatacccggccatatttctaaaccaccgttatatacatgaactttccaagctgtatatatcttcccccccctgataatcgctatcaaaccaatctcccccacaaacacttgtccacctgggccacctccccacattctcagagtcaaacacttttagtcttaaaccccaaacccggtgttgcagtaatacaaaaaggaaaacaactcttctatctcccaaaaccaacaaccatgcataagccactccagaaaaacaattatacaggaatatcttttaagaacaccaacatttcatccgccatagttcaaacatatgtttaacctccttccctccagccagcgagttactgttagtagttacatatctgtctcaccacccccctcacccgattgagcttcccccctggctaataaaccaaagccccctatcaataaatttttggttaaacaccccaccaaaaca

SEQ ID NO: 671610 - DNA, 260 bp, Homo sapiens
cccccccgcatcagagcagtctatagacatcatcaaaagcaggccttgggattctgggctttgagtacaaaccacggatctggtgcagaaacaagtagagactcctccattccttccagaattttcagagatgaggtagacccacctcaaccatcctcagcatcagttggctaaattgccaggctcaatgacaagctctcctgccatctccaagcccacttttcatagttccgctctgtcttgggctgcagcactttagg

SEQ ID NO: 671611 - DNA, 1489 bp, Homo sapiens
  misc_feature (1)..(1): n is a, c, g, or t
  misc_feature (1267)..(1267): n is a, c, g, or t
  misc_feature (1353)..(1353): n is a, c, g, or t
ntcacgcatgtgggtgttgtctcaccacgctcggtggagaaggctggcgggcctatatcattatgaccgagggggggggcgccacccaaaagaggggtattatatattgtgtcgtcggcacgcccctggtgtgggttgcgaggccgcccccgccaacatgtggtgctcgtaccacagtggggttgtttgcaccacctctgatagggatgggtttgttgttactacccgctcgccgtctcctagatgtttttttcctggcccaagtgcgcgttgtcttgtgacgacagccacaccccaatcgttggctttttgacacacaccccccgtgggcgcaccaagggctgtcaatccccacagtggaccaaagacctttttggggtatttccggttgggagagggaaacctttcattgtggtacccccccccgtgtcccaatgcgcaattcagcctggccccccccagaagacctttgtggtgaatggggcccccccccccgggggaatccttttgggccgcttgtatggccccccgcggggctttctcaccagagacaattgcaatggcccctggcgctttctgatactttgggcgcaacgtgtccccaaaggactcgttgtggggcccaaagggttcaattctccccttgaggccttggtaccggcggagaggtgctttcaccctgggacacatggccctcttcccgctggtgccccccacactgggccccaacgtgtgtgtccacactgggttgggagacactcgagacctcgaccgctttctatagagaaaacgcgctcgtgcgcccacatgatgtgagtggacacactctcacagcagagaagggtttggttgagagagcacccagagcgctctcgcgagagggcccccccctcctccaaagggcacatctctctcggggcgtaacacacactctgagagacacacacacagagtggtgttctctcctctctgggagactgttccacacacacggcgggaacacacccgacactgtcgctctccacccctctgtggagacgcctcgtggggctcgggcgcacttgggcccttctcacaacgcacaccacactcttgtttcacagagctctcactgtttccgtcgggtattgtaccacaccgagaattttgtggctatacacgacacacacacaggcgttggtgtgaccctccactgtgcgccacacacatggcctctccacacaggagagtataagagacccctcggagccacccacgccccaccgcnccacagaggcacaccacaagagaggaaagagaagagaaccctccacctcgctgtgggaagttccctcgccaccacactcacgtccncccacccaccacctgaattctcccctccctcaccacgttgccacattgtagagacccctctgaaagaaggggaaggggcctaagggaagcccccccttgtcatgtaccatccataaagtaccctgtgctcaaccca

SEQ ID NO: 671612 - DNA, 647 bp, Homo sapiens
ggctgtaggaattcggtacgagctccaacatttgtgcacaacacgataatctgtcctcaaacgagaggactaacggatatttttcctaaaggacgcccatcaccttaaaagaatggactctgttaagtatgagagcgttttcctttgtaattgacatctggcccatcttatactgagagccgggaactcaggagtaggagcctagatatttaacctgatactcaatcaggaaatatatgatatccgtatttaaaatgaaggtagttatatttaatgagctccattcctaaatcctttttcggtaaaggagctctcatttatgagaatgctggccgaataacatgactaaatagaaggattgtaccgggagacattatgttactaaattagcacagtaaaaaactttcggtctctaaccaaatttgttgcgacaatagaacatgtaactgcccgggaaaacgaacggagaaaattagccgggaatatttgatctgaaacccaacgaaattaattcattaatgcccacccaagcggagccggttgctcccaaaaccacgaactccttatttaatgatctaaggggactaaaaaaagctcggggtttggcctactttctccccgcactattcccctcaccttcgatttgg

SEQ ID NO: 671613 - DNA, 312 bp, Homo sapiens
agattggaaaagctcctgcgggtgcgtgtgtgtgtgtgcacttgtgcacatgtatatagtgtgtgtggtgcatgtggggagtgcgagtgtgtggggtgtgtgtgtgcgtgtatttataaagtggcttacggaagagtcccgagtaggcacatcaggcgcttgggttcagatcctggaagtctgacctcagagctaagaacattgcagccacccctgtctcctctcttcttccccttccacatctaatccccagcaagtctaggcagctctcctctcagctgtaccctgaatccatccatttctctttctctc

SEQ ID NO: 671614 - DNA, 1082 bp, Homo sapiens
gcaggcggcgagaacgcgctgggggaacccttggtccgctctgcgcgtcgctctagcgatcctccgagaaatggatgcacgggctgcgaaaggctggccagggcttgggccaggcatctacgagaacgacttgccttggcagcatgtgctccactggcccaccgcgtggaccttgctagtcattggacatcgtggatgatgctcagctgtccctgtcgcgtgaacccttccttgcatgggagtccatcggtccatgtgcatcctggctgtggctgtcggacaccgcgcacccaccgtgctcggtggcaccttgccactggtgtgctcccgttagacctcgggctggtatgcgtctggttaagatggcggaagttgtcactgtcctggggacacggcgtaaacccctaaatccctgcctgcgccgaacctcctgacccccggtccccacggtgacgactagactgggcctccctgacgcgcagcgcggctgccgtggacaccgagtgcgttgcgaacacggagggacctttgtaacgccacgttgtttgctctttgttgaagaagaacaacgaataaatgtgttagacttgtctgatgaaaagtagcatgcttgaatcatcatcatgggctaacactaagcaccagtgggcaacattgtcagagggtgtctaggccagaaatcgttgatggaagccggcatgtcgcgaatgtgtttacccggacacccccgatatgtttgtgtgtcaacacaaggcgggcaaagttcttcgagggacgccccacaaaatggtagtggggcgaactaaaaactctgcgatatgcccgttataatccctgttatataacctgcccgtcaacaacagggggaggtaataatcgggacgatcttgcgctgagaacagagaacattaatcgaggggtcgaactgagaggacacgtcttgcctccgtatctcgcccgggagtacctgccggacatcccccggattttgcgatagatcggggtgagcatggatgtaagttgctttaggatacaaaaaggaccaataatataatgtcaccaccgatgggccgtcaagactc

SEQ ID NO: 671615 - DNA, 327 bp, Homo sapiens
tatgagccgcccagcttatcagtaggctatctggtcggcctttttgaagacattaacctgtatgttatccatgccaaacgtgtaacaatcatgccaaaagatgtccaactagcacaatgcatttgtagaaagcatccttaagaatctactatgatgggtcaggcatggtggctcacgcctgtaatccttggcctccactttacagacatgagccaccatgcctggccttttgttttgttttgttttgtttttttataagggcccaaacccattcatgagggctctaccctcattatataattaccttccaaaggttctacctccata

SEQ ID NO: 671616 - DNA, 158 bp, Homo sapiens
agtcgggaccccgggccgaatcctgtcgctcgtgcaaaataggagcttcagcctaaagaatgtgaagcactgtgggctggacgagcgtgacaagatgctggagcagctggacatgcggcgggatgtgcgggagatcttccgcctgacacctcacgaga

SEQ ID NO: 671617 - DNA, 1226 bp, Homo sapiens
tggatgcttccaaatttttatggaccagctaaggaaatcacaagggcaattaaaacctttgccacggtaaggcaaatgcccaatgtattaagaaagcgcaaagggcgcaagggttcactggattcacagcatgtcaagaaaaaatgtggctttaggagacccaaaaatattggttcccagcgcctggaaaagcgctttggtgtgggcaattcaagaaaaggggagattgagagatattaaatatcagaaagagacttacaggtcctggagatttggtggcgatgagaccctctccaggtattggagccctaatatattgtgagttctctctcctctatatatcctctatattctccccccaatctcttgcggggcgctctaaaattgaaaacttgtgaatgtgcgccccagagaaatgtgtgtacacaaaagtgggcgccccttactgctctatatcacctgtgatctgtggcgctattatctgtagagcctttaacagagtgggtttttttctctaacacgagaaaaactctagaggggtcccctttatgagggggtatcattaaagggaaagtattatttaccccgtgggtatatccttgtgaaaagcgatatatcctgtagagtacccttatgtgaggaaatctctgagggcgagagtcgtgaccatgacaatggggtttatatagaggaaagagtcttcttatataacaccacaattatgcgtcgaaaattatgcgacaacatttatgagagtgagtggcacatcttaatataatggcggggaccttgaggaaagacataactatctctgcaggaagtaaaaatagcgacaatattctgctccaattatacaacctgtggtgggtgcccggccctctaatcatacctcctatcttccaacagcgcaatttccccccgcttacgaaagtacgaatctacgacaaagagaacttacacatttacgatgatcaaaaattacaatgttacacatactctcattgtacaaaacaaccacagtcaaaataccccagctccgatgatacaaagaaccaatattccatcgtacggagaaccaaacaacacaaactctctgtcatcacaaagataacaaagcgaaacggaccccaagaagattattacacaacaccttattaatagtacacctgtagtgtggagcaaaaaaccccctcttagtgcaattaaaccacacgacgcatattaag

SEQ ID NO: 671618 - DNA, 192 bp, Homo sapiens
gtcttacgagtcaaagacagaagcgacatgtagctgagtgagccacgaagttgtacacaacaaaaggaatgatgaacttagaatttgtctatttaatcatctctttttctttctttccattttttttttttgtctttttcgggccgcaccctttgtatatcgagattccgtaacatcataaccactggggct

SEQ ID NO: 671619 - DNA, 1306 bp, Homo sapiens
  misc_feature (807)..(807): n is a, c, g, or t
agcgggcgcaaggtctggcctcgggtatccgtaacaggtgctctctatctacctccagactctcgcctgcgcgccagctccccgtgtttccttctgctcctaaccacgaacgagtgtggctggtgctctcctgacagacagcaaccgtcttgcatccgtggcatggttcaatcgcttgagtcggtgtgacgcgtgtgaccagtgaatgactcgctgtgtgatcgggtcgttcacatttgcaccggtcaaagtctcgttcggcgacctgagtaggagaagagactccaatgagatcggaccacacgtgtgatagcgacagagacgtggttagtggccagagcccgtcgcagatggtcagctattttggctctggtcagcgacagacgattcagatcaaatagcgtcgaatctatatcagaacagatagtacccaaacgaagacaagatcgctggcatagcattgagttgtggttgctcccccgctcgcttgaacacagctcagattcgagttagtccttgaggggatccaaatcctatcattcctttggggaacggattgagaaacgcattgagtccaccgaaaacctcacacgcatgttcatcgccaattagaaaccccatgtttggccaattcgtatgggaagcaatagctctgtggctccatatcacgaattggagcgcaatggctctaactattgcattcgtcccacttgtgaaatatgccaactatgcgttgtcctttcatctatgccgcaaggattacctgatcgcccttgctagtctcatgttgtagtcccggggcgacgnaccagaattggaacgcatttggttactgaagacaatacacaagtcatagatgccaagtgtaacagtcacgtgaacgcgcggatctttgatcacacaggcggctcgtggcacgtagatagacacgtaaataccagtcatacttgtaatgtgcgggcggggcacatttccacgggcgcccccattggttttctataccatggggctcacttatagattgatcgagtgaggggaagggagccaaactatgaggaaggaaaaaggatggatacacattttaaagtttcttcgagacacacacttcaggaaggaatctggaccaaattggaaatttgcatttccccagggttttgtaccaaaaaaggaaagacttttgagaaggcaggcgtttggcaacacatcggtggcaacaacacacacgaattggggtttcctttgaaggaaagccaagcgtttggttaaaaggacatccttggagaagcctttcttccagtggaaaccc

SEQ ID NO: 671620 - DNA, 1164 bp, Homo sapiens
  misc_feature (14)..(16): n is a, c, g, or t
  misc_feature (34)..(34): n is a, c, g, or t
  misc_feature (69)..(69): n is a, c, g, or t
  misc_feature (73)..(73): n is a, c, g, or t
  misc_feature (274)..(274): n is a, c, g, or t
  misc_feature (299)..(300): n is a, c, g, or t
  misc_feature (326)..(326): n is a, c, g, or t
  misc_feature (329)..(329): n is a, c, g, or t
  misc_feature (876)..(876): n is a, c, g, or t
  misc_feature (895)..(895): n is a, c, g, or t
  misc_feature (976)..(976): n is a, c, g, or t
  misc_feature (1164)..(1164): n is a, c, g, or t
aaccgatgcgccgnnnaacagaaccaccgcgccnacccacacacaactcgcgcacacgccaactgcacncacngcgacgtacgcgccgacagcgaggccacacagcccgcccgacccacacaacaaacgacagccacccccacgcttctgttaacgccacccatcgctctcctccaccctccccatctggctcaacgacaccagagaagtcgaacgcgagaaagtgtgagacatactataagtcatgaattatatacgactcctttaactattntattatattctatacacctccatcnnatgatatattataaatccacaactcnacnaaattgccttagcttccctccgccctgaccccttcacatcttcgcacgtcacttacttttctctctactttcttctcttctcgcaaagcgcacgtcttagacctctgggataggcacgtcggttaggcggcgcccgaccactcacattatcttcgtcacactctcttctgccgccctccccccctgagcctctcttatcagtctccgcgccaccgacgtcgcttctgcgcaatcctcgtactgactcaatgaggttatatatctcgcggacctaaacgcgagatggattagtgatacagtatctatagaacgactatattattaatagactcacggccataatacttacgataacatatgtagtctttcgacctaattaattagtatatactttacatttggatagattagatatacgtagcatatcactaagtcataaactgagatgcatatataagatgataaggatgaaatgagtcatggtaatttaaagattgttggtggtgataataaacttctacagatacgcacacctcgcatcgtgcgntaccgtaacattgagccgncccacagctcatctctctggtcagttttctctacctacattgttcgaagcatttcttgtagtagatcacatacaagattancgtataaccgagtacgcatcaccgaacagatataccacactgctcattcgttccccatgatacagacagtaagggcgccgtgctcgccgtgttgctgagatcatgcatccgccacacatatgaaggaggtcgagcgcggatgcaccgtaccgaaccctcaattataccatagaactgtgcaactacgn

SEQ ID NO: 671621 - DNA, 279 bp, Homo sapiens
  misc_feature (168)..(168): n is a, c, g, or t
  misc_feature (199)..(199): n is a, c, g, or t
gaggtctctaccacataggtacgggtatctaccacataggaagtacagcacctatctatgccatgtagcctagactatatggggtatgcccatagataggcagagagcagcaggacacggtatgccaaacgctagtacaaacgaacctactagggtaccatagggtangacacaccagagagcctatcccagggtttcntacctaccagcatactatccacatatacacctatgcccccaacaggctatgtagataagtaaagcctatgtacctaccta

SEQ ID NO: 671622 - DNA, 749 bp, Homo sapiens
gcccaggtggagtgcagtgagccgagatcgcaccattgcactccagtctgggcaacagagtgagattccgtctcaaaaaaaaaaaagaaagggaaaaaaaaatagtttatacctcttcctggtctcaaccgccatgaaaattctgaacactccaatttcacgtggaataacccaaaacaaaattttataacgtataaaataattttactctcttatagtaatagtatacttaaaaagcctcggggtatattatctctctaaacagctacaatccagggcacgcttacattaaccaactaggtcctctagtgagaacaactaggcctatttcactggctggtgtagcctcaggggcctaacatgggttgccaaataaatatccggtagaataccctgaatggtaaaaaccatttcggttttgggtttccaatgtggccaaaaactctcaaaaggtctgtcatatgtaatcctgggacaactcatatttaaattggattcctcagtaatgagatgctgggtgtgacttaagaaccataaggtactcaatattataaaaacctcaaaataacttgacttggaatttaaccaaatcctcccctttcctacagttaattttacaatctggggtatccctaagtcgatatttgaatgttctaaacagggtcacaattggcttacggaatattgtataatttccccacaatgcaattaaagacaatctgcgggattggggagtactaattgggtta

SEQ ID NO: 671623 - DNA, 283 bp, Homo sapiens
  misc_feature (164)..(164): n is a, c, g, or t
caacatccatcttgttgtacaattccattagagctcttgggtgagcccaggtgcactgtcaatgaacagcaatattttgaaagtaatcatttttttctgagcagttgaacaggtctttacagtggccttaaaatattcagtgaagcatactataaacagatgtnctgtcatccaggctttgttgtttcatttctagagtacaagcagagtagattaagcataagtcttaaggggtcttcgggattttttgggagtggtaaatgagacctggcttcaaccttaa

SEQ ID NO: 671624 - DNA, 170 bp, Homo sapiens
tgtgtatactgctctggggcagtgaaggtagcacagtgctcagcaggaaggagtcaagactttgctgtcgagcacaggtaggctggtgcctgagtgctcagcgtgccagtgatccacgcctcactcccagtgctgcgcagaagagctaggaatctactccctcttcctgt

SEQ ID NO: 671625 - DNA, 300 bp, Homo sapiens
aggttagttcagtcaaaacaggcaacccccttgtgggccctgaccctgcccctggggtcatggcggttgtggcaactggggaggtttggcccccacagccctcctgggcctgcttccctgtgggtcggggtcctccagggagctgacccaaaggtggaggccccggaggcagggtctttggggactgtcgggggggacaaagggagaaggctttgcaaaagctccctggcaatacccccctggggaaatgctttgtgtgccacagggaggaagtttccataaaacagccacaagcttcca

SEQ ID NO: 671626 - DNA, 350 bp, Homo sapiens
gcttctactctctgtcttgtgccggggctgcgacgggtgggcactcggtgcggggcggtgggccatgactgcagcaacctagtccgtgctctttaagccccggagcaggactgcagtggccaggactgtgctgcggggttaggggtgcactctctaccccagaggggtgcatcgaagcagacatttgtgggcttgcccgatacagtacaggtgactgtgtaggctcatgggtcctgcctgctgagcccttatgggtagtgatctctgtgtcttgtgagtgtgcttatgtgtgtgtgtgagagagaccctcatccggtgtgccgatacgctgagccaggactcagtgtggg

SEQ ID NO: 671627 - DNA, 224 bp, Homo sapiens
tggaaacctgcgaccttacacacaggacagtacttgcttcttcaaggggaatcttcagcctcaggtggctctcatgaagctgatttatcaagttgtaaatcttcacctgttgaattcataagttcacgtcttccaaggagaaacgtgtaaggatggcatgactcgcccgctactttcattgcccacgttgcattacctctaattggccagagtaccatcctctg

SEQ ID NO: 671628 - DNA, 265 bp, Homo sapiens
ggatgctattgatgggaacaagccagaagaacaaactcttgttcccctttagggagctctttgaccatggctgtgactctctttccacagtatttatggcagtggagcttccaattgccgtcgcttaggaacttatcctgactggtttttttcccgctccttttatttgggatgtttggtgttttattgcgttcaatggcagacttatgtttcaggcatgttgagatttggaaagtggatgtaactgaaattcagatagctttag

SEQ ID NO: 671629 - DNA, 781 bp, Homo sapiens
cgactgagcaacaggcaggactcagcctgggacaggccccagagcagtcacacaaaggaatctttatttattacatgacaaaataaccacaagtccagcattgcgagcacaactccctgctgctgggctataactatgtaaactggaaagccaattggaaacacgaacaagcgacttgatcccctatgcgcacccaaagggccgcaagcacctgcttcccgtcacaaacgaacgtcccatctacactcgacgcgggacacgagcagctccacacgggccaacagcagaaacgcaattgcccactgcttgaacacacacagaacaaaaacttggcaagcacacgaacactgctacgccccaccaaggcacgcgataaaccccaacccaaaaccgggcacgaccgaaccgaacaggccaaactaacggccccagaacgcgcacaccattatgcgagagaggggaacttggggcccgaacaaccaggcgcttctcacaattggcccccctgagagacaccccaaaaaagggaggggattggccaaaccaagagcgggtccaaaaccctttcacaacctaggggagccattacaccccaacctatattaaacgatacatcaaccaactccataaacctcaacaaacaccaattttcccacctttaaaaggcgcgtccacacaaaacacatttatctataaaaccattttagtaacgcgccaaacatccccaccctaataaaaacattctacatcacaccaccgcatcccccaaaaacaccctcat

SEQ ID NO: 671630 - DNA, 169 bp, Homo sapiens
acgtgcagccaccccacgaggagtgggacagacactcagcactgacacagaggccacagcagccaccccatgaagagtgggacggacactcagcactgacacggaggccacggcagccaccccacgaggagtgggacagacactcagcactgacacagaggcctcggca

SEQ ID NO: 671631 - DNA, 935 bp, Homo sapiens
  misc_feature (9)..(9): n is a, c, g, or t
  misc_feature (156)..(156): n is a, c, g, or t
  misc_feature (158)..(158): n is a, c, g, or t
  misc_feature (160)..(160): n is a, c, g, or t
  misc_feature (164)..(165): n is a, c, g, or t
  misc_feature (172)..(172): n is a, c, g, or t
  misc_feature (176)..(177): n is a, c, g, or t
  misc_feature (181)..(181): n is a, c, g, or t
  misc_feature (184)..(190): n is a, c, g, or t
  misc_feature (192)..(193): n is a, c, g, or t
  misc_feature (195)..(195): n is a, c, g, or t
  misc_feature (197)..(197): n is a, c, g, or t
  misc_feature (202)..(202): n is a, c, g, or t
  misc_feature (206)..(206): n is a, c, g, or t
  misc_feature (209)..(209): n is a, c, g, or t
  misc_feature (211)..(211): n is a, c, g, or t
  misc_feature (230)..(230): n is a, c, g, or t
  misc_feature (261)..(262): n is a, c, g, or t
  misc_feature (264)..(264): n is a, c, g, or t
  misc_feature (312)..(313): n is a, c, g, or t
  misc_feature (336)..(336): n is a, c, g, or t
  misc_feature (343)..(343): n is a, c, g, or t
  misc_feature (345)..(345): n is a, c, g, or t
  misc_feature (353)..(353): n is a, c, g, or t
  misc_feature (355)..(355): n is a, c, g, or t
  misc_feature (360)..(360): n is a, c, g, or t
  misc_feature (362)..(362): n is a, c, g, or t
  misc_feature (367)..(368): n is a, c, g, or t
  misc_feature (383)..(383): n is a, c, g, or t
  misc_feature (408)..(408): n is a, c, g, or t
  misc_feature (411)..(411): n is a, c, g, or t
  misc_feature (417)..(417): n is a, c, g, or t
  misc_feature (427)..(428): n is a, c, g, or t
  misc_feature (430)..(430): n is a, c, g, or t
  misc_feature (434)..(434): n is a, c, g, or t
  misc_feature (465)..(466): n is a, c, g, or t
  misc_feature (470)..(470): n is a, c, g, or t
  misc_feature (481)..(481): n is a, c, g, or t
  misc_feature (493)..(493): n is a, c, g, or t
  misc_feature (507)..(507): n is a, c, g, or t
  misc_feature (544)..(544): n is a, c, g, or t
  misc_feature (562)..(562): n is a, c, g, or t
  misc_feature (612)..(612): n is a, c, g, or t
  misc_feature (622)..(622): n is a, c, g, or t
  misc_feature (681)..(681): n is a, c, g, or t
  misc_feature (683)..(683): n is a, c, g, or t
  misc_feature (804)..(804): n is a, c, g, or t
  misc_feature (835)..(835): n is a, c, g, or t
tattttttnaacatcatttatttttatttacttttatttgcaaagatagttgtgctgccaacaacttgaggtaaaggcattaaaagggttagactacaagaaatgaaaacaaaacaattgcgatacttcctataggagaccgcacaaaaagcagtngncngctnncatattncatnntcanctnnnnnnnanntnancaacnaaanaancntccttgtattaacataagnatcagaccttggcccccacacagtgttggtnncngtatggctggaggtgtccttactcaattgacttcactggaaacatacnntgtatgtcaattcatctttcagnacttccncncacacaananacttncnctatnnaacccaacgacaggngcccgaaccgagcggccgcaagcgnganacccgnggcaagagcnngnggancgcgcccattgctttgtcctgaaacgggacnnccgncagcacggtantccagcatggcnacagagggaaaaancgaacgcagagggggggggaagggcgggagcaacggntgtgccagctgggatagngccacggcttccaacccgttctgtcctatcagcacaaaataatcgagtgngatgtctctnctgaactacaatgtaggttattccaggttgatagtctttctccaaactgatgcaggctncncgaattgctagtagttcataatataatacctgcctaaactgcccctctgaaacaccatcccgataaaagatgatacgagtaggcttgaaccgagttgacttataaaattgaataagaagtncccggaccatggaggccaagtcctggatganctcctgtcggggtctctgaactcttactgtggcacagtatctgcttgggtgtgcatccatactacctacaacagcagcaatagaaggcttctatccatca

SEQ ID NO: 671632 - DNA, 113 bp, Homo sapiens
agtctgcaaattaatgaatgccatcctctgcaatggactggataaaataaagtaaaaaaagtacaagacaataaaagataaaggtcacctactacccagagagtttccacttt

SEQ ID NO: 671633 - DNA, 537 bp, Homo sapiens
  misc_feature (404)..(404): n is a, c, g, or t
tctacagcggccgggagaggctgtggtggccccgagcgcgagtgtgtggtgacaggacagcggcaggcccgccctcccctggtgatggtcattgtcctccagagcagtgatggaggaaataccagcccaggaagcaggcagggtcacccaagggtccagttttcagtctttggaagacccagttctgagtgtctgtcccccagaagccctcaggttttgtgcaggaccaccggcaccttggaaacagggggaacttcaacttggggctccacccttgatttccctcagggttgcccttgcttcttcccccgttgaaggggaagcccaggagacaggcagctgcgctcttgacagccaggtaccaggagtttgtgacattcgaggatgtggctgtgcaccttacncgagaggaatggggatacctggaccctgtaacagagggacctctacagagaagtgatgtcagagaattatgggaacgtggtctcactgggcatacttctccgccttcccaccacccggattcatagtgtgaca

SEQ ID NO: 671634 - DNA, 528 bp, Homo sapiens
  misc_feature (87)..(87): n is a, c, g, or t
tttatacccccaaagtttttttttcggaggttttttttagccttttcccattccgccctagccctccccccccaattagggggggantggcccccaacaggtatcaccccgtttaatcccttagaagtcccactcctaaacacatccgtattactggcatcaggggtatcaatcccctgggctccccatagtttaatagaaaccccccgaacccaaataattcaagccctgctcattacaattttatggggccttttttttcccctcctacaagcctcaaaggatttggagttccccttccccatttccggggggatttaggggtcaacattttttgtagccacagggttcccggggcttcaggtcatttatgggccaaactttcctcacaattggtttcatcccccaaataatttttccctttacatccaaacatccctttggttttaaaccccccccctgaaactggcattttgtaaatggggtttgacaatttttgtatgtccccctttattaatgggggtttta

SEQ ID NO: 671635 - DNA, 228 bp, Homo sapiens
tccccgtggcgcgcgcattacactgactggttcagcgggtgcttaccttacgcgggcaggcgcggttaacccgttgaggcccattcgtgatggggatcggggattgcatttattccccatgaacgaggaattcccagtaggtgcgggccataagcttgcgttgattaagtccctgcctttggaacacaccgcccgtcgctactaccgatgggatggtttagggcgcgc

SEQ ID NO: 671636 - DNA, 280 bp, Homo sapiens
  misc_feature (147)..(147): n is a, c, g, or t
tatctcaggccaggacgactggggctccactgtatctcaggtgcctgctcttccccgtgagggaagcccaggagacaggcagctgcgctcttgacagccaggtaccaggagtttgtgacattcgaggatgtggctgtgcaccttacncgagaggaatggggatacctggaccctgtaacagagggacctctacagagaagtgatgtcagagaattatgggaacgtggtctcactgggcatacttctccgccttcccaccacccggattcatagtgtgaca

SEQ ID NO: 671637 - DNA, 430 bp, Homo sapiens
aggacgttttttggcttgtgggattctgtgtggattccggatattattagtcctttattatcagaggcataatttgcaaatgtattctcccgattctgtagatttcctgtttatttggttgcattatttcttttgctgtgcaaaggcttttgtgaacttaagttccatttgtctatttttgatttagttgcatttgctattggggaataagccataaaactctttgtctaggccaatatccaaaagagttttaccttccagggcttttcatagttacaggtcttatatttacgtctttcaatcccatcttaattttggtcatatggtgcagagacaggggtccagtgtcattcttctgcacaaagccagccattttcctagcagcatttgttgaatggagtgcactatcccattgttcattttcgtccac

SEQ ID NO: 671638 - DNA, 1257 bp, Homo sapiens
  misc_feature (14)..(14): n is a, c, g, or t
atttcagtaacccntgggttaatgtagcctgcgctcgccggcgcctggtgtctctcccggggaatggagggttgtcgcggtggtgacggcgggcagcgtagtgcgctgccaaaacctgagtggagctgcaagccttgtctgcctccgcctccgcctcctgtctccccgcccgccctcacccctgcacccgcagcggagtgagtgagggacctgtgctgcctctgtctagagactgtgttgtgctacccgtgctgctcctgtgctccctgtgccccataagctaggatgcctgtgaacagcaggcataggaccgcttcatgattgcctgctatacgaggacgagtgacgagtgagttggaagaagcaagaggaagctcgaagcgacgcgacagcaaagccgagaacgcgaagcgcgacaagcagggacacaatagagagaaccggcgacaccacacacaaagcagtcaaagacagcggccgacgaaccggcaacacagaaacaaaacaacaggcagcggaaggcacacaagacacaggagacagaacagagaacagaagacccagcaaacacaagaggacaacaaagcagaggacaagacacggaagagccacaaacaacgcaaggagcaacgcagaaccgaagaagaagcaacgagaaaggacacacggagaaacaagcagcacagaggacaagaacagcaggcgacacaacgagacgcaccaccagaagcacaaacagaacagcagagccgcacaacacacgacacaaaggcgaaaaccaaccagacccgaaagccacagagagacaaggagaaagcagcaaagaaaaaacaaccacgacaaagacagaaagcaaacacaaacaacacagaaagaacaacaaaagaagagaacacgcaacacaacaagaacaaacgcaagcagaacaccaaacacgacgaagaggcaagagagaacagcgaaaggacacagagaagaggaagagacacagacaaaaaagaagaagaaaagagaagaagagaaaagaaaaaaagagaaaagaaaagaaaggaaacagagaatgaaaaaaagaagagagaagaatgagaaaacagcaagaggaagaaggaaaataaagatgagagagagaagagagaaagagaaacaagaaggcaagaaggagaggaagagaggagaagtgaagagagaaaaagagaaagaaaaaggaaaaaagagaagaagacaccaggaggaaagagaacaggaggacaccgacct

SEQ ID NO: 671639 - DNA, 261 bp, Homo sapiens
  misc_feature (12)..(12): n is a, c, g, or t
gattttcagccngactgccggaatcagagccgcgggtgagatccccagccctgtgagcctgtaggagtagaatggttccccaaagtgtatgagttccgatctggcattatcgcccgagaggagttgttgagaaagtggacggggtgacatcagtatgtctgtgcgaagaggtacgtgtccatcgaaagcgatcttccaccagcgagcttaagagcattttcagggcttgccgtttccgaggctcgagggtgcccccctggt

SEQ ID NO: 671640 - DNA, 1392 bp, Homo sapiens
cctggagctctggggagcggagcgtggtggggaggggagctgggacagtgcgacacatggaagacagcggcgccgcgtgcctctccccgacctagtgctgggcccgtgatcctactggacgccctgagggcacaccagacctgcgcctctagatgtcaccccactgccgaaccccatcaccctctttctctagaacgtatacttttccagtcgcgttcgcactgacgttgtaggcaatcagatgagtagctttagaagagtggtcgaacagaggaatgctactagagggggacggacaacgtgaggaacagaaagaccagggaggactgacggtatcatgttaaggtcgagaagaagggaagcgccgagaagaaacgataactgagcacaaaacgacgatgagcgaggacgaaagtgggcagcatgagagaatcaggaggagagagacactcaaatagacacgacagaagccaacagcgaacaagccgggcggatgcgagatgacgcgagacgcggagaaccggaagcgatctactacaggagctgatgacggagcgatcgcacaacgaaccagacacatccacaacacacactcaccaccgatctctcttcctacctgcccaaatctcaacaatcggtatccaaaacatgaactgataccccatttccctcactacacatcatcagacagcagacaagtcccaaacccaccactctataaacaactcaacagtgtcttcaagagaccacaacataacagctaacagaaccagcaatctacgaccataacacaaaacactagcacaccaccactaagatgcaccagcaaacaccaacgaccaagaacacaacacaagcacactatctccaccgtccaccaataactacacaacctacactacgacgccatcctacccctacgacatcagacgccgcccaaaaacaccatagtataaattatctatactcacaagccgcacacgacgctcacccacatcagcaagtcacaggtagcccaccagcgtagaacacaggcatcagagtccacgccggcgcacacagcagcaccccaaacgaacagcggaagcggagccgctacatagggaccgcgctagcaggagagagcagtgagcagaacggcagctcgaacgcgcgatgtggaacaggcggcgcgcggggcgacgggaagccgcagaggcgcggcagcagctcgtggcggaaccggccaggcgcgcggggtgcgagacgagcgcgtatgtgccgcccgtgcggcggtcgcccccgccaggtcgggtttgcaagacaggggcgcgcagcgggagccgaagtgccgtggagaccctcggctgtaggagggaatacaggacaggagtacacagcgagcgaagaacg

SEQ ID NO: 671641 - DNA, 317 bp, Homo sapiens
gttgtcaggtctggagtatatacattaaaccaagcttctggctggagtgggggctcatgcctgtaattccagcactttgggaggctgagacaagcagatcacttgaggtcaggagttcaagaccagcttgaccaacatggtgaaaccctgtctctactgaaaatacaaaaattagccaggcatggtggtgcacgcttgtagtcccagctacctgggaggttgaggcatgagaatcacttgaacccaggaggcagaggctgcaagtgagctgagattatgtcactgcactccagcctgggagacctgagcaagccagg

SEQ ID NO: 671642 - DNA, 108 bp, Homo sapiens
acactagaggatcccgcggcattacaggtcacggtggactgaattggctttttatcttcccactgtatcatggaagtatctgcttgcttgtactgtccatccgggata

SEQ ID NO: 671643 - DNA, 166 bp, Homo sapiens
  misc_feature (12)..(12): n is a, c, g, or t
gattttcagccngactgccggaatcagagccgcgggtgagatccccagccctgtgagcctgtaggagcacaacgcctccttttttgcctgagttctctccgccattatccccagaggagttgctgcaacgccccggggtgcaccacgttgctccccaccgccgctg

SEQ ID NO: 671644 - DNA, 945 bp, Homo sapiens
tcgagaggttagaaggagcgtgggtatcaccggcctacagcagtcaaactccgggccacaggaggcaataggaccaggaccctggacccgtggggcccagtcggcacctcagatgcccttgcacgtcgggtatgaagatcgtggcggattgaggatgtcagccccatcccctctgacagactcgcaggaaggggggtcgccgcggtcgccgtctgtgaacaaagagttccctcacaaaagtattttcttgtgtactagaatttgtccttcatgtacacaaaaaataaaccacggggcgcggctctgcgaggcataggtacccgctcgggagggatcgctcgaatggagtacccgtttttggacccacagggtctatttgtggcagcacctgggcggttccccaaaaaggagggcacggcccattatactgctgcataggaccatctggccggcgcttgacaacgcttgaggatgcgagacaagagcgggcagcgctcagagggcgtctcaggaccaggagcacaataacgtacttggccgctgtagactgcacatgaggcaaacaagaccctaccggggagatatcgcaagcccgcaagaggaaaacaatctgcacaaccttcacagcggcggggaccccccggtgggcagcaacgaacagcggcacgtcgtcgcatgcgccagggcaaggaaacagatcatggaccacgccgggaaccaggagcgcagctcggacacctcctaaccgcacgccggcaccctcggaaggaaataaagtcaggcggcgacacgacgactgacgcacgacacccacagcacaacccaaggcttacccagccggctctccatagcacgtcgggtacaacccagcacgcccccgagcaccgcaccacccacatgccacgcaagaactcacgacagtggccacatactcacaccgccagc

SEQ ID NO: 671645 - DNA, 303 bp, Homo sapiens
ctcagaatatgctgtctcatgcctgtaatccgcgtgtacttaagaggccaagggcgggtgaattgcttgaggccaggagttcgaaaccagactgagcaacatggtgaaacactgtctccacaaaacaacaacaacaacaaaatacaaaaattagcccggtgtggtgggtgcaagagcctgtagtcctagatactcaggagtctgaggtgggaggattgcttatgcccagaaggttgaggctgcagtgagctaggatggtgccactgtacaacggtctgggtgacaaagggagatgctgtcttt

SEQ ID NO: 671646 - DNA, 281 bp, Homo sapiens
  misc_feature (1)..(1): n is a, c, g, or t
  misc_feature (10)..(10): n is a, c, g, or t
  misc_feature (22)..(22): n is a, c, g, or t
  misc_feature (34)..(34): n is a, c, g, or t
  misc_feature (39)..(39): n is a, c, g, or t
  misc_feature (45)..(45): n is a, c, g, or t
  misc_feature (51)..(51): n is a, c, g, or t
  misc_feature (53)..(53): n is a, c, g, or t
  misc_feature (60)..(60): n is a, c, g, or t
  misc_feature (63)..(63): n is a, c, g, or t
  misc_feature (67)..(67): n is a, c, g, or t
  misc_feature (92)..(92): n is a, c, g, or t
  misc_feature (97)..(97): n is a, c, g, or t
  misc_feature (99)..(99): n is a, c, g, or t
  misc_feature (102)..(102): n is a, c, g, or t
  misc_feature (105)..(105): n is a, c, g, or t
  misc_feature (116)..(116): n is a, c, g, or t
  misc_feature (119)..(119): n is a, c, g, or t
  misc_feature (158)..(158): n is a, c, g, or t
  misc_feature (160)..(160): n is a, c, g, or t
  misc_feature (167)..(167): n is a, c, g, or t
  misc_feature (176)..(176): n is a, c, g, or t
  misc_feature (189)..(189): n is a, c, g, or t
  misc_feature (192)..(192): n is a, c, g, or t
  misc_feature (198)..(199): n is a, c, g, or t
  misc_feature (205)..(205): n is a, c, g, or t
  misc_feature (218)..(218): n is a, c, g, or t
  misc_feature (246)..(246): n is a, c, g, or t
nccccgaatncatttatttagngggaaaacacanccatncaaaantggggnanacaatgnctncccncagaaaaagggggggggattaagcngaatngntanatnccattcacatnaanaaaaatttttaaagaagaaattgtagattttaaaagccncnttagacnccagggacncaaacaaaaaacnaancccccnnaccgcntgattttcagggngaaagggtacaataatccatatatttcnattacatggcaggaaaaacaaaagcattttaaaca

SEQ ID NO: 671647 - DNA, 106 bp, Homo sapiens
gcttctgcttctgccgcttcctgcttctgcctcctgcttctgctgcttcctgcttctgccttcctgctgcttcctgcttctgccactccagccagggtctggtgag

SEQ ID NO: 671648 - DNA, 155 bp, Homo sapiens
tattaaacacctacaacttataaactaaactttaagctgctcaagtcaccttcattttaatctaacagcataggccttctataggtataaattcggggctctgtagtccttactctcaatatttctaaggtacggattaccgcgggtaccgggct

SEQ ID NO: 671649 - DNA, 213 bp, Homo sapiens
cagatatcaaacagtggcccacactggcccagaccagacttaggcacagacccaccaaccaatccacaattcagtacagactacattttaatctttaaaacaaccaccaccatcaattaaggtggcttcaacttaaacacctaatgggacaaaatattttaccttaggaaaattcattccaaacccaccgtcacatgggactggtggactggg

SEQ ID NO: 671650 - DNA, 264 bp, Homo sapiens
tagccctgaagctcatgtcccggtgtttgtttgtgtttatctctctgattttttcctccttgaggcagcttgaaatgtgaaagggcaagggaaccgagctaacgtagggtggaaacatggttatatgtacattaagtgtcttactctactcaagtttgcgtactcactgtaagcccaatggggagaccaaggttctggtgtccacacacgcatgtgcagaggaagacagttgacataatgatgaggctagtgcagatctttatc

SEQ ID NO: 671651 - DNA, 658 bp, Homo sapiens
  misc_feature (232)..(232): n is a, c, g, or t
attttccgccaagtttgtaaaacacccccctggactttatttatttaagccattttttttaaacatccttaagttgaacttcaagatattttttgcaaaaataattccctgcatggcagtggctttatagaagcatagtcctactccttaagccggtgataaggcaatttgcgttgtacaagagaccctgtatgtctcagtacatgggctcaaccccaggacgtaaagtgcnctgtttacacaatgtatactcgcatgaggggcatgtctccagccctcagagcttccgatgcaccagtatacatgggtgttaggttcattcggcacacctcagtcaggtatgttatgagtgcttctacagcagtcacagaatgagcacctgacagtaggggtttcctaggcatacttttttatttttgtacataggcctcatacacaacttatgttctaggcatctgtataagtaatctcattcaggttctagagacaatcaactcctcgtatagcatcttttattgttcgatgtggtactatgaacccttgcttgtccgattctagttagttaatatacaaggtctaatctgcgaatagtcatgtcattgtcaataagtctccacagcggtattagtgccctcactgtcgcccatcactttcatgc

SEQ ID NO: 671652 - DNA, 1561 bp, Homo sapiens
cgttgacacaggtgatatctgtccagtcaatcacagtacttggaagagtagtcatgatatactcaatctgcctactgattcatctgaatgaaggagaattagaacgggacacacgacagagagtccacctcgagtgctatcgatagtattactagtaatacgaatagactacataatcagacgatgaaagttagctcagtgcacaaggagcagaatccatcaagtcattgtgattagcctaggtcgactgttgattgtgtatgaaaccttgcgtcgtgacattgaacattgcgcgtgtatatcgaagtttcccaagaggtgaccttctatgctcacgagcacgccatatcgatcatcaacgctgggttgtgtataataactcctaggtttggggcgtaggagccctacacatggacccagtgtgagcattgggatccctattcacatggtagattgtggcgcgccacttttgtgcggatgattctaacaccactcttgcacgttttctcaacaagtacgacccacggaatgcccactgggcaagtcaaaccattacaagcaggaagcaatatccggtacacgggagagctttcgtcgcgataataattttcccaaggtaacagtagccctcttgttctaatccctgtagatactcgtactctatcggagagagacggcaaagcgtcccagctttgttcccgcctaaataggatagcatcacgcgcattcaaggttctcacggatccgccaacggataccaccgccaactacaggtagcaacgtctccccgttttgcctattgtgacccataggctacgaggaacctctcacaagaaagggccgtattggaacaggggcaccaccacaaacatgggctaggggccataggggatcatgaggcaacaagtttcctctaaataacgctcttccccagggtttctcacggactgcgcacacttccacataaagtggagttctcttccccttggggcttagggaacagaagtcaaactgatgttgcctttgtaacacctatattggcgcacaagcctgtgaaggagaaccccctatccttaagtagagaccaccgacgagcgacagaaggcccaacttaacggcgggatgtcaacacacaggcgcgtgggacctagatgcacattagccgaaatcaaacactctgtgtacgggccctaaagggagggcgtggtttacacattggagcgacgatgtgaagagtctagaggagtaggagcaaatcagttcaccaaaggactacagtcccaaagcacccgctaacttggacaaatcccccgccaacagtatactagagacacaacacaagccacacaaaccacagacggcacggacacagagcagtcccccagaacacataacacacccatcccaacgagggccgccccaaagactacaagacaaccctacaacaccaaacgcccaaaacaaagcaaacaaacaaggcagggaccccatacatagtagcaagaacgcacgaacaatattaaacagcatatagaaccaaaggaagccacagacgacagaa

SEQ ID NO: 671653 - DNA, 459 bp, Homo sapiens
  misc_feature (454)..(454): n is a, c, g, or t
ctgggggctctgctgaaaagcagagattctttcccactgccatgtttgaatagtttggttagcaattccctgtagtagagaaagcatttgagaaatgttcgtgagatcagaagtcaaaggtgggtctgtcccactcacgcagcactggatcagtcgggctccggggcactcgtgcagagaaggccattctagagaggggagtgttctgctgctggctgccttgccgtctgcccgtgcacacagccagacttttccaccaagttaactgagtgaggtatgaggagtgttctgagatttctgtgtgtaggggcttctcccttgagtactgggaggcaaacctgtctgcgaatggcctaggcagggcagagtagggtggattttccctccaggttgtaattcactgtgtctatgacacaaatgttgtagtcaattaaagtttaatgttttgaactcnaaaaa

SEQ ID NO: 671654 - DNA, 865 bp, Homo sapiens
tgaagtgggaaagcgcgtgctcggaaagctatgccaatgctgttattgctggctgcaagtgtgcccaccgttcggtggatccctagtcgcctgagcgacgtgacgcgtagtaaagcggctgagtgcagaatttcgccacaggtccgtggagctgtgtcccggcggctaccgtatgtccggggtagccctgctttgtgcggccatggaagtgtcgtgccgatgattccgtgacactacgcgtgcgtgtcacggtgtagtctgccctcatacgggcgcgtatgttgtgcactaggatggtccctcattttgtgcaggttctgtgctatcgtgtaccattgggtgctacgtaacgttgacaaaaaaagaggtgcttgtcacaaagtagggaggacacacacatagagtgctcaggtacaggtatcagtgccccaggggtacgctcgaaacaaaaagcgcaccctttgcgggatcagggagtgagcattgtacttccttggaaacactatcatttcgcagatacgattagccttggtgtccctctatagaggaccgcctttgttgcgcgtgtcccctgcaaggggtacgtcggaaaatggtcccagggcaaatacgttcgaggaggttgacagagggtggaagtactttgtcttattgagggcggacatgggcatgaaggcgagcaaacataggcgtctaaaaacgattgacgctcgaagggaagtgagttgcgggcagggtttgcctgagtgtccctcgaggtgtttcttcaaaaaactttggatgcaaaacacgagggtgtccaaacctcctggtcacgcaatggtgaaagcctggatgcaatggcggtcccattacgtaaggcagg

SEQ ID NO: 671655 - DNA, 148 bp, Homo sapiens
tgcgagtataaccactatacaccacgacgctaggtgcctcagtgtaggccaaactctggagtcactagactggtttgatattcatacggtgcaatatagcataataggtctagtactagactacataggaataaaaccacatactact

SEQ ID NO: 671656 - DNA, 280 bp, Homo sapiens
  misc_feature (53)..(53): n is a, c, g, or t
agcgcatgtgctgcggtcattctagaggatcccgcatggtctgtcggttgctnctgaggtaatgaaaataaaaagaaaatgtgaaacagcaaaaaaaaaaaagcaagggtccggtcggttcattagtggtgacaaatgcaccactccaccactcgggtggggatgctgccagtgggggaggctatgtatgtgtggggacagagcgtatgtgggaagctctgtactttctggctcaaattggctgtgaacctaaaactgctctaaacattaaagcctattc

SEQ ID NO: 671657 - DNA, 278 bp, Homo sapiens
  misc_feature (269)..(269): n is a, c, g, or t
gtggctgggcacagtggccgacacctaaaaacccagcactttggggggccaaggtgggaggatcgcttgagcccaggagttcaagaccagtctggccaacatggtcagattccatctcaaagaaaaaaggtaaaaataaaataaaatggagaagaaggaatcagacataatttccatgtggttgttttacatttttactggttttcttactcttcttataagggatattttcataaactgattatatattttacaaaccaataaatgtntttgtaggt

SEQ ID NO: 671658 - DNA, 130 bp, Homo sapiens
agcacgagatagaatggatctggcagcagataagaataggtcatatgcgaatctcctgttagattagattaaaaacaaatttccattttagtggagaagttgcagataaatatttctccccgggatacag

SEQ ID NO: 671659 - DNA, 117 bp, Homo sapiens
gcccaggtatagttcaactatctttcgggtcctaaaaagtgcgctacgtgatctactcctctgtgctgtccatgtgctgtacacctcctcagcctcctctgtgctgggtgctgtcca

SEQ ID NO: 671660 - DNA, 339 bp, Homo sapiens
  misc_feature (339)..(339): n is a, c, g, or t
gagattcttagctcttgggatgcaggctcagcccgctggagcatgagctctgtgtgtaccgagaacttggggtgatgttttacttttcacagtatgggctacacagcagctgttcacaagagtaaatattgtcacaaccactgaacctctggctagaggccatattcacagtgaccataactgttaccatatatgacaggcctccttgggactttgaaatcaaatggttttgggaattggtcccctttgagaggcaccctccccattttgagatgtttaaaagacccctcatatttgcgcatcctctctttaaactataggtaattaaggcagctgtan

SEQ ID NO: 671661 - DNA, 713 bp, Homo sapiens
tacgctatctagaattgtaccaaccaaaatctcgtattggcagatcttgacaggctggacctgcaagatgtggcttgaattttaaccatttattacataatctctagtgatcatgcatctagttatcataagaaataatttaaaaggtttggtggctgaaagccagctaagtggtgcacgtaaaatacttaagttattcaaagacatgtaatctttctttgcaagagtaatttaagcacatgggaacagattctagactttcggtcaccttggcaacaacaagtgcccatctgctggctagaaacccttttactactttactatcatattcatgggtggcttgagctcagctcaatctgagtgcagcatgacggctggacatactaactaaccaaataaaactgacggacgtgggtccaaaaacgcttacacttgcgaacatttactaactttactcctaaacgttaactggtaaccatctgaccaaacaacttttcaccttttctgggaccaaatttattcacacccacacaccattttctacaactttatacttaagaaccattggtcctaccaagaggctcaatttgcccaaatttctaaggaattcatcttcttaaaccctttggtgtggccccaaggacacatttcctaagcaacattttccaggcttgaaccttatgggcctatacgtaatcctatttactcacgga

SEQ ID NO: 671662 - DNA, 108 bp, Homo sapiens
tgcagaggcgtataggttatgtacgtagtctaggccatatgtgtgggagattgagactagtagggctaggcccaccgttgcttcgcagggggcaagactagtatggaa

SEQ ID NO: 671663 - DNA, 424 bp, Homo sapiens
  misc_feature (13)..(13): n is a, c, g, or t
  misc_feature (38)..(38): n is a, c, g, or t
  misc_feature (43)..(43): n is a, c, g, or t
  misc_feature (265)..(265): n is a, c, g, or t
  misc_feature (355)..(355): n is a, c, g, or t
  misc_feature (417)..(417): n is a, c, g, or t
aaatccaccaccnctttggcccgtgaatattttgcgcnaaagnaaatgcgaggcgcaatcatgactgagcgcacgccagaacgaaccttctgagcgatatcgtcaaatttcgtgtgatggtcgagatgaattgccagtggatggtgatattcttcgccatcgcgctgaccagcgccaacagattttctgtaccagcatgagtaaatgtccaggcgttccggcgatgatgaccggcgcatgcaggttggcagcggtttctaccacnacttgcatcgtttcgagattgtgaatattgaatgccggaaccgcataaccgccgcgctgtgcgttgttcagcatctgctttgtcgatacnacgtacattttcatatcctgtcgtttgttttcgatttcaaaatataatgaaattatttgttnttaaata

SEQ ID NO: 671664 - DNA, 902 bp, Homo sapiens
tttaagattcagttcagggggaaatgactagtttcccagcactttctggttaccatggggagcgggtgatccacatccaaagcctgcgggttacactcagggactcttgccaactcatgaataatatcgctggaagcccggctgccgcgtgcgatgaatgacgacatgtgttcccaattgtcatcatgaataattgaattatggaccggcccctgggggggggggggattaagggagggagcacaagaagcgctgcggaccgctgttgtgaggggcgggtcgattacaagagagccgcgccgacgccgtagcggcctatgacgtgccgtcagaatggacgacatacccggccgttattggtgctgcacgtgggcgaagtgagtgtgttttgttgtcgtcagcggtcgcgcgtttcggtgtgtgccagcgccggggtgggatgagctcgtgtaccatggtgagacgtgttgcggggtagcaaggagggatcttagcgtaaccacacggagccggggtctttgtattacggggtgcggacgccgggagtggtgtggtcgaggagcggcaggcgaagcgttgtgggatgcggtatggcgcacatagattgttagaagagtagttgaggacgttcggagcgccagttgttaatcgtcggggtagatcgagaaaggcgtgtcatagtgcattggtcgtgccggtgttgggccacgggtggcgtgtgtgtgcagtgtattgactcgcccggtgaggcgtgaggatggtagtgataacgccggagcggcgtctcagaggggtgtggggagtcggaggacgatgagtggcgtgcgttgacacgtgcagagcgcgggtggcgggagatgcgtgcaccgttcagtgtcgtatggaggtggaagtggggagga

SEQ ID NO: 671665 - DNA, 333 bp, Homo sapiens
  misc_feature (150)..(150): n is a, c, g, or t
tgtgagagaacaggaagacagtagacgactgtaaaaaaaaaaaaaaaggatgaaaatacagggtgagttttggtttgagaataggcatggagtttccagaaaagcccaggacaaaaggagagcagaattaagcagaaagggtttgggganagcttgcaaaggctctctggaaaaaggagagccaccttgtaaaggcttgtatttgggagaagtgctgaaatatgcatagggcacactgaagattacaactgggccttaagagatctctatggaatccctcatgcaaaagatgtttccaggcactggctccaggcagcaggcatcaagaattgt

SEQ ID NO: 671666 - DNA, 373 bp, Homo sapiens
caacctggccaacacagcgaaactctgtctctagcaaaaatacaaaaatcagccaggcgtgatggtgggcgcctgtaatcccagctactcaaggagccgaggcagaagaaccggttgaaatcgggaggcagaggtcacagtgagccaagatcaggccactgcactccagcctgggcgacagaacgagactctgtctcaaaaaaaaaaacaagaaaattttgcatgcagaacactgccagctgtgtgaacgagtgaatggcaggaacaccataatccttggaatttttgaaatcctggggccacttcaaatactttctcttctctgccattctttctaccctattcattcattcattacctcaatccatcacac

SEQ ID NO: 671667 - DNA, 244 bp, Homo sapiens
gggcaagagccttaagttgagccttatttgcagaaccattattttacttaaatatctagagaacaagcctttgcagggtgttcgggcttacgactttaacttcaacaccttggaggccgaggcaggcaaatttcttttaccccggagttcaagaacagcctggcaacatgcgagacttcatctctcaaacatatataaaatgctggtgcatgctgtgatcctagctactcaggagcttaggtgg

SEQ ID NO: 671668 - DNA, 250 bp, Homo sapiens
gtggtggctttaggatcccagtttctgctcatatttctccccttttgcgggttcggctaacgcggagagcacgccatgaaggcctcgggcgcgctatcgatagtcaaggtcgtgacgtcgcagactgctggcgcccaaacgccacacgccgcccctctaccgcatgcgaatctttgcgcctagtcatgtcgtcgccaagtcccgcttctggtactttgtatctcagttaaagaagatgaagaagtcttca

SEQ ID NO: 671669 - DNA, 141 bp, Homo sapiens
  misc_feature (109)..(109): n is a, c, g, or t
ctagacaccttgacggtaccaacaggactaggggcttgtatgaggtgagaagggacaggctaaggcagattggcatgtctggggacattttggttgtcacatcttccangggataggggatggggggggactattggcatc

SEQ ID NO: 671670 - DNA, 419 bp, Homo sapiens
cgtcgacataggcataccaacggaaatatgattcgccagcactttatgacgtggatcaatgaagacggcccccaggtcgtggggtgctaaagctagcgttggggctttagctggacggttgattttccctgaagacacgctttcggcaaaaacagccattctgtgcggtctccaaaatttagggtcgactcactatttccaattgactgctgctcaaaagcaattgtcttgataagctctggtaccagcgaatggagtcgtagtgatgcctcacatgatagccatgcctactactctcgaatcggtcaatgacgacaaaattgcgtttgctatcgaagtgggggcagcacaccacgttatcgtgcaaaggcgagtttcaggtcgacgcggccgcgaatttagtagtagtaggcggccgc

SEQ ID NO: 671671 - DNA, 167 bp, Homo sapiens
  misc_feature (54)..(54): n is a, c, g, or t
gggggggggccccccccccccccccttttgggaaacttcttttttgggccaaancggttttccccccccggttttggggggcccccttaattttttttttctttaaaccccccccccccccccccccccttttttttttaacaatttaaaattccccccgggggtta

SEQ ID NO: 671672 - DNA, 783 bp, Homo sapiens
tgctctgtcggtttgtcttttgtctgcttttttcttttttttcctttttggttttggggtgatgtggcttaaatgcaatagttctttttggggacatatttctgccaattaaagactacaagggcacaacttttttttaaattcccatagagaaagatactttaaaaaaaatcttactggatggttttggtgacgccataactaaattcatcggtaaaaatttggcactattggtcgaaaagggagcaactgtagtttggggtccactggtgggtattggtttggtattggcttggttttttcacgagattacacatggtttctgggataaggattagcttctcgaagtgtccatcatttcggttgtaagaacgcttaccatatgtaatggtaaccaaactccagtattaaaaatctctcatgttggttttctttatacaaagcaagatacgggcttttaccatcggccattacttggccaaaatggttggctaccttagtttaaaaaacaatctcaaaacaaacagactggctcacagggggtttataacaatcaggcagtggactccaaagaatttcttattaactggaaatgtatactattggcgactaaaccctctcttccctggttgagctctggattcctggcattagggggacacttggtggacctaccgtttttccccacttctacgatcagatttacaagttggctaacattcacttatccaaaggcaaccccaaccaaacccttggtctatcacccacgtataaacaaccata

SEQ ID NO: 671673 - DNA, 108 bp, Homo sapiens
gctcgtccattgtgctgacaagatgaaggagatctcgtcggggtagaatgcttggcctcccccttgtagctcacctgaccttggcttgttccgtcgttgatcacctgg

SEQ ID NO: 671674 - DNA, 809 bp, Homo sapiens
ttatgcgcccctggacgggtgtcaaagtcctctgcaatggatgcacgagctcctcggtcgtgcatggactcagacctggacatattatgccttggacactaagtttcggtggggaggcggtttacctatttattctgtgagattactgtgatgtccagctaggccaggggccgtgcacctgggcactgttgccagggcttcttgtctgcgcccccatccctcgaggtagatctggtacataacgcccctgctgcatggtgtgcatacctgttggtcgtaccccggggcagcgtctgatgggcttgtgaacgctgatgttcctggatggtgggcctggacgcgtcgggcgcggcgcgctcgatgcatagttgttgatattggagggtcctgtgtgctttggtacgtctcgatgtggtgcaatggctttgggctcttggccttgtcttgtgttgcaggaaggtcttactcactgtttgcccccctcttgtccctatgtggtgttatcggcttgtgctttgcttgatgtgcttgtctttgctcgatgtggtgtgtgctgtccatgacactgctctgccatcctttcccttgccccttcaccacgtggcgcctcgctccctttcccctctcagctcgccctttgcggcccttcctgtgcgctagtcctctgccgcctgttcctctcctcgtcctgcccttgccccccgacacagtggcctccacggtcctctatcatgccttctccctcgccttgcccacccccgcactggtcaccgccccccgcccacttcgtcccacttccttcccccttc

SEQ ID NO: 671675 - DNA, 384 bp, Homo sapiens
gccttagaggatccgatttatcccaacacaggactcttcgtaacatgtaggaagagtgagagcaatctgacagcatggactcatcatggtatgaagatggtttgggtgtattgttggttttggttggtttttgcgaataggatctcgctgtgttatccaggctggtctcgaactcctgggctcaagggattctcccacttcagcctcccgagtagctgggacaacaggcatgagccaccccacctggctggtttggggtttatagggtgggtttggggttttgactacttttttgggggaaatgtttgggcaagaacatgtgaggacagggataaggccgacagggggctatctgggatttagaatggtgttgggggataacat

SEQ ID NO: 671676 - DNA, 122 bp, Homo sapiens
ccggtcagagctgcaggcagttttgagccatgcagctgccctggctccagagaaggcctcgaagtggctgctgtgctgaggatccgggccgagtcgggcaccaagggactcttcaccggcat

SEQ ID NO: 671677 - DNA, 289 bp, Homo sapiens
tcacgctgaccgaatttgtgccaataagtacatggtaaaaagttgtggcatcgaactcttacatatccggtagcgggtccaacacttccacgtcgatccgcatcaacaggatgttgtcctgcgctggtagtgacagacgagcttgagctggaccttttatggcagtcggagtctcgacattattagtctcgcgttattttatcagagcatagaggtggccccagcgactcagccactatggctactagaaaagccaggctggcaagagactttcagtggtcactcagta

SEQ ID NO: 671678 - DNA, 843 bp, Homo sapiens
  misc_feature (1)..(1): n is a, c, g, or t
  misc_feature (83)..(84): n is a, c, g, or t
  misc_feature (192)..(192): n is a, c, g, or t
  misc_feature (388)..(388): n is a, c, g, or t
  misc_feature (438)..(438): n is a, c, g, or t
  misc_feature (488)..(488): n is a, c, g, or t
  misc_feature (490)..(490): n is a, c, g, or t
  misc_feature (544)..(544): n is a, c, g, or t
  misc_feature (549)..(549): n is a, c, g, or t
  misc_feature (553)..(553): n is a, c, g, or t
  misc_feature (555)..(555): n is a, c, g, or t
  misc_feature (557)..(559): n is a, c, g, or t
  misc_feature (565)..(565): n is a, c, g, or t
  misc_feature (567)..(567): n is a, c, g, or t
  misc_feature (578)..(578): n is a, c, g, or t
  misc_feature (583)..(583): n is a, c, g, or t
  misc_feature (594)..(594): n is a, c, g, or t
  misc_feature (603)..(603): n is a, c, g, or t
  misc_feature (676)..(676): n is a, c, g, or t
  misc_feature (697)..(697): n is a, c, g, or t
  misc_feature (716)..(716): n is a, c, g, or t
  misc_feature (744)..(744): n is a, c, g, or t
  misc_feature (831)..(831): n is a, c, g, or t
natttcatagataaagtggcaatctttgcagcttctattgcaccaagtatcgaagattaaaaacacaaaaaaagaaacgattnnggtttgttggaaacactgcaaatagccaagtacagtactttggtaaataaaaaataaaatggttcagatgaacacaatccgtggaaagaaacaatctagggggaaggnactatggacatcagacaatggtcacaattctcaccatcgagctccatagataaggcaagacttgctaagtctatggatcacgaccccatggaggtcttaagtatctccagactgaagctagaacaagtatagtgcaattagaaagagagaaggcccctcctccacggatacatccacccctctgtaaaggagactnacgcatgccaacacttctacatgggaaaggggagcccccgcgcgctgctnacgctctgcactcctggcccttttcttctttcctctgagcttagtgctgntngaggctctggaagaggcactggggaggccaagggccttcctactatgaaaaatnaactntaanantnnnaaaatntntcaagcctctnaccantcctgctcganggacctgcnagcgcgcatcaaaccgccagccgagcgctctgctggcctgagcctcacaatgcattgtcatggcatgcgctgnccagcctgcccgccagcgcancagcgcccaaggcatgcanagcccaggcccacagcagagctctgctncgcgccaatcgccgcccagcccgccaaggcactgcgcagctgagcagcagcagcctctggcatcacggcctatgaacctgccttagnaataaaattccc

SEQ ID NO: 671679 - DNA, 201 bp, Homo sapiens
ctcgtaagaatagtgagaatgatgggggatgtgtacctggacggtgtgtagcttctgcctgagaaacaagtaagactttgagggctggggaggagaaaggagggcatctggcctgagcaccgcctgagccaaggtgtgggggcaagaaccggcatgttccttaaggtgtgagagaaagggaaggaagtgcagggattgggg

SEQ ID NO: 671680 - DNA, 322 bp, Homo sapiens
aggggacacgcactttcgacaagtctgcacaaaggcgactctttcctgacgcgtactgaatgtcgtcaatatttaagttaccatcaccttaacccgagagttcactctcacgtcttggtctgtcattcaaaatttgatgccgacgattgtcttacatctttttccaatcccgacattcctcacgtgtacgcaaacaggcaacgcaaaaaccggttttcccctcaaatttgcatattttaatgcaggatgacttgacactcatactttaggttgcaatctgcgagtgaacttcgacagtaatgtgcgacaagccttgggccga

SEQ ID NO: 671681 - DNA, 329 bp, Homo sapiens
cacaggatccagcgtatacatatcaagacgttttagcccggatccgatggcaaatgatgagcaagatcgatggcggaggcttttagatgaggagatgtctgaagtgatttctccttacctagtagagcgcgatgggatttctaccgaactggctacagtacgcgagcacaaaaggcaaatcgaatatgggattaaagtgcggaagcaacagaatgaaatattcggcgagattgaaacgttaggccgaacaatcgatcgcataactttgcagcttgatgagttacgcaaaaaagctccgtcaatcggagaagtgttgtcggtgcttggtg

SEQ ID NO: 671682 - DNA, 342 bp, Homo sapiens
agccgccgccgtggattcagcagcctcccccttctgggccctcgcttcccgacgttccgttcccccctgcccgccttctcccgccaccgccgccgccgccttccgcaggccgtttccaccgcggaaaaggaatcgcctcctaatgtcgctatccagaacctccactctttcgacccctttgctgatgcaagtcagggtgatgacctgcttcctgctggcactgaggattatatccatataagaattcaacagagaaacggcaggaagacccttactactgtccaagggatcgctgatgattaccgataaaagaaactagttgaagcggtttaagaaaagttt

SEQ ID NO: 671683 - DNA, 349 bp, Homo sapiens
gagtgcagaggcgtgatcttggctcactgcaacctttaactctctggttcaagcgattctcctgcctcagtctcccaagtagctgagattacaggcatgcaccaccacgcccagctagttgtgtatttttagtagagacagggtttctccatgttggtcaggctggtctcaaacttacaacctcaggtgatccactcgcctccgcctcccaaagtgctgggattacaggcatgagccaccgtgcccggccgagtatcagtcttttaagtggatgcaatttacttctctttgataaacacctgggagtggaattgctgagtcctatagggtaagtgcttatactgttctg

SEQ ID NO: 671684 - DNA, 659 bp, Homo sapiens
tccgcacatctggcctcaagtgatccatccaccttggccctccaaagtgctgggcttataggcgtgagccaccacgcctggactgttaaaggaattattaaacaagaaacataaatgaaaattaatgcaaactgcattcttattttccttttacttattaaactatttaactttgaatagtttaaaatattttcaatacctatattgaactgccctatctaaccatccaaatacaacacttcacattttttagtaaaggtggtgcaatgctattttaaaaagtaatgagctttataataaaataacatgctgctgcaatgttcatgcggctttccactaaacgcataaagcaaaaaaatcacttgcatttctgcacagcttcatgccatgaagttcataaaagaatatcagcaactcttaaataacagtaaacattaaattgttcctaaaatattacaatataaatatacaacctaaaaaataaattacataggctaaatatacagaaatcaggtgggaaaccattcatatgtctcctgtcttctgcggcatctttcatacaattcttacaataaaatacaacacatttcatttatgtggcagacaaaacgctaggctatgctgacagccaaacagcacaaggctctctgacaaccaaa

SEQ ID NO: 671685 - DNA, 944 bp, Homo sapiens
ggaaaaaaaaggcgacatggatgaggcgcacatagaccaggtgagagcgaaaggccttgtgtgaagagatcgatcgcgagtcaggcaatgacggaagcttctgaacaccaggaagtggacgggaacccatgtttggtcacgctgggatactgtgtggtttccgaggaacgtaggaccaacacaactcgaaccattatgctcaggacttaattgggctagggcattctagataacaccttgtccccattctgtttccaggactcgacgctcgcgacgcaggcctatcggatgtgcgaatggcctccaagctatgggccctgcggtcgataggaatgcgctggtgtgactagctctgcatggcagaatcttgcagtggcgtgtacgaaccagggtcattgagcttgggaagtacaggcccggggaaggccggggccgctcgtggtgtatctccaaactcggtcctcacaagcgaaacgcaatcttgtttggacgagttttgatccaagcgggcaaaactggctttccggcaaacggttcaaggatccacacggaccgtgcgggagaggcaatttaaattcaaccctccgtgaagcgaagggttgtggttagcttccgcgccccgaaagttaagctggcctagcaaaaaatatgccggttggactttacttcccagtattaatggcctgggagtttataccacaaaatttttggttctgggtggaggtagaacagtcaagactcttctgggttgaggggtagcgccattcggaaggcccaggactaccacgtactaagttaacatatagcttccccaattaagggcgttacgcgtttcccaggtcaattggggatacacgtagggcataaaactggtcctaatgtcaagtttgttgccacaagttgaacaggccaatcttgactggtttggggtccagcattggaac

SEQ ID NO: 671686 - DNA, 385 bp, Homo sapiens
gaggatcgtgttgaggtgtctgttcatgagctgagggttgggttacccagaggagttggaggaggtgagtggggctggggaggtggaggaggtggtgaggaattgggtgggctggaggctggatgaggggagagaggggtatcctggcgagtccccgtcttctcaaagggcgtttgtttttccagatccaggcttatgacccagagcactgggtgtgggcgcgagatcgcgctcacctttcctaagagctccagggaccggggaggttcataatgattgacgcacttgagttactgattggggtcgagcgcgtcagctgaagctctggtttacatctcgtgccagctaaaccaaggtcgaagcacagagcatgagcacttcatca

SEQ ID NO: 671687 - DNA, 639 bp, Homo sapiens
ggcaagactccgtcaaaaaaaaaaaaaaaaaaaaaaaaattgatttttgggcccccctttaaaattggagccccattcctttttccaatcgggcccgaaattagggaggatgactgtttcggaatggggggtggcctctctcgcttgccaggggccctttgttcagagccagccgggcttggacagacgggccttcccttccttcttccaatctgaccgggccacctgtgctgctctcgggggctttaggccaccggcttcccttgatccccaagaggagatacgccccagatggcactggaatgtggtcggcatgagagcgcttgtgtgcgatgcgccccggcttggtggctccccttctttgtgtccctctccattccgtgatagtgctgtcccgtgggctcccttttgcattgttgttccgtgtgtacagaggtgagcggcggttatggcgattcaaacatcaattggggcctcttgtggcttgctctcaaagaggccaaattttgtgacttgtggcaagagcatttccaatcctcctttggaacaccaaagaattcccttgaagttcccccttaaaccctgggccctttgttcccaaccaaaggggtaaatcggggaaatggggggaatggcaat

SEQ ID NO: 671688 - DNA, 742 bp, Homo sapiens
ggcaggctgatggaagggcctctagggaacttggcactttctataccttggtactatgcatgcctatggattctacacccaataatgatattactgtgaacccatctgtaagaaactgcttcggaaatcattgtgtgtatgtaaataacacaacatagaaccaggagggaaaaaagtctgcagtaatgcaggtattttttccttccgtgtaattcccggttgagcttaaagtcctttaattttaaatcccctttggttccttgcggtctgggttccttcgggtctatatgggtgccctgatactccagcagagatcagaagggctaccaagatccattctatccatcgcgttaatggtggctggccattccaagctgtggaggtgtctcttaacaaaaggatacatcaccaggttggtggtccctgggctacttcgttggggatggcatagacgtggacaacacatttaaaaccacacttaccttgggtaaaccatgggtgggtacaacaaattaccatttaacttcttaaataggtaaggaaggcggtagaatgtttttaacagcagtggacaggcgggctttttaaatttcctttacattccgtaacatgggtgggcgaaaggcagttctgtttgaacacatccagtcttgggttgacacaaggttcccattggtccacaactggatttctaattaacaatgtcggtgttacagacaaacaaagacacaaaaacagtttg

SEQ ID NO: 671689 - DNA, 603 bp, Homo sapiens
  misc_feature (515)..(515): n is a, c, g, or t
ggtaacgctgagctcccttctttgtcagagcacctcggctaatgccagcggcgtgttcattaccgatgcacactagatgaaggttgactgtcggactgaagcgtggcgcgatgatcattagctagcctagaggctgattggctaagctaaggaactgcacacaggatcaattgaacatcatcatgcatcagcgaacgaagctgctgacaccgttgcatcatgcattgctgatgagtcctgtgggaagtgtgacaaaacactgtattcccttattggcgacagaccatgcacagttgcatctctgagcgaacactacgctggggtgcttgctgtactgaacacgagcctgctagagatgaaagcttcttgccgcacactgatgacaaccgacacctacagcctatggccagaccatgagttataccatgtgcactgcttgccatgacaaacaagacacactccagacaataggcttatgtgaaagagcccgaagacatccttacatgtatgccccnggaactctcattgttcttctgtagtcaagctagacgaacttcagactcagtggacgctacgttgacacaagagactaaacgtgccgct

SEQ ID NO: 671690 - DNA, 359 bp, Homo sapiens
aattagtatgggaaattattagcaaataaatatttttcctttaattttttattgtgaaaatgagaccccaggcccaggctaccatgcagggctaattctttataaagctagggtcttgccatattgcccaggctggtctccaactcctgacctcaggtgatccccctgcctcgacctcccaaagtgctgggattacaggcatgaacccctgggcccagctgacaaaatgagtttttaaacttttttttttttcagttttttttcccctttgaatcaaaaatataatttgcagtatcatacttgtttatattacattgtatgcctccctattcattaaaaatcaagaaagttttattgta

SEQ ID NO: 671691 - DNA, 258 bp, Homo sapiens
cttgagattcccgcacgactctaagcactggtacgccgtcgtcatgagccctgtggaaccagtggacggactaactacagcgaagcacaggcccaggaagaaacgctcgtcgccactagctgctgtccgtctgggggaccgtacggcccggcaccgggggtaacggagtgtgccttccgtggtccccacatgggtcaggctggcatacgaccagtgcagcaccacagtatacacctgtgacatcatccccatcagggc

SEQ ID NO: 671692 - DNA, 376 bp, Homo sapiens
  misc_feature (6)..(6): n is a, c, g, or t
  misc_feature (28)..(28): n is a, c, g, or t
  misc_feature (209)..(209): n is a, c, g, or t
  misc_feature (214)..(214): n is a, c, g, or t
  misc_feature (217)..(217): n is a, c, g, or t
  misc_feature (356)..(356): n is a, c, g, or t
  misc_feature (372)..(372): n is a, c, g, or t
agcagnacgtcggccccgaatgttgganagtcttgtgacgctcggccccgttcacgaaccgccccggattctctcccgccaagtaacgcagggctgccgatgacggtatcgggcgggaaatgcgcctttcgccgttccagcatttgaagggcgccgtggatatgggcaagctcattctcgagcgcgtagtagcgattcatatggtcctncgcgnatntccgcggctgatgatccgtcaaaccggaccgacacgcttgatcgcgctcaatcgatcgatgtatcggcaggccgtcgcccgcgaagcacctgaatttgtccgttgatacagatcaaccgcgccagaagccggcacgccntccatgacgccagatncttg

SEQ ID NO: 671693 - DNA, 130 bp, Homo sapiens
gctttgaggcaggacactggtgagcacagccgtacgactttggaggtgacccccaatgtgagccacagcaatatctattcacccaaggaaacaatccgcagaagaggcacgaagtgatatgcactacagt

SEQ ID NO: 671694 - DNA, 916 bp, Homo sapiens
ggccttggacgaagattcggtatgagaagcctgacagacccttcgaagttggacaggtggtaaagagctgaaaatggacatcatccccaatgcctcaggaacgtagccctgactttggtagacacaggcattgggctatgaccaaagctgatctcatacaataattgtggtgaaccattgccaagtctggtactacagagcattcatggtatggctcttcaggctggatgcagacatctccatgcattgggcaggttggtgttgggctttgtattctgcctacttggtggcagagaaagtggttgtcgatctacaaagcacaatcgatgatgaacagtatgctttggggaagacttctgctgggcaggtcccttcgctggtgcgtgcgtgaccatggttgagcccatttggcacggggtacccaaagccgatgccgtccatctttcataagcaagattcagacagaagtcacctagaaagatgcaggccgggtcaaagaggaagtcatgtggacagaacgctttctgcaagttgcaatcaggctaataccggatgctagcctgtgttgattgtggcagcaagcggaaaccgtaccagggaacgggtataacttgaagaggagaagtagcgaagagcgaggaagagccagacggaaccgggggggaaggaccaagacaagacgaggagaagaagatatcaagaaaaagatcagatcaggaaaacacacggccaagaaggacggcagaagatgaactgccggggggatgaggaaatctggggagagggtacagatccacgtgggggggcatccagagcatggtaccaaacgaatatacacaagacaagaaatcggaagagatcaaacgagaacggcaacagggcaagtacgggaacccagaaggcacggaggccacag

SEQ ID NO: 671695 - DNA, 185 bp, Homo sapiens
cccttaatttagttgggttaatttttcaaggggagggatcccccgcttttttttttggcatttgttttttcaaggggtttccatggtatgaattgggctttttgcccccaaatttttgatttggggttgtttggcgggatttttttttgtgaaataatcccttttataaaaaatttgatgggcca

SEQ ID NO: 671696 - DNA, 184 bp, Homo sapiens
gaggcggtacccatgctcatgttgtcagcttattatctttttcacttcattctccggtttggaaccagattttaacttgtggggcccccttgttcctcgagcttccttcctgttctgggaggcggctgggaggcgcgaaaggccgggtccagtcttagacccctcttgcattgggccagctggt

SEQ ID NO: 671697 - DNA, 220 bp, Homo sapiens
gccggtcccactgaaagaaatgaagcatttattccaaaatatatctcttgacatattttgaaacagccctgcaaagctgtctcttgtggggaaaatctacattctatacaggatccccttcctttcccaggtcttttgctgatccaggagagatttaactaagagtctagcaccttttacagtctgatgagacatctgccacctattctttttttttttt

SEQ ID NO: 671698 - DNA, 252 bp, Homo sapiens
  misc_feature (75)..(75): n is a, c, g, or t
  misc_feature (80)..(80): n is a, c, g, or t
  misc_feature (82)..(82): n is a, c, g, or t
  misc_feature (175)..(175): n is a, c, g, or t
  misc_feature (177)..(177): n is a, c, g, or t
  misc_feature (188)..(188): n is a, c, g, or t
tcctccctgcaccagatcctaactctgacctttcaccttctctctctcctgaaggaactcttctgagtggacatnggccnangccttacctaagcggagagggagggcaggggctgctactcttctctgtaaccttctctgatgggttgtcactttgcacgtctactcttccacntngcactgccccnagctctctgccttacctgtgttatgggcacttaagcagaaatacagcggccattttaaccagca

SEQ ID NO: 671699 - DNA, 171 bp, Homo sapiens
cctatatgaatgggcagctcacggaacgccggatccttaacccactgagcaaggcaggatcgaaccctcaacctcatggtttctagtcggcttcgttaaccactgcgccaggatgacgggaactcccatttttatacattattattcagaccgtcaggaatgctaggcatc

SEQ ID NO: 671700 - DNA, 104 bp, Homo sapiens
gagctcgtccctgttgcttttgcacctacgggggcatctgagtccagctcccccaagatgagctgcagctcgcccctgagttacttgcagctcgcccctgagtt

SEQ ID NO: 671701 - DNA, 1030 bp, Homo sapiens
  misc_feature (745)..(745): n is a, c, g, or t
accaaatgcctattgtctcccgaaactttgacatctatattagtgttgcaggtcatatatgtacatagaggaattgatagtccagtggtacatgtacgaatctcctgctaagtcgaactactaggaaagcaagacgagaccaaatggaataaatggatgaagagattgaatgaacatttttctaaagaacatctcgagctcaagattaccccagataactttctgggcttcaaaatcttgcttgctgtgtgtcctcatctgtaggtggcgcgagactatacatctgattgcctaagccagaaacctcatagttatacttgacgtggccaggacgacatattattgagtttgttcacagaagatgtcacgcttattgaaggtcattgttcttatatggatacataatgcgaacagtgtaataagtgtcatatggtcaatgagttggaatacatttatgtacttgtgtgactatcctcatagatagagaggacaagatttctattcacgacgcggtgaatttcctatgtgtgccatcccaatcaatcctttccccttgcgtggttcctaaacaatgactctttcctatcttttgagaaagattagaaattgttttctagagttccagtaatggctcatacggggtcgaggtcgtgcgtggtgctgttacagatacctgagactgggtaattataactttgggaattattctcacgggtgcggatgcttgagaagtccactgagccancgggcctagcagggtccgtggtcctgagggcccagtttctcaacttgagagctgggggtgtaaaacaggcgccagatgggaagggggcgaaggggccaaacaaaacaaaccacgggcgggtggggggagcgcgcaaaaggggagcacccgggaagagtgaaaaacgccagagcagccataatcgtgggggaggcccatcggggcaacagccacgaaaaatggcgcgggcacgacagggagaggataggccgaacacacaggatcacagaaaaaaagcacacgggg

SEQ ID NO: 671702 - DNA, 332 bp, Homo sapiens
gctggacatgatgggtcacacctgtcatccgcatgcactcttgggaagctatggtagtcagaacagcttgagcacaggagtttgagatcagcctgggacacgtaatgagacctcgtctctatcaaaaataaaaacaaaaaccaattagccagtgtgtggctggtgcgcacctgtagtcccatctacttgggaggctgaggcaggaggatcgattgagcctgggaaatagaggctgcaggaaactatgcacggagctgtgcaaccagtgcactccagcctgggtgacagagtgagaccttgtctagaagaaaaaagggtggccagaaggaggt

SEQ ID NO: 671703 - DNA, 292 bp, Homo sapiens
gctcgacaaaaaaaatcaaacttacctgggaataatgtataaacgaaattttgagaaagtcatgtttttctcatatttactttcccaccataaaactttatctttccatattagaagatgatctaagagtataaatttgaagggtttttttttttcaatgttttatgcttgcactaacatttttttcctgtcacactaaaagcagacttcgttatgctgctcacacgtgaagtttatgtgagatatatggaagtaaatgtgtgtaatgagtgtcaaaacatttaatgtcaag

SEQ ID NO: 671704 - DNA, 582 bp, Homo sapiens
  misc_feature (21)..(21): n is a, c, g, or t
  misc_feature (42)..(42): n is a, c, g, or t
  misc_feature (44)..(44): n is a, c, g, or t
  misc_feature (128)..(128): n is a, c, g, or t
  misc_feature (262)..(262): n is a, c, g, or t
  misc_feature (315)..(315): n is a, c, g, or t
  misc_feature (354)..(354): n is a, c, g, or t
  misc_feature (356)..(356): n is a, c, g, or t
  misc_feature (371)..(371): n is a, c, g, or t
  misc_feature (515)..(515): n is a, c, g, or t
gctgcgcctactactaccctngaccagtgatccatctgcctngnctcctgaagtgctgggatgcaggtatgagccaccatgcccggcttttctttccttttttaaaaatgcaaattaacaaaaatgtnggagaataatgtttcaatacaatattaaggggagaaggaagatgctaaccaatgtgtataatatggtgctttttggttaaaaagttattgtctgtatagtaagtgtatgtttggaaatatatcatctttgaaanggcagagaaaaaactggaaacagttctatagaggagctgagcagttggaggcnaaggtaggaaagctgattttcattaaataaaagcctttngnattctatactattanctattataaaataaatacataaataggaaggaataaatccattttcaagcctaaaatatctgaactgcattatatacagtatgcataccgttgtttgtaatcttccctttcaggctttttactagcttcattacagtcggtgtnccatgggtttctggttacacatttgttactaaataggttatgaggttaagattagagtcatataaat

SEQ ID NO: 671705 - DNA, 887 bp, Homo sapiens
tgctgggattataggtgtgagccactgcacctggcctttattattttatttatttttaggtattcttgccagtacagcatataggtttatctaccccaattacttactggggtttggtcccacatctacataaaggcccaaactcatggaagtatcacaaaaccgttacatgcaggccgtgtgttgctcgtggttagtcaagtggctgattgtgcgttcaacgtgtcgtcagttatgctatgtgcagcctgaaacgtggctccattaaacagtagaatagccgcgggtctcagctcatctctgtgcaaaaacaatgtgcatcatgtgttacacacaagttaaatctcgatatacagtgtggtttgtgacgaaaacacggggcgtaccatgtgttttcttcacacacgtgggtgtggcccatataaacggcctctcaggataaccatttgtgtctccactttgtgtgatagactccatttgtgtgggtgtgctccaccacactgtgttataccccctataaaaccctgtgcacgagggcaactctcaagcgctaacgtgtggtaatattatatagtgtgtgagagtgccaagcaaaaaggcgaaactaaccctgttgtggtgtattcgtgtggaactctttgtatatctcgccctaaaagtggaggatcacctatataaggggcgacgacggggccaactaacgcgtcggaaccacagggaaacaaccacagcaaacaacacccaaaataaggtgtcctacttgtccatattgtgtgtggccccttatactatcttgggcataacgaaaacacacagttatatctgtttattatctccctctccggtggcatcccccttttaataacccaagacaactgttttggccc

SEQ ID NO: 671706 - DNA, 381 bp, Homo sapiens
ttatgtgaggcactatggttgttggcctataggcagggaatgtgataaggccctagaactcgatttaaagcactacactaaacttcgtaaactaaagtcccagtgcagtatagaatggcatggacagaaagactctagaggtgcagctccgcaatggctactttcttgattcagtgctatttctggcatcatgtgctgcaatgtgaatttttgcttatctcccaggagtcgaattcctcaggtcactaaaggtgtccagcagcctctactcaaatcgttttagcatttgttcgtgaacaagctgtgttcactacaacatgaactcttacaccaattgcacatccaggactctggcacttggtgtcagtctgctgatgtttc

SEQ ID NO: 671707 - DNA, 103 bp, Homo sapiens
actctaaggatccccattggatatgcggatagggagaacgtacggtgtgtaggggtaggtgtacttcagagaggttccctgggtttccggcgacgccctcctt

SEQ ID NO: 671708 - DNA, 201 bp, Homo sapiens
ttgattactgaaggtgatctagaggatcccttccacaaaccccctcaacccaatatcttctttgttgggaaaagaggtatgagggagctggctgggtaggctctctagtctgttgggaagcagtgaatgtgtggctccatctccatctcttcatcccttctcatggctagtgaggacaatagggcaattactgagtcctgt

SEQ ID NO: 671709 - DNA, 296 bp, Homo sapiens
tagaggattacgcgatcgcttaggcttcaactaaccatatataaaccctgcaaatgtacgtgactggcagaaatattgctgaatgactaatgtggatcctcaaagggaaacacctcagctttttctaagaagagatgtgagattcccttggatgttgaaaaacagattgaagacccaatagctattcttattctctttgatgaagccagatataatttatagaagggcttaatacagactccatgatgctcagctgatgatcatagacaagtctgcaatagaaaaatagtcatatg

SEQ ID NO: 671710 - DNA, 867 bp, Homo sapiens
tagaattgtgcttgttatggcctggtttaatcttgtgccacgaggcgtgggctgtgtgagatgggcctgggtctgtgacggtgcctgagatccctataactgaaaaatggagaatggatgccccccaaggttgccaaatgcacatgccaatgcctagcagctctgggcaaggagtgtgtggatggctgatgaacactgatgtgatgtgcccatgcctgcatgccccatgccccatgcccatgctccaagcccaagtctcagccaccgtcatccaacaatgctgtcccaggcaatatgcactgcctggcccccctactggcagctcaggcagaaatcaattgtactcagggtggtgcctccagatttgtcagagaatggtgagctgactggccaaagctcctccctgcttcaaccgtcagcaaggaatcggggatgcttgcaagaagcttccctgccctgaaagattcagcgccaacccagtgatgcgggaggagctgatatataacaggacaagcataactgccatgttgccttgctgtaccatcgtatttgagcgtttcggtggtacagggagccacagctcatagttgaccctcgagaaagttcaccgcgggacggtgagatagctgtgagctagaggagctccacagccggaagacttgtgcttgggaagatagcagatcaaccgcccaataggccccggagcattgttggtacatcttgacgcgcccaaatactaacgccctcgaagctgctgtgggctagagcagtgcttgagtgccgatagagatggaacacccttcctattcgctggggatccggcgttcgaccgaccatattagctacggagatacccgagcaatgatg

SEQ ID NO: 671711 - DNA, 381 bp, Homo sapiens
ccagcaggtgcagcaggagaaatcgtagacgcgtattacgcgctgcagcagaaggtgagcgaagctggcgagcagcgacaacgaatctctggcctcgtgtgaagaagctggcggcgtgaaatgcggcgcaaagcgactggttcacccgtgacaacattcctgccgcgctgaacttcaagccggtcgtgcaggcgatcttcgacggctcgctgatcggcgagaacggcgcgccgggcagcaactccgacgtgatcaccgtagacggtgaacgagccttcgtggtgcgcgtgagcggacacaagccggaagtgatcgaaccgtacgaccaggtgaaagaccgcgtggtggaactggtgaagcgcaacaaggcgctgaaggcag

SEQ ID NO: 671712 - DNA, 100 bp, Homo sapiens
cgcttactattctccagctgtttaaagccattttccagctgctgctgggcccgcgcccttcttggaagtgcatcttcctctcctcccaagagccggaatt

SEQ ID NO: 671713 - DNA, 323 bp, Homo sapiens
  misc_feature (23)..(23): n is a, c, g, or t
  misc_feature (58)..(58): n is a, c, g, or t
  misc_feature (60)..(60): n is a, c, g, or t
  misc_feature (75)..(75): n is a, c, g, or t
  misc_feature (93)..(93): n is a, c, g, or t
  misc_feature (96)..(96): n is a, c, g, or t
  misc_feature (115)..(115): n is a, c, g, or t
  misc_feature (123)..(123): n is a, c, g, or t
  misc_feature (138)..(138): n is a, c, g, or t
  misc_feature (159)..(159): n is a, c, g, or t
  misc_feature (173)..(173): n is a, c, g, or t
  misc_feature (223)..(223): n is a, c, g, or t
  misc_feature (228)..(228): n is a, c, g, or t
  misc_feature (240)..(240): n is a, c, g, or t
  misc_feature (243)..(243): n is a, c, g, or t
  misc_feature (250)..(250): n is a, c, g, or t
  misc_feature (270)..(270): n is a, c, g, or t
  misc_feature (317)..(317): n is a, c, g, or t
  misc_feature (322)..(322): n is a, c, g, or t
ctccgctgaggtgatttggaaanccctaaaacgttgaaggcacgaatcgggtcctganancaagtcctcagccancagagccacgttccttangancaccgtgggtttatttcantttcctanaccactgacccgaanaaagcccggcgccaaggggantccggctttggganaagctgaagttgttataccccaggaaataactgtcactccggtccaaganggcangcaaagaaggantancctgcantgctttccttggatgagaangaactcgaagagcagtttgtgaaaagaaaaaggtccaaaggggccangcaanc

SEQ ID NO: 671714 - DNA, 104 bp, Homo sapiens
cagggagacaaagaaaatgaaaggccagtttcactcattatcatagatacatcaattctaaataaatggttatggtgagtgtgctgggaaataaaaataaataa

SEQ ID NO: 671715 - DNA, 326 bp, Homo sapiens
  misc_feature (2)..(2): n is a, c, g, or t
  misc_feature (16)..(16): n is a, c, g, or t
  misc_feature (53)..(53): n is a, c, g, or t
  misc_feature (119)..(119): n is a, c, g, or t
  misc_feature (174)..(174): n is a, c, g, or t
gntaataacattttcncctgtaaagataggctaatttctgaaataataattanatttatagaaagccgagaggaaattgctagtttacccctggtagaggaatttctgtatttgaaaantctccagaaggaataatataaactgtggactttgggtgataatgatatgtaggtncgtcagttgttaacaaatgtatctctctgttgggggctattgataatggggaaggctgtgcatgtgtgggagtaggaggtgtatgggacatctctgtaccttctaatcaattttgctatgaacttaaaactgctctaaaaataaagtttatt

SEQ ID NO: 671716 - DNA, 1005 bp, Homo sapiens
aggaaaacaaaaagacaaaaactacaagaacactaacagagaggcacggacgtgcgtacagcagaggcgagcccgcgtcggggaaccgttcgaggggtcgcgtaagtaaagtgcacacaccgtgggacgcaataagggtggcaaggtaaacctctgacccggagggccccctctagtgcccgggtgggcgtctctcccaaaggccgagggtaagacccccccgcccaaggagaccgggccttctttcaaaggaggggacccgcccctttggccgggccagaaaccaaatgttccccttggggccaccaaaagtcgccgcaagcaaccggctggcgtctcctccctcgggcgcagtgggttcatctactgtaaaagcatgcgcgggtgttttccttgcacacagtgtgcctacagcgagtttgtcccggaaacctcttcccctcctaaggagatggctttcacgagccccccgcctccctccggaaggccaagaccgacgagcaagcccaggtatgcaatcgcggggccattccgtgtgggacaatgtgctggcccccccgcgaaaaggttgtgaaagttagtgcggccccccgggccccggcaagaaagaacgacgaaggggggacggacacccaagacacaacacaagagggagggtattacaactatcagggagaccccctctgctgcgtcaaaatctgtgggatgggtcaacacccagcgccccctcgttcaggtaccaatacgctccacgccttgacaccccactgcgagcttgtagaattatgcggcgtctgtcctctgaccttacacacacacactatgagggctgttttgaggagagaaacacattcatatgggtgggcacatcgattcaacaatactgcctgtcccacgcaaataacatggattgttccacaagccagtggtgtacagcacaacagtttcttaaaaaaaaggaagtgggaaaaaaaacaaaaaagatccccacaaaaaaccatgaca

SEQ ID NO: 671717 - DNA, 150 bp, Homo sapiens
  misc_feature (98)..(98): n is a, c, g, or t
tatatgcgtgtttgttgacgtgtgtgtatgtgtgcgagtgtgagaattgtgtgtgtggatgtgtggactgtgcgtgtgttcatgttcggactgtgtgngtgtatgtaagtgtgtgtgcgtgtgtgtgactgtgtgtgcctgtgtggactg

SEQ ID NO: 671718 - DNA, 464 bp, Homo sapiens
agctggacccacgatatcggtcacattagctccggacagtcagaagtgctttatctccatttgcataagtggcaaagtgaccctatgctgagccagagtgggaatgttgacagtcgagagaaacagattcctctgagtccccgggagcaatggaggatgatggcttgctgtggtcgaaggcagacatagagcaatgtctcctttcagaacagtgggaagtctaaagttgaggataccgtgggggagaagatagggaaatgaggcaagtagatcaaagagataatcacttttgaattctgcaatttacagggatgtgactttaaacagcaccattctccctttaatgtttgacagtatttatgactgtcactctgagaggagacacagcaatacgtgccacgatttggttctgtaatggcatcacctgcatctcaggccatgactgtataatattccagtgtgct

SEQ ID NO: 671719 - DNA, 203 bp, Homo sapiens
  misc_feature (5)..(5): n is a, c, g, or t
  misc_feature (61)..(61): n is a, c, g, or t
  misc_feature (99)..(99): n is a, c, g, or t
  misc_feature (110)..(110): n is a, c, g, or t
  misc_feature (115)..(115): n is a, c, g, or t
  misc_feature (202)..(202): n is a, c, g, or t
gaaantgtacagtgtgaactcattttaaaatgtagtgtgcttatgtttataaatgcatagnaaggtctattcacagctttactttgaaacaagtgtagntacacatgganacttntacaactttattaacatttactcgtattaatattttaacaataaaccacattatttttaaaactttattttaaataaagaatttttna

SEQ ID NO: 671720 - DNA, 433 bp, Homo sapiens
agaagttttgaaacactctctttgtaaagtctacaagtggatattttgagcccttggaggcattctttggaaaagggaatgtcttcacataaaaggcagacagaagtgttctcagaaactgctttgtgatgtctgtgttcaactcacagagtttaacatttcctttgagagagcggtttagtaacactctctttgtagaatttggaagtgtatactaagagcgctttgaggcctatggtagaaaaggaaatatctttccataaaagctagacagaagcaatctcagaaactcctttgtgatgtctgcattcaactcaccgagtggaacattcctcttgatagagcagtttggaaacactctttctgtagaatcagcttgtttgtatttggacctccttgaggccttcgttggaaacgggttttcatcgtataa

SEQ ID NO: 671721 - DNA, 188 bp, Homo sapiens
gcaggccctgagttagcagaggaggactgtaggctgagagggaaagaaaatgaaggttactttcatggaagtttcatttcttttccctgtttgtaccacctgcatttacttttggcctgcttcaagggccaaatttggtttaccttgcaatcctaaaggtacaaaccttgttctcaggaatattttaa

SEQ ID NO: 671722 - DNA, 166 bp, Homo sapiens
gtgtgcaccagcgaagtctcacagaggctcacctttgacacttcctgagagaggtctctttatgaattaagagtacaaaatcctctgagatgaagcaacctatccagttctatggattgaatggagaatctttcagaaagaccatcattgggtagggcaactgatt

SEQ ID NO: 671723 - DNA, 247 bp, Homo sapiens
  misc_feature (8)..(8): n is a, c, g, or t
  misc_feature (147)..(147): n is a, c, g, or t
  misc_feature (190)..(190): n is a, c, g, or t
  misc_feature (211)..(211): n is a, c, g, or t
  misc_feature (215)..(215): n is a, c, g, or t
agctctcngggcctttctctggcttccttgcttgcctggtgggggaagggcaggagcggaagaaggaaagggaagagtcttccaagaccagaaggagggggacaactccccaagaccatccctgaagacgagcatccccctcctctncctgttagaaatgttagccccgcactgtgccccaagttctagncccccagaaagctgtcagagncggncgccttctcccctctcccagggatgctctttg

SEQ ID NO: 671724 - DNA, 956 bp, Homo sapiens
agcggagagcagacagcgccgccgccgccgccgcgcactccgtgcgtccgtgagagccgggccggctcgggccaaccaagaagggcttcccggctaagggccgaccgggcgccggacagcgcgtgtgcccggggcgcaaggccagggcttgggggccttggggcttcaagaagcttaagcgttaagggcgcactccttgaaaagcccctttttgtgtgatatattgtgtttgcgcaactttttccgtgtacacgaggttgggccgtgggccaggaagggcgtatacgcggcccccttgtagacttttttgagattgcgttattgtattgttagtgcgcttgggacagcaggggctgagattcgccgtgattctttgcgtttactttcgtttgagagagacacagccgccaaaacgcttgaacagacaatctcagtgctccccacattttgtgtccttgggggcgcattgtgggcttgtggtgacccggagagacacccagaggaaattgggggggctgtgagagcttgtgggtttttcacacctttaactttttacttctccccacaagagggaggctctttaaagtttctcatatacattctatgggccttgttggaacagggtgtgggagagctgacagaaggggcggtttcactagtgctcacaagagggacccacccagttaaacgctgtggggtgactcgtgtggtggtgcaaagacgacgaagctgaggcctggtggtgttttatccccgcccgggcgttttctacaggttggtgctggcgcccctttttggacccccttttttgggtatcaccagagcggcgctttccaaaacgccgcccagtttttaaaaaaaacctggtggatctctgtggatactctttgtgcccacaacaaacatacagaataaaacaaaaagagtctctctcacaagacgccgcgaaggaactc

SEQ ID NO: 671725 - DNA, 111 bp, Homo sapiens
cgactctagaggacccgcaggtgccttagaggttggttttctagaaagctcacctttttctgtggcaattgatatgatgtgatactattcatctgtaaacaactccttctg

SEQ ID NO: 671726 - DNA, 377 bp, Homo sapiens
gaataaacaaggagaaccaaaacaaaactggactcaaagcctaggatgttccattcagttgtaaaagagatgtggactttcttggtccacccttacaagacaatgacatctgtaatgtgacctgtacttgctaggctttagcaagtcactcgaggtcatggaacatgtttttgaagaaataatatcagttcatgaattctgtacctgtatctagtcgctgaaggggtaagtgacatcagcagcatgttcattccttttcttgtcttctacctgttctccacaaaagtataaaaagccagaattgctttttgggttttgagatggcattgtcttccatttgcaaaaaacagtttataagacaaataatacagaaattg

SEQ ID NO: 671727 - DNA, 409 bp, Homo sapiens
cggatccccgtcttctgttctgcctcgagcacagtcagtacgagagggcgtgtaagctgctgctggctgccaggaagtatcagcgaacccctgtcgagctgtgcctggggcagaacatagcactcaccgaggagatagcggaaaagatgaccgtggccaaggactcctcggacctgcctgaagagtccgcggcgggagctgctctagcagatagcagactgctgcatgcgccagggcagctaccacctggccaccaagaagtacacgcaggccggcaacaagctgaaggccatgagggcgctgctcaaatccggagacacggagaaaatcacgttcttcgcgagcgtgtccaggcagaaggaaatctacatcatggctgctaactacctgcagtccctggactggcaga

SEQ ID NO: 671728 - DNA, 150 bp, Homo sapiens
  misc_feature (79)..(80): n is a, c, g, or t
  misc_feature (147)..(147): n is a, c, g, or t
cgcattcggggagcgtgccgtggctctctcggctctcatgcgtgacgtcagggtaagctgtcgctggtctgtctgtcgnngtctcgtcgtatcactgagagaatctcagtctctcgtcaccactgttgagtgctgcgtctggtcggngat

SEQ ID NO: 671729 - DNA, 748 bp, Homo sapiens
ggcagaacccagagttaccaccccaccgccttttttttgggacggagtctcgctctgtcgcccaggctggagtgcagtggcacagtcttggctcactgcaagctccacctcccgggttcgggcgattctcctgccttagcctcccgagtagctgggattacaggcgcctgacaccgcgccaaactgattttcgtatttttacgtggagacagtgtttcaccatcttggccaggctggtcttgaacttttgacctcatgatccacctgccattggcctcccggcagtgctggcaattcacaggccatgagcccactgtgctcagccgtaccacccactttccaatggcacacaacttgcacaacccgagaagcttatccagccttcttccgtagcaacacgtcctgtcatcagtctgcacccattcaatcttgcactgtacacttaacaggctcaacgtgtaacactactgcactgcacgacactgccgctgacgctgattacctctacgtcacacctacgctaccagggctacgcacctgcctctgccaaggcagccagtacccctcatgcatgtctgctcataggggccacctggctttccactcaaccacgttagggaactcttagagcacaggggatgcaaagataggagtaacatggacatggtacgatgccaagcaactcttgaggaaagggctcgaacagagaggatggaattcgatgaagaaggcccacagagaatctgaa

SEQ ID NO: 671730 - DNA, 416 bp, Homo sapiens
ttgtcggtgagatggtttactttttctgcacgtctgttctggcatgtttcttatgatctcatagctcacctggctcaatgatggccagtggtgcacactctgtggtattttccgcatggctgtgcccagttcattattattgccagtgtgttgatggacaccagttttagccaacatatcatagtactctatttcagatttcctcaatgctgggcagttgttatcgagaatgacgcacttccgcttcgctcttgtctgatcatctcagagtctgcttgtcccccacggcgtattctcctagtttccatctggagtcgtgccctcatagttgctcgactccatcgacttttgcgtcttctttgcggacctgatcttcctgccttaggagcgggacggcccccaaccaagcaacccct

SEQ ID NO: 671731 - DNA, 496 bp, Homo sapiens
gtgttggggaggcattcatgaagaatggagtacacatatatatgggtcagggtgttggaaaggctgccaattcaggaaaaaaaaaaaaaaaaaaaaacaaaaaacaaagtgtgtgtgcgcggcgcgcgcctcgggccctcggaaaaaagcttttagagaaaccacttgcgggtggggcggcgcgggggcccccaaggtgagggtaaggtggaactggggccaaagaggcggtcccacgagaggagaaaccgcgcgggcagagagaacaagagggggcgggggattccccacacacaatatataaaaaaagcgccgccggggggaaaacaccgcggaggcgtttgtgtgaaacaaaaccgagaagagagggagatacccgggggggcgcaaataacggggggacatctatatacacaacgagggggaggctcccaaaggggagagcccgagaaaatacttacaatttatagccccccgaccggggggggggatccta

SEQ ID NO: 671732 - DNA, 169 bp, Homo sapiens
  misc_feature (55)..(55): n is a, c, g, or t
aactggaatggtttctgtacatttgatattatttcaaaataaagctggatgcggntggctcacacccataatctcaacactttgggaggctgaggacagaggatcacttgaggctaggagctggagaccaacctagggaacagagcgagacctcgtctcttcaaaaaca

SEQ ID NO: 671733 - DNA, 792 bp, Homo sapiens
agcgggctgacggaggcccgggaggcggacgaaggctgtcgttgccttggccgtcgcatccccgagggagtcgtgtcggtggccagcccgggcccacgagtcccggagattggccaccgtagagctcgtgtgtgcgtcccccgattcccagccaggcactcgacccctggcgctcgcgggcctgtgtcgtccgcgcaatcactgtgtggtatatttggcgttatcttaatactatccatgttgcctcgaacgagacgagaaatcctggagaccctaatcaaaggccttcagatactggagatacagtaaggattaccgagttctgcctgggtcgtggcgatattagagtcgtgagggccaagtgtactaaaagaaatgtggagacaggcccaaattgtcgctggccagagagactcacacgccttgtatttcatacccaaatgacacaggggcacaccacgttttaatagcggctacctggagcaattgcaacgaaaagctttacaacgaaatggccaacccaatggaatagtagggacctcttctcggattacctacgagactcctgatgtgtacactctgttggcactacgctcatgacctcggttcgggcaacaactagttggagtgaaccccagtccattgtcaatagcccatgccccgagtgcatctggagtagctccatccattgaatttatcgtgtcattcgacagatggaatcgagtcagtcaacgtacgagaaggatcttgacaagaagtttgttggaacgccaagggctatggacttctgaa

SEQ ID NO: 671734 - DNA, 140 bp, Homo sapiens
ttcgatctgaaagaatagggtaaggcgatggacagtaaacttttagactattacaatcacgagctggtctatctgcgcgagatgggcgccgagttcgccgaacagtaccctgaaggttcgcggtgccgtctcggcatgcg

SEQ ID NO: 671735 - DNA, 558 bp, Homo sapiens
  misc_feature (9)..(9): n is a, c, g, or t
  misc_feature (51)..(51): n is a, c, g, or t
  misc_feature (71)..(71): n is a, c, g, or t
gccacgccntcaaacaacaaagggcaacacacaaaactccggtcatatgcntgtgaccttatgaaacgtcntcaccaaatcttacaactaattccgagatacattaaataattattcatcatgaacagtgcaatttaccccggtttacaaaatgattagcatatgtaaatcaacaaagtgatagatcctatcaacagaatgagggacataaaccaaatgatcctttcaattgatgctgaaaaggcatttgatgaaattcagaattctttatgataaacatcctcaaagaactgggtatagaaggaaatacctccacataataaaaaccatgtatagcagacccacaactagcatcatactaaatggggaaaaattgaacacttttcttctcggatcaggaatgcaacaaggatgcccactttgaccactgttatttaacatattactggaagttctatctggagcaatgaggcaagagaaagaaataaagttatcccaattagaaaggaagaagtcaaaatttttgtttgctgatgacataatcttatatttgggaaa

SEQ ID NO: 671736 - DNA, 608 bp, Homo sapiens
  misc_feature (6)..(6): n is a, c, g, or t
  misc_feature (11)..(11): n is a, c, g, or t
  misc_feature (32)..(32): n is a, c, g, or t
  misc_feature (61)..(61): n is a, c, g, or t
  misc_feature (69)..(69): n is a, c, g, or t
  misc_feature (78)..(78): n is a, c, g, or t
  misc_feature (85)..(85): n is a, c, g, or t
  misc_feature (92)..(92): n is a, c, g, or t
  misc_feature (136)..(136): n is a, c, g, or t
  misc_feature (169)..(169): n is a, c, g, or t
  misc_feature (171)..(171): n is a, c, g, or t
  misc_feature (183)..(183): n is a, c, g, or t
  misc_feature (187)..(187): n is a, c, g, or t
  misc_feature (212)..(212): n is a, c, g, or t
  misc_feature (224)..(224): n is a, c, g, or t
  misc_feature (249)..(249): n is a, c, g, or t
  misc_feature (301)..(301): n is a, c, g, or t
  misc_feature (311)..(311): n is a, c, g, or t
  misc_feature (324)..(324): n is a, c, g, or t
  misc_feature (347)..(347): n is a, c, g, or t
  misc_feature (373)..(373): n is a, c, g, or t
  misc_feature (394)..(394): n is a, c, g, or t
  misc_feature (437)..(437): n is a, c, g, or t
  misc_feature (440)..(440): n is a, c, g, or t
  misc_feature (443)..(443): n is a, c, g, or t
  misc_feature (475)..(475): n is a, c, g, or t
  misc_feature (588)..(588): n is a, c, g, or t
taactnttctnaaaaatttatttttaaaaaanttaaaaaaaaaaaaaaaaaaaataaaaanaacctatnaaaatttanaaaaaanacaccangtaaggaagggttctttcaaaacaaccacaggaacagttacganaacttaaaaaaaaatgctttccacactaaactnanaaccctgcaaancacncctgagtggggacggcagccccaancccaggggcaancccccccaggctggacccaggccangcacacctggggagtctcttactgctgaaaacctcacccatctcacttcatntacttatccngctggtcaaccangattttggcggaggacttggcancaaaaaaaaattcactgatctcttcnacatgctctttctcaatgctnttcttcccgttgattttaacaaacaaattggccggggtcaacngcngcnctgagtccctcagtttggtcttggtgccaatntcccccaggtggttcagtgcctcctcactgatgttgattccttccgtctgggcacggattttaatgatctgtttcatttcctgtggagtatacagcatggtccggattatcancactcggtccagaaggtcaa

SEQ ID NO: 671737 - DNA, 271 bp, Homo sapiens
aattaaaaatttaaaatttttaaattaggattgcccatacttccacatttggggggggtttttttagaaatacattttgtaaagccccccagacatttgtcttccatttaaacctttttctttaaaaaatggttttggggggtaacttttacccagttctgggtactgttaatatctgggaagtttcttgggatttcagtgggaagctaaaccgtctaaattaacatgaagtacttccttttggttgggaaaaaaaaaacagattttttca

SEQ ID NO: 671738 - DNA, 330 bp, Homo sapiens
  misc_feature (322)..(322): n is a, c, g, or t
gctgagcttacgcacagggaaaaggtttgacttggagaggggctttgctggcctcaaagttcactagagaactcagggggcagtcacagacagttgagacttctctgctaagaagaggtagaatcttccctctagcagctaccatcctgtggcgtgagaagctagcctgcacctccacagctccactgtggttgcttgagccaacagtggtcgcttcttcactgccaaacccaagggagcttcttggttcatacctacgccggtagcacttggcgcaataggtggttatgttttaagtcaccttggcctctgtaaccccctnttctctct

SEQ ID NO: 671739 - DNA, 86 bp, Homo sapiens
  misc_feature (4)..(4): n is a, c, g, or t
  misc_feature (22)..(22): n is a, c, g, or t
aaantcgaccagcccccaaatntcgaagaaccttgccaatgttgtttaaaaaaaaaattcagggaaaattaaaaacctggaactcc

SEQ ID NO: 671740 - DNA, 144 bp, Homo sapiens
gggctctgaaggtcaactgaaaagtcttgtgggacaaagacttgagttaggaagccctcaatcactccgccttccacggtggcccgccctgctgccatcatcggctgaagcaccaccaggattcacggcacccaactgcttcag

SEQ ID NO: 671741 - DNA, 885 bp, Homo sapiens
gtcatccaggaatgccatctagtgggtcacgctgtggtgcaggtgggagcttgattctcagcagttgaggggatctgttgtgtacgtgtgagagggatgaggtgctgggagggatagatgggggtgctgcctggatccccagtctgtgggtacagagaggtcaagcccagtgaggactgccccgtgcagactggattgggacgctgtgtacgacgattggatgtgatgtgacggcacatgtgggataggcagctatggcatatcaagtaggtggttgtgaggttgaccagttgtcgcttggtctctggattgttgggaatttagggaagtgatgtcatcctcttgaaagatgctgaagcacggtagaagaaaagtgggcatgatatccatggagtggacagggacatgactttgtgcccattaactaaaggcctctatccttgtctgtgtcataccaggccgacccagactctgagcccctgggactagctgcttcttaaccccagtaagccactgccacacgtctgagcctctccagcccatagtgaccggctgctttaccctaaggcaagggcctcttgaggtccacttcttactcacacacgagatgtagccagtatactaggtagtgccctatataacaattgtaagaattgaggcacgagccatgtgaagacactggctcataatcctgcagcctgggaaggccggttgctcagagcttgaccacgggaactcctagttgaaagcaagtcctgctatagactggggacaatcctgtgtgaggcagatgtgtgcgactctggggccaatcagacgggatatgagagggaccactacggggtgtcgtatccacacaaaggcgagaaaggtctacgactacga

SEQ ID NO: 671742 - DNA, 668 bp, Homo sapiens
cggcacgagccaccgtactaccagacaaccgtagtcagaccatatacccagagacagtgtatgcgatagacaatggaacctggcgcaatagctatagagccgcacgggagaggtgaaacattatgaccacgcgttatattggctggactaacccctataccttttgtataatggaataactcgaaataactttgcaaggggagccagagctatgacccgccaaaacagacgagctatctaagaacaggtaaacgagcacacccgtgtatagttttgaatagcgggaagagatattggtagaggctaccaacctaccgagacttgtgattgcttggtgtccaagagagaatcttaggtcaactttaaatttgaccacagaaccctcttaatacccttgtgaatttaactgttaatggcaagagggacagatatttggacactatggagaaaccttgtggtgagagtcagaaggttacacccattgtgggcgtaaaggcagcatcttgtacaaagcgtcaagctcaaaccccatctctaaggaaaccaacgtataactggcttctaccccaatggcccattgtcacctatagagaagtgtgttgttaattacatgggaacatttcttcgctgaggcgcgtacaataacactgatcgcaattcttcttcgc

SEQ ID NO: 671743 - DNA, 312 bp, Homo sapiens
  misc_feature (270)..(270): n is a, c, g, or t
ctgctgccgggcacactgggaccagcaggctcctcagccaaccctgtcccccggccctggccctgccagagagggaccccagcacacgtgggcaccgggcaaggtctcagccgctcccacctgcccacagaagcccaggagtgtgtggacgctgagcccagctttcgcgcgcccttccttggcccctcacttccggcaagccggtccgctcttgcccaccccccctaccccggcgtttccgggcttagactggagaacattcatttcttnctcgactgagtggatattaaccgaaaagcagttggaaaggca

SEQ ID NO: 671744 - DNA, 194 bp, Homo sapiens
gctactctagagatcccggctcttctggaccttactgggtactggccctgggcaatgcgtctcgctggagctttgcctccttctactgggcttccacaagcccaggacatccctaacttcccctttaaactctggctccatccgcacactccgttaccacactgggtcattggcatttggagccctcgtcctga

SEQ ID NO: 671745 - DNA, 168 bp, Homo sapiens
ccctgtcgcttgccctcattctcaccatgtgaaataccgacacccgctttgccttccaccatgattttaaccttcctgagggctctcctagagggtgatcagatgccagcaccatgttttcatttaagccttcagaaatatgagccaattaaactcttttctttaaag

SEQ ID NO: 671746 - DNA, 266 bp, Homo sapiens
ttgaatcaattattgtatgatacaatagttagagtacagctaatcagataagcaacctgcgggcacaatgacctcagttccacacgtacacccgttcagcaggaccctataaaactttcctccaggccttgcctctttgcaggtagccccttctctgctgagctgcccactgcaacatattttcacaatttctctaataaatctgcccttctttacctacaactatcttggtaaatggctttaccacctgcgaaactgaccctagg

SEQ ID NO: 671747 - DNA, 278 bp, Homo sapiens
aaggtgaatggttttgttttgtttcgtttagttcgttcgttatgtttgacgactggagtctcaccactgtcaccaaggctggcggatgcaatgtgcacgttctctggctcactgcaactctccgcctcccgggctcaagcgaccctcctgcactctatctcccacgcagctggtaccacaggcgcccaagaccatgcccggccgatttttgcatgttcagtagagacagggcttcaccattgtcggtcaggcgggtctcttttgaactcctgactggt

SEQ ID NO: 671748 - DNA, 411 bp, Homo sapiens
  misc_feature (86)..(86): n is a, c, g, or t
  misc_feature (381)..(381): n is a, c, g, or t
ctgttgctgccatctttatgcccgtgagtacccagtgtttagctcctacttataagtgagaacatgcaagtatttggttttctgtncctgtgttaatttgcttaggataatggccctcagctgcatccatgttgctacaaaggacattattttgctctttatggctgtgacagactactttttatttaattaattaatttttttttgttttgagatggagtcttgctcttgttgcccaggctggagtgcaatggtgcgaccttggctccctgcaacctctgcctcctgggttcaagtgatctcttgcctcagcctcccaagtagctgagattataggcacccaccaccacgcccggctaattttttttatttttagtaganacgggctttcaccatgttggccaggctggt

SEQ ID NO: 671749 - DNA, 272 bp, Homo sapiens
ttaggtatgcagtctaccctggcactaacatctggccgggctagcatgttagactccgtgctagtcgtgatctccatcttgtatcgtccccgtgtacacaatgtcttcagtaggggggccccctcttgggtcacctcctctgccatcatctgaagaaccccaagccaaacactgaatgtcacctgtgcctgccgcctcggtccaccttgcgagttgtgtatgacacaactcaactacacagaacagacagcacgtgaacaatctcgcattat

SEQ ID NO: 671750 - DNA, 661 bp, Homo sapiens
atacacgaagaagaggaacaaggttagactatataagaaccatttgctgcgcgcatagtgccattgtgatagggaagaacttcagaaatctgtggtagtctatggcttgtctgtgtcttccctgaaccgtgtctccgagctctgtgaaagccagcatctaggggctaagaggatgcaagaggagagcagcatgcattggtctgtacaaagtgtgcagcgagaagtacgcccagaagcttttcctactgtacagatctctcgagtctgctttgaagtgatttcttttcttcttgattatttcttatatttctatatgtatggtgtaatagcctttgttaactaattgcgcttatttatccgtgtttaggaattaagcacgatcatgtccctttttaagccttacctgagaggaacaatgccttagaatgaaatacaagcattaatgagatgaagagtatgcacagaataagtttcctctacttattctgtacttggcctcatgagttccaatgtgtgtgaagacagggcagatgcgtgacagttgaattgcgatgatgttacgaagtgatgtctgtgggtcacattaatatgattgagcagtgggtggccaaaagtgttgtcttccacagggaagcttaaagaaaagaaaattttaaccatg

SEQ ID NO: 671751 - DNA, 670 bp, Homo sapiens
  misc_feature (142)..(142): n is a, c, g, or t
  misc_feature (151)..(151): n is a, c, g, or t
  misc_feature (159)..(159): n is a, c, g, or t
  misc_feature (163)..(163): n is a, c, g, or t
  misc_feature (177)..(178): n is a, c, g, or t
  misc_feature (234)..(234): n is a, c, g, or t
  misc_feature (501)..(501): n is a, c, g, or t
  misc_feature (504)..(504): n is a, c, g, or t
  misc_feature (524)..(524): n is a, c, g, or t
  misc_feature (532)..(532): n is a, c, g, or t
  misc_feature (550)..(550): n is a, c, g, or t
  misc_feature (556)..(556): n is a, c, g, or t
  misc_feature (562)..(562): n is a, c, g, or t
  misc_feature (572)..(573): n is a, c, g, or t
  misc_feature (579)..(579): n is a, c, g, or t
  misc_feature (608)..(608): n is a, c, g, or t
  misc_feature (610)..(610): n is a, c, g, or t
  misc_feature (665)..(665): n is a, c, g, or t
tgctcaccagggcagagccccttcagaacccacagagatccgtccacaaaagcggaaaaaggggccagcccccaaaatgctggggaacgagctatgcagcgtgtgtggggacaaggcctcgggcttccactacaagttctgnaactgcggnggctgcanggcntcttcgcgcgcgcnnctcatcagggagcgcactacatctgccacagtggcggccactgccccatggacacncacatggcgttcggcaatgccaggatgtcggcttcgcaaatgcgcgtcagtggcatgcgggaggagtgtgtcctgtcagaagaacagatccgcctgaagaaactgaagcggcaagaggaggaacaggctcatgccacatccttgccccccagggcttcctcacccccccaaatcctgccccagctcagcccggaacaactgggcatgatcgagaagctcgtcgctgcccaggcaacaggtgtaaccgggcgctcctttttctgaccnggnttcgaggtcacgcctttggnccattggnaccagaatccccataagncggggnaggccngtcagcagcnntttttnccactttcacttgagcttggccatctgtntnttgtgcagggagatagtttgacttttgctaaaacaggctacccgggctttcctgncagct

SEQ ID NO: 671752 - DNA, 421 bp, Homo sapiens
  misc_feature (1)..(1): n is a, c, g, or t
  misc_feature (10)..(10): n is a, c, g, or t
  misc_feature (87)..(87): n is a, c, g, or t
ncacctggangtggtcatggaccccagctttggccagcacaagtacgagcatgattttagaggttgctccagacgactgctctcccnagatgaggatgatgacctgtgagaaagtgaagctggagccctgcggtcagaagtctagttttataggcaactgtcctgtgatgtcagcggtgcagcgcgtgtgccaccttatttagctaagcagatcgtgtacttcattgggatgctgaaggagatgaatgggcttcgagtgaatgtggcagttaaacataccttcattttttggacttgcatatttagctgtttggaacagagttgtttcctttctgaatttcaaagataagactgctgcagtcccatcgcaatatccagtggggaaatcttgtttgttactgtcattcccattcttttcgtt

SEQ ID NO: 671753 - DNA, 156 bp, Homo sapiens
tcggacccgtctaatcacagcagtcctacttcatcctatctctcccagtctagctgctggcatcacatatactactaacagaccgcaagctcaacaccaccttcttcgaccccgccggaggagagagaccccattctataccaacgggaaggaacg

SEQ ID NO: 671754 - DNA, 1787 bp, Homo sapiens
  misc_feature (1107)..(1107): n is a, c, g, or t
  misc_feature (1214)..(1214): n is a, c, g, or t
  misc_feature (1302)..(1302): n is a, c, g, or t
aaacacaccaatattgcggagttcttacgccgagttgaactcggggggccgcaggcaggccctgatgtgcaccattaatagtgtgagtaccatccgacgggtgcgcattaccgaacgacgtgtcttctgtgtcgatccgagcctgtacctaagaggtcgcggagcgtttcagtcagagatcagtagtgtactagagagactcgggtgagcgtccgtgagtgtctccgagatggtagtcatcagtcagagccacgtcagaggtgcgccgcatggaatacagagtatctagcgaatagcccaccgatctattcgcatacgtcttggtgctcgtgctctggacataagcgcgtactttacgcaacgcatccaaaatgccccatagcgatacgtacgcactcttttcatcatatacttacctcattgtctcaatataacatgcgattcattcacgttacattatagcaacttttcatattctcatcgcgtaagtgctcctctttcttcctcaaggagaatttgcatgtgttgtatctagcatatgaaattataattagtctcctacgaaaggccgattacattgcagggaaacgcgcgggcttgtgcacccggtggcgctagtgatgacactcccaaggaaatatacactcggaaccatctacactgtaatgaactatatttctggagtagggtacattaagcaaattggggactctatcagaatacagagttcgtgagagaagtgggattatagttatagacataactctataaagtgcaagtgatttgggtaactaacctcgctcgatttcgcgttagtgtgaaggtcagattcttataccttcgtggtcttcgaacctggtatactaattcacattgtctacgcccccgggtgtgcggcccatgacatgaggcccactcactttggggcgagtgtcacaaaccataagcacatcggttccctcaaagaagccacaccacgaaccaacctgtgggtcctccccctagtgttccaagagcggtgtttggaaaacctccgcggagccccaggttcagtgttctggggggcgtccctttacattggaccctgggtgtgtaatactctgtcgnccgtcacaaatatcccgcgcttcgcttaaccgcaccaccagaggtggggccgaccggtttaggggctagggtcctggtgatacccgcttcaacggagccatcccccnttgtgttggcgcctcttccaaaggaaacaaagcctttgcggggttcgagtttgtgcaacatcggtggccgtatccagggtctattccncccgacatagaacccttgggggctatacgacacaccccttctccaagccccccgcgggagggcctatacacactttgttggcaccccccattagaggggtcctaactcctctcctgggccacaatggggggtcacacccctcttattgaacagccgccaaatatcttcgttagagacagcggctcaactagtcgctaacaacactgtaagatcctcccccggtgaaaccctctgtgtgcaagcggagcgaacgcctcggtgttttttatccgcgcccagagttctccccgccatctgtacgggaggggtccaccggcgggccaccccctgcggccctacgagacaccgcgccacccgaagacatctcgccgagctcgccgagcaccccacgagcgctcccaccacggttggcgctcccacaccccagcggctctttctctcgccgcacacaccaatcaaccgagcggtagcggctgcacacaacc

SEQ ID NO: 671755 - DNA, 456 bp, Homo sapiens
  misc_feature (48)..(48): n is a, c, g, or t
  misc_feature (58)..(58): n is a, c, g, or t
aggaggaccaagagcgtggatgcctgaagaagtgtgagcatgaccccncaagtgctcnggccgtggccaagctgttttggagtcagcggaagatcaccaaggcccagggagtggttccaccgcactgtgaagattgactcggacctgggggatgcctgggccttcttctacaagtttgagctgcagcatggcactgaggagcagcaggaggaggtgaggaagcgctgtgagagtgcagagcctcggcatggggagctgtggtgcgccgtgtccaaggacatccccatcgcccacaagaagagggggcaactgaggaggtgcccgccccccccaaacaccttctctaggggattcaacggttgccatggccggtgtcggtggggcagggttgggccgcatgtggaagggctctgagatgtgtcctccttcatttacagtttttatgtctcgtgtcac

SEQ ID NO: 671756 - DNA, 351 bp, Homo sapiens
cgggcaggcactatattgatgcgaacttagtgcggacacccgatcggcatagcgcactacagcccagaactcctgggctcaagcgatcctcccacctcagcctcctgagtagctgggattacaggtgcccgccaccatgcctggctaatttttgtatttttagtacagaaggggtttcaccatgttggtcaggctggtcttgatctcctgacttcaagcgatctgcccgcctccgcctcccaaagtgctgggattacaggcatgagccactgtgcccagcctgcttttttttttttttttttttaaataaaagggtggccttttttgggcccccggggggactcctttaaa

SEQ ID NO: 671757 - DNA, 111 bp, Homo sapiens
cttgatgatcccgtcataaaggcaacgtggctgactcatgggagtctgagctacagcgttagaggtgtcaccactctcagctgccatgctgtcaggaagatgacccgcagt

SEQ ID NO: 671758 - DNA, 181 bp, Homo sapiens
agtgaattcgactcgtggtactggatggatctctagatgtctgaccaggctccagccttaactgatatttggatggtcagcacggtgctcactgtgtctgacttgaacttgtacagtggaggcatgcacctgcagtggtgaatacacgtcgaccatggctccagtgtttaacgatattttg

SEQ ID NO: 671759 - DNA, 1592 bp, Homo sapiens
atgactagaattttgacattatgagttgacatccaccagccatcaccatcctcctcaacagtcaccaatttgcacaacacacacaacacatccacacaggtccagcaacagcaaacatccatcagcagccccatcccactacaatctctatgcaacatccacatcatcaatagatccacagtgcaacaacccatccaacacccattacaggtcaggcatcagccatcatcatagatgcaggcagcagatagttacagagcttgcacatccaccagatcaggtcaccatatcacacacacacacacaatctccagatgcagatcatcactcgtatatcagcacattggtatcaacattcaatcacatcagtagcatcatttcatttcatattctcaaatcaggtagcaatatacaagcacaatctatcacgagccagagatcaacatccacaaaacagagacagcacacagatatgcagccgaacagtcacagcacaacacaatcacatcatataaccgagaggcatctaatgcacaattatgtagtacgaaacacgctccaaacactcccaatcacacgagtcagttacgaaacaacgacccattaacagtgggtcacacccaagccaaagattagcaattcacccaaaagtgatccaatcaatccccaatggttaattcccaccacaagcacctattgggaagacaaccattggggcagacgcatccattagcacaattgtacaacggatttacaccacgagtatatacagatacatcaacagaacaccgtccacaacatccggcaaactatacactatacagacacatacaccaaagcacttaaaacataacaattacattcacatattaaacttaacacccattccttaatctttcatcacctatataatcatagatcccttctttaacagaaaatggttaatttaacgaacatatcaccaaaaacgttagccccctggttgtaaccttatcatgattattatcaccttgaagactttaaaacaaaatctacaaagttaacaacaaaaagttcccactagagtaatcacaaacacagcacttgcaaataagcaaataatatggacaagagatgttttaaacgcaatatcatcagatcaacacacactgtacaaagtggcactcattaaacttctacgaaataatcataccctagttgaactcagtcatgacgacccgtgagaaatccccacacagggacaaaatacggacacaaagcgaaccaaacacacagatgacactacaaagaaaaacagataaacaaaaaacaaatgagcagaagaaacacacaacaacagcacatagaaacaagacaacacagaaaagacacaaacacggaaatctagcaaaacaaggaaaaaaaacacaacaaacgaaagggcaaagacacgacaaagaagataagcaagaagaataaggaacatgcacaaaaaaaaaaactaacgaaacatccacagatagacaccagacaccgagcgacaacagcaacaatgaaacaaaacaacaaaaaacaaaagacaaaacaaaacagaagaaagcaaaacaaaacaa

SEQ ID NO: 671760 - DNA, 794 bp, Homo sapiens
taccgcacggcctcacctactacctgtgacatcaccaacccgccgcgtaccaacgtggctgtactggagctggcgcagtacgcctcggtagccctcggaagcaggagctgcatgcgcaagatggcctcctcctccggcgagggcaaggagctgtacctgagctgggtggtggaggtgcccggtaggcacatccgtggccatcctgcaggactgcctcgtccctgcggtcccctcatcgaccacctgttgtgagctgctgctcgcgccttgcaggctcgcgcctactacttccatcgcctcatcctccaaggttcctagccccatatctcatgttgcacagtctgttgctggtggttgtggaggtacgagtaccttatggccggtcctgctatcatactaatggggcgtggccaccgaactgggctgcgtgtgtcgcaatggtatgcctgccggggagaatcgggcgtgccgtgcagcttggtgcccatgttcgtgcgcatgtcccatgttccgcctgctccttcaagggccgatccatcgcctgtcgtcatgcgtgtggccccggcaccggggtggcacccttcgtaggcttcatccaggagcgggcctggctgcgacagcagggcaaggaggtgggggagacgctgctgtaactacggctgccgccgtcagatgaggactacctgtaccgggagggagctggcgcagttccacaggcacggtgcgctcacccagctcaacgtggccttctcccgggagcagtcccacaaggtctacgtccagaacctgctaaa

SEQ ID NO: 671761 - DNA, 256 bp, Homo sapiens
  misc_feature (52)..(53): n is a, c, g, or t
  misc_feature (128)..(128): n is a, c, g, or t
  misc_feature (130)..(131): n is a, c, g, or t
  misc_feature (164)..(164): n is a, c, g, or t
  misc_feature (187)..(188): n is a, c, g, or t
  misc_feature (243)..(243): n is a, c, g, or t
  misc_feature (252)..(252): n is a, c, g, or t
caggtcgacactagtggatcctgggtgtcattggctctgggaagcggcacannagcagggaccactcggggtctggtgtcggcacagcatggcgggcgcgttggtgcggaaagcggcggactatgtcnanngcaaggatttccgggactacctcatgagtacgnacttctggggccagtagcaactnnggtcttccattgctgccatcaatgatatgcaaaagtctccagagattatcagttngcgggatgngaaa

SEQ ID NO: 671762 - DNA, 144 bp, Homo sapiens
ctatatctcaggtcacccctctgcttcacaggagtcatgagctgatatctgcagagtagcatgtcgtgcggagtcatcccgttcttaagatgatgcccacgctgcgacgtgctgcctcttgttgctgtacaattccacagggcg

SEQ ID NO: 671763 - DNA, 842 bp, Homo sapiens
ctgcaggttgtacactcacctgtctacctggactctaatttccatatttccagccacttgaggactgagaggtggatgataaaccctgtcatagtggagcaagttcaggtgtttaaccgctgttatgggggatctgccttttctccctcttctttcttacttccataagtatgtatgtgcagagattgaaaaataaccttgagagagtccatccatctaactccagttcattggaaatttctgcttctttgagactgaggtatattccacttcttctgactacaccaccaccatcaatctccttctctgaactcttggatcattacttcaacctgaaacaactcatcatgcataatagttgcctactgccccaaccctaccaaatgttccagcacctttgatattacctcacatggcaagagggcttttgaagatgtgattgagtcaagtgatcttgaattggggagattatcctgaatttattcaccttggacccagtgttaatcacaaaaggttttttacaagatgtgaagataggctttaagaagccagaaaagtgatattgtgacaatgggattcagttgtcagaagttgggagttgactttgatgttgatgaaggaatttaaaccttgcttggtttctgggccttttaagggattgaaagttaaattgggtcccattgaagcctcaaggcacataccacggtgtgcgcttcttttttcaagtaaatttttgtatacagatgggttaattcattttttgctaaatttcaggggtttttgaattttttgggctatgtagggcaattggggcttcatggatgggacctcttgtgactttt

SEQ ID NO: 671764 - DNA, 271 bp, Homo sapiens
  misc_feature (221)..(221): n is a, c, g, or t
  misc_feature (229)..(229): n is a, c, g, or t
  misc_feature (256)..(256): n is a, c, g, or t
  misc_feature (259)..(259): n is a, c, g, or t
ttttttcctggccaaagtgatggggttccacccatggggaagcaacccaatcctttgtttccttgctccaatggaggcaaaaaagcccaggacccaagctttttggcaggggtgctgtgaatgtccagtggtcccagctcccccccctggccctgccccagcctgtgtagcttttcctgcatgtggatgctgcatgtttggtttggggcttggatgttgcnctgccccnctgcctgtcccttttggtaaaataaanaanttttaatgccca

SEQ ID NO: 671765 - DNA, 280 bp, Homo sapiens
tactgtagcttatcttttccagaatgtcagatacatggaatcatgcagttatcttttttgtctgggttcttcttcttttttttttttaaaaacagaatctcacttggtggcccaggcgggagtacaagggcatgatctcagctcacggcaacctccgcctcccaggttcaagcgattctccgtctcagtctcccgagtagcggggattacagggtgcccgccatcacgccgggctaattttggtattttgggtagagacggggtttcgcacatgtgggtc

SEQ ID NO: 671766 - DNA, 539 bp, Homo sapiens
aacaaggcgtaatgtggaacagcagatactaccacccctacacctacagccatctattgctcctggtatctccagctagccctcctgggagtcttgagcctaaggcagcatggcttcaccctatgcgtagagagagtggtcgccccatcaatgcccccacgcaaagacttgcctgactctcagcaacaacaccagagctctaaaaaaggaaagctttcagaacagttacaacatagcaatggcatttatgaaggagttactctctacgaagcatgctgcctatgcttggcctttctatacaccagtggatgcttctgcacttggactgcatgactaccatgacatcattcagcaccccatggacctcagcacatgtcaagcggaagatggagaaccgtgattacctgtggatgcacaggagtattgctgctgatgtacggcttatgtactccaactgctataagtacaatcccccagatcacgatgtcgtggcaatggcacgaaagctaccaggatgtatttgagatccgttatgccaa

SEQ ID NO: 671767 - DNA, 235 bp, Homo sapiens
ttgactcgtgaagcatagattagtgagttttaatgtctttgttactaatcagaaataatcagtgaaatttagtatggcatctggagccttcatgattgggggtcagtgtgctacgtatcccactggacagtccttgcattgacatactggcacaccgaataggactgcatcttgagttatgaatgcccaaaaaactgcccaatctttaacgtctagagatgagttacctgcttga

SEQ ID NO: 671768 - DNA, 973 bp, Homo sapiens
ggttattactcaattcaaagaaaagaaagggctaataaaacttaaacttcaagtcaaaaaaaaaaaaaaaaaaaaaaaaaaaaaaaaaaaaaaaataaaaaaaaaaaagaaaaaaaaaaaaaaaaaaaaaaaaaaacataatatagcagatacctatatttgatagaaaaatatgagcagagctcaaacgctaaagacccccgtaaaccagaccgagctaccgtacgaacagctaaaagagcgacacccgtctatgtagcaaaaacgtgggcagatctataggtagaggcgacaaaacctactcgagcctggtgatagctggctgaccacgatcgaacttcttcacgttcaaacctccaatttgccccacaaaaacccctctcaaatccccccttggtaaactcgcacctgtcagccccacagacgaacagcctcctaccggacactccgaacccaaccccttgtccaccagagtcaacaaacttccacccccccattagctcggcctaacaagcaggcacctaccttatccacaagcgttcactctcaaccacccgactacctcaaatatcacaacactattcactcgcactcctcaaaccaaattggaccacctactccccttaccaacgactactgtcgcctcctccccccaccaacactcacccccgaactaacctcgctcccgtcctaccctccctgcccctcacgccccctctctccaacaaccagcacctccatcaccctcctttcaccctcaacaccggaccccgcaccacacccccccgccccgccctccacacgactagcaaagagcccacacccactcctaacccacccccccaaccccatctgacccacccctctcctgccccacccccccgccatccccccccgcatctcccctgccccccggctctcgacctccgccgcgcaccccccccccgctcctcccgatacactcccccacccc

SEQ ID NO: 671769 - DNA, 454 bp, Homo sapiens
tttaaataatattgggcatacaacagtttggactcatcacaatgaggtcgggtgtgggattatccacttggggcattatactggtgctcaaaaagtttcaaattttggagcattttagatttaggattttcagattagggatgctcaccagtaagtgttatgaaaatattccaaactccggctgggcatggtggtgcccacctgtaatccccagcattttgggaggccaaggcaggtggatcacctgaggtcaggagttcccaaccagcctggctaacatggtgaaaacccatctccactaaatacaaaaaaattagccaggggtggtggtgcattcctgtaatccgagctacctgggaggctgaaacaggagaatcgcttgtacccgggacagcaggttgcagtgagcagagatggcatcattgcactccagcctgagtgacagcactgcact

SEQ ID NO: 671770 - DNA, 146 bp, Homo sapiens
taccatcttctgctcttacacctagtaggtgtctcctctatcttaggggccatcaatttcatcacgacaattatcaatataaaaccccgctgtcataactcaataccagacgcccctcttcgtctgatccgtcctaatttacagcg

SEQ ID NO: 671771 - DNA, 805 bp, Homo sapiens
acttatttggattctatggtgtttgtttcttagttagtatgtgcatgttttctttgctagtaccggttccccgtgggtattctgcgctctgggtagtattccgtgcgagatgtgtcatcttgctgttgtcacggaagtgttcaccgcagttatgatagtggcttgttgaatgtggacgtgatgaaggcagagcgatgtgtctgtttcgcggtgtgatcttcgtatgacagtcggaatgtgctgtggcagacgacggtgaggtgtgcggtctcgtacactgcgttttctgaagaaagtgtctgcgctgttagagtgaatggtgcgctctgaggtatctggcttggggcagcttaggagagcgctgctcgcgtgcttggtggatggcaggatgtgtgcgagattacgtgggggtgctacgtgtttctgggtgatagtcgaaggatgcctgtgtctgtcgttgccggtggctcgtgatcggtatcgcctgggtgtacacgtcggcctctattgtcgtgacggttcatgcaggaccgcagagatgagttggttggtctgcatggtggagctgtcaggggcgtttggtcgatggtagtctggtatccgcctgtgacggagttgtgttgtctgactcctaccttgctgctgcgagacgtcgtaggctctgaaagaataagaatcgggaaatagacgcgtcggtccacaacgtgctattagcacacactgagtctatacagaacgtcaaggacctactctcaacgcgagatcagcccttaaacaatggatcgcaaccaaagagcaacagaaa

SEQ ID NO: 671772 - DNA, 434 bp, Homo sapiens
cctgttagacgataatattacagaagtgtacgttacgctaagtgatgagtagtcccgctaaaagacatttatgtttttataaagatggtagttatggttatcaggaggatataatctattatcttaaattaggctaagaccccggccttcaggccggggatacagccgtaatttaacctcatgctccattttttggcctccttttccctaacagactcccataactaccataaagcacatctagctctagctagactatatgaacgtgtcagtaaccagagacatgactggcagcacaagatcactcgaaagctggtagacgaaagccaagctatctgcatagaggatcttcgtagctccttcatgttccataaccgcagacttggtaaagcctcagaactagagaaggagatactctagaggattaagtagcc

SEQ ID NO: 671773 - DNA, 369 bp, Homo sapiens
  misc_feature (1)..(1): n is a, c, g, or t
  misc_feature (45)..(45): n is a, c, g, or t
  misc_feature (231)..(231): n is a, c, g, or t
  misc_feature (312)..(312): n is a, c, g, or t
  misc_feature (355)..(355): n is a, c, g, or t
ngtgacagagtctcaccctgtcagcgggctggagtgcggtggagntcttggctcattgcaacctcccactcctgggttcaagcaattctcatgcctcagcctcccgagtagctaggattacaggcatgtaccaccacacccaactaatttttgtatttttagtaaagatggggtttcaccatgttagccagggatggtcttgatctcctgacctcatgatctgcccgcctncaacctcccaaagtgctggggtacattttaatatctggtagtgttcaggaactccagataacttcccctgccctgctcttntttttacacaagttttccaaatattcttgtgtgttcatttttnaacaccaccttaca

SEQ ID NO: 671774 - DNA, 467 bp, Homo sapiens
tggttatataacaaaaaatggtggcatagatgatgtgttccttctacccctccctctttcccatttgcacgttattgaactatttcccttaattctcctataagctggtggaagatacagacagaatggccagactctacacttccactgacatttaaaggtcaagtctccttgtatcataaataatgatatctcccttccacacgtagggaaaggataactgaaaattacctaaggtcagagggggagggaacctttgaaagttcacctggcaaaaggacttgatttactgcaattttgctgaacactttagctgagatagctcgtttcatgaagagttgaaggaagttaacatcaaaggatgaattcatccagctattgtttttcacctctgttgttaattgattttaatttggttaccctctcaataaataaagacttctaaaactgggtcaatgacataaaaa

SEQ ID NO: 671775 - DNA, 295 bp, Homo sapiens
tcggccaggtctctccgtcctgctgtaaagcgtctgtggtatatgaaacacgtctcacatatttcttatattgcattcattagtgaaaagagaaactatacgactcataagtaggacacattccagtatatctgtccaaggcagcaacaagctcgttcgtgtttaaggcactaaaatcagaattctgcatataaacatggctcatattcgaaattgctctatagtcattagaagccagagaactgctaagtctcctgcaatgtttttctgctttttgccttccccatatatatgg

SEQ ID NO: 671776 - DNA, 178 bp, Homo sapiens
tctagagcatcccccgtgactgacccaatcaactcacaatgagaaatcaccggccaggcgtggtgactcacgtctgtaatcccagcactttgggagggcaaggcaagagcttgagcttgagcctagacgtttgagaccagcttggtcaacacagcaagaccctgtttctttaaaaaaa

SEQ ID NO: 671777 - DNA, 223 bp, Homo sapiens
gagtgcttacgtgagaagagggcacaaattatcctgtgctaggcgggtggaccctatcttctcggtagtgagtggatggatcacgtcttagagtgatagaaacccgtagaatgactgagattatcgacgcacatatgaatgcatacagtcaggccactctccttacatagatgaactttaggaggtcgtgacaaggatcgcacaaagtgacgcatattcatgt

SEQ ID NO: 671778 - DNA, 1382 bp, Homo sapiens
  misc_feature (1136)..(1136): n is a, c, g, or t
ggccgacgggagccggggcggggctggctggtccagctgaaggagcgcgcgggctggtctggccccgccccctcctccgtcccgccttcccgtgtgaccttcagagggcccgggtggctgggcgcatgtgcccctgcggctgtgcggcgggatgttcgtgcatggaggagaagatcttcgctgggcaatggtgctgctgtgtctgcactaatctgcgcggtccgactggcgccgaagttgtgcttggtatggaggcctacctgatggacatccctcggtgtgacgtaagtctcagatggacggcgctagcttcaatgcacctgtctgtctcactgcgcgaggcttcagacatgagtccccaatatagctactaatgcccaatcactaataattacatcccatctgcttgtctctcaggatgacgggctgcctgcagctgcatgccccagtgaccattacctgtgcatagtcagccaacacttccagtgacccataggcatgctaccatatttactttgcagtacaccatagaccatgtcgttggctcttcattccaacccaggctttaccacaatgcattgcgccctgaacgttttgtttcctttctcagggctgtgtcggactactcgcatctcatcacctggctctctcctccagcagcgctaccgctgggcatccaactgtagaccatgctgctttccccgtacggaagtttaccgagctctcgagcggggccctacgttaatgcctttcggctggtgtgtccctacctcccttgtgcgcttagtcgcctttagcgccgcttctctctttttatactcaagcgatgttcgcgatcccctcggtgcgcccccttgtgcggtggtttccccatctggtagagctctctaacaatcgccatgtttagacggcgaaggatacccttttttacctcctactgcgaaatcctgtctggaccttgctgcttttctcgctggctggtaccatcggaacattaagccttttagtgcggatttggccttccgtttcgtttcctcgtgtttctcgcgacgcgggcgtttgggtccgctctggcctcctggcgatatggcgtccctgcgcttatatggcgggtacctctggtattactgtcctgncaagtgctatatttggtccgggggcttggcggcaatatgccttttgggtattttgtagttccgtgaaatattgcatggctcctagcgatccttagtgcactgcatgctttgtgctcttgtggaactgtcggacagtggggattccgcatgtgcgtacctttgcatcctgcccggtttgtattggcgatctcgcattctgtggggtcattggaggccccgcttgttgtgagtgcatcatgctgtctc

SEQ ID NO: 671779 - DNA, 223 bp, Homo sapiens
catagaggccacggaggcaaaccttctttcacccccggttcagccgagtgaaggccaacatatctcaaaaggaatttggctggaaaatgaagagaaggcaacacatagacccggggaaatggaaagacaccgtaagcagaagcgtaaggagcctcagagatttttctcatcctatgtaccttcttcccttcagactggctccggtggcgctctatgatggggt

SEQ ID NO: 671780 - DNA, 218 bp, Homo sapiens
  misc_feature (218)..(218): n is a, c, g, or t
tccgtaacgacgcatcccctatgttcagacaggattacacgtgtccgcctactcaagtcgacaatttcactttcgcatacggggctgtcacccgctatggccgatctttccaacatcgttctgctaattcacttgtcggcactggcctggtccgcgttcgctcgccactactaacggaatctcggttggcgctcgttacggaggatccgagctcgaan

SEQ ID NO: 671781 - DNA, 169 bp, Homo sapiens
gtcacagtaacactttattacagagctgattgtttgttcctaaaatttttcagggaccctagaggagagcttttatacaattaccgatgtgaatttctctaaagtgtatattgtggtgtccagttatattatttaaaaaagggttactttgtaaaaatggtatataaag

SEQ ID NO: 671782 - DNA, 1009 bp, Homo sapiens
ggccgacttgagtgaactcagctcagagttctaacggaccagcattctgggggccatgttctctacaggcaaatggaatgcttttccataagcatccagaatgtaatgtggttgctcgcgtgaacggaggaggctacgccatgcgaggtcctgacggtacccatggaggtgatgcgtacttctgcatgcagtctacagggcatctgacaccgtaacatgagacgtggcgatgtgagatgatgacttggcagtgtgagacatagggtcactagagacccttctgggtcagaggagagagactgaataggactaaaccgcgtcctcgtgttcccagcacgtaatctcatatagccctcagtcactagagggagtcccccgcaggattggcgaggcacattcccttgggacagaggctacaggtcggagcttacataacccctgcacacaaacagcgccaatccaaacagaccacctgaacaaaaaaactcgggaaacacacaccaaacgagccccacacaaagcaaacaacaccaacgccaagaccacgagcaccacacaccagtggtgatcaaaacgaggaaaaggaagaaggaaaaacccgcgcaacacaacgacacggacaccaacacactggaaaaaccaaccaaggagaatggaaacagagaaacagaaaagaaatcatgaccacaacacagcgaaccaaggagaaagaaacaccaacaaacaagaacagcacacaaaaccaacaacaaggaaccaaaaaggaaagcaaaaaacagcagaacaaggactacagacacacaaccgccacaacagcacgtggcaccacgccaccaccgcagcaaccaagaaccacaaccccacaaacaccactggaccaacacaaaactgaaacaaacaacaccaccaatcagcaacgaaaagacaagacacatacagtaacacgcacgcacaaccaagagagacaaaccacccacaaaagaaaacagcataagaacaaccgcccaac

SEQ ID NO: 671783 - DNA, 883 bp, Homo sapiens
ggaagcctagcagaggactttttagctgctcactggccccgttgttggccgactcatccgcccggaaccctaatcccctctgcctgccccaagatgctgaagccagcctggcccacaccgatcctccctttgtgcctcagctgctgtggggcttggagtagccgcggacgcccgagatgaccacacggatgggtggcgtccaaagatggagctaacacgcgctatcttacggggcgggagccccggtgtggccaccggttcacctcgcaattccccggccaaaacgcctcttcagggtacccagggcccaggtgggttgccatcgtttgattcggtggggccgggtaaaaccttgactggaccgacagactctacgggggtgcatccccaatggtcctaaaaggcgtctggcccttaaaagccctgggctcctggtcaggaccgcggcctggcgggtgctaaaagaaccggtttaccgccgaacagaacatgggaagccactaaaccctggagctaagtgggcgcgaacaccgcgccaggcgatggagcggggagaaagcagtgagagcgtaagagcctgcgccacgggggataaaacccaggaaaattcgggttaccaacacaaccacacaacgcacacacggcgcccgcccaaccaacataccgccacaagaacaccctgtcaatcgcacgccacccacccagaaccacatcaacactagaggtggcgggagcccacatcgaagggagtccagactggcccacgaagcggcgaaagagtggtgcgataccaacatcagcggcacgcgactcaacacggcggggcgcaggacaaagcgcaggtaaataccgcgtgagagacacacgcacgcgcacgggtgag

SEQ ID NO: 671784 - DNA, 164 bp, Homo sapiens
agaggttccaagtatgcacagggtcaaaaccagaagcaatatttggcttatttgggcttcagccattccagtccagtatgggttacattctttaagggagtgtaatcctattcagcaggaatctaatttctagacacccagcaaacccattcctatcagggggg

SEQ ID NO: 671785 - DNA, 472 bp, Homo sapiens
ctgtatgtgtctccctctctctcggtctcgtgtatgtgtctttctctcctctttccgtccgtcgtctctccctgtctctcatctctctctcctctttcctcagtctcgctcctctctctttccaaaaaaaaaaaaataataaactacataccagggctcaaagaaatcagagatgacacagacaaatgaaaaacattccaggatcatggatagggaagaatcaataacaagaaaatgaccatgctggcaggtaaatttacagattcagggcttttcccattaagctaccatggatattcttcacagaactagaaaaaacagttttaaaattcatatggaaccgaaagggagccggaataaatagccagggcaatccttagcacagaaatgggtaaacctatagacaaatcgggacaactggatggtgtaaaacagcataccaaacacacaagaatcaattacggttctagaa

SEQ ID NO: 671786 - DNA, 342 bp, Homo sapiens
ccaagttctgatgataactgctgcatcacagttgcacaaaggctgatgagttgtcactgttcatcatgacatctgctcggcatttgtcaacttcggcacgttttactgtgatcatcgccttctgtatctcagatacgttatttactacaaacacatcatggagtcgcttgacgagctgcgttgctgcatgaccctcatctcttaaatccttgaacacagcttctagtttgtccaaagcagcactctgataggcagcaaatactccatcaattttctcagctggtattacccctggtatgtctgtaatcactttctctgtgatctcctttccagctgttaatc

SEQ ID NO: 671787 - DNA, 613 bp, Homo sapiens
gaaaaaaaaaaaaatgccccaacttaaattacttaccgtattggcccaccattaatttacccccaattacttcctttacacttatttccttcatcacccaacttaaaatttttaaacacaaacttaccaccttagccttcccttcaccaaagccccaaaaaaaaaaaaaaaaaaaaaacaaaaaaaaaagtgtgtgtgtggcgcgcgcgcgcgcgcgcgcgcccgctcggagaaaagcgttttatatgatagacacacctctcgcgtgtgtgggcgcggcgcggcgagaccacacagagggtgaaaaggagaacaactagtgggcacaaaagggtgtgtgtcctcacaggaaagaaaactccgcgggcaacagagacaacaaggcggcgggggagattctccaccacaaaataaaaaaaacacgcccgcgggggggtgaaaaaaccgcgagaggtttttctttgtaaacaatactctcgacaagtggagagaatctcggagagaggaaacaatataagggggggaatcttattataaagcgaggggagatctctcacagagggagaactccgctaaaaatactaaaatttacccccccaatgacggtgtggca

SEQ ID NO: 671788 - DNA, 206 bp, Homo sapiens
cccgcgtcgctgcatttattgcaggtgggtgcactggcgggagggcaggtccggcggcaggtcacactgcctcgtcggtcaccgggatggggttgacctgggacctcccgggtccccccgccgcaccgcagcctcctccatgctgggcttctatgcggcggccgggggccgcggcggggggttgctgggcggctgcttgatggtgc

SEQ ID NO: 671789 - DNA, 522 bp, Homo sapiens
gactagcacgtgtcatcactgctatcgatcataaccagcgtagtaatacaagcatatctagtgctgattataatataatatcgtaatacatatagtagtttgtagggtaaatacccacaacaacagtagtttcttacttagacaagagaatgcttatttaagtcgttagacttccattctggcaaaatcttgccttatcagaagacattggaatagagggataccctttggtgttcggtcttctacttagaaaaacctatagcagttagtaaatcttgtagtattcatctttgtatactgaagatacggttggaattacattgatacacacagaggggaaccgatttgttttatccaatgtgaattataaatgagataatccactgttattcattgtggagttgttgagactattaaagactcattgtctttgtattccgctcttttatagtgtaactttatccccacctctgcttgctttctttccctcccctccagtgatgagacgtagaagggggtacc

SEQ ID NO: 671790 - DNA, 108 bp, Homo sapiens
atccgaatgctgaagcagtaggatcagttgagttcggaagggcggagactgcagtgagctgagattgtactgctgcgctccagcctgtgtgacagagcgagaccctat

SEQ ID NO: 671791 - DNA, 701 bp, Homo sapiens
gcagcgtgccccatctttgttttcacccgcttccagcgcccacctgctatcgtcctagcaacgactgtcccccgagctgcgccccccaactgtgggtgtgagcacccattaatgttatgtaattaagaaggggtccgtggcttttaccaaacattgtatcggttgatacgttgggcgcgttaagttagtgtgggcccacccgggcatccgcggggtcccataattgtgcagagtgtggcgtcgtccatgcgttgaatcgtctgcctacgtagaagatgcaggagaaggccattttgtaacgcacaatatattattggtcactcacactgatgttcctcactaagaaagtattgtcttttttaacaccgacactagattcgtctctcctgatagccatttgtgtgtccaattatttaaggatatttccgtcgtctctctagtgaatacacaaccgtacgcgcatttcctccagcggtctctagtcttacttcccccccacacaggacattttgtctaaggagaagatatgttcccttccacgcggggtaatagcccccctcgagagtgcggcaagagtttctctcacagggttatgtgtcttttcgaaggttgcgccgcacttgtttgcactatgctgtcggactccacattcgctctcaggtgatcttgttgagtcccgccccaccaatgtcgcaagaagt

SEQ ID NO: 671792 - DNA, 109 bp, Homo sapiens
  misc_feature (92)..(92): n is a, c, g, or t
gcacccccatttgttagcacaggccccggtgaaccactctgagcgagggtcgtaatcggcttcgaggctagcctccaccggatctggaccancctgcgggcagacctgg

SEQ ID NO: 671793 - DNA, 177 bp, Homo sapiens
cttccttcatagccaggtaactggttagcacacactcctttgatagacacaactcctctctcttctgcttgaagttgtagcttgatgtgagggtcgctcttctcccggaccccgtcaactcggccgtcgggatggatgcgcaggaagaagcccccgtttttgcagtacagccggaga

SEQ ID NO: 671794 - DNA, 979 bp, Homo sapiens
tccccccaaggggggggttttttaaaaaaaaaaaaaaaagggggggcgggtcccccgccccaaagaggggggggggggggggggggggggtgtttcttggggggtgctcacaagtttgtgcctcccccctcctagaggggggtgttcccgcggtggggcgcccgccgtgtgcgtgccgcgtcttcttggttcgttcttctatggactaccccccccccccccggttgtcgttcttctctcctctcctgacgccgcgcggtggttcgtagaagagcgtctcttcttcctggcgcagcctctccccttctttcgtcccgccgtgtctgccgagtcccctctctctgcgcgggcgagttcgctgcggcgggctgtgtgagacagaaaaaagatcggtgtgagtccccgcgtctgtcggagtcgcgggtgagtcctttctctctccgcgcggcgtgcgaaccagaaagcgtctgtctctctctctgcagcgacgagccctcaccacgccagccgcgccctctcgcccgactgcctcccccaccggccggtgtattggccacgacccgacctcccgttgttgtccaccccccccccgcgacacttggttgggggagtcgctcccccctcgtcgggcggcgcgctcgtctcactcccgtgagtgaagggagagcttaccaccgagagcgctacgctgtgtgcgctaccgagcgacgccctcccctccgaaaaaggaaacagtcccgcacgagaagattacctctctctctcctctctctcgcaggagaacaaatccccaaccaccccccgagcgttatgtgtgtgggtctcccccgcacggggggctcccccaaactagaggttcgtagaacgccgccgacggggggacccccccctcccgcgcagatgtaacctccccccgcttcagcaagagaaccccaccacaacccacagggggtggcgggctgcctctccgctccacccc

SEQ ID NO: 671795 - DNA, 1010 bp, Homo sapiens
gcagcgagacgggaccctctagctgcaggtcaccacgcccgggtcaagagcatcccatcgtggctgtattgcgcctcgactcctggtagggcctgccatgggctagcagggatccacgacttgtgctgctgaccacttcatttggctctctacaactgccatggtgcaccagcggatgctgtgtacctggactcggtaagaggagcgtgtaggagtatgttcctcagccatggagggcgtgttctcctaacagggtgtcggtccacggttcatgtctaagaacagtaccttggaaattattgggtgagttggaatgaatgggagtccctagagcactctgcctgagtacctcttctagactgtcaagcctcaaggttgcctgaagaacggtgcgggcgtctgtgacgtgtctcccgacgcgaatgagccgcgtgtctacgttgggttcgggagggtgagtgggcatggtcaactgcaacgatgaccagggtgtgcttgctgtggacgctggtgacaacaactacggggacggccgtcagccccatgtgcttggatcggcaagcgtggagatcctgcggagctggaagaaccacggctgcagtcgcgtcaagtatgggcagtgctgggtcttcgacgcgtggctgcacagtgcgtgaggtgctggcatcctacccgcggtggacaactacaaatcgccccaggacaggaacaagacaagcttctcatcgaggtacttccgcgaagaagttgggcagatcatgttggcaagagcggagatgcgtgctgggagatccactggtggtggaaccgtagagaacacgcacgcccgggccggggtataaggatggaggacgtgccaagcccccagagacaggaaggcgtcagagtgaacatcgcgaggccaggggaggtgacaacagtatcacagagcagaggacaaacaggaacgacaacaaggaagcgaacaacagccagaaaaagaaagcgcagggaacaacaagagagaagac

SEQ ID NO: 671796 - DNA, 1182 bp, Homo sapiens
agcggagtcattctccgatcagcgcgtgaacgcagctcggcttgccgcgtgtgcaggaaacaattctgcagaaaataatcatactcagacctgcgcgattgtctgcccctaggtctgtcgctcagccgccgtccacactcgctgcagggtggggggtgcacagacatttcaccgcgggagagaacatccctcccaggccagcagattacaatgctgcaagactataggatctcaaatctcggacattcaagttgtatctcactgggaaacttggccagttgtctcctagcgcagtgtttggcatcattagttccgcaagacgcatgggggcacgatctagacgttaggaagagtcacaaatatctctcttttagttgacacaagagggtgcggcaaagcggcaagtaagtggcgcgacaaaagcaattacaccaggaaccagttcatccgtgggagtatcatcgccccacaaatgtgggcaggcacacaaaaggcgttcacaacacccgcgaaaaaaacacgaggacgacgccagggaagatcctacaaagaggagggaccttcatggggcacaacgtggcagtggcatatgctcgccgttccgcgttccacagagcgccggcgttccaaacaccgagatggctatatagtatacaaagcgtggcccgacaagacgaaactcacaggaaagactggaacaaggcccccggcggcacacgttcatcatcacccacgaggcgtggataggcaatcgggggtttatcacaccaagggaggcccgcagaaaagggggaaacatatgagggaagaccggacattaggaacggacttcccaacgaggaagggagacaccaaaccagccggaagacagaaacaagacaagacgatagtgtacgacaagagaacgatccagtaccgaacgacagaggaacaacggagcagaaccacacagtggagatctgacccaaccaggtaaaaacatgtggcgcggcgcaccgaaaacacacgccgcgcgcgaaacgcaagggaggcaaagagagtctatacagcagaggagaaggacaacgaacacacggggagagcacacaaacgagccagatggacccccaggagaggggacacaactaagggagatgggacagtagcaagtggcaagattgcgatcgtaggagacatcacgag

SEQ ID NO: 671797 - DNA, 483 bp, Homo sapiens
  misc_feature (5)..(5): n is a, c, g, or t
  misc_feature (80)..(80): n is a, c, g, or t
ccttnctagtcaatcatcctaaaggaatggttgggtccactttaccctttcagccctcaaacaattagcctaatttagtntcaaagattgcatcccatctctaaaattccagtaaattttcctaatcttggggctacattgctaccacaaaagccttggtgaatagatattatcttccaggcattaagaataccaggttggctgagtacagtggctcatgtctgtaaccccagcactttgggaggctgaggtgggtgaatctcttgaactcaggagttcaagaccagcctaggcaacatggggagaccctgtctctacaaaaaatacaaaataattagctaggcttggtggcatgtgcctgtagtctcagctactcgggatgctgaggagagaagatcacttgagccgaggaggttgaggcagcagtgagccgtgactgtgacactggacttcagcctgggtgacagagccagaccctgtctc

SEQ ID NO: 671798 - DNA, 123 bp, Homo sapiens
tacattcatctgtgtccgcagtgcaggaacgcggggcagacacctggggaggctgcaggtgggatctgccggggcgggattctgacttagaggcgttcagtcataaccccacagagagagcgt

SEQ ID NO: 671799 - DNA, 158 bp, Homo sapiens
gtccttggctcagtcttcaccaccgtgctcgccatgacctctgagtccagcggccacccgagttccgccgctgcggtccccaccaggtgggtcccgacgcgacaggcgatggtctggcttttgatccgcggcaggcgcgagccctcttccccagccag

SEQ ID NO: 671800 - DNA, 354 bp, Homo sapiens
cacgaggagctttttgacagcaactctcgcccagtgcctgtcttataaccatacagtacctgtgatactcctccccctctcaacaatcttaccccttacagggacgatggaaaagaggcatgtcatcttctacatagacccttcacacttctttgatctttggaaggagaagatgctgcaggacagtattgatatcatgattgatatgagatagcataagaattgaaagtgagataatccaaatcgagggaatgtaaacccacgtaaactcaagacacgttcggaagagtgggagaaactgaatatggggtaagaatttgtggagtccagagaaaagctggggacgtctgggta

SEQ ID NO: 671801 - DNA, 175 bp, Homo sapiens
atggtggtcgtctgacggtccggaagacgaggaggccgggcgacgggctggattggctgtcccgaagctcaagggggtacgctggggctctcagaatggaggtaatgtccctgcgtcccaccactcggccctcagcacccattcccctcctatggctgtccacctcctctgtgct

SEQ ID NO: 671802 - DNA, 189 bp, Homo sapiens
acgacgcggagagtccggcgtcccgcagccaggccgggtgaggctggcgggcggggcgatcaaggtcagccagcgggcgtcctgatcttcgctcaattcgcacaggataggtgccagcaggttcaggcagctctcagccgcaccgcgcaacgacaattcactgaacgcctcaggttcgccgccccaggt

SEQ ID NO: 671803 - DNA, 151 bp, Homo sapiens
attccgagcttggcctttccgtatgagatagagtagggttgtggtgctggagtttatgttgagtagtaggaatgcggtagtagttaggagtaatataaatagttaaattaagaatggctatgttagggtcatacggaaagaaccatgctac

SEQ ID NO: 671804 - DNA, 343 bp, Homo sapiens
  misc_feature (64)..(64): n is a, c, g, or t
aaaaagtgcgatatgcctttgacacaggggcagggcactctgccttaaaaaggcacctcaggcncgggcgcagtggctcacgcctgtaatcccggcactttgggaggccgaggcgggcggatcacaaggtcagaagatcgagaccatcctggctaacacggtgaaaccccgtctctactaaaactacaaaaaattagctgggcgtggtggcgggcgcctgtagtcccagctactcaggaggctgaggcaggagaatggcctgaacccaggaggtggaggttgcagtgagccgaaatcacgccactgcactccagcctgggcgacagagcaagactccatctca

SEQ ID NO: 671805 - DNA, 252 bp, Homo sapiens
atccctcattaacttagagcaaatcattctctcaaaatactagcaaactgaatccagcatcatataaaaaaaggttattttattaactactccatagggttgctgtgataagcgagttagtatgtgcactgggtgctgcacatagcatgtgttccattattgttcatttcttcttcctgttttctcatgaatggatttgccaggatgttctatgttcaccattatccggattctctcttttatgtatagttt

SEQ ID NO: 671806 - DNA, 198 bp, Homo sapiens
gaatcagacaccaaaataacagctaataccaaggatgaaccacaccacacaaaccatcaaaggagcacagcagtcaagccatcatccaagccacccaaccaactagccagctcccaagagattctcctacccagcccactactgggtccttctgcccaggaactgttactctcagatctgacttggagagtcattcaa

SEQ ID NO: 671807 - DNA, 194 bp, Homo sapiens
gccgctcattaaaggtcagtttgttcaacgacttaaagctcctatatgcatctgagttcaaaccggcaataatccaggtcggtttctgtctacttcaaattcctccctgtacgacaggaccagagaaataaggcctacttcacaaagcgccttcccccgataaagtgatatcactctcgttctcattctcttgt

SEQ ID NO: 671808 - DNA, 366 bp, Homo sapiens
  misc_feature (52)..(52): n is a, c, g, or t
  misc_feature (132)..(132): n is a, c, g, or t
  misc_feature (135)..(135): n is a, c, g, or t
agttgcttcaagggccctttttattttattttaaaaaaagcagtttttggantgagcccagcatgagttccccccagccccagttgggtgaacttttaggcccagtggggcaaactttttcctccccactgntgntgggggaatggggttggtaacgtcctgtcctgcccctgtcctccacaggcatttttgggttcctggcctttggctttgtgctcattaccttcaggtgccccttttacgattttttcaaccaggctgagtgggagggcagcttccgggatttttttctgtgagttaggggcatggaggcggcagtgttgggagctggagccaaggccataaaaacccccatgctccccccga

SEQ ID NO: 671809 - DNA, 1241 bp, Homo sapiens
  misc_feature (35)..(35): n is a, c, g, or t
  misc_feature (255)..(255): n is a, c, g, or t
  misc_feature (261)..(261): n is a, c, g, or t
  misc_feature (267)..(267): n is a, c, g, or t
  misc_feature (300)..(301): n is a, c, g, or t
  misc_feature (350)..(350): n is a, c, g, or t
  misc_feature (361)..(361): n is a, c, g, or t
  misc_feature (386)..(386): n is a, c, g, or t
  misc_feature (400)..(400): n is a, c, g, or t
  misc_feature (412)..(412): n is a, c, g, or t
  misc_feature (416)..(416): n is a, c, g, or t
  misc_feature (442)..(442): n is a, c, g, or t
  misc_feature (447)..(447): n is a, c, g, or t
  misc_feature (467)..(467): n is a, c, g, or t
  misc_feature (475)..(475): n is a, c, g, or t
  misc_feature (502)..(502): n is a, c, g, or t
  misc_feature (522)..(522): n is a, c, g, or t
  misc_feature (526)..(526): n is a, c, g, or t
  misc_feature (528)..(528): n is a, c, g, or t
  misc_feature (532)..(532): n is a, c, g, or t
  misc_feature (544)..(544): n is a, c, g, or t
  misc_feature (547)..(547): n is a, c, g, or t
  misc_feature (557)..(557): n is a, c, g, or t
  misc_feature (562)..(562): n is a, c, g, or t
  misc_feature (574)..(574): n is a, c, g, or t
  misc_feature (658)..(658): n is a, c, g, or t
  misc_feature (807)..(807): n is a, c, g, or t
  misc_feature (993)..(995): n is a, c, g, or t
  misc_feature (1002)..(1003): n is a, c, g, or t
ccaagaggagagctgctattcacagagggggcacnttgggaccaccaagagctctagggtggcagaggggtcctctcaacagcagagaggccgtgttcccgtggatctcggggcaatcggtggggcaatgtaggaggcaagagaaaggcagatgggtacaaccagcctgatatccaagcgtcgtcagaccaacaaccaacagaactgggttcccaacccatcgctcagcagccgcttcagcaaggtggtgactantctggnaactanggttacaataatgacaaccaggaattttttttnnatacttatgggcaacagtggaagtagacaagtaagggcttgaaaatganactggcaaganacgatggctctagatctacattctncaaaaaaaaaaatnggcttaactgtntcanctttaagtagcatttggctgccattngtatngggctgaagaaatcactatngtgtatanactcaagtctttttatttttcctcttntcataaatgctcttggacantatngngctngcagagttcccntantctggggatnacaangcctttaccgtntcaggcttcattttagcttcaaaacaagctgggcacactgttaaatcatgatttggcagaacccttggtttcggacagtttcanttttttggatttgggatagattacataggagtatggagtatgctgtaaataaaaatacaagctagtgctttgtcttagtagttttaagaaattaaagcaaacaaatttaagttttcttgtattgaaaataacctatgattgtatgtttngcattcctagaagtaggttaactgtgtttttaaattgttataacttcacacctttttgaaatctgcctacaaaatttgttgtggttaaacgtcaaaagccgtgacaattgtgtgcttggatgtgatggtattccaatttctggtccatgtagattcaataaaacttaaaaatctattcaaaacctnnnaacaaanngggagaagaaagcgacgaagaacagagacgagggaagcgacagaaacagagagagagagagagggggacgaagagagagggaggaccgagtgcaggatcagccagagggacgagcgcaagcagcaaggggatgcacagaggacagggggaagaggacacgagagagagcaacaagcgcagcacgaccgagtgcgagcgacgagacatagagaaggaaaagagaggctgcgcggagcgt

SEQ ID NO: 671810 - DNA, 991 bp, Homo sapiens
  misc_feature (408)..(408): n is a, c, g, or t
  misc_feature (557)..(557): n is a, c, g, or t
  misc_feature (743)..(745): n is a, c, g, or t
  misc_feature (752)..(753): n is a, c, g, or t
gcagctaagtaagactttggctcaagattccaccagtgtttacacgtcatgtcccttattgtgtcccaggatcctgggatgttcaggacaccacggtggtatgtagctagtttgcctccttagatctcaatgtcatgttagtgatatctgatgtgtgtgctcatctgtcactgtgtccacgggatttattgtgtgaaaagcagtcatcaattcatccatccactctcctatcgcatggtacatttaggctgtgtgtcaatatttggcgattagaaaatgctgccagtggtacagggagaataacaaatgcttaaatcgatatacaggaccttcattttagcttcaaaacaagctgggcacactgttaaatcatgatttggcagaacccttggtttcggacagtttcanttttttggatttgggatagattacataggagtatggagtatgctgtaaataaaaatacaagctagtgctttgtcttagtagttttaagaaattaaagcaaacaaatttaagttttcttgtattgaaaataacctatgattgtatgtttngcattcctagaagtaggttaactgtgtttttaaattgttataacttcacacctttttgaaatctgcctacaaaatttgttgtggttaaacgtcaaaagccgtgacaattgtgtgcttggatgtgatggtattccaatttctggtccatgtagattcaataaaacttaaaaatctattcaaaacctnnnaacaaanngggagaagaaagcgacgaagaacagagacgagggaagcgacagaaacagagagagagagagagggggacgaagagagagggaggaccgagtgcaggatcagccagagggacgagcgcaagcagcaaggggatgcacagaggacagggggaagaggacacgagagagagcaacaagcgcagcacgaccgagtgcgagcgacgagacatagagaaggaaaagagaggctgcgcggagcgt

SEQ ID NO: 671811 - DNA, 234 bp, Homo sapiens
gaagaggggatgtgtctatgcggccgcatgattaaaatttacggagtaaggcataaatgttttggtcaagtgttgcggctgaaatagctaggtcttgtgttacagtccatcaccaagcccatgatgccggatacaataaaattgatttcaatcgtatcggggctattgttggggtaaagtagcttcgagcgcgacaagcttttttgcattaagggcgactttcgattagctgga

SEQ ID NO: 671812 - DNA, 141 bp, Homo sapiens
  misc_feature (17)..(18): n is a, c, g, or t
  misc_feature (63)..(63): n is a, c, g, or t
acattttaaatattggnncctatttgcttataaaaaatgtctctcctaacttaggtattttantttattttattttattttattttattttattttattcattttttgagactccatctcaaaaaaaaaacacctaccaca

SEQ ID NO: 671813 - DNA, 150 bp, Homo sapiens
ggattggaacccagtgtgtatctcgcatgtggaatgtcagcagtgatagtccacgtgggaagtgaagacccgaaggctcaaggtgacacaggtggctgacagtggtcaaaggctagtggggcaggattcaggcagaggagctctagtggg

SEQ ID NO: 671814 - DNA, 180 bp, Homo sapiens
tttgctgaggatggtgttacatccaaatatgtacatgcctttagattacatgccatattgcgatgggaagaacgtatgtactgctgtttctgagtcgagagctctgcagaggtatatcacatccatttgctccaatgtggaggtcagctcccgagcatctatgtcaatcttctgcctcaa

SEQ ID NO: 671815 - DNA, 122 bp, Homo sapiens
  misc_feature (14)..(14): n is a, c, g, or t
actctagaggaccncatccccggttctgggtagtaaaaattttgagatatattgagtatagaatatcatatctgtgcatattcaaatctaaatagtgaataagttggttgagtatgtgctct

SEQ ID NO: 671816 - DNA, 209 bp, Homo sapiens
ggtccctggtgcctgcacagtgatatggagtgcgcactcatgatatgtatttacacatacatggttcaatggatgatactggctcttcacttgtgtaataactggtaaatgtgtgtcgttagccatatctcactttagatggattgcatctggtcatgttgaagtgtttcaacgttttaaagcagtacataatgtcttatcatgcgcta

SEQ ID NO: 671817 - DNA, 814 bp, Homo sapiens
tttgaagaaggaaagtggtttttcaccacacatagtctgggcgatctaggccaggcacaatgctcacatctgtaatcctagcactttgggaggccgaggtgggtggatcgcttgagcccaagagtttgagaccagcctgggcaacatggtgaaaccccgtctctgaaaaaagaaatacaaaataatttgcccggtgtggtggccacatacgtgtagtcccagctactcaggaagctgaggtgggaggatctcttgagcccaggaggccgaggtccacagtgagctgtgattgcaccactgcactccagtctgggtgacaagagtgagaccccatctcaaaaataaaaaaaaaagaagcgatactcggggaaactcctgcccaatggaggttcgtcatatgttattcaataaaggtgtccctatttataacggacccgtttgggtaatcataaggttatatccctttttaacccaaagggctctttatgaggggcagagcccagtgttggggtgcggccgggacccgatcttcgagaatcccaaaagcacggttgtctccgttcattttaagaccccttagttcaggcagtatatgagccggaacagcatttaggggcacctttgaccattcttgccttggggtgtgggcactcgttggctcacttctccatgtcgcatttagtgtctcatataaacaatttcctggggaactggtctatttacagcccaaaaaaatttcttgcgaatgccggcgacacacaccgtctgaacaacagggttttttccacgcaacggtgtttcaaaatgtcccgat

SEQ ID NO: 671818 - DNA, 1166 bp, Homo sapiens
  misc_feature (384)..(384): n is a, c, g, or t
gtggcacagaggcggcggagagatggccttcagcggttcccagtgctccctacctgagttccagtctgtctcctctttactggtgattattcaaggaggtcatccaggacggacgttcatgatcagcgtgatcgacattggtgaccgtactcagactccaggtggaagcctagtgctttgcgtgtgaacttttcaggacctggctactagttgcgaaaatgactagtagtccattcgcatcttcgaatcgccatcgagtttgaaagaatggaagggtactgtggatgttgctagactacagagtgcagaatacggaatgcttgggaggcaccgagggagaggcaagatacaacaatgtcctgtaccaagtacaggggcatgccnctttgaccatcttgcgttcctgtgatgcaatgcagcgtcaggatgatcaataggttgagtggatgtagagcgcggatccatcattcgctgcgagatacattcctaccggtcgatggaccacttttcccagccagggaggtagagatcgaactcagttactctcgtgcaattggctcttgtagtcaagcctgttccgaaactaatgcatgttctttaacacacgaccatacgcgcgggacgtcgtggaccttgtccaaagcccacggacttccccaagtataacctcggataaccatggttcgagttccgaggcacaggtgaacagaaagacggccccgcctgtgtgcatgaggattgtttacctgcgtcaacttcacccgggaaccaatactctgcgaacgcatattgtgagtagcatgacccacagcccaatggcatcgtgaccttattccgcggaaattgcatcctttatcaaaatgcacaccccaagcccacatgtaacttgtgcgaaggtgagacaaataggttggatcacaatagtcaccaagagggtttccaaagtcgccgatctcaatggaatcaaggtgtgaatccaggggccccattggacgcggaaggctggccgtcaaggaaggggtttccctagccaatcaaagaacattggttgacatcctaggagagaaaaccacgagaaagatgtcgaaacaatgtacaccaatccagttggaatagcacacacggaattatgtggacattggacgaacaatagcgtcgggtttaga

SEQ ID NO: 671819 - DNA, 126 bp, Homo sapiens
ggggctgtggtgtacccagccctgacatgtctccagcagaacagctcaaacagatggctgcacagcagcaccaaagggccaaactcatgcagcagaagcagcaacaggaacagaagcagcagcagc

SEQ ID NO: 671820 - DNA, 465 bp, Homo sapiens
gccagggtattgaattctccctggttttatagactccgctgctttagaaggaagattttttcctctcccaaaaaaggctggagaaagtttgcgccccccttttcccccagttgtcccaaagtgcaggaggcattccaggaggaaagcctgggggtttttctggggggggagctcccccctttgggggggtttccccagggccccccctttaaagggtttatttaccccccccagggtaaatggagcctttttcccccccttttaaacattttaaggccccaaatttggagccaatttttgggccgtttttaaaagttaagctgctaaagtaagtttttgggccttttccaaactttaatttgggacaaatgccccggggaaggaaataacctttccctttttaaacccttttttttaagtggaaaaaccaatttttttaataaaaattttttaaattggccccca

SEQ ID NO: 671821 - DNA, 2073 bp, Homo sapiens
ggctttgtctcaccgtatgcgtttggttggtatgtatccattctctctgtgtgggagtttgtcacatgctgcgtacagtgtgtgttccgcttgtgatccattctggtggtggcccacctcatcgtgtgtgagctgacagaagctcattgagacccccacaagggtggtgttgtgtgggttgcgcccgcttgttcttccccgtcgctttattagtggtgtctgttgttgtctcgccctcgtccgtgcgctctggttattgggtgcctgctggccgcgaccatgagtggttggtttgttgtaaattgttgttcacgtggggggcgtctcgcccgtgttgttaacgagaacttttgtgtgtgtgtctcccttgatgcgcagatggtgtgcctccttcgctggattgttgtcgttctcctcccctcgggtccagctgggttattaggtgcgacgttgcctcccctcggttggtgtcaacaggagtggatgtatattggcgcgctagaggtaaaaaggtgagttggcgcctttggtgaggttggtgggtacgctcaaaacacagtctgtgtagcaaagcgcggccgctataagttgtgggaggaccatagatgttctagagggtacctactttgagtgtgtggacgcaccaaccactgtggtgcgccccgtacgttgtcctgcctcgcaccgaatgtaaatgatgcggttgggtggggcgagttttttctgtgtggtgtgagcgtcatctctttacatctacacatctaaccgggggggtctacaccataatagggcctctgtgatcatatcattcgtcgccgctttatagattctcgtccgtcgtacgtagaagcattaatgttgttttaatttatgagccgcattcgctccacaggacggttgcttcatcctcgggcctcccggagttatttagtaacgatcagttcgtcatagtgcccagcatgggcgcaacaccaacattatcttcgtggtgtgcttcctctctaccatcaccggcaggtgttcgtcggaggaaaagaacgtcccgtcgccgtctctgtttggggacgagaggagatgtgcacaacgaggagtggtgcacggcggtccgctgcttttactaccccacgtataatagatgaggatgttataatgataatgacgcgccaccgacggtcgggactcccacctccgccggcggtgagcccaatgttgagcaacacccggtgtggtgataatactctactgcggcgctgcgcgacgaggtggtggtgctattattttatacttctaactatgttgtcggccaccgctcaagtagtacgtgctcgtattacggacgaccccacacccactatttattattcgttgtggtgaagacatcataatagaaggggcggcttcatatagcagagtgtgtgcgcgggtaacaccacgtcgagagagcatcgatctgctcttgtggagagcgcgctcgacacaaacaaaggccccatcattggttttatacacccaacagctgtttcacagtgggtcgtcattgcgacatgtatatgatagatatatgagggtgtgtctgtctctgtgctgtgtcttcacctcgtctctcacagccctcgtgggtgcacagtcgcgagcacgagacactcctctgtgtcacacggtacacagagtgtcgtcgcgattactttgtgtagggtgggttgagacatctgtgtactctctgtctatgcgctttgtcgcgcctctcttagactcactctctctagacgtcaccactcaccctgcgtgaatctaactatatgttttgtgaggatcacacaatgtgtgacacttctacacgtatgtgtggggggaggtagatatgtgtgagatacaccaagtgagatgggagactctagttctcatacattattgtatatatgtctgtagatagaatatatacacaagcgccaacgagagtgtgtataaccaataataatatgagcgtgcgcggtggacaatatgtatctcacacgcgtctatcttctgtattggagccaatctgtcccaacagtctttctaagtaatgtttta

SEQ ID NO: 671822 - DNA, 932 bp, Homo sapiens
acatattgcatagctggttggtggagaatacataacagtttgccgttgtgtcacctgtcttaagctccctgtgtcccccaaagttgctgtcgtaagaggggacgcggacaacggtgagagaaccccggtgagaacaaattgcgcggattttttccgtcggttcatttgcctggggttcggttcgccaccatttggcttttaatcgcgcgtgtttgagcttttaccattggtcactgatacaggcgcctgtgttggtatgccccgcgcccccgaaggacttggtggccccgccccgcctatatggaattttgagttcccccctcggggcccgccggtggtcgggaaaccaacgttggccctgccccaggaagacaaatagcccggccccaccgaagcggctggcccccccccctgttcgatatgtgggtgacacaaattggggtcgccaaatgtacaacgactctcttttaaagaaagaatgtgttggagacacaccaggcaagttggtccgggcatagaaattcccacaccattgagtgacaccccccgataatgagcccccaaagtggaggacgcccccttatttctggggaccccaacataagatatctagtccccggcgccacatagagtggacaattaatggcgcgcaaccaccacagtagccattccaagcaacttgtccaactggaacgtaggacccagttgaacacggactcgagtaacgactgacatggacaaacaaacgaacaaatacaggggcgaggatctgagcaccagtaaccgaccatggtggcaggaggcatagtggtggcgcaaccccaaaaaacacccggacacctcttcgggcaaggccacaaggcccgctgggaacaacggatgttgggcccgcccccgcccccaagcacacccatccctcgccccacaagaca

SEQ ID NO: 671823 - DNA, 620 bp, Homo sapiens
tagttctagatcgcgagcggccgccctcaaacctaaaaaaaaaaaaaaaaaaaaaaaaaaaaaaaaaaaaaaaaaaaaaaaaaaaaaaaaaaaaaaaaaaaaagggggcggcgcgcgcgcttatcaaaattctctctctcctcaacggggcacccaatattccgccgccgacccagcgtatttatgtttgtaacaaggggtgcccctcaataagagggaggttgttattattataagccgaatggagcgcggcgggcccgcgattgttatataagaaagagagagctgtgaaagaggggagataacaagggcgtgcgacaccactctgggagcgaactctcttgtggaggagaagggaacacctcctcatttctgtgcggggggaggaccacaaatagtgtgcggagaaacacctcactatctataaggagacatatgtatataagagggcctctacagggggagcaaattatatataaaaacttcttcaacaggcgtgtatatataagtggggcgcgtcaaaaccacaaacgcgcggcaattatgtagcgcgcgtggcgaggcggaagagacacaacgtttgcgcgcgcctccgcgggcggagatattgatgtcatctt

SEQ ID NO: 671824 - DNA, 1004 bp, Homo sapiens
  misc_feature (450)..(450): n is a, c, g, or t
agcgtggaggttcgggctccgttggccgagggggccgtacggacggtgcgcagctgtgggagagaggcgtgctgtggatagagccgagtgagctcatagtcccgggatccaatccctctacgattccgaggccgatgacccgtgaccctgcagacgctacctgggaagctgaaaccaggtcgggatgggctccagtcgtgagcccggaaatcgggcaacttgtgatggtagctccacctggaagacgtgagatctagagatgtttccggtcgttcatgaggtgactgtggatgcctgtagcgtatccacagtgcttacccttgaatgggaatcgcacttttggctatatacagcacggtgcaagacgatgagttgaggactcgttcattagcttagatctagggttagcggcttactggcattagtaagacccactctatccctccaagncgactcatcacgcattgtgtcgaatccatgcgcatggggaagctcagtgactcattggctcaaggcgctgcactgtgtactcgtccaagcacgcgacgtggaaagggcattgatcttctcgcacccattatgtgtggaattggcctagagagtagattgctccgggggtggggttttctcactggtgcaaccattgtaattggggggtacttgatttgtacatttgcacccactagtaatttcgcgtataacatctactagggtaaatcaacccaattgtaacaatgactttgtgtaaggggctagaagttttggcaccgaggaagcaccgtctcctttccaattcattttcaccagcatgtggttccaatctttgcgcttgaaccttgtgcaaacgttagcagtcgccgttagaattgggaggttgcgctccgcccaaaagggggttccttaacccctatataggacggaccaaattcctagggaagcaatttggcgtgcttctggtggctaccccagaggggcggggagaatccccgggggagggcacactc

SEQ ID NO: 671825 - DNA, 127 bp, Homo sapiens
tctacacggatccccctcagaggttactagagaacacggtggttttaagggttatcttagatgttacacactcggaaggtttttaaacactaaagatatagtatttatagattaagagctaaaaagt

SEQ ID NO: 671826 - DNA, 759 bp, Homo sapiens
gctcagcactcctgagctgcacactctaactcaggcttatggcattgttttctggcccttcaaggtaaagcatctactgtgctggaggggctgagatgttcccagttggctggcaacaatactccaatggtggctggaggggccatgggagagtgtgttgtagttaacggctgcaggtgagtatgcattggtggggaagcagggtggggccatgcaccccctgaccttgagcttccaccaggcactgagtacaaggcaggtataatgatggaggcatctgggacccaaatgttgagttctgattctatcaataacagattactcaaactgagcttccatttcctcatctgtgaaatagaggcaataatacttattctatagggagttcatggggatttgaagtattgtgcacagaaattcatgacattctattttcccttggctaaaaatttcagtggaaagagtggctaaaatcgttctggcatgtaagttaccttaagtgataccatgtactgataaaacctaaaccttgatttcactttcaaacagaataatttcctggtcggatcgtctacatctatgagcatttttcttaggagaagcagaaagctataacaggacgtcaactttatcagaaatccacctttgtacaacctcccatcccctcctgctctggaaagtgaaggcatactgggaagagggttggttgtaccagtgtcatcactggcccaacattgaaagcactgtgcccgatatctg

SEQ ID NO: 671827 - DNA, 487 bp, Homo sapiens
cgtgcggctgaatgcaaatggcaccgtacagactgcctaggtgcccaagcccgatgctgcagcaggatacgcacagctctgtcaccatcacaccccagagaagacccacaggagccgtggaggtccaagtccctagaggacccggtggtggccctaagtgggcaccgatgtcaccctgcgctagctccttactcccccgagcctgagattcagcctggcacagctcaacctcatactggcagactgacagacaccaaacagctggtgcacagtttcagcgaaggccgggaccagggcatgctgcctatgccaaccggcaggtccctctacccggacctgcatggcacaaaggcaatgcaatccctgaggctgcagcgcgttgcgtgtggctggacgagggcagctttagctggtcgtgagcatccgggatttacaggcagctgctgcggtcaagctgcaggtgtgccgaccctactcgaaaccagca

SEQ ID NO: 671828 - DNA, 166 bp, Homo sapiens
atcctgatggcgctgattcacctgcatgtgagatcaccgtgtctcctctgcggcgaacgcaacgcgcgacgaagcgcagcatccggttgcgctgcctctatggcgcgccgcttgcggcgctccctgaagatctctatattccgccgcaggctttgcgcctattgct

SEQ ID NO: 671829 - DNA, 127 bp, Homo sapiens
  misc_feature (39)..(39): n is a, c, g, or t
agcaacgtgatgctgccctggtagatgttgatagctgtncacgcggttggcactgagggctgtcttggtcagcgtctcaatcacgtggtcactctgcagcaccacatctcccttttactcattgtct

SEQ ID NO: 671830 - DNA, 226 bp, Homo sapiens
aatacccacgatcacgccacagagaactccctcctacaaatggggagactgaggaccgagttaatgagggtgctggcaggcgtatcagagcacattagtgatgcccttcaccccagggaggtgtctgttcccaactagtttatgttgcactgagacatccatccctgaccaaggatgctgcgaaacaggatcaatgtactacggccgtctaattctacatagtcgc

SEQ ID NO: 671831 - DNA, 348 bp, Homo sapiens
agcatcgcgatagatccacactctggatggaacaccgtgttgccggtgcttggcaggacacttgtccatggcctcgaccgggatcggctgaatcgcgatccactccggcgttgcgttcttggtcggtgcgcttttggttgtcgctgaacctgcggaaacgctgagcagatccgccagttttttgcacgcctcaacgtccgtaccgccgtcgatgtagcgcactagatcgatcaggtcgccgcccttatcgccagtggcaaaatccgcccaggtgcctttgctcaaattcaccttgagtgagcctgcgcgtttgtccgtgcgcgtcgggtttggtagtctcacggaagc

SEQ ID NO: 671832 - DNA, 221 bp, Homo sapiens
taccccaagaggagataactagaaataagatttacaaacaaaacataaaaaatcacttgactatttcagactgatacaggaaacaccgttaagtctgtcagtagaattcagagcactgaaatgggtgaaattggggtatgtggtttgatggatacacagttacctctcagtatctggtgtcactgagaagctatacaatggatgcttgtgaaacaagtatc

SEQ ID NO: 671833 - DNA, 158 bp, Homo sapiens
tacaagatggccgaggttagtaaatatgtgagcgtgcttcttgagaattatttatagtctgcgagttgaatgggagagcgcaggtagaacacatctgaaggtggatgggtgtatctcccagaactggaccgggttgctgaaaaggggtaccgaggctc

SEQ ID NO: 671834 - DNA, 376 bp, Homo sapiens
tctccctactgtatcctactttatttacatctttcattattctggaaatatgggggatataataagaatgaatgaatacccaaatcagggactggattcattagttctttttccatttctttttttttttttttttttggggaaaaaagatcccttttgcccccccacttggggggaggaggcgcattttggttttatcgaaccccccccccccggggtcaagggttttccccccccccaccccttaggggggggggaatacaagggcccccccccccccccggccttttttttttttttttgggaagagggggtttccccctttttgtgaaggcggccttgggcccccaacctggggaacccccttcctggggcc

SEQ ID NO: 671835 - DNA, 852 bp, Homo sapiens
tgtcatgaagcatgggtttattgctgacaatcaaatgaatcatgcctgtatgctgtttgtagaaaataatggacagaaactaattaagaagaatttatgtcgaaagcttcatgcttcatctagtcagcatgcatgacttgaatcttattagacataatgtcaatagatagagagctgttgaccatagactccgtgaaatgcagcaagacataattcaacgaattcagggggaatctgcttcccctgcgaaacgaagaagataactgaagaacaacatgggacagcaaatggatttagtgaatattatactcaaagaaagagaacacgctttggaaagcagatagtgtctcaggggtttcaaaacagagacacaaaacaaaaactctgaaaagctctaagcgcccatgttatggacaaacactgaaattacatttgagggaattcatcctctaagaattatgttatcggtgatttaatcatatgttgccaaacaggcactgttagatgaagtaaactgatttcgaacaaggatatttgtatcagggttgctacttcaccttcattatgcagcattacatgtatatcactgtttattgatgtcattaaaacattctgtactttaagcatggaaaagcaatattgtcaaagtatttttaacattcaagaaaatgtagtcaaatatgttgaattgatctagaaattatttcatatataattcagaattttttgcatttatgaacggtgtttctacttggtatggtggagacatttctgggagggacatggactggtcctttttaaaattgaagtggcttcaattcatacgaaggacaatgaaatggggttctgatt

SEQ ID NO: 671836 - DNA, 240 bp, Homo sapiens
atttcactccattcgttcccattccattcaattccattccattcaattccattccatttgtttccattctcttcgattccatttctttatattccatgccattcgattccattctattggattgcattacattcgtgttcattccattccagaccattccatttgactccattcctttcgagccctttcaatttgagtccattcttttccagtccatttcactccagtccatgtcgacgc

SEQ ID NO: 671837 - DNA, 641 bp, Homo sapiens
  misc_feature (188)..(188): n is a, c, g, or t
ctaaatgtgcaatagcattatgtctaacaaatatacaaaccttaatttaaaaatatttactgttcaaaatgctgacacagaaacgcaaagtgagcacatgctgttggaaaatggtgccaaatagacttgcctgatgccaggctgctacaaaccttcaatttaaaaaaaaaaaacagtattcacaaagncatagtagaagtgagggtatgccgtgttatgtggctctttttcgtgacaggtggtgtgatataaaccactctctaagaaagtgtttctaccggtaaagatttccccagtacagtcagcctctcgtggtaactggtggtctccacattttagatccaaccagcctgggataggaaatattggaaaaaagaaatgggcatgggtactgaacacgtacagaccgtttttttctggccattattccctaaacaatatggtgtagcatatttacatagcattttatatggtaatgggtattataagaaatctagagatgatttaacattatacaggacaggtgtcgcgtcaggttaacgttgcaaacggctatgccattggcccatcagggacctggagcatcctcagatgtcgggagtctgagggttgacggttgcagtccgggaaccatcccccag

SEQ ID NO: 671838 - DNA, 1068 bp, Homo sapiens
  misc_feature (146)..(146): n is a, c, g, or t
  misc_feature (270)..(270): n is a, c, g, or t
  misc_feature (288)..(288): n is a, c, g, or t
ggccggcagtccccccgaagccgacccggaggagcatccaaggggccccgtgcacctgactgccagcggccgggaaatgaagccgtgagagagtgctcgtgggaggccgtgggactccggggctgccagagctagtagaggcaccnggcatgcagggggccccatgtacaacacggaccaacatgagacaactaggaggccgaaggactgtcctagcttgcgcctcaaaataggagccatgaaaaaaattcagacgcaagcgaatgtggncttccgtggggaaccagncactagagtgcatgatatgtcattccagtatcctatctctcgcgcatccttcgcaacagaccaacgcttaatccggggaccgtacagacatatcgaatgacagattccaggccgctgccgtgtcgcggagaaaggaggtagcgttggacgaaaggagccgctggatagggtcgtcaagagaccaggagacgagcggcatggaggacagggacggacaggaggcggcatgggcgtgaggagtcgccagtgcaggcgaaggcccgaagagagcgcaacggagcgaagtgtgcgcatgcgaagccgagagggcccgagggggagggcctccaaatggacgcgggagagcctgcagtcagagccagtcacttgggaagaccacgcccagtcatgcctaagctaagacgaccctagggaagccaaaaacgagggcgaaggacgaggccgaggcaaaaacaagggcatagtcccaagacctggcgggggtgtggcctgacgccggcacgaaagcgagtacacccaacaagggtctctcagtgagggcattccacacaggtgccaccgcgacggttctcaaattgactgtggggaaccccaagggctaaggaacgaggggcaaggtatgagggccccgtgggacaacggccgggggaagaccaaggagaaggccggcacaggaacaggccgcggggggacaaggcccatgtggggacaaaggcattacgccaaatttggacgcggtggaaagttatacacacagaaggttgaatcatagatgaggta

SEQ ID NO: 671839 - DNA, 1290 bp, Homo sapiens
  misc_feature (1290)..(1290): n is a, c, g, or t
taaacctttccttatgagcatgccggggtggggttgacagtggagggtaataatggactggtgggttggattggtagattatggggctggttaatggtcagttcagtggtttaaatctggacgcaggcttatgcggaggagaatggtttcatgttacttatactaaccattagtttcttctatagggtggataagattgggtccaattggggtggtggagagagttcagttatattgttggggatttttaagggtagggggttgttggagcttgaaggcttatcttaagtgggggggcgtgcttttagaggccatactagtggggtggttacaattttaaacctctctcttacaggggtttttcccataggtgctccaaagaagcgtggtcccctcttgggaactacacgagttaacatttaccagggggcattcagacgggtccggggggcgcaaattcaacgcttgaaccataaagatccctatctggggacaacccaaggctattcaccaggctcgcgccaggttgggaccgccctctaccttaataaactcgtcccacacagaaataacacggaccccactaagaaaggggggagatgaccacacgaaaagcacgggccataaagcgacacccacagccacaggagaacacgggcgggaccaaacagacctagggggattcctaccaccggacaacacgacaaaccaacaagccaccaccaccacacgactgcgccaccaagcggacaatacgagggggggcgaaggcccccctgtcgcaagagaatacgtgcgccggggcaaatacatagtctcaacactgatcgaccgctgcggcggaaagcaacaactagaaatagcagcccaggatacacaacaaacccaagcacgcccaaataacctaccacggggggaaaacgggtcagagccaaagaggacggcgaggagaaacaaacggcgcgacagatgagaaattggcgcgaaccgagactcagccaaagaacgatcacgccctcgaccggacacagaccccaagagtgaaactgtgcgaccagatgacaaggtggaaagcacacgtcaaccccgccgaagagccccaggagggcacgcggcccgccacagaacaccacccagaccgggtacatccacgcgaaacggcctacaagcgatgcaaagaaagtagtccacggagcgcacgctaccgcaccccctaccacgacgcagccgacatacacagtcgagagagtaacaaaccgtggatagcacacctcaccccccatcttcggn

SEQ ID NO: 671840 - DNA, 1227 bp, Homo sapiens
gataattgactgcctctacaacggaagttatcttgtctctcaaattctagataacgaggagatctatcccttctatggtggatggttatgaaaccgaggtcacgagaaagcgtgtggttgtacttggtatagaacggagtgacaagcgagaagtagtggttgtccaatttagctggatcagtggcatgggaatgtcgtgcgttatcatcatggtgagatgtcaggtaatgatgaccagttatcaagtgtgtggctcagaatgttagtgggtaggaataatctaaacctcattgcagcccattaggtcagtagaggtagacaggctacatggtggcacaggattctgctagtccaggatacatactttagaaggctcagctctttaggctcgatccgtaattatccaccaaaagatgatgcaacacgttgaagctgtgtatatgactgacaagcagagtgttgcagcctgaatggtaccaatgcctattattcccatggtgctgctaaatggtgctgaaggaatcggtcactgggttggtacctgcaaaatccccaagcttgtgaatgtggggtgaaattggtaaataagcagtcagggcgctttgcatgggagtggcagtaaagaaacctgtgtgccagatggtttccgaaagattacacaaagcaagtttcaaggcgtactaatatgacataaacctggattacgaaagtcaataatgtgaaaacagatgggttgaaagtcagacgtaataccttaacatatcatagcaaaaggcaaaatgggaaaaatagtacaaacacgcataatacccggtcacggaaaaacatggaaccccagcaacatccgtaatcacacaaggttactcagcaacccccaatgatagaaaatgggcaaccctgagagaatgaagcacctctcctgtcaatacaagtcaaaccaacgcaccgctagtaaagggacgcctaacgcccacaaaacgggatatacacgaggcctaggaggaaacacactgggaaggcagacacacgaccgcactgacgaagcacacaaaccctgggccagaaagggcacacaccaaaaacgagtaggggcaaacacaccagcaacacaggaacagtccagacacacacacgaagaggaaacaacactatcgcaacgtgccaccgccagaagtagggcgcatcatgaggacaacggcatatagacagggttcagacgagaagctt

SEQ ID NO: 671841 - DNA, 501 bp, Homo sapiens
gggtgttctagaggatccctgatatgcgtctcaaaaaaaagaaaaagaaaaaagaaatacgtactcacggagtaagaggcagtgtgctttaaagcctataaaacatgcctgtgggcacaagctggtttggtgggatatataacttctgtgactacactttcatcagtgtgtggtttgggaggttttttctgagacagggtctggctctgtttcccaggctagagtgcagtggtgcaatcatagcttctgttaccttgaacttctgttaccttgaactcccatgtcagccctccgagtagctggaactacaggcacacaccaccatgcctggctaactttggtatgttgggtagagatggggcttcgccatgctgcccaggctggtcttgaagtcctgacctcaaagcgatcggcgcacctcagccttgcaaagtgctgggattacaggcatgaaccaccacgcccagctcatgagtacgtatttcagtgcactcaaatgac

SEQ ID NO: 671842 - DNA, 107 bp, Homo sapiens
tcagtctatcagcagctcctgcttagcttcaagtgctccctccgctgcgttcagctcatcatctttatagcagaaaactgagcacagggatggaagtgacttgcctg

SEQ ID NO: 671843 - DNA, 1383 bp, Homo sapiens
  misc_feature (403)..(403): n is a, c, g, or t
  misc_feature (1163)..(1163): n is a, c, g, or t
tggaagtacacaggatcacggaagcatatatgcctagaactggacattgagattgagcagcgatgaagagaggagcgtatcaacccgagacttcatccaggaatggacggaagaggaggtaccaatcgcgagctagggctcgtggtgaagagagcgactcagtcggcaatcgtgtaacagcccgcagtgttgtgtcagtcacctgtataaaggggcatcgtcgagaggtttagactcagccatcgtagcgcttatgacggggaccagataatgctacgaggtcacatcaccgagcagtagttaccggcatagggaactagacatcggaatataaggcggcatttcggcttaagtagaatcctaggtgcgaggtggcccggaaaataaggattgcagtgcgcgnagccgagagagatatagctcgaacgaaacgcacatgaattgtactagattatgtgggcacaacgaggggaaagagcatgagtgcgtaggttctcgtgtagaggatttccaaagggcaaagaaactattgtgcaggagtagcagagttagcgtgtgtgaaacttttcccagctgcgaaacgtggcaagcgttagtccaaaaaggggagctcctcgggggaaaggcacactatagtcaattcggcacaatctccgtcacagtgcgccagggtgtgggccgcttgggagctcaccagaggcaggcaatttcagtcgtccgggcaccaggattaggaaaaggggccaaaaccttgtccctgaggggtcattggtcgcccagtgacatagagagggctggtttggtttcagcataagaggtgggatagagcccttcccccacttggtggaatcaaccacccttcctaatgacgttttgcgagttagcccccaaaagatggcgacagtattatagtgaggccgagacgcaccctttccgcacggaatcgtgaaaatgtggagcgaatacggtttcggaggctcggccaaatttggcacccgttgttggtacccgacatgaaaaggaaaaaaatatcccccaaaaataggggcgcgccaaattggaaccctttagggggtatcgatatgggcaaaaacacaacaatattgggcggcccaaatttagtcgaagggggggcgccctcgggtgtggccccaaccaaaggnggactcaccccttcacagaaaggggtgttgcagttgtccccccttaccggttatatccccccgttgtgattttcccaacgacaatacgttggcttggtcgtgggggcaccacaggtcaagctgcaaaggtccccgggttcattaatcgttttaagagacgttccccgccatattacggggggagcccaaaagggcgaacaaaccccgcacagggggaagg

SEQ ID NO: 671844 - DNA, 158 bp, Homo sapiens
  misc_feature (158)..(158): n is a, c, g, or t
cagtgaagcgacacatacgcatgatcatactgacacgacagtacctaggatacgcgatctttcagagtctatcacataggtgacactcatttgatcgacatccatgtgcgcaaagaagaacattcaacagaagtacactatctgtgacgggaacggtn

SEQ ID NO: 671845 - DNA, 426 bp, Homo sapiens
accccgggctgcaggaattcggcacgagagatatctattattaggctagatgtatagactctactcccccagatttttgctcttgaccctgcactgtgagtggcccttctattaacagccaaggaaaagggaaacatgagcttatacacaacggtggcagagtctccttggcaatcaaccaacggtgcgtatgaaatatgcctcacactgtgtagctcattattagacggcagggttggtgagaaaaagtgggccagacatgattaatgaatcagaatcctgtttcattggtgacttggataaagactttttaattttaactttggtctaagacaggttggcatgaattcaaattagttatataattgcatctcaataaagaggtgagattttactaggtttccacgtgcacatactgacttacgg

SEQ ID NO: 671846 - DNA, 450 bp, Homo sapiens
cctgggggcgttcgacattcacccatcaacatccggtgaggggacagtgtttatgatcccggcttaaaaccactgaccatctcttatgacccagccacctgcctccacgtctggaataatgggtactctttcctcgtggaatttgaagattctacagataaatcagctgcacttagtgcattggaacgcagtcaaatttgaaaactttgaggatgcagcactggaagaaaatggtttggctgtgataggagtatttttaacggaaacttctcagtctcccttgaagaagtgaagcctccttctttatgcactggccactgtctaatacctcccagcaatactcagaggagactacctgctggaacctcactagaattgagagatcaaatggttttggctgttttcccactggagattataaaaaatccacagttaattttaaaaaaaaaa

SEQ ID NO: 671847 - DNA, 470 bp, Homo sapiens
ggtggagcacgttgtggctggatgctggggctttcctgcggctatgcggtctctgcaggacatcgcgagaagaacatttacaccatccgggaggtggtcactgacattcgggacaaggccactacgcaggctggctcgctgtcctgaccctacgagcatgctggttcaaggagtcccttaccaggaatactgtgctggctggtgacgtgagttgtacacacagaagaacagggagacgtaccccacgcctcgtctgccacggacatcctaagtgcgttgtactcacatagccagtttggaagcagacgtccgttaggcggtgtctcaccgtaaaacagagatccacagagaggttaagtgtgagtctcatcggattcagagacccgagaagacacgctctgcacgatttctgagtttcccatctgccctacacagcctaaaccacccacaagcagacagacaagaggaca

SEQ ID NO: 671848 - DNA, 382 bp, Homo sapiens
  misc_feature (15)..(15): n is a, c, g, or t
  misc_feature (33)..(33): n is a, c, g, or t
  misc_feature (70)..(70): n is a, c, g, or t
  misc_feature (112)..(112): n is a, c, g, or t
  misc_feature (120)..(120): n is a, c, g, or t
  misc_feature (133)..(133): n is a, c, g, or t
  misc_feature (184)..(184): n is a, c, g, or t
  misc_feature (236)..(236): n is a, c, g, or t
  misc_feature (246)..(246): n is a, c, g, or t
  misc_feature (274)..(274): n is a, c, g, or t
  misc_feature (356)..(356): n is a, c, g, or t
aatgcacattatagnaggccacatatattattntggcaactgtcccagtacacagggttcctcatttgtnacaatccaaatggccacatctgatagctgttccttccagacntttcattncttcagctccagnaacaactgagcagtaataagtgtcaaggtctaaatagaggagagcaggttncccttttcatcagcaccagaacaacaaatgaagtatcatccaatagcatagnaactgagacnaaacatagtatatgaagaagaaccagtntgaacatcaaatcttctacagtatgcaatcaacagcctggtacaataatgctccaaaacccaatattgaaacaggcatgagnacacactcattactgagaaatagatc

SEQ ID NO: 671849 - DNA, 654 bp, Homo sapiens
atcagctgccagcacagctagaatatagcaggcagaagaaggtggcaggagcagacttgagtgagtcttcatggccttcgtcttcctttcgtgctggagcttcctgccctcgaacatcagactccaagttcttcaggttttgaactcattggacattacaccagcggcttgccagcatggtctcaggccttcaactacagactgaaggataccctgttggcttccctacttttgcggatttggggactcagactggcttccttgctcctcagtttgcagattggccgtatcgtgggacttcacgcttgtgatcatgacatctccaatgaacttcgttcactgaagtcttaaacccctcacagtgacccatgaggattggaatcagcttcttgcaaactcttactattgtgatatgaggatcgcgttcctatgaatcgtgaatattatgaatgacatctaaaatgtgactcctggcacgggcacagatggttcacgcctataatcccagcaccttggtaggtcaaggcgagaggatcatttgaggttagaagttagagagcaaccttgagcaaaatggtgaaaacctgtctctactagaaatagtaaaaattagctgggcgtggtggagaatggcctgtaatgtgagctatatgg

SEQ ID NO: 671850 - DNA, 273 bp, Homo sapiens
tctgtggtgatctacaggatcctctgcaacggttggcaagaccggtcaagtttttacgtgaatgggctgacacttgtggggccagacaatgttcggtgatccggtgcactcactagctgcagtgatgggtgcatttatgcatgtgatcttcgtaccaatgagcacctggtggggccccctaccttcaattgtcacgtgtcaccaatgacttgacaatgacgctagtcctagctgactgggcaaaagaacggtgtccacagagtggtatttgat

SEQ ID NO: 671851 - DNA, 135 bp, Homo sapiens
aatcaaatccctaccttagaaggcgatctccagagaaaattggtcaggcagatcttctactgatgattagggttaaattggagattaaagtaatccaaagatagggaaaaattccccatttttaattgacagtag

SEQ ID NO: 671852 - DNA, 329 bp, Homo sapiens
  misc_feature (58)..(58): n is a, c, g, or t
  misc_feature (107)..(107): n is a, c, g, or t
  misc_feature (111)..(111): n is a, c, g, or t
  misc_feature (183)..(183): n is a, c, g, or t
  misc_feature (225)..(225): n is a, c, g, or t
tttggaaaaagccctttttaaagggggaaactgttaattaaaaacaagctgttcaccnaaatatgttagcccctgtcaaatgacatttacaaaagtttgaagaaaanaaanttgggaaagttaataattcgcctttcctatccttcaaggattcaaattgcccgttttctctcctttttttgnctttcaacttactgtaattatgccccaatagttcgggtgcangtgcacgcctataatcccagcactttgagaggctgaggtgggaggattgtttgagtccaggagtttgagaccagcctgggcctcatagcaagatccctgtctta

SEQ ID NO: 671853 - DNA, 1484 bp, Homo sapiens
  misc_feature (1132)..(1132): n is a, c, g, or t
  misc_feature (1333)..(1333): n is a, c, g, or t
  misc_feature (1464)..(1464): n is a, c, g, or t
taacgggaggacttaccctataaaggctgttgctatatttgcaaccaggaggataatgccgatgtgttttcaggtttctctgagttagagaaattgatctccgtaattataggcctcgcccgattgttgtaggaagaggcacgataaagaattattgaggcgccatgggcgttgaaggttagcggattgattcagccattaattatacgttctcgagtgtgatattttgggccgacatgtgatatgaacaacaggcgcggtgtgaaaggccgcttcgcggtgaagttcacctgcctatgtgtctaagcgacatatcagctcctctgatggcctgaaatctctgtgaaggctatccaggtccaagccgcccaaagggaatttgaaacccccaaaaaattttacattccatgtgccgagacaaaaatttgtttgtgacagctgcgcgcgtttgcgagcaaagcagtctccgcaaactgacgacctaccacgtttgatgctacaaatctcaaacaggtttctctactttacaggcgcgctttataccaatctccatgcagacgaggcacaactttactcccacaatattcagggtacaactatctgtcctccgcacaacccaccacctgtttgtcccaacgaaagcaccgtgggtatggaacgaccacaaaacccccagtagaagtattaaaccccggtgtggaaagcaccaagctccccaaacagtgtcccatattcacggaccatttccaacagggagaacgcgaaacaaactggcgcacccttttgcgaccgccccattctgtggaacaaccataatagggaacagttgataattggccccacgggcccaataacccattacttctcaaccatttaccaacgtattactccccaccaaaccccaatatatacaaatgccttacttattaacacgaccatacgttgtactccccccccctatacaacatagtgtccaccacaaacaaataccacacaaagaagtactagcacctaaaaagacaggcgtccctaatcatattccgcgaaagaaataattctccaacatttcctctcccccacacgaatgtttgtactactgacgcaaaagcgcaggtgttgtctgtttgagcanacacaacaacatgattcatccacacctacaatattcgagctggtgcaagagcaacacatccaaatgaattgatcagatcgagtcacagctcacaaatcatttctatctaccattgtcagcaagcagagccccgacatatcttgcatgcttgtcctctcacatcaaattgaacagaggtggtgtatccacccacccacacangcatcgaaacgagtggtctgttgtcacagaatcatacaaagaccgcgcacctatcaaagagcgttgttatcataagaacaactgagttgaggaaattctcgcgacgggcagctatcagatgatgtctatanaatcaaggggacaaaaccca

SEQ ID NO: 671854 - DNA, 1340 bp, Homo sapiens
gcgatcggtagacccgacaaggaagaacagacctgtctcatgagtcggattcctggacgacgtctgacgtttcagatgacctatgtaccagatagaacggcatatattaacttgtatcacaatgcatggcatctgaagtgttctgaccactagcaacgtgatgaagacaaagacatgcctcaacgaacatggcatgcctaacagcatgtggaattgatgagagataatcgtggcagtgttggtcagacactttcaatgcccttcttggaggagactcgtgaggcatatcagcgcaagcaccatatatgtgccatatggtgctaggaccaataagttaataggttggatccatatggtcacagtggtacgatgttcacggacacgaccgaagtcacgactgatggaatggcagttcaccgtatagaaatcgagcgtatcgatagcatttacatccagtgggcacgtcacgtggcttgactggcgattatgcgtatggatgcccgatgatgtacctacaacattgatttcagtttgcctccaagtaatgcaacattgggtgtagctgtcaggctgctgatattgacaacgacttagatcattctacattcagcatcttgcagagatcaaaagatgaactcactaaggttgtcaagacgggccatacccgattattccttgaataggtaggcgtcgtcttggagtcccacaagaagtgaccaggaagattggcaagtgtgaagtgcacgatcagcacctgcagggactttgcgaacctctggcaggagtgcaaacacgctcactattgttccaacattctcctgggcattgacggtgtgcttcgtgggcaatcctgtacggagcacttcatgacggccaatgggatggccagagacagaactgggaccaacccggggacgcaccgaagcatcggggaccaacacggcgaaaagacgacccgtgcactccaaaccagaggtccataatgtgccgaccagcgatgctaaaacaaccactctagcaggtgggcccaggtgcagaacacactcgggtgaaacagggggagatacccagggcgaacaaccccagcaagcgagaaagaccacagagcagaggaacagcgcaaaagggggagacacaaaagcgaaaagagtagagaaacgcaaggatcggccgagaacgccagacgtagcctgagggaagcgcagctgcacgtcagacggacacgagcgagcgacaagcataggacacgacaagtgaagtagaacaacgacacgaacgacatagaagtctagttttaccagcagctccactgatgagcagaaacagagagcgagagcacg

SEQ ID NO: 671855 - DNA, 797 bp, Homo sapiens
ttgctatatttctatgttctttccggaattactgagaagcatgtcggttagcttgttagtcggtgggggacatgtcggtatcaaaagatcgaagtcttattcatattgatgtaggccatgaatcaatcacataactggtgctggaaagcttgataccatccactggggtgctattggagaaggattatatgggctatctttatagtctgcaattagttgatgattgctttcctagattctatcaactgcatttatatttcgcttttctgttacatggaaaatcctttatttgctggcggttcatcttgttggttagtatgttttgtcccacttacagcgaagtagaaagtggtctgaggttatccttgcttttcttcgcggtttgccatgtgtgacaagtagatttcctgctattgatatattctcattatacgacagaatagtggagaacagtgtttgccactggacaaaatccagtgtggtccactctggggaagcattcggacctgtggtgcttctaacaacttacaagtctagatggtccttgacactggtccccacagccatagcggcatactacttttgtgcattctacattagctgtcatctaatgcaaggatggctcctgtcccgtgataactcagggcgatccattactgcttcactcttccattccctattctgtagacaacccaagcagatcaatttccccttatgtccagggccaacccaaagggccttgggcgcacgcttctcggggacactcctcaattggagcacctcggctgagaacctgt

SEQ ID NO: 671856 - DNA, 138 bp, Homo sapiens
  misc_feature (54)..(54): n is a, c, g, or t
gatccgtgtcactcatcattgctaactgcaggtccatgcccaactcagaatctnctgcctgccatctgaattctcatctgcttggcacacgctgtctaaaacctcctgatcaccttctgcagcaatggatgagtggaa

SEQ ID NO: 671857 - DNA, 315 bp, Homo sapiens
gaccagagatcctatgagaagagtgtgccatctttaaaagtacatttagggaccaggcacggtggctcacgcctgtcatcccagcacggtggctcacgcctgtcatcccaggcacggtggctcacgcctgtcatcccagcactttgggagaccaaggcgggcagatcaccagctcaggagttcaagaccatcctggccaacatggtgaaaccccatctctactaaaaatacaaaattagccaggcatgggggagtgcacctgtaatcccagctactgaggaggctgaggcaggagaatcgcttgaacccaggagg

SEQ ID NO: 671858 - DNA, 492 bp, Homo sapiens
gagatttactgaccttaagcactatagtgatgaactgcagtctgtcatctcacatcttcttcgagtcagagctagagtagcagatcgactctatggtgtatataaagtacatgggaattatggtcgagttttcagtgaatggagtgccatagaaaaagaaatgggtgatggactgcagagtgctggtcatcatatggatgtgtatgcatcttctattgatgatattttggaagatgaagaacattatgcagatcagttaaaagagtatcttttttatgcagaagcattgcgcgctgtgtgcaggaaacatgaacttatgcagtatgacttggagatggctgctcaggacttagcatccaagaagcagcagtgtgaggaactggtaactgggactgtgagaacattctctttgaagggaatgactaccaagctctttggtcaagaaactccagagcagagagaagccagaataaaggtgctagaagaacaaat

SEQ ID NO: 671859 - DNA, 275 bp, Homo sapiens
cgtccggctattttaatgttttgaaataaacccttttaaaatataaatcccgtggtttaaaaggaagaaatggtgggaaggaaaagtagagaaaaaaatccccattcccggcccaagcgttatttgcccagtttttttagaatgaattttccccatgtatgggttcttgttacccgaatggggaccggaaaaactgaaaaacttttgcttaaaggggccttattgactgctgatgtgatgctcctgtaatcccataaattttttaattgttgcca

SEQ ID NO: 671860 - DNA, 261 bp, Homo sapiens
  misc_feature (51)..(51): n is a, c, g, or t
  misc_feature (172)..(172): n is a, c, g, or t
  misc_feature (180)..(180): n is a, c, g, or t
  misc_feature (212)..(212): n is a, c, g, or t
  misc_feature (222)..(222): n is a, c, g, or t
gagaaatgaccaagtggaggccagtatgccttgaggagctgtttggcagtnccatctacccagcacattgatgaagctcaaatgcgtcctcttcatgctaatgcctgtagcactgtgggtgggggaggcagagttgagaaaacacatggaagtctgtatcctggggaaattnccaaacgnctgttttctctccttgtaccttgtgccacctncctcttctcngcgcactttgatagatgacctattttaatgctggcaaag

SEQ ID NO: 671861 - DNA, 133 bp, Homo sapiens
agcattcgggccgagatgtctcgctccgtggggcctcacgcgccccccggggctactcctcctcttttccttggcctcggaagggtaatccagggggaacttccaaaggttcaaggtttactcacggcatcca

SEQ ID NO: 671862 - DNA, 898 bp, Homo sapiens
  misc_feature (19)..(19): n is a, c, g, or t
  misc_feature (578)..(578): n is a, c, g, or t
  misc_feature (592)..(592): n is a, c, g, or t
cgtcagggtgttcgggaanttttgatggtaaaaaggtgaagcaaaatgtggtaaacaggaatgaaaagccagaatgaataaaggaagccttcattgttctgagtgagttccccagcctgagagattcacagagacctggcaaatgatattgctgaaccatgggcagtgaatgcagagaacagaaaagggcatacacctttggatctctgagccatcatgtaagaagttcagctaccctgaagccaccatgttggatttgccacttagagacagagatatttgaggaaccccaactgttctgggctccagctgtttgagtctttccagtccaggtcttccaagtttataagaagaatcagatttccaagagcaatttacccctttcttcattctgttaggcattatttggaatggcttttcttcgatgaattcaattaacaggctggagtgcagcggcgtgatctcggctcactacaacctccacctcccgggttataagcgattcttctgcttcagccttctcctgagcagctgggattacaagtgcgcaccatcatgcctggctaatttttggattnttaatagagacggngtttcttcatgttggccaggctcgtctcaactcctgacctaaggtgatctgccaccctggcctcccgaatgttggattacaggtggagccctgaacccacctaaaaggatatttctaattaaaatctatagcttagaaagattcatgaagggataaaatttaaaatataactcaaccggactttgaaaaattgagcaatttattaatttacaagaatggtatacatgtttagaataattactgtaaaagataagttatattttcccgatattttcggttgaatttatttgaaacatttaaagtggt

SEQ ID NO: 671863 - DNA, 161 bp, Homo sapiens
acagaaatgcaatatgttcacagtggtttctgcccaaggaagctagcttaagactcacgctggggggccagtacggggatgggcactctgcttgaccagccagccacaattaggcacataaggcactctgtttgcacaaccagccaaaattaccagaatcc

SEQ ID NO: 671864 - DNA, 342 bp, Homo sapiens
  misc_feature (26)..(27): n is a, c, g, or t
  misc_feature (36)..(36): n is a, c, g, or t
  misc_feature (48)..(48): n is a, c, g, or t
gttcctagtagagatgggctttcaanntgttgcccnaagctggtcttnaattccagggctcaagcgatccagccgtattggcctcccaaggtgctgggattacagccatgagccaccatgaccaacgtgtttcttaatttaaaaaaaaaaaatagaccaggtgctctggctcatgcctgtaatcccagcactttgggaggccaaggtgggcagatcacctgagatcaagtatttgagaacagcctggctaacatggcgaatcctcgttttgaccaaaatatagaaattagcctggtgtggtggcgagtgcctgtaatcaagctttattcaggaagggtgagg

SEQ ID NO: 671865 - DNA, 134 bp, Homo sapiens
cacggcatatcgccgatacggtatgtataggattgcttgaatggtagctgtgctggtctactgcttccaccctcccatgtcattagtatcagctagtgttacaggaggccttatgcttagcatcaaaagcacac

SEQ ID NO: 671866 - DNA, 160 bp, Homo sapiens
atgtttattacccttctagaggaccctgttctgtattcaatgaaccccgatcaacctaaccacctctggctcagcctatataccgccatctccagcaaaccctgatgaaggcaacaaagtaggcgcaagtccccacgttagagacgttaggtctacctgg

SEQ ID NO: 671867 - DNA, 881 bp, Homo sapiens
  misc_feature (880)..(880): n is a, c, g, or t
gtcgggtccgctgcctggcgctgcgggcggcgtgccactggtggtttggattgagccgggcccgtgcccggggcgccgtagtcggcgggcgtggcagctcagcggcgtgccgagtgctacggggctcggtttggctgactggggagtcggcaggcggcaggtcttttgtgtgggatgagccagggtgcaagggagacgtacaattactccagttaccgaattgaaaccatccctgctagtggagcagcctcctccagtattctgtcgggtttagagctacctgttaaataagtcagtgggattgtccagggccgaccgccctcccttggctgcctcagggcgaaaatcaggacaccattgcgaggccagccggagccatgcttgcctgtggcccagtccccgcgctcgtgccgtccgagcttcgctatctgcgtgcatggcgttgactagcgcgcctgccatgtacctactctctaactgccgtgggttcttagttaacagcggcttggcagctaactgggcacaggctcttgccttgctggctccccttgcttcttacgaagctccttttggagagggcaggatgagcgaccgtcttgttcgcattgctttgccttcttgatgctctgtggctactggtctgcgtatcacatacgctgatcctgctgtgtcctggaccgtggtgtgccgtggctccgtggctgcatcgttgctgtacagtgctccgatttgtacgcttagtcgcgctaccgtgctgtgtccttgcctcgtcattcctccggagcctacgtcagtgcctacgactcttgcttggcatctgcttcctattagccactgggaatcttgatcgctgatttgtgcttcgcactatctacccatng

SEQ ID NO: 671868 - DNA, 243 bp, Homo sapiens
  misc_feature (5)..(5): n is a, c, g, or t
  misc_feature (8)..(8): n is a, c, g, or t
  misc_feature (13)..(13): n is a, c, g, or t
  misc_feature (22)..(22): n is a, c, g, or t
  misc_feature (143)..(143): n is a, c, g, or t
ggcantgntgggnatttaatgnaatttgtctgaaaaacatgataagcataccagcaaatctgggtaaggccataatatagctgattatattgatccagccatcatgaagaagaaaaagtggcagaagaagaagtaaacatctntgtaagcaagtaagaagtaaaaggggtaaaaagaaacacattaaggaagaaccactttctaaggaagaaccatgtaccagcacagcaattgctagtccag

SEQ ID NO: 671869 - DNA, 229 bp, Homo sapiens
tgaagaggcacaggaggtggtgcccgatggggaggggtaatggctatgtccaagtaatctcctatctggaacttctggcgacggcagggtcatggaatcatcagtcccctttctgccagacatggtggctgccaatctccttaactcagatagccaggtcttttaagcatctggtaaagaacggatggcaaaatgggaagtggagtgccctttctttctaagcttctgg

SEQ ID NO: 671870 - DNA, 99 bp, Homo sapiens
  misc_feature (1)..(2): n is a, c, g, or t
nnactgatagaattcaagcttctaaaaaagaacggggacatgttcatgccctgattttataaacttgtatctatcaataaacattgtgagacttgaaaa

SEQ ID NO: 671871 - DNA, 679 bp, Homo sapiens
ctttgctttccaccatcgatgtgaggcctcctcagccacagagaactgtgagttcattaaacctctttcctttataaattacgcagtctcgtgtatgtctttattagcagcgcgagaacaaactaatacaggtaaattggtaccggtagagtggggctgtgaaagatacccaaacaatgtggaagtgacttaggaactgggtaacaggcagaggttggaacagtttggagggctcagaagaagacaggaaaatgggggaaagtttggaacttcctagagacttgttgaatggctttgagcgcaaaatgctgataatgatgtggtcaagtgaaatccaggctgaggtggtctcagatggagatgaggaacttgttgggaactgaagtaaaggtgattcttgctatgttttagcaaagagactggcagaattttgcccctgccctagagatttgtgaaactttgaacttgagggagatgattttgggtacctggcagaagaaatttctaagcaacaaagcatcaagaggtgacttgggtgctgttaagaccattcagttttaaaaggaaaacagagcataaaaattcagaacaatttgcagcctgacaatgatgaccggaaagaaaacccattctctggaggaaaattcacgccagcggcgaaatttgcctaagtcaccag

SEQ ID NO: 671872 - DNA, 786 bp, Homo sapiens
  misc_feature (23)..(23): n is a, c, g, or t
  misc_feature (97)..(97): n is a, c, g, or t
  misc_feature (101)..(101): n is a, c, g, or t
  misc_feature (109)..(109): n is a, c, g, or t
  misc_feature (113)..(113): n is a, c, g, or t
  misc_feature (213)..(213): n is a, c, g, or t
  misc_feature (217)..(217): n is a, c, g, or t
  misc_feature (220)..(222): n is a, c, g, or t
  misc_feature (224)..(224): n is a, c, g, or t
  misc_feature (226)..(226): n is a, c, g, or t
  misc_feature (228)..(228): n is a, c, g, or t
  misc_feature (230)..(235): n is a, c, g, or t
  misc_feature (452)..(452): n is a, c, g, or t
ggaaggcggcggcggcggtggcntttggggcgaagtgggcgtgcggctcgcgctgttcgcggccttcctggtgacggagctgctccccccgttccanagantcatccanccgnaggagatgtggctctaccggaacccctacgtggaggcggagtatttccccaccaagccgatgtttgttattgcatttctctctccactgtctctgatctncctngcnnnantncncnnnnnngcagacacaagagacagcagacaagcctgcctggctgccagccttgcctgctgtctctgatcttcctggccaaatttctcaagaaggcagacacaagagacagcagacaagcctgcctggctgccagccttgccctggctctgaatggcgtctttaccaacacaataaaactgatcgtagggaggccacgcccagatttcttctaccgctgcttccntgatgggctagcccattctgacttgatgtgtacaggggataaggacgtggtgaatgagggccgcatagagcttcacccagtaggacattcttccgtgtatgaatatacatatggatctctaccctatgccgttgtctttcacatcatcgaatttaacctagagagagactagttcaggcatgggacaatctgactactcttgtttctagcaatctggaagaatccccccttcggttcgtaactccacagtttaacaagtctgagccattgactactcttgggtaaatattacgagtacagaaaggtagtttaccttcatgagattgttactccc

SEQ ID NO: 671873 - DNA, 714 bp, Homo sapiens
  misc_feature (248)..(248): n is a, c, g, or t
gggactcccccccgaaattcttccacgttgtgggcgggggggccctgatctcccggggtttcaccgtttttctgttacccaggtttttttcccttctttgggggggtgtttttgtgacccggcgtccttcaggcatttaaggcgttgggagggggtggggggaaccttccccgtggggcgttttgccctggcccttgttccacgggcccgcttccgctttaaaaaaaacccgggggggcccgggtgtntgttcctggtgcccccttcggcccccccgggttggaaattttacccctttcctcccccggaggatttttggacgggggccgtgggcccttttttaccttccggggccccccccaaggggggtgcccccccccccctgttttttagccccggccccggtttccggtttggtttccctttaacccccttttttaaaccagggggccaaccccccccccggggggtttcctttggggtttcccccaaaagggttgaaagggggggtttcccccctttttttttttcccccttggggccaaagggggggttttcccgtaagggaatttccggggtttttttttttgggggaaggggggcccaacccaaattttccccccctggggggggggtttcttttcccaattttacccccccttggtcttttttttttgggcccccggccccgaataaaaccccctttttttttta

SEQ ID NO: 671874 - DNA, 351 bp, Homo sapiens
acagaattaacaaaatataagttgtggccaggattatttaaagaaaatttacgttatgtagaaaacaaaaaaaaaagtgcctatggtaatattcaggctgctctgctaggtggtggcgggggtagatgtggatcttaccttagaagatcttatggtctaataagatatgagtccagagctatggtgttataagcacactgcagagagtgacaagtgacttaatcactgatcaccagttgttttttgagaattcagtagccgtcgttataaacatctcggggtggggcccgcgtcccaattccccctatagtgagctttattacgctcgctctttggcagttgttgtacaac

SEQ ID NO: 671875 - DNA, 216 bp, Homo sapiens
aaccaaccatgctgtggctcctaggtgatagaggactcacctcggaggtatccgagctggacacagcccctggcaccgtgatccagacagctggccgtcccccaagcagcctgtcaccttcagcgagacccatatcctccccatccccagagacctctagaagtacctagccacatagctaccaggaattaagtgcgcctggaaaacaaatcgaat

SEQ ID NO: 671876 - DNA, 165 bp, Homo sapiens
acagtacttgggcttgggtacaagaggaccccatggtctgtggccgtgagataatgcacacctggaattcgctttctaaaggaaatcaaatgaattggaggaactttccaaacaccacttactggtgtatatagccaatataactatctctactaaaggtgctga

SEQ ID NO: 671877 - DNA, 130 bp, Homo sapiens
gaggagtaaatgaatgacaaaggtgggagcatttcttttctatgtaatgatgaaatgagaggcaggagcagcaggtagtagcaaataaatgtcgagggatcattccagtgtgaaaaagtctgtttggtcc

SEQ ID NO: 671878 - DNA, 330 bp, Homo sapiens
gacgcactgcttgcctcccctggaggccgcaagaaagccatcctagcccgcgacacactctttcttggccttggcggcgcatgcgtgcacctcctcaccctggccactgcccttatagtccacccacagctctgacttctccaccatggtccgcagccgatccagctccgactagatcaccttgtagtactgcacgagccgcgctgagatcagcagcagaaccagcttgaaggtgcgcatagactcctgccgctggctgaagtgcttgaagagcagcttgcaggcacccgagaccagcggcgcatagtcgtgcatggtgaggtggatgag

SEQ ID NO: 671879 - DNA, 536 bp, Homo sapiens
agcggaggtgagtcacacagcctcacatgcgcacagtcagaaaggtcgactctacctcttctgtcctccagaccctgtcaagtaagcctcaagacctgagacgtgcagcgaggtggcccaagcgttgcctgcaggttgatggcaggggcacgtcaaggcgtaaccctggatctgcgcattgctggacctatgggccactagccgtggagaaccgtgctcctgtgattaatgctgtgagcaacaggcatggtggccagtgcctgtgctcgaaccgtgacaatcacacatacggacagtccctcagccatggagggtactgcggtgccccgagggacaggtcgtctcactgatgcagcgcacttcgagccaagtcatcaaccactgacagcataggacacctgatgaagcactcgaacgcacagtcgtggagctgtacgagtcgtgcttgaggacgcgccgtaagaagatttccttcgacgttggtagagacggctagagaggccaacaatacacagagcgctctcttggtggaaccc

SEQ ID NO: 671880 - DNA, 1653 bp, Homo sapiens
  misc_feature (1653)..(1653): n is a, c, g, or t
agtgacttgggaggctgaggcaggagaatcgcttgaacccgggaggcggaggttgcagtgagctaagatcgcgccactgtactccagcctgggcaacagcgagactccatctcaacaaccacaaccacggacatgctgtctcaagaacatgattatccagggcgtatctcctaattcagatcatcaaactgattatatagcaagagttggctttaaaatgtttgcaaatgtcttttttctctctctctacactacatggcaacaaaacaaactatctctgctctgctgttcctcactacagatcgacttaggaactgatcattatcacaagaagacatatattcacaccaaacaactgaacacccttgaaacaacaatacaaaaaacaaaacaaaacaaaacacaatgaaaataaaagaaaaaaataaaaagaaaaagataataacaaaggacacaagggaacaataagaagagaaagaagagataagaaataagagaagagcggcaggacaccgagcaaagagaggaagaaaagaaatggaggagagggcacacagcacacaacgaaagcagaaaggaagagggggggaagggaaggcagcaaaagagcgcgaagagaggggaagaggggagaagggaggaggctagaaagcagacaaaggcgacgaaccgcacgagtacggctagagctacgagagaagaggagagacgaagacaacgaacacacgacataaacatcaaagcaaagactagagcgcaaacaaacacaaacaaaagaaaccacacagacacataacacaactatgacaagaaataaagaattactaatatacgagcgccacacacaacaaaatcaaacaacatgaagacatttctaatataacgaacaatcaagatacacctgatacaacacaactcacaacccaccaacacagagaagaattcacattattagaagagggagggaagagggaggaggagagagaatgagagagggaaggaagcagagagagggaggagcgaggagcgcagcaggaatgcgatgcgaggagaggggagcggatagagaagagcgtagagaataggtggcggcggcggccggcgggcccgacggcgagagaagaggacgcagacagaggagcgcagcaggcgaggagggcagaggaggagaggagagcggcgcgtgagagggcgacgcggagagagcgcggagagaaggataggagggagagaaggaagagagacagagacgggcagccggagagacgaaaagccacacaggacccagacagtgacagactgatggaaaaagacaagacgagcatccaaccacacatccgaagcaggcacagctaagcctgctaccaccagaacacgcctccgtaccagcagtacacagcaacgtcgcagcagcaaggaacacacgaagagacaccgagctgcagcaactacgagtacacacaatgcacacatcacagagacacaaagacatgcgagccagtacacgaacgtagtaagagatactacactaaaacacaacgtatcatgcatagagctgagcatctactaagtaagcaacatctacgacacctaacaccaaatataatgaacacaaagagtcagacaaatcacaacagcaaatacttaagctcn

SEQ ID NO: 671881 - DNA, 282 bp, Homo sapiens
tcgacagcccctttccagaggctcaaagaagtaaaacactgaggccgggtgcagtggctcacgcctgtcatcccagcactttgggaggccaaggcgggtggatcactggaggtcaagagttcgagaccagcctggccaacatggcgaaactccgtctctcctaaaaatacaaaaattagctgggtgtggaggttatggtgagccgagattgtgccactgcagtccagcctgggtgacagagtgagactctgtctcaaagaaaaaagaaagtcgacgcggccg

SEQ ID NO: 671882 - DNA, 119 bp, Homo sapiens
atcccccacgtgtagtctctgctacagccgatggcgcttgggcccgtggcttgccccttgctccctgcctgcctccgctggacctgaaagcccttgaaatagacatatgctgcttgtct

SEQ ID NO: 671883 - DNA, 320 bp, Homo sapiens
gagatggagtcttgctctgtcgcccaggctggagtccagtggcgcaatctcagctcactgcaacctctcggattcaagtgattctcctgcctcagcctcctgagtagctggaattacaggtgcacaccaccatgcctgactaatttttgtatttttagtggagatgagctttcaccatgttggccaggctggtctcgaactcctggcctcaagtgatccacctgcctctgccccgcaaagtgctgggattataggcgtgagccactgcgcccagccacaatgttgcattcttgacccttctgtcgtcctctcgcagccgt

SEQ ID NO: 671884 - DNA, 104 bp, Homo sapiens
tcttcatttcaccgctgcaaatggaaagctggcatcacttgtgttaaatcatggtaaccatgaaaataagtagaatgaaaataaaataatgttgtcacactctg

SEQ ID NO: 671885 - DNA, 3088 bp, Homo sapiens
  misc_feature (859)..(859): n is a, c, g, or t
ctcgctgaataacccttgtaagcagagcctagaaaagagttacatcacttggatttttagtgcagagatatgtcacaattccattgtaggcagaccctaggacaagtgttacatgacctaggtgatcagtgcagagatacatggcaatgccctgtaggcagagcttgacaagtggtagaacatctgggtgatcattgcaggaatatttcacaaagcaccttgtaggcagatcctagaaagagttacatcacctggctgatcactgtagagatagtcacatgccccataggcagagctagacgaatgtccatcactggtatcagtgcagagatatgtctcaaagcccctgtaggcagagagaaaagtgttacatcactttgcttgatcagtcagaagtgtgtcttgctgactgtttgctcccggagctctgcgtgcaaccggaaacatgcagggaagagtggaagaccggcaatggtgtcttcgctctccttgccagtttccaaaccggccacactgcagactccccatgttgctgcacacgggaatctattgtcaggccatcacggcggggaggcatcttatctctctggggtctcgctctggtctcctacttggaaatgaaggagagccacacgactgcctgtgtgagacgttcccgacaatggcgacacccacaggcactgcctccttcacggagagaaggcctggaacactcaagaatcccacggacgttgagttccacactcccctccactctcccaggccggtttctccctgctgaagacgcgtggcgcccagaggcgcttccagttaccgcgggatttctggagaggtccatagagccagcccagaaatgccnccctcacaacttccctctcgcccccttcctcttcatctctccggccccaccaccaccgtcaccacgccctccccaaccaccctgccacccctcgggcgcaggctcatcgccctgtggacattccggggtggcgcgggctgtcccagggctcactgccattcatgaagggatggagcctgcctgcctgcgggcctttataacagccgctggctggttgtccgggctggcctcctggctgaacctgccgcagtccacaggccggctgaggtgcatgggagcccgccggccactctcttcccatgtccgtctgtgaaattccagctggggctccccgcgatgtccatctggatacttcggaccgtgccctccctgtggaagtccggggacggtgacagtgtatgagactcgtttggaccccgagacaaagcgaggctctgtgagccacatttgagcagaacccatacccgggcatcaccaccagagaatgactggcccaggccatcggcattctggagtccagggtccagatttggtttcagaatgagaggtcacaccagctgaggcagcaccggcgggaaactaggcctggcccggaacacgtggcccataagaaggcaggcaaaagtggaccgccgtcaccggatcccagaccgacctgctcctccgagcctttgagaaggatccctttccaggcatcgccgccagggaagagctggccagagagacggacctcctgaagtccaggattcagatctggtttcagaatcaaagggccaggcacccgggacaggatggcagggtgtccgcgcaggcaggcagcctgtgcaaagcagcccttattgggtgtcaccccgctcccttgtgggtcgccttcgcccacaacggcgcatggggaacggggcttcccgcaccccacgtgccctgcgtgcctggggctctcccacaaggggcttttgtgagcctgggagcgagggccgtccccgtgctccagcccagcgaggctgcgccgcagagaggatctcccaatctgccacggcacgcggggattttgcctatgctgacccggcacctccggtagggcgctctccaaccctcaggctcctcggtgtcctccacacccgggaaaaagccaggaagaccgggacccgcagcacgacggcctgcgtgagcttgcacggtgggagagcctggggcagctcaagcgggccaaatggccaaagtgtgcttgcgacaaccgagtcccaggggagtccgtggtgggactggggccggggactccaggtgcccggggcggcctgggaaccccaagctgtggcagctccacctcgccagcccgcgcccctggagtcttccgcgtggcaggggcagatgcaaggcatcctggcgccctcccaggagctccaggagccggggcgctcgcctgcactccctccggcctgatgctggatgagctcttggcgagcccggagtttctgcagcaggcacaacatttcctggaaacggaggccccaggggagctggaggccttggaagacgctgcctcgctggaagcccccctcagcgaggaagaataacgggctctgctggaggagctttaggacaaggggttgggacggggtcgggtcggaacagggcagtggccactctttcgtggggaacaactggctggctacggaggggcgtgtcttacccccgtcccctccaccgggctgaccagcatgggattcctgccttctaggtctagtccgggtgagaggctaaacacagcggagaactgccattctttcctgggcaccccggggatcccagagccggcccaggtaccagccagttgggtcgcctactgcacacccgcgggtttcctggcagccggctgggctgtgggagcagcccgggcagagctctcatgcctttccaccaccccacccccgcctgaccaacccctccccgcccacacacaccaaacccagaaaatgcatcctcccctgggctgagtgtataccctcgtcccgcgaaacaccaggcccacgcaggttccaggcctgagacccatccagcggctcgcctcctctgtgcctccgtgccaccgttgtgggcacgcccgtgcccctgaagcatcccagctgccaccatggagcgactggcggcggaaggcagacctctagctctcttttccagtctcctggctagacctgtgctcattgcgcaccacgggtgacgtgcaaggga

SEQ ID NO: 671886 - DNA, 596 bp, Homo sapiens
gttcctaaagagagtccttggcttaaagctgtaacaagggtgtgctaggtgggggatttggagcaaaaccgtcgagtaggcatgatactggtatggagtgggcctgcaaaatcagacagaaatggcttgagaagccgcagggggagcatgcctgtctctcagtgatagagtatgggagggacctccctagcttggaaaatgagaattgaaggggttatgaacaaataggatgcctagctgaggatgttcccaaagttatggccaatcttatcattagtagattttataagccacatagacaaaccacaaacggaataatgttacttgggatgctaaattttttggttctaggtgtggctttgtacatgcataagaatgctatatgctgcacattttgcctttaaagtcttacgactttccccattttagtctaatgggaagatgcagatgtgcaactgtgctaaaaagtggtctgttatcatctttggattcagctctgagtaatggacattttcagacatgcacagaagtggggaggatggtacttggtccccatgtgtccatcacctaattgcatcacttatcagctttgggca

SEQ ID NO: 671887 - DNA, 129 bp, Homo sapiens
cttgagttgatggcacgcaccaccacgcccagctaattgtatttagtggagacggggtttctgccatgttggtcagtgctggtctcaaactcctgaccttgtgatcctgcctgcaatcaagcctggaag

SEQ ID NO: 671888 - DNA, 359 bp, Homo sapiens
  misc_feature (272)..(272): n is a, c, g, or t
  misc_feature (275)..(276): n is a, c, g, or t
  misc_feature (278)..(278): n is a, c, g, or t
  misc_feature (281)..(281): n is a, c, g, or t
cggaatttcgagcgcgttttcaaagtgccccacttcatactcatagtggttacggatgtcgataaatagtgcatcgggatcgtcaagcatggcgttcacttccgccgcttgcagatactcaccaacattgctggcatcaaagtgaggatcgtcaataccgtcggcaacaatgcgatcgggtaccttcatgcgcagtacccagaaggatttcccgtcatcatccaacgcgatattcaggcgtaaaccctctaaagccgggtcgaaggcatagngcnncncgngaaatgtttcaacattgctcgcaggtacgctgatttgcgcgttaatgccctcatgcgccaaatacactcgcccaaaaa

SEQ ID NO: 671889 - DNA, 1061 bp, Homo sapiens
  misc_feature (610)..(610): n is a, c, g, or t
gtactgtttgtttctaagcatgtgaattcactactgatcccatcgcctggccaggtgagacccagtcattcacgtccagtgtgaatcagtcctcactgttttgaagacgacatacatcgtgtgcgtacacgtcgtagttggagacattttactaaagcagacacagtgacaagtgccaagcgaataattaattgatagcgtgataagtgttgtacgattatcgtgcagactagcttgactagagtatcgtcgcgattcttagagagcgttcataggttgctggtatagattgggctgtaacaactaggagaactcgtattgagctgatttgtgacatgctagagtttgacgttgtgaaggctattctgctgaatgttcagcctggttgtgcgtcaccagtgacttggagttcgtctggcgagctaatggtcgcctcagcaagcctcaagtgcagttctctaagtacttcgtggtaattccgcactgtgttcgtgggaggcagtatttaatgatgttctaccatgcccagtgacagctagtgttcctgacaagtgcgttgactttacgaaagatggcagacgttcatccttggagatggtgagtgtccatnctgagccttgtgtacagggcgtatatgttgggcagtgtcgatcttcaggacgtagaggcctttggatttcccatagatcgcaaggaactagtcaaccctcgtatctgtaaccatgctcgctgagttggccaactgttccaggccactttgacacacccatcttgttgaaccttctgaaggtttgcgcactgcaagggccactcactagggggcatccattgcccaagcacctccttcatgctggtgcatggcagtcttaaacttcgatggcccaagggattagacatggtgggctaacctgctgggatcaatctggcctgagtcaattgaattgtcaaccagacaatttacttgcaatcgtcaggttggacgcaattgcgtgaggtacaatcctaagccagctaagatgggatcccagatggtcctttcctggggacccagttaagaaccc

SEQ ID NO: 671890 - DNA, 359 bp, Homo sapiens
  misc_feature (281)..(281): n is a, c, g, or t
  misc_feature (350)..(350): n is a, c, g, or t
gctgtacgatcgcggagaaggaagccagtctggagagcaggctggctgaagggtgggcttaccccggcagatcccttgtgccttccctctgtctcacattcgccttccttctcccagctccttttccctttccgtcctaggcattgagatgttccacaatgagcctggtagagggccgaggccggatgataacctcggcggccccggctccgatggcttgacagcgggaggacttgcggcgggggcctcggtcatggtcaagccagagttccgtcaagccnccaccagaacggtggatggcccagcgtttacatccgtcagcaaggcaggaaggtggccgccacaagccnctttgtgtc

SEQ ID NO: 671891 - DNA, 3354 bp, Homo sapiens
tttttcctttcttccagaaggagatttaaccatagtagaaagaatggagaactattaactgccttccttctgtgggctgtgattttcagaggggaatgctaagaggtgattttcaatgttgggactcaaaggtgaagacactgaaggacagaatttttggcagaggaaagatcttcttcggtcaccatacttgagttagctctagggaagtggaggtttccatttggaattctatagcttcttccaggtcatagtgtctgccccccaccttccagtatctcctgatatgcagcatgaatgaaaatggcaagtttcctggccttccttctgctcaactttcgtgtctgcctccttttgcttcagctgctcatgcctcactcagctcagttttctgtgcttggaccctctgggcccatcctggccatggtgggtgaagacgctgatctgccctgtcacctgttcccgaccatgagtgcagagaccatggagctgaagtgggtgagttccagcctaaggcaggtggtgaacgtgtatgcagatggaaaggaagtggaagacaggcagagtgcaccgtatcgagggagaacttcgattctgcgggatggcatcactgcagggaaggctgctctccgaatacacaacgtcacagcctctgacagtggaaagtacttgtgttatttccaagatggtgacttctatgaaaaagccctggtggagctgaaggttgcagcactgggttctgatcttcacgttgatgtgaagggttacaaggatggagggatccatctggagtgcaggtccactggctggtacccccaaccccaaatacagtggagcaacaacaagggagagaacatcccgactgtggaagcacctgtggttgcagacggagtgggcctgtatgcagtagcagcatctgtgatcatgagaggcagctctggggagggtgtatcctgtaccatcagaagttccctcctcggcctggaaaagacagccagcatttccatcgcagaccccttcttcaggagcgcccagaggtggatcgccgccctggcacggaccctgcctgtcttgctgctgcttcttgggggagccggttacttcctgtggcaacagcaggaggaaaaaaagactcagttcagaaagaaaaagagagagcaagagttgagagaaatggcatggagcacaatgaagcaagaacaaagcacaagagtgaagctcctggaggaactcagatggagaagtatccagtatgcatctcggggagagagacattcagcctataatgaatggaaaaaggccctcttcaagcctgcggatgtgattctggatccaaaaacagcaaaccccatcctccttgtttctgaggaccagaggagtgtgcagcgtgccaaggagccccaggatctgccagacaaccctgagagatttaattggcattattgtgttctcggctgtgagagcttcatatcagggagacattactgggaggtggaggtaggggacaggaaagagtggcatataggggtgtgcagtaagaatgtgcagagaaaaggctgggtcaaaatgacacctgagaatggattctggactatggggctgactgatgggaataagtatcggactctaactgagcccagaaccaacctgaaacttcctaagccccctaagaaagtgggggtcttcctggactatgagactggagatatctcattctacaatgctgtggatggatcgcatattcatactttcctggacgtctccttctctgaggctctatatcctgttttcagaattttgaccttggagcccacggccctgagtatttgtccagcgtgaaaagaagaagagagttcctccaattctgaccgagtgctgatcattccctagagacaccagtaaccccgggcttagctaacgaaagtggggagcctcaggctgaagtaacttttctctgcttctccctgcccagctcagagctgagggcctccccctccacagcaaccaatcacaaccataaagctacaagcacgcactgaagcactttactgatactcattcaattattcatatgacagttgtttgagtttggtaccatcttattttccccttatacagataaggaaactggggtgcagaaaagtgaattgactacaaagtagacatgactagttaacaacacagctgggatctaaacagcaataactaacattaatggagaacttaaaatgctctgagtgctgtgttatgagctttggtggatgtcactcctttaatcctcgcaacaccctgtcgggtagtctcatttagcaagtatggaagttgaggcagggcaacattaagcaacttacataactcatgcagtaatttctgcagttgggagatgttcagcttcagtccccggccctatggccgttcttttccaccctgtttcttcccccataggaagaacccacctgtagccctgaggttcttttcccaggatggctccaggataaggatcactgtaggtggttgtggagttgacacccctgttgactccttcccagctgattgtcagagccttagacccagcacgccttggattagctttgcagagtgtcttggttgagagaataacctcaccgtacccacatgacacgtgatttggaaagagactagaggccacacttgataaatcatggggaacagatgtgttccacccaacaaatgtgataagtgatcatgcagccagagccagccttccttcaatcaaggtttccaggcagagcaaataccctagagattttctgtgatataggaaatttggatgaagggagctagaagaaatacagggatttttttttttttttaagatggagtcttactctgttgctaggctggagtgcagtggtgcgatctcagctccctgcaacctccacctcctgggttcaaacaattctcctgcctcagcctcccgagtactgggaatataggtgcacgccaccacacccaacaaatttttgtacttttagtacagatgagggttcactatgttggccaggatggtctcgatctcttgacctcatgatccacccacctcggtctcccaaagtgctgggattacaggcttgagccaccgggtgaccggcttacagggatatttttaatcccgttatggactctgtctccaggagaggggtctatccacccctgctcattggtggatgttaaaccaatattcctttcaactgctgcctgctagggaaaaactactcctcattatcatcattattattgctctccactgtatcccctctacctggcatgtgcttgtcaagttctagttgttcaataaatttgttaataatgctg

SEQ ID NO: 671892 - DNA, 552 bp, Homo sapiens
gagaggagttcagtttagaagagatcaagctggcgaccggaatagaggatggagagataacgagaacactgtaggcattagactgtggcaaagctagagttctggcgatacaaagggcaaagacattgaagatggtgacaagttcatttgtcatgatgatttcaaacataaacttttcaggataaagatcaatcaaatccagaggaaagaaacgggtgtagaacaagcttgcactacaggaagagtgtttcaagacagacagtatcacattgatgctgcaattgtgtcgaattatgaagatgagaaagacacttatccacaatctccttggttcagaagtgtgcaaccagttgaaatttccagcaaaggctgctgatcttaataagagaatagaatctgtaattgaccgcgactacatgtgaagagagaaagatgtcatatgcagtagacagcggatctaacctgttgactcaatattatttggctccttctttactacccgtgagccaatggagcagtgtaattaatgggaatctgagtggacactttctt

SEQ ID NO: 671893 - DNA, 115 bp, Homo sapiens
cgcaggtctcggtagaagtgtagtgactcattgatgtcattgtaagacatctgtagctgatggcctcaattgctcagcaataggtgatggtctcactgctcggcgattgtctcac

SEQ ID NO: 671894 - DNA, 576 bp, Homo sapiens
  misc_feature (5)..(5): n is a, c, g, or t
  misc_feature (7)..(7): n is a, c, g, or t
  misc_feature (21)..(22): n is a, c, g, or t
  misc_feature (26)..(26): n is a, c, g, or t
  misc_feature (29)..(29): n is a, c, g, or t
  misc_feature (43)..(43): n is a, c, g, or t
  misc_feature (45)..(45): n is a, c, g, or t
  misc_feature (47)..(47): n is a, c, g, or t
  misc_feature (53)..(53): n is a, c, g, or t
  misc_feature (69)..(69): n is a, c, g, or t
  misc_feature (89)..(89): n is a, c, g, or t
  misc_feature (94)..(94): n is a, c, g, or t
  misc_feature (97)..(97): n is a, c, g, or t
  misc_feature (114)..(114): n is a, c, g, or t
  misc_feature (132)..(132): n is a, c, g, or t
  misc_feature (134)..(134): n is a, c, g, or t
  misc_feature (139)..(139): n is a, c, g, or t
  misc_feature (142)..(142): n is a, c, g, or t
  misc_feature (152)..(152): n is a, c, g, or t
  misc_feature (164)..(164): n is a, c, g, or t
  misc_feature (167)..(167): n is a, c, g, or t
  misc_feature (174)..(175): n is a, c, g, or t
  misc_feature (183)..(184): n is a, c, g, or t
  misc_feature (188)..(188): n is a, c, g, or t
  misc_feature (199)..(199): n is a, c, g, or t
  misc_feature (234)..(234): n is a, c, g, or t
  misc_feature (236)..(236): n is a, c, g, or t
  misc_feature (239)..(239): n is a, c, g, or t
  misc_feature (241)..(241): n is a, c, g, or t
  misc_feature (258)..(258): n is a, c, g, or t
  misc_feature (270)..(270): n is a, c, g, or t
  misc_feature (276)..(276): n is a, c, g, or t
  misc_feature (279)..(279): n is a, c, g, or t
  misc_feature (291)..(291): n is a, c, g, or t
  misc_feature (293)..(293): n is a, c, g, or t
  misc_feature (300)..(300): n is a, c, g, or t
  misc_feature (312)..(312): n is a, c, g, or t
  misc_feature (314)..(314): n is a, c, g, or t
  misc_feature (316)..(316): n is a, c, g, or t
  misc_feature (322)..(322): n is a, c, g, or t
  misc_feature (329)..(329): n is a, c, g, or t
  misc_feature (331)..(331): n is a, c, g, or t
  misc_feature (353)..(353): n is a, c, g, or t
  misc_feature (362)..(362): n is a, c, g, or t
  misc_feature (400)..(400): n is a, c, g, or t
  misc_feature (406)..(406): n is a, c, g, or t
  misc_feature (411)..(411): n is a, c, g, or t
  misc_feature (417)..(417): n is a, c, g, or t
  misc_feature (425)..(425): n is a, c, g, or t
  misc_feature (440)..(440): n is a, c, g, or t
  misc_feature (451)..(451): n is a, c, g, or t
  misc_feature (466)..(466): n is a, c, g, or t
  misc_feature (529)..(529): n is a, c, g, or t
tgggngngataaaacaatttnntggnggnttccttggtttacncncnactctnaggcaagggggcaaanttttctctccctgccctggnacaanggngttcgggggcaaggggnaaccccagttcggggggngnggggntcnggtccccgcnccgcctcgggtntcntgttccnnccggccgnntggntcggtggctgngggccctggggggggggggggctgccccggccccncnggngngggggggggggccggcnggcggggtttgngtgggnccnccctgcccccgngnggggggngcccggggggcngngnaccccngcttccngngccccctgggggccccgtgggntcggggggncccgctctcccctcggggctgtcctcgggggtggggcngggggnggggntggggngctggggntgggggggggggggngataagaaccnctgccgaaagggacncatgctggttgctgggccatgctttcctcccagacactgggttcctgaagaccccgctttttnttcccagggttacaacattccccagactcaaagctggaaggcggcaa

SEQ ID NO: 671895 - DNA, 567 bp, Homo sapiens
tggggagagtaatttaccagagcagaaacctcccaaacaccacagccaggtgatgaacaaggccaacatcaacagtagtaagtcatggggatagcagttactcttgatatgatgggaagaaaatggcacttcacctctgtggtcttcctcccaataactcataacccgagtattttctatgaggaaagacgtcagacaaattccaatactaggcaacctataaaatacttggcctgtactcctcaaaactaacaaggtcatcaaaaataaagtgtgagaaattgccacatttaaaaagacatgacaacttaatgtaaagtggtatctgagatggaatcttggaacagagaaagggcattgaataaaagctaagaatctctaaataaactatgccattttaaaaataatgatgtgtcaatattggcttattaatcataacacatgtatcatactaatgtaaagtgtcaacgatggggaaactgaatggaaggtatctgggaactttctgtactgtctcctcagttgtttctgtaaatctaaaactgttctaaaaaataaagtttgtta

SEQ ID NO: 671896 - DNA, 1117 bp, Homo sapiens
ttagggctatcgtcgaccacgcgctccggaccgcgtctgcccgcgatgcacatgattgcctcgcctttgccggatcctgccgaccgtccacacccgccgcagctcaccatggatgatgatatctgccgcgctcgtcgtcgacaacggctccggcatgtgcaaggcctggcttcgctgggcgacgatgccccccgtggccgtcttcccctccatctgtgggtgcgccccatggcaccatgggctgtgactgtgtggtgcatgggtcacgaacggattcctatgtagggctgacgaggcccatgagtcaatgagatggcatcctcaaccctgaagtaccccaatctgatgcactggtcatacgtcaccaacttggtgactgacatgtgcagaaacctctgggcacccacaccttctacaatgatgtctgcgtgtggctccccgaggtgagcaccccgttgctgccttgacctgatgtgaccctccctgaaatccccaaatggccaaacctgcgcagaaacgatgactccattacttcattgttctgaacgaatcctttcaaatcatacctcatgccactgtaccgtaggctactccacgggcctgttgctatcccctgtaccggcccttcttggtcccggtaaccaccatgggcactctgtgacctgtgcatcctccctggctggaacgtgggggttctaccccaacctatccttggattgccccctattcctaacgcaagcgcggctaactggccccttctcccctctattgtcccacttctctggcggctcctgggcacccctgcgccttggccccgtgagcacctttgacctttgacctttcgccctccctttgccatgtaattcgcctttcttccccgaccccctgccggagcactaccctgtgctttcccaccccacccccacccgggtccccgcatccccgcggtaccgcaatcacgttgcctcgttgccccacattaacagcggacctcaatgcctcgctcgccatacacgtctccccccccttgtgacacttctctccgcccaccgcacacacttgcaccacggtgatcatgccttatcccatgcttcactccccctgtgccacacaatac

SEQ ID NO: 671897 - DNA, 336 bp, Homo sapiens
tcacccaataaaatacaaattaattaattttaggaaaaaattgcaaatgaataaaagtttctacaaagtctttgaggaatatttaattcccatgttgtatgcatatttctataatgtaggacaagctgaaaagctatccagctcactttatgaagctaaaattacactgaattgaacatagactaaatgtcagggaactattagacaattttactcataaatatgaattctaaactcctaaataaaatgttaacaagttgaatcctgcagtgcaggattcaagtacaatttaccccagcaaagtaaaggtggttcaatattagaaaagccagaaac

SEQ ID NO: 671898 - DNA, 608 bp, Homo sapiens
ccaggccaacaatgcagtgctggctcccgcggggctggctggagccctcctcaccctcctgtgcatggggctcctgtgtctgctgtgtaccacttgaacctgtccccgcagcgggtacaagggacccccgagctgagccagccgaacccggggccccctaaagctacagctacactgatgtacttcatttgcagttgaatgactgaaccctgtgtgctattaccaagcctgacatatagcgcactgtgacgctatggcttgctttgagcaacgtgggtattccagtgaccagggaacatgggtcccacctatgtaggtacaccaaacttgctccggcggaacacatgccaccacagctactgtaccttgccaatgattggctagctgagtatcgacaccttctttgggccaagttgggggctataggtagggtatactagccatgtggacgatgacaactatgtagaagccaatgggctgctgcttgcagccttctagagagccttcccgctggcccgcgacgtactatagtgggaagggccatgcctgaatcggccatccatgcctcagagccacagcccacaacgcacgaggctggtacagtactg

SEQ ID NO: 671899 - DNA, 915 bp, Homo sapiens
ggcctcgtccagggaaacagcctggggtgggaagtcagggcgtcctctccgtctccttctcttctggtatgaacgtgggggcggactaaaatacagaggtgccaggaagttacgagaaaagtggaatggctagcggctgagccccactagagcaggttctagggttgctttcccaacatcctgccaactaaataatcgggcatccacgtctgcatcagagggagaagctgcaaaatcaattcatgcaggagggcaagcgccaggatgagcgtacgccgaattccccaagtggcataagggaatggagaattcgtatcaagtgttgtcactcctaaaggatactgataggaagagaatcagaatgcctttggaagaggcaggaaggagtggaattaggaaaaggagagagaatagcttgttcttggccagctggtcaaacaaattgatgaataaagaatagaactggcatcattcatcatgtgaataacgtcttctaggttatccgggtattctagaatgtaaatggaccatagtgtgtgagttccatggtgtagcttgttgaacggggatgtggttatggaatatgggttaatttagatgtcacatgtacgtgtgatatctgagaatttgtccgataatatagtactgagcttagtattcaatataacgatagtggttcttgaacacgattagggtcaagtttggaagacagtcactgcttgggtctaatgacgagtaggtgcttgagaatgctccgatggggagggggcatatgggggtactggagggcacattgggggcttaatggtgtgaaaggaaagaattggataatggtttgaaaagaaaaaaaatggggggggaaaattaaatggggccgaaaatatagggaagaaggtgaaaaagggacaaagtgaa

SEQ ID NO: 671900 - DNA, 318 bp, Homo sapiens
tctacagattctcccgtacgtcaaaaaaagaaactgactaagaattggggatccgaatattataagaactagcacagagctattagaaggaaacgcaacccagtgaaagtgggcaagacttcgtagcttcacggagagaatgtgacgtagggagcacaacggcaaattacccacaattttccaccagtggaaatttaaagccacaaaacaagtgttggtgagtagatggagcggctggggcacctgttccctggtgttggaattggcattgtctcatactattgaatcatttggaatagattgggcgtacgggggggg

SEQ ID NO: 671901 - DNA, 257 bp, Homo sapiens
agaggatcccctgttcgaagttaggctaggactgcagtggtgcactctcggtcaatgcaacccctgcctcctgggtacaagcaattctcgtgcctcagccccctgaagatagcatggaattaggaggcatgcaccaccacatctggctaattttttcttttttttgtatttttagtagagacggggatctcgctatgttgctcaggctggagtgcagtggctattcacaggcgcgatccccttagttcagagccagg

SEQ ID NO: 671902 - DNA, 1007 bp, Homo sapiens
gtcttcccttgtcccttgcggttggtctctccccgtctcggctctgattgtgctccgtggttgtcgttctcctgtatcgacttgtctgctttcttggcgtccctccgcatgcggtcggccctgttgctgctgctcgcgtcctcttcatggggccggtgccagagttgggatcggcgcccgtctcccttgggcacatttaactctgtgcgggttcacactgctggctgtctgccccattcctgtggtcgtcggggcacctccccttgactggcccttagaagattcgcggtctactgtgtgtcggctctgtcccccacatccactgtctttgtacccatagtcattgtcgttgctactatgagaaggcagttggaactagccgacctataccaatagggtcatctgcttcatgccggaccagccgccctagtaatatgccatcatctatatacaacaatgaggacttccaggtcggacatagccaaggtggtcctgaagagcaaggtatgaccaaggtgaccgttatcggggctggggtgaccctgcacgaggccttggccgcttgccgaactgctgatagaaagtaatagatcaacatccgcgtgctggaccccttcaccatcaagccctggacagataaactcattcatcgatcagcgctcgtgccacccaatgggacaggatcctcaccagtggaggaccacttattatgaacggtggcagttggtgaggctgtgtcgcacgtgacagtagtgggcgagcactgggctatcactgtcacccacctggcctagttcaccgggtaccaagaagtgggatagccggctgtagctgctgtaagatgcttgatatcgtacagggatgccattgcacaagctgtgaggggccgtcatcaccaaggcctagcgcgggtatgaagtgtggggccgggggtctatacattcctgagattctgggaaaggtggataacaccatgtactgagaggatggtatgtctttgtttcgct

SEQ ID NO: 671903 - DNA, 280 bp, Homo sapiens
tgctgggattacaggcgtgagccaccgcgcctggccaataccttcttgagctctcactacttataagtctttgtactttatgctaccaggaaaaaaaaaatggtatgagacatggcaactaattgtaaatctgtttgtaaacatttgatatgctttttattcacctgggggggtcttcttgctaagctgcaatttccctttcggaaggcttcactcgaattcctgcagcccgggggatccactagttctagagcggccgccaccgcgtttgagctccagt

SEQ ID NO: 671904 - DNA, 456 bp, Homo sapiens
  misc_feature (147)..(147): n is a, c, g, or t
gaggtggatctagaggatcccatgcaccattccgagtgtaggaagagcagctgtccattcttggtgggcagcctgtcgtcaatgaccacctccacccactctccgtactgccagaactggggaggggggacacagcggctgctcacntgaataagcagatgtgtaaagggagtccctccaggggacctcacgtggggactctgtgccatcagtgttcgagtcttggctccttaggagcaggacatgtgtctgccttatctgtgcacataggagatgccagatgaacccgggaacatctagtccagggtctgcgtttgtgcatcagagaacttgcccagcgccacctagtggcagcaggaagtgattcagacccacacctcctgaccctcagtccacagggctttcctgaaggccacgtggcctaggggagctgggaagaggatggatgtgtggata

SEQ ID NO: 671905 - DNA, 156 bp, Homo sapiens
tgactctagagacccctcagttgtctgcgaactcagcctgcaggaacgtgttaggaggggtcggggagaaatcaggctctcgaagctcagaaaattcaacgtgaggagcaagctacaaggacgcccgaagcacagtggacggtcatgaaggagcgg

SEQ ID NO: 671906 - DNA, 440 bp, Homo sapiens
  misc_feature (7)..(7): n is a, c, g, or t
  misc_feature (282)..(282): n is a, c, g, or t
tctaganatcctccgggtgctgatgtgtatgtgtgtgtgcgtgcgtgcatctgtgtgtgtgtgcgcgtgtgccatgtggtgcgaactagtgtgatttgacatatacatgtcccgtccgtccatgtttggacatggtggcagatggggggtggttgggagggctaagcaggcaatgaagcctaggtgtgcaggctcaggcccagagagtgatccaccttccccagtcggttcaggccctgatcaaagacttccaggggaccccgactttcacctacaaagcgngccatatcttcttcaccgacaactggcccgagcccctgttcagtgagctaggccgctctcgtctggcaaaggtggtgaagacgttgaaggagattcaccttgccttcctcccctacgaggcccaggtgttctccctcgatgctccccacaggaactac

SEQ ID NO: 671907 - DNA, 261 bp, Homo sapiens
caagactgcagccccttgagcggtgactatgtcattgaggatgtgcaaggggatgacaagcgatacttccgtcggatgatctcctcagcaacaggaatttggtgcagtccgaagccaggttgctgaaggatggtttctcacaaagcccagaggagcggaaaaggacaggaagagcagcgcctctgatgcggagacctcctgcagcccggggcagtccattgataagagttacctgtgtggtgacacacacgccatgatcgc

SEQ ID NO: 671908 - DNA, 107 bp, Homo sapiens
ctgcatgagcttagaacgggacgacccacagcctaattattagctcatccctctactattttttaaccaaatcaacaacaacctatttagctgttcccgttgtcgat

SEQ ID NO: 671909 - DNA, 85 bp, Homo sapiens
catggatttgctggtgcagtacaactaggcttaatagggacatgtcaatattctttattaataaaatgtttttcagtgccaaaaa

SEQ ID NO: 671910 - DNA, 332 bp, Homo sapiens
  misc_feature (8)..(9): n is a, c, g, or t
tttccttnnaaataaagtctggttgtcagacgggctccatccgctttccctcagggtgattattgaaggtttggaaaaaatatctaagaagcaaagccagttttttttgccttgtactttgcaaagtctcggcgtagatttcaccctccaaccttagatctccacattcttcccttttgatgtctcatgagcattcaggagggtattctgaactcttcaggctggatccaaagccaaaaaaggaactgtgaaattgtcttaataggtagcttgtcccctcctctgcagccagaaaatctggtagtgtctccagagccctcctcccctgggga

SEQ ID NO: 671911 - DNA, 457 bp, Homo sapiens
tctctgacccccaactagacaaagctcgggggagtgctgctattcccagagcttaataatgacggctaaggacgacccgaacaacagggacactgcagacgcctgctgaaacacaaagacccagcaacaacgcccgtgaccagggcaaggacaagatctgccccaaaagcaaaccttgcaacaagctcaataactacaccttgattgacacagctacctatggctgttagactgtgccatcgaggctacgtgtgcagggcacccctttatgagcttcttagtgatagacttatcaatctgtgtccaaagcacagagctaagtccattacaccgcagactccaaaggtgcagatggtacagctgttggcgaaagagcatgacttgcacaaccggctgtacattttttaaggtgcaggctttcttatttcaatctatttaatatttggtggaattaatt

SEQ ID NO: 671912 - DNA, 199 bp, Homo sapiens
  misc_feature (69)..(69): n is a, c, g, or t
caccgcgccggacccaacaggaaggggagttaagagctcggcactgggtcatacacgtgaggaaaattnagctctccagtgcctatctggagccttaggcagccccccaacctgtgtgcctcaatttccccatctgcagaaagggaataataacagcatcacctgattgttgtggggacaatcaaaggggtcagcagat

SEQ ID NO: 671913 - DNA, 205 bp, Homo sapiens
ccatatctgtgtgactagtccttccaagagcccatggagggggtggtagcataccggcatccctttcccgcatcacgtctcgcctgtcaatgattccatgtatcgtaccgggggacttctgtgtctttgtgatagtcagcagaacaagcaatattagacccccggcccgcctgcaagcgccgcacttctggcacttcgtgggccg

SEQ ID NO: 671914 - DNA, 366 bp, Homo sapiens
ttccttagaggttggttgacctgagtggagcccttccatgccagcgctgacagttcccaagtccttcccaggggaattccagcttcccgtgaccgaacctgacatcaacaacaggctggaatcgttgtgcctcagtattgacggacaagcccttggaaaacgggtttaacggaacttcaacatctagaagctgaagacgagaattaacgcgctggccgtgaaatcgaatgctgcgggtccagtgtccggcatcttcagggttgcacagaatcctccaagatactttgcagccttttttccccctggtccctctcccgttttgattttgtgagagcgtaggtcatcctcgtaaacatatcagtagaa

SEQ ID NO: 671915 - DNA, 1524 bp, Homo sapiens
agcgggaggccgtaggaggaagatggcggtggagtcgcgcgttaccgaggaggcaaattgaagaaggagccagaggaaaccgatcgtaccgccggagcaagacatgcactcactgtgcgctactgggtcttcgagccacacaataacggcgctgccagcgagcatgaagtggtacgagattgctctccagggggaaattggtaccgtccagaccgagtttgcccagaatctaacacattgggatggactggcaacctctagcaagacggaaatcgtggatgcacagagcattacgcgtacagccaggacacggttcctaatccgcgagtgagacggtctaggacagagaagagggagcagcattcggggtgtccctagtttagatggcaaacactgcgcacaacgttaccgatggaattgcgtcaaacacgcgaaccccctggagcgctaattcacgaagtgagtttgcaacggggcacgtcacgttgggtcgctagaccagctacagacctgggtataatgggcaggcaacggctaaaccacgcggtggggaaacacttggcaaccttgcaccatattcgccgatgttggcaacccgcacccgattggcatccatgcaaagtctcgtcccatagctgaccatgctctgttcccccaaaggtcagagaatactgagcgcgcaaccgcgaacgtagtgagaaccgttccttgtgtgtgcaaacgcccaatttacgcgcccgaccatgtgcatagagcgcccagagcaacttcgcgcgagcgaacactgttcacgcgaggcgggacacgaaatgcgccgagctagtccattaccccgccatgttcgcgaagctggtgagcacaggggctccagattttgagcagatgcaacctgccgcagcgttcaagttcgtgtcggagcaagcttgctcccgtgtgaacacatcggtcgatccagctcgtctcaacgttgatatcccggggcctacatcaggtaaagacagtctctggaatcagaggcatccgtagcgacagtcatgccgaccccgcagtactcacaggcagcgtacactaacgcgttggaagtagcaatgccagcagagtaaacgagactcgccaagtaaagcgcgctgcctgctggagcgcattcacaagcacactgtcctcgcaccgcggctgtgggacacgacgctaaagacttactagcggcgcccagcgaatacctaatcacacggaccgaccgtaactatacaacaaacaaccttactacacgtcaaaaacacagagcgacacaacaacttctctcacatactaacacgtttgggcccagaatgtacgacaatccccccctcaaccttagttactagcgagtcaaaaccacgcattacctcaccgactcatactcccacacgcgacgacagcttgttcatcggccactacaaccccacgccgctacgcctttcgaacatcctacccacggaaaaccctactcatacgcacacactaacgcccaacactccgcctccc

SEQ ID NO: 671916 - DNA, 333 bp, Homo sapiens
  misc_feature (195)..(195): n is a, c, g, or t
  misc_feature (243)..(243): n is a, c, g, or t
  misc_feature (258)..(258): n is a, c, g, or t
ggagggatagcaccaggagatatacctaatgtaaatgacgagttaacgggtgcagcacaccaacatggcacatgtatacatatgtaagaaacatgtacgttgtgcacatgtaccctagaaattaaagtaaaataataattaaaaaattaaaattaaaattaaaaaaaaaaaaaaaaagcccagaaagcaaatctngccagcttggcttttcatgtcctctttaaccagaaagtagcttaaagncaaaatcttttctanggttttattaaatgttcaaatacatgaaatcttttcctttctatttcactgataatttttatgacgtctaggagg

SEQ ID NO: 671917 - DNA, 495 bp, Homo sapiens
tatctcatggattctcgcgtcaccctcgtcagcgacgatcgctccaggcttcgctccccgacaccctgctatggacccgatgtggctgtatgctcggcattcacaccggtgagtggaccgcccatatttttgaatacgccatgtccttcgagggcaatatgacgcaagtgccgtgagctcgctgccgccaacggtgtcggtgtgctgcatcccccaggcgccctggccaccgatccgcctggtctcatcgtctgcgacgttgactcgaccgtcacacgcaccgtggccatcgatctactcgccgattgcgccgggaaagccgatgaggtccgcgagatcaccgcccgcgccatggtcggagaactggacttcacacagtccctgtacgcccgagtcaggtatctggaagggttgcatatcggggccctcgaagaggcgtggaaagccaccgtcatcaacccctgggacagccgagctaatggcccgcttgcacat

SEQ ID NO: 671918 - DNA, 231 bp, Homo sapiens
agctgcatgccaagataagctgtgttgctctcaatagacattgaagctaagatgatggccctgtgaactgagagttgcagtatctgctcaataaggccaagttataccaatgccccggaccccgcacctaatgtgacaagcactgggaccctgggcagagccaacccctcaatgccatgtgccagatgaccagtggggagacaggtcatccactccagacagcccggtgga

SEQ ID NO: 671919 - DNA, 363 bp, Homo sapiens
catgctactctcttctatgatgtggtaagaagggtagcttggcccaggcgtggtggctcacgcctgtaatcccagcacttggggaggctgaggcgggagaatcacctgaacctaggaggcagaggctgcggtgagccaagatcgcgccactgcactccggcctgagtgacagagtgagactctgtctcaaaaccaaacaaacaaacaagagtcaaactctgtaaaatgtttaaagaggtttattctgagccaaatatgagtgaccaaggcccgtgacacagccccaggaagtcccgagaacatgtgcccaaggtggttgggttacagcttgattttatacgttttaggggtatggctctgatc

SEQ ID NO: 671920 - DNA, 537 bp, Homo sapiens
  misc_feature (8)..(8): n is a, c, g, or t
ccacgcgntcggaatggcattatgaaggacaccctccgggactgtgaccaggagtccaccgtgctacaacacgggtcactctacggcctaatacgtactatatgagtggtacccttacgagtggcttgtgacgaggcccccagaattacgtaggcgtaagatacgaaacgttggtgttgtggaatacaggcacaggaatgtccttagaaattggccaacaggcgaacccgtgggcgggcaagcggcgaacgccaaggctcacaacccaaaagcgcgcaaggggccccgcacaaaggcgcgccacggagcacaagaggcccccagggacaagacccgcttacaaaggacgaaaggagggccaacttggggacaaggcccccattgggggggaaaccgggcccgcttggggggggcaaaggggaaccttggaacaaggaacaccgtcagacaccaccaagacaccgcgagcatcgacgcacacatgtgggccagacgccgcatgtccatcttgggacacctggagggaatcagacaggg

SEQ ID NO: 671921 - DNA, 769 bp, Homo sapiens
  misc_feature (9)..(9): n is a, c, g, or t
  misc_feature (67)..(67): n is a, c, g, or t
  misc_feature (69)..(69): n is a, c, g, or t
  misc_feature (96)..(96): n is a, c, g, or t
  misc_feature (99)..(99): n is a, c, g, or t
  misc_feature (115)..(115): n is a, c, g, or t
  misc_feature (126)..(126): n is a, c, g, or t
  misc_feature (145)..(148): n is a, c, g, or t
  misc_feature (155)..(155): n is a, c, g, or t
  misc_feature (160)..(160): n is a, c, g, or t
  misc_feature (168)..(168): n is a, c, g, or t
  misc_feature (178)..(178): n is a, c, g, or t
  misc_feature (182)..(184): n is a, c, g, or t
  misc_feature (187)..(187): n is a, c, g, or t
  misc_feature (195)..(195): n is a, c, g, or t
  misc_feature (197)..(197): n is a, c, g, or t
  misc_feature (209)..(209): n is a, c, g, or t
  misc_feature (214)..(214): n is a, c, g, or t
  misc_feature (216)..(216): n is a, c, g, or t
  misc_feature (222)..(222): n is a, c, g, or t
  misc_feature (317)..(317): n is a, c, g, or t
  misc_feature (322)..(322): n is a, c, g, or t
  misc_feature (324)..(324): n is a, c, g, or t
  misc_feature (334)..(334): n is a, c, g, or t
  misc_feature (362)..(362): n is a, c, g, or t
  misc_feature (366)..(366): n is a, c, g, or t
  misc_feature (378)..(378): n is a, c, g, or t
  misc_feature (390)..(390): n is a, c, g, or t
  misc_feature (397)..(397): n is a, c, g, or t
  misc_feature (408)..(408): n is a, c, g, or t
  misc_feature (412)..(412): n is a, c, g, or t
  misc_feature (424)..(424): n is a, c, g, or t
  misc_feature (439)..(439): n is a, c, g, or t
  misc_feature (443)..(443): n is a, c, g, or t
  misc_feature (448)..(448): n is a, c, g, or t
  misc_feature (454)..(454): n is a, c, g, or t
  misc_feature (456)..(456): n is a, c, g, or t
  misc_feature (458)..(458): n is a, c, g, or t
  misc_feature (463)..(463): n is a, c, g, or t
  misc_feature (539)..(539): n is a, c, g, or t
  misc_feature (591)..(592): n is a, c, g, or t
  misc_feature (596)..(596): n is a, c, g, or t
  misc_feature (624)..(624): n is a, c, g, or t
  misc_feature (645)..(645): n is a, c, g, or t
  misc_feature (654)..(654): n is a, c, g, or t
  misc_feature (660)..(660): n is a, c, g, or t
  misc_feature (666)..(666): n is a, c, g, or t
  misc_feature (686)..(686): n is a, c, g, or t
  misc_feature (689)..(689): n is a, c, g, or t
  misc_feature (694)..(694): n is a, c, g, or t
  misc_feature (700)..(700): n is a, c, g, or t
  misc_feature (769)..(769): n is a, c, g, or t
ctgaaatgnaacagcctcttgagtgacttgagcggcatgttactggggttctgtaaaaagggcaggntnctccctcctagccctgaagcctcatgnacntgtcttgtaagataanctctctaatantcaacttgcagggtctcgnnnnaacatcnaaganttggtagnatctcctttntccnnnaanccagctgnanctcaactaatcntaaangnaaactnaagaacagctcaccagatgccacctgttgtttgtcagggtttcaaactccagaggaaatgcatttgcctgtgatggttttcctctctaagggcanctgtntnaacttggagntgtgctttcactggtgcctcatggggcntggncctactctccanctgaattcacanttttctntataagggatnaggnggggaataagtncaagaaggtgacaanaggntcccntgcaananancttgntcattcctggcaggcatctcccacaatgccccagtagggctggctgaggccgggacagcttaaggtcagagaaagngcagaggggtgcttggaagtgctcatcactcaggggagctggcatgcccggnntganaggcagcctgatcagtgctggtacaaanacagccaccctgcgccccttntcgatcagnggctgntgtttngaagcagctcgtcggcacanctnctttnttgcangaaatgttttgtatcgggccaatgacttcagttttccttgcctggagatgccttcatgaaggaaggggn

SEQ ID NO: 671922 - DNA, 258 bp, Homo sapiens
  misc_feature (22)..(22): n is a, c, g, or t
  misc_feature (237)..(237): n is a, c, g, or t
tatccatgtagtcaaatctagnggaaaaagcaaataaaaatagtaaaatttggccgggcacagtggctcacgcctgtaatcccaacactttgggaggccgaggcgggccgatcacgaggtcaggagatcaaggccatcctggctaacacggtgaaacctgtctctactaaaaatacaaaaaaatattagctgggcgtaggtggtgcacacctgtagtcccagctacttgggaggctncaggcaggagaatggtgtaaa

SEQ ID NO: 671923 - DNA, 380 bp, Homo sapiens
tactactactaaattcgcggccgcgtcgacgtggggatgatgatgggtgatggagtgtggggatgatgatggagtgtggggatgatgacgggtgatggagtgtggggttgacgacggggcgtggggttgatgatggagtgtggggatgatgatgggtatggagtgtggggatgatgatgggtatggagtgtggggttgatgacgggtgatagaggagtgtggggatgtgatgggtgatggagtgtggggatgatgatggaatgtgggattgatgacggatgatggagtgtggggatgatgatgggtgatggagtgtggggatgatgatggagtgtgaggtgctttctgggctggaggtcgacgcggccgcgaatttagta

SEQ ID NO: 671924 - DNA, 362 bp, Homo sapiens
tggcaccggtttcagccccaaggacgtgttggttccctggctgcaggggtcacaggaattgccccgcgaaaagtaccttacttgggcatcccggcaggagcccagccagggcacccccccttttttgtgaccagcatactgggggtggcaaccgaggactggaaaaaggggggccccttttcctgcatggtgggccccgaggccctgccgctggcctttacccagaagaccattggccgcttggggggttaacccccccatgtcaatgtgtttgttgtcatggggggggtgggcggcccctgtttttgagccgcccgcctgtccccccccctgaattaactccatgctccccccagccgcca

SEQ ID NO: 671925 - DNA, 407 bp, Homo sapiens
tgagaacggagtcttgctttgtcacccaggctggactgcagtggcatgatctcggctctgcaacctccatctcccaggttcaagcgattctcctgcctcagcctcccaagtagctgggattacaggcaggcaccactatgcctggctaattttttgtatttttagtagatatggggattcaccatgttggtcaggctggtctcgaactcctgaccttgtgatctgcctgcctcggcctcccagtattgggattacaggcatgagccaccatgcccggccttaaaatgccttcttaaggaaaaatgccaactccatccttaatctaaggaaatctgattgtccaatagatctgttaatatgtaacatattaataggtacttgcctgtgtaaaatataagccatattta

SEQ ID NO: 671926 - DNA, 416 bp, Homo sapiens
tgtgcctagttaatgcatgggcagccaggtttttgagggtctcggctccctctgactccagaggcgtctgctttgagccacactcagggtgacagcagcttccctggaaatggcagtggtttgtgctgagacaaacatttctcctcttccttctcccccatccgcctctcctgtgagcggggtccagtcccggagcttcagccaggaaatgctccttgtgtgtccacagccctgctcatcagcagtggaatgagaggcccagagtccaaggagcagcagatgggttccatcaggggctgctggactgtggtcagaactcaggcagtcacaagtgtgtttgtctctccagagacagaaggagagggcggcatcacagtcagctccaggaattcccctgcatttaacgcacacgttca

SEQ ID NO: 671927 - DNA, 790 bp, Homo sapiens
ccgcgcgctcgcagtctgtctccgccgctcccacgcacgcgtccggctcacgcgtcgcagcgaggcgaggctgctctgggtgagtggctgacagtagcaggtctgcggccaccagctgctggatgtcaccaagaaggggctcgagtgcccctgcaggggagggtccaacgtctccggtgtgagcccgacctcgtccctgttctccattctgcgtttcgttcccacgacatgtgtggcctgtgccgccaggctccccgtgagtctccgtcccctgtatgccacgtctctgcccacgtacctatgcttctagaaatgcccctcacctctagtgaccccagaggtgaccatgcatgagaggcggcacgagggcggacgacgcggggtaactggatgtgccaatgccttgcaacgctttcatggaaattcttcccatgaggggtcccagtgatcccctgctactccactgacctggaacgatgcttgtcgtaccaggcacacacacactgttgagggcaagccctgagttggtgagggagccactggagacccccaattctcccttccatggtcagtgaagcgcgcgggagatatccaagcttatagacggattgcggtcgtgatggatcaatctgaagcggcactctcatgccaaactcccacaaggagtgaggattgacgcctctcctttgccccagtccctggattcacgtgggaaatgcacatgaacgtggaggctgaacaacaaccctccaaaaaagactgatacctccaacggtcaacataagtcccg

SEQ ID NO: 671928 - DNA, 272 bp, Homo sapiens
cccagcttcgcgagacggagacggaggctctcctggggtctgtgttcaggagcagggtctgtgtctacagatggctgtggcccctgcaggcagctgttgaacactggagggtcccccggaccacactggggtgggctcctgaggacgtgggctgcccgtcttgcgggggctgccgtcttgcggcgcagcccccgcaagacgcagagatgcccctgctggccgcaaagtgggtctcattgctgcccgccggactggacgtctttcgagggctg

SEQ ID NO: 671929 - DNA, 159 bp, Homo sapiens
ttgtgtgcctaccttactagctcatatgtactaggatctatatgaggtaaagaggtaggggcaaaagggtttgggttgtagcatgcttctatagatctagggcaagggcacttcaatgtatcacatcttgtgggcataccatgcaaggtgtgggataag

SEQ ID NO: 671930 - DNA, 903 bp, Homo sapiens
  misc_feature (263)..(263): n is a, c, g, or t
  misc_feature (607)..(607): n is a, c, g, or t
  misc_feature (736)..(736): n is a, c, g, or t
  misc_feature (799)..(799): n is a, c, g, or t
gctgtagtggcttcgtcttcggtttttctcttccttcgactaacgcctcccggtctctgcgtcgacactcccgccggtccgtctccttaacagccgaacaccatgccgttcaattcaagttgctacgagttctgattggagatgatatttagtaacgttagatgtggaaattgccaagatcaatctgtgactattaagaccatgttggcaagatttcgggaatggatgatgaaggagtatgatgacccagtatcctctaccanatgtgaatgcagcaatattaaaaaaggtcattcagtggtgtcacccaccacaaggatgaccctcctcctcctgaagagatgagaacaaagaaaagcgaacagatgatatccctgtttgggaccaagaattcctgaaagttgaccaaggaacactttttgaactcattctggctgcaaactacttagacatcaaaggtttgcttgatgttacatgcaagactgttgccaatatgatcaaggggaaaactcctgaggagattcgcaagaccttcaatatcaaaaatgactttactgaagaggaggaagcccaggtacgcaaagagaaccagtggtgtgaagagaantgaaatgttgtgcctgacactgtaacactgtaaggattgttccaaatactagttgcactggtctgtttataattgttaatattagacaaacagtagacaaatgccgcagcaagtcaattgtattagcanaatattgtcctcattggatgggtagtttgagcacagatcccaaaccttacggcaagtttcttntagtatgatggaaaggttctttttttctttgctctgaataaaactgaaccgggggtttctttaagtgggtaaaaaaaaacaaggccccgttggctcaccgaggt

SEQ ID NO: 671931 - DNA, 278 bp, Homo sapiens
cggcgccgggtgccggagcatcgggcgaggacgatctgatcgcgcgctactttcgtccgctcgcgaccgatccgggtgctttcggtctcgttgatgatgcggctctgctgaatcactccggcgatgatattgtcgtgacaacggacgcgatcgtcgaaggcgttcatttccttcccgatgacccccccgacaccatcgcacgcaaggcgctgcgggtgaatctgtcggacttggcagccaagggcgcttcgcctgcgggttttgtgctgacgcttgcg

SEQ ID NO: 671932 - DNA, 520 bp, Homo sapiens
cccttcttcaagtaataaaaaaccctgccttttttcaaaagtgaatttggtactgaacaaccaaattaagccaatgtgtcggtcgtgaggacagttacataagaatccccccattcgggcttaaccgttgtgaataagtggtataaacagctttccgttaatgtgtacatttctcccgagtgttgaatgtgcgcgactgaccaggttcggaaacagttattctgttcgtatttctttaagtagaacttatgtagttttctaaattatagcacgttcccttctgttttgtacatcaatgtgccatcgagctgttaatgccatatcaaaataaagggtcctgcgtaaggtttctttcttaaaacgcagaggtgctttggctgcacacttgtcttcataacccctcggggcgcagagcgtcttgagccctttccaaggtgtgacacctcttcaagtcaattttttgaaaggcaaaaaaccaggcctcgactattcgttgttatgtactgcacagtgtgaactg

SEQ ID NO: 671933 - DNA, 679 bp, Homo sapiens
  misc_feature (48)..(48): n is a, c, g, or t
  misc_feature (53)..(53): n is a, c, g, or t
  misc_feature (66)..(66): n is a, c, g, or t
  misc_feature (71)..(71): n is a, c, g, or t
  misc_feature (383)..(383): n is a, c, g, or t
  misc_feature (512)..(512): n is a, c, g, or t
  misc_feature (575)..(575): n is a, c, g, or t
gggatggggcgggccccgcagggggaagaccagactcagtttttaggnacggnccttggcggagtncattncagtggtgtcacccaccacaaggatgaccctcctcctcctgaagagatgagaacaaagaaaagcgaacagatgatatccctgtttgggaccaagaattcctgaaagttgaccaaggaacactttttgaactcattctggctgcaaactacttagacatcaaaggtttgcttgatgttacatgcaagactgttgccaatatgatcaaggggaaaactcctgaggagattcgcaagaccttcaatatcaaaaatgactttactgaagaggaggaagcccaggtacgcaaagagaaccagtggtgtgaagagaantgaaatgttgtgcctgacactgtaacactgtaaggattgttccaaatactagttgcactggtctgtttataattgttaatattagacaaacagtagacaaatgccgcagcaagtcaattgtattagcanaatattgtcctcattggatgggtagtttgagcacagatcccaaaccttacggcaagtttcttntagtatgatggaaaggttctttttttctttgctctgaataaaactgaaccgggggtttctttaagtgggtaaaaaaaaacaaggccccgttggctcaccgaggt

SEQ ID NO: 671934 - DNA, 333 bp, Homo sapiens
agaagcataaaaaggcattcaaggactgttgaatgctgactgttcaaactcctgtcattacaaaacaacgggggacctattgcattcacaatgggacacaccaaaaaaaggcaacaggagtgtgagctgaatgcccatagcaagaagcccgatcactgtgtccctgcagaatgcatgatattcacaaagaagaaaaatatacagccacagccatgcagagaggataaaatattaaatgatctaagatctgacaatatacttgccttccaaatgtcactattaatctctcccccattcagaacagcataatcactccatggctgtttctagaca

SEQ ID NO: 671935 - DNA, 310 bp, Homo sapiens
ttttcgtcctgtaaagacgtgttgctatggcagaatccaggcgcaggtcacagtccatgagccatgagagcacagtggaggaggcgggagtcacgcggcttcctgcaggacggcctcgtgttcacagcacacactggctgcgctgcaactagaggaaccgcggctcacactctgggagtcctgtagctcagctgcgggaacatgcagtgcggagtcctgtccccctggcatagacatggcattgcgggcccttaaagcggcaccaccatcaaaaagggctgcagggacccccgtgaacgatctgccttgg

SEQ ID NO: 671936 - DNA, 231 bp, Homo sapiens
ggaaaaaaaaaaaaaccccccccgggggggggttaagagaaaaaaaaagggcaaattttttgccccgggcttttttttccccccggggtttcccaaaaaagggggggtttaaacccccatttccgggggtttttttttttcccccccgtttcccaggggaaacccccggggggggttttttgcccccaaaaagcccccttttttttttttaatttccccccggggccccca

SEQ ID NO: 671937 - DNA, 496 bp, Homo sapiens
  misc_feature (286)..(286): n is a, c, g, or t
attgcaagacagtttgtcctcctcaatttggtttatgaacaactgcaaacccctttctccctgatggccagtatgtccccaggattatgtttgttgcccatctctgacagttagagccgatatccctggaagatattcaaatggtctttatgcttcggaacctgcagatacagctttgttgcttgccaacatgaagaaagctctcaagttgctgaaggctgaattgtaaagaaaaaaaatttccaagcccttctgtttgtcaggccttgagacttgaaaccaaaanaagtgtgaaaagactggctagtgtggaagcatagtgaaccccctgattaggttatggtttaatgttccaccaactattttttaaaaaaaacaagttttaaaaatttggtttcaaggggacatgtgtgaaaccaatattgtatactcccatagtgagccatgattttttaaaaaaaaaaataaatgttttgggggggttttgttttttcca

SEQ ID NO: 671938 - DNA, 921 bp, Homo sapiens
  misc_feature (123)..(123): n is a, c, g, or t
  misc_feature (908)..(908): n is a, c, g, or t
gcacgagctttcaaatcgttattaatatttcctctgccctcttcaccttatagctttaggaaacactactctattcatattcaactaaaaaagtagtatatttccttccgttagaattgtggnacaaaccagcgcaatataaaccctgattgcctcatgcgagactttcagtaaacatcaatctccatacatatcctatcatccttaattggtagaatagacttgcatttagtccgacgaaagtctaccacttcaacttttttttatcctttttatattaggacctggcctaccattcttctgttgttcttaatattatcttacgagcattatatgagttttcatgaactttaatgtataccaatatacctctacaaattattacagcgtaaaagcttgttcaaaccggcactcaatttactagcgttcatttcacttagactcaggttggttggaaattggttaaatggacagaccgtgttccatctcaagaatttactgcacaacgctaatcaagaactaactgtcgaagtaattagcggtttgaacgcgcttgacaaatgttctattgaaaaagtgatgtcctctgaagagtaaaggcactatggggcgttgcaactaaaggaaatattagattcatcaacagtgagattttttcataaaacatgagtctatatcaggtgaaacagtttgagacagccttaatatggaactgaaaaagcaaaatcaaaggcaaaagtttctcatatatatatggcattgttgatcacccagtgcaagcccaattttgcttatgctttttcttaaactgtttttgacaacaccgaggttttcgctgcagaaaaggaacatatggtggtaatttgtgcaaggggttaagggtccaaaatttgctgccatgtcgctcncagcagcaaaagg

SEQ ID NO: 671939 - DNA, 169 bp, Homo sapiens
  misc_feature (80)..(80): n is a, c, g, or t
  misc_feature (82)..(83): n is a, c, g, or t
  misc_feature (156)..(156): n is a, c, g, or t
tggagacagggtctcgctctgttgcaccactgcactccagcctgggcaacagagcgagacctgtctcaaaaaaaaaaagnanngcaatgtttatattataaaagagtgtcctaacagtccccgggctagagaggactaaggaaaacagagagagtnttacgcaggagca

SEQ ID NO: 671940 - DNA, 550 bp, Homo sapiens
ggtcgtcatccgcggcgcggcggcggctcgtggggtttcagcgagagtcttctagatccgaggcgctgcgggacggtcattatatttaggagagaagcagatacagaagtacaccaggctgactatcccaaagattagtgtcatagatacttggtgtcacatgaaccagacctacaggacgtacacgagtgtccacgagaaagtggactcagagttagcttgcggaagacgctggggtctcaagcatgtcgacatgttggacgtctggactgatgctggaagtggatacgaaaatgtagaagaatcaatggagcagcatcgactcttccggagcatatggctttcaagggcacctagagaatgagatcccagttgagatctggaagtggagattgaacatatgggggctcatctcgatggctatacctccagagagcagaatgtatactatgcccaaagcattctctagaagacgttgccgaagagctgtagaaattcttgcatgatagtaatagcgaaagacagcatcattgggcagaagcagagatgg

SEQ ID NO: 671941 - DNA, 295 bp, Homo sapiens
cagtgggtcagcagcacgcagggcagtgcagtgcacatgcagtgggctaccagcagggccgtttgctggtggctcacgcctgtaatcccagcactttggcaggccgaggagggcagatgatctgaggtcagcagttcgggagcagcctggtcaccatggtgaaaccctgcctctactaaaaatacaaaaacaaaattagccaggcgtggtggcgggcgcctgtcctcccagttcctccgacaggcttaggccgggacgaactggtgacgacacctacggacgcggacgaacttcg

SEQ ID NO: 671942 - DNA, 605 bp, Homo sapiens
gctacggcggctgcagggctccggcaaccggtccggcaacgccaaccgctcccgctgcgcgcaggctagggcttgcaggctctacaggctagcagcgctagggtaggactctaaggatcctggctataccaaacatagtaggcaagctactagaggcctacccctctagctagcctaagctaggtagtttagggccaaataggcccctggacgcacgggccccatattattaccaattcgccccatgttcccgtgacttgcaggctaggggtacaagcttaatagttccgaagcaaaacccggcacattaacccaaacggattcgaggccatccaagcccccggaatgtggccaagctaatacccgatataccagataatcaaacaatccgcatcatggtacaaccccacttttggaaaggccccttaacccttattggaaaaacctcggaaaaagcgtggctgtataagtatgggactttggaggaattaagcgcccgataatacccccccattagcaacggcctaaggcgggacgcacccccccaacacaggtcccccacaatcgagcggcgaccaaagtggaaccgagtaacggcgttttcc

SEQ ID NO: 671943 - DNA, 438 bp, Homo sapiens
gtagcgcatctcttcgcacagtgggctcagcttctgttcaagctcgtgcagcttctggcgcgtgacctcgtgtagctctgtggtcactggctagacattcggctggtacagctaaagtccgcatggcaggtcttaggcaagtcgtacagtatggcagcactccgtcctggacctgtgtcacatcaacgctcatctccagcctcaggacttctgtctcagctttcgtgttaacataatgctcccaggtcacaggtacaagctgttcgcgcagctttcataaggcacaggtagctgtgtatcagtcgtcaagaagctaaagggtcaatctgagctcacaagtgtggacagtctgaggttgtacgcatagtccatgactccgtctttgagcacatccaagtacacaatggccaggtcattgatcagatctcagtggctctg

SEQ ID NO: 671944 - DNA, 211 bp, Homo sapiens
gcgggagacagttgctcctcttatctcaacggcgaggaggcttcctctttcactaatcctcctcagcacagaccctttatgggtatcgggctgggggacggtaaggtctttcccttcccacgaggccatgtctcaggctgtctcagtggggagaaaccttggacaatacccaggcgttcttgggcagaggtcccggtggcatcgataaaca

SEQ ID NO: 671945 - DNA, 624 bp, Homo sapiens
  misc_feature (113)..(113): n is a, c, g, or t
aagcttgtccacccatttgggttatacgtcttctctttcaagctgatggcctccaagcttcaaactcatgtcctggatcaccatttgtggtgatgcacagtcagtttgctcanagcttaatgcagtcgtatagcagtctgagacttcgtgtattgtccaccaacactataatgctgtttccagccagcgatcatattagtgagccatctcgtgccatttcttgacatcttgtctcggcttcatgtcatcaagcagtacaagtgtcctacatatgataatgagctatcattgtgctgctataactataagatagctcggtagatggttcaggtctctttcactattgtgcctagtgagtttgagcacctgcatacattcgtctctgtagtccgccagagttctatgagttccctagtactagtctgtctccgtctagtcttctgttcccatgttcagcgtgactgtggatctaaactgatgtgcctgctacaaaagttctatcgtttgaccctcaaatgccacttcgaaatggcttcagttaatggcatgcgttcaatgtcctccacggttcctccaagctatgtgcacgtacctgttcatgaggttaggcactagtccgttctc

SEQ ID NO: 671946 - DNA, 140 bp, Homo sapiens
ctttcaatgaaattgtgatcctttcctaagaaaaggtaaaattccctatcatattttgtgtcccccccttgatgttacatgactttggaacaatatgaactggatttaagaatgttataataaaagtcttacaaaatgga

SEQ ID NO: 671947 - DNA, 932 bp, Homo sapiens
  misc_feature (932)..(932): n is a, c, g, or t
gaaggactctatggttcttacgcgcgcatacagaacgcctatataagtccatgcgcaggaggaggagcgccatctttcccttcgttgtgccactgaaccatcctgttgtcgacatgctacagctgcccggccgttggtaatccgggatcgtaggaacctgtgccgtatcccagtagtctcagccttcgtgccggaggtggtccctgagtgccgagatgcgcatggtttgaccgtggggcgcgtggaccaggtccgagtggttgggtttcgcgctatgtggccacgtgtttgtctgatgatatgagcagcgtgttcctctggaatgccctggaggctgtccgagtgtgttgcctggtaaggatacctggtttggctgttgtgtcacaaagatggcttccactatccgggggtgcggtcgcaactccttcacacgtgtatccgcattcactcctagatgttgtcctgtgtcctgggagcgtgaaaggtacggaaagagggcatgcagagtgtgccttagataataggcccagggcaacttgtggtctcggttcacatagggcgaagttatcatgtaccatccgcacaagggtgaataacagaggcgcttgtgattgacagccctggcacggcccatttcaagtttcctgccgcagtagattcccatttccaggaagtggggttcccagattcaagtggtgcattcgaaacttggtggtgaacagcggtcaccccatggtggggtcaggactcccacgggggctctggagtgggggccgaccctgagggctccaaggggcccctgtattccaattccttgcgcagagagaaacaaattcgcggacgcaaatacatgccggccgaaagactacacggaagttacaacgcctcgtagggtatcaaccgagcagtgtccagacatctccacttcacan

SEQ ID NO: 671948 - DNA, 167 bp, Homo sapiens
tgggggttggttttccccccccccccccccgcgttttgaccccatgggggtggtgcccccttggcccttcccattttttgggcttgggtttcttggggggggggccgtttttttttggaaaacacctttttttggggttttttaaaaaaaaccccctttttccccca

SEQ ID NO: 671949 - DNA, 899 bp, Homo sapiens
  misc_feature (412)..(412): n is a, c, g, or t
  misc_feature (501)..(501): n is a, c, g, or t
  misc_feature (553)..(553): n is a, c, g, or t
  misc_feature (573)..(573): n is a, c, g, or t
  misc_feature (579)..(579): n is a, c, g, or t
  misc_feature (650)..(650): n is a, c, g, or t
  misc_feature (669)..(669): n is a, c, g, or t
  misc_feature (766)..(766): n is a, c, g, or t
ctcctacagattgtgttagtttctggggaaagaatagtaaccatgcgatggaaaaaaatggacaacctcttgactaggttatcaaaattaacctcaccaataaagggtggatgttcaacatgtgccttcaaatgtgacccactgagaaggaaacaacatcactgtaacaacaacaaccagaaacgacagggggttttgactgaattcttcaaaaatgtcaatgtcatagaagacaaagaaaggttgtggaaatgtttcagattaaatgatagtaaaaacacctgacaactaaacatagtaagtaatactagactggattctgtaccagaggtaacataagtgctccaaaggacaatgttaggtcaactggcaaattggaatatagacagtcaatcagataagaagtatactntgattaagtaaaaaaaatccctattcttggaaaatacacaataaagtatcttgaggtaacgggccataatgtatgcaatctactctcanaaaattcagaaacatatatttggttgcattgcatgtgcaacagtacacacanacatacttaaagagagcaantgatanggaaataaggtacatttacaatatctgttcacataatggagaagagcactgttaagtattgagtaaacttnaacatatctgagcaaaggntttgcgtttctttggacagctgatcttgaactattctgtagtgaactatatcaacatggtgaaaaaacccgactggcaactctttctttttacctanaaggctgggtaagggctttaattatgtggggtggtggaatggggttgtgccggttcaataccaaaacaagtaaaactgcttgtattttagagattggtatccactgttaaaattttctaataattattcttct

SEQ ID NO: 671950 - DNA, 295 bp, Homo sapiens
  misc_feature (262)..(262): n is a, c, g, or t
agaagaaggcttcagacgatcagacttctccgagctaaaggaggaagttcgaacccatcgcaaagaagcctaaaaccctggtaaaaggattaagacaaattggctaatggattacccagtttaaggagaggccttaaaaatgacctaagtgagagtctgaaaccccatggacagcgagacacactctcgcgtgagagatgtgcacagcgctcaaagagagcaaattgggactccatttgggagagaagaggggtatcattgntattaagggctcacattaagtgatatagggtga

SEQ ID NO: 671951 - DNA, 208 bp, Homo sapiens
tgtttttccttgccaaccgtccctgagcctccctgccggagtcttccttagagagctggccgtgctccccatcccctaagtcctcaccagccccccagactgtgtgaagttacagttcgctcctttcgggggggcagcttcaactctctcgctggtagtcaaaaccttccccacccatagttatgtcctacatccagtcactcccaac

SEQ ID NO: 671952 - DNA, 126 bp, Homo sapiens
taatgctcatcccattcaacatcccagtccagccattcagtatctgttccaccatcacaggtcacatcgccgcagtgtcaggtcacactggggcatcacatgttttcctatttcagggcatgcagt

SEQ ID NO: 671953 - DNA, 183 bp, Homo sapiens
tctgtaccatataatgatatagtaattcgctttgacagatgcaagtcttccgcatgtactgctcggaggttgggttcttgctccgaggtcgccccaaccgaaatttttaatgcacgttcagtactttaggacctgtgagtttgttaggtactgtattgcattcatatattaaagctccatagg

SEQ ID NO: 671954 - DNA, 333 bp, Homo sapiens
atgttgcacatagtacgatttgcaactctctgcccaaaatatgatgttgtgaatcacttggctacatgcatcatatactagctacttcttgtatttttactagtgatagggcttcctccatgttggtcacgcctggtctacgatcgtcctgacctcaatgtgatccaggcttgccttcgagcctcccatgtagctgtgattactgtgtgctcgtcgtgcaatgccaattttaactttctgtatctgttacaaattgtgttggagaagccgccacaattcttgacgcccagtgtgggagtggccctgtttcccagtcagggccaccgcgggcac

SEQ ID NO: 671955 - DNA, 732 bp, Homo sapiens
gacacagttgagtagatgcaggagctggaaccagcgcttttgggctctggcaggagcatactccatgtgggccctgtggcagcatctaggtgggggtgcctgtggcccccgatcccctagagggcatgttacagtgctcttttagctctgtcatccacgggcggcttaaatgttaactggtcagtgggccctctgcctttttgcatgaagcagctgctctttgccagcgagggcaaaggatcagcatgacacccttttgtatccacacttgcggctcctgaatggtagtgcggcatccaggaaaaataaggtctcactaacgaattgaaggatggtaaatgcaggggattattactattttttattttattttttattttatttttttgctgatgaaagtggctctcagtgggaagaggagctgaaaagggggtgaggtggggcagtgacgatggaagaaaaaggcaagattcactttgggaggctgaggcgggcagatcacgaggtcaggagatcgagaccatcctggctaacacagtgaaaccccatctctactaaaaatacaaaaaattagctaggcgtgggtggcagacacctggagtcccagcgactcaggaggctgaagcaggagaatggggtgaacccggggaggcggagcttgcagtgagccaggtcgcgccatacactccagctgggcgacagagcaagaatccattcaaaaaaaaaggcccg

SEQ ID NO: 671956 - DNA, 286 bp, Homo sapiens
atgaaatccttctagtcaaatgagccacaattttgtttcttccttgagtaaaatcaagaaacattttcctctggaaaaaatatccatattcaaaatccactaataggtggtctttttcaataaaaaaaaaacaaactgggaaacttgcttttggctgtcactgttttttgaataatgtatcatattgctacattagctggtaatgtgtcatgtatgtcttcatggagccaaagcaattatggatgtttctgaaataaaaaacaaaacaaaaaaacgtttgcggccg

SEQ ID NO: 671957 - DNA, 178 bp, Homo sapiens
cccacctggactatctgtatcaccttattatttttgcttcatatattttctcatgcaatttttgtatcagatatcaaccgtaatctgtaccacagtgttccagaataacggtctcataggtttctaagtttatctacaattgtggatgagatgttggtatgaaataatagtacttctg

SEQ ID NO: 671958 - DNA, 249 bp, Homo sapiens
ggcgggtgattcagtgagccagcaacattgggcatccatcgtatgcctcgctccttgtcaaagatcagtgactatatttatgtgggtctatttctgggctctctattctgtttcatgatctattgtcttttctttcaccaatatcacattgtcttgattactgtagctttatagtaagtctataggttggatagtttcatccctcccatttagttcttccttatttatttttaattattatggtttgag

SEQ ID NO: 671959 - DNA, 156 bp, Homo sapiens
agaagaaccggtttttaaaattctatataaccctattacatttatactcctgatcaagtgttccctaaactcaaatctaaggaaaccttatatctatggcagcaaacaaggtttcctgtgttctttaaaacacacacacacacacacacacatttt

SEQ ID NO: 671960 - DNA, 161 bp, Homo sapiens
tgggatccctggactaaaggtgctgtggagagccctggcaatgctggagagcgaggtgttcccggaccccctggcgctgtcggtccttgctggcaaagatggagaggctagagctcaggtaccccctggccctgctggtcccgctggcgagagaggtgcta

SEQ ID NO: 671961 - DNA, 641 bp, Homo sapiens
gcgacttactccaccagttagagaataactgggatttgcatgaactccatctctgacctgaaatacagacgcggatgttaagtatccttattcttctgattgttattaacgggtccttagtgtctgtctgaagatcgagaagctcaggaggatgaattgctggcccttggcaggtatttacgatggagatcaatttagaaaagcagtgtcttacttatgtgcgtgaaaccaggatctatttggatttgccacagaatttcaagatatttgtgagcggcaattcaaatgagtgtctccagaatagtggctttgaatacaccatttgctttctgcctccacttgtgctgaactttgaactgccaccagattatccatcctcttccccaccttcattcacacttagtggcaaatggctgtcaccaactcagctatctgctctatgcaagcacttagacaacctatgggaagaacaccgtggcagcgtggtcctgtttgcctggatgcaatttcttaaggaagagaccctagcatacttgaatattgtctctccttttgagctcaagattggttctcagaaaaaagtgcagagaaggacagctcaagcttctcccaacacagagctgcgtctgctgaggaggggg

SEQ ID NO: 671962 - DNA, 681 bp, Homo sapiens
  misc_feature (48)..(48): n is a, c, g, or t
  misc_feature (72)..(72): n is a, c, g, or t
  misc_feature (83)..(84): n is a, c, g, or t
  misc_feature (86)..(86): n is a, c, g, or t
  misc_feature (117)..(119): n is a, c, g, or t
  misc_feature (122)..(122): n is a, c, g, or t
  misc_feature (127)..(128): n is a, c, g, or t
  misc_feature (131)..(131): n is a, c, g, or t
  misc_feature (136)..(136): n is a, c, g, or t
  misc_feature (138)..(138): n is a, c, g, or t
  misc_feature (163)..(163): n is a, c, g, or t
  misc_feature (171)..(171): n is a, c, g, or t
  misc_feature (173)..(173): n is a, c, g, or t
  misc_feature (184)..(184): n is a, c, g, or t
  misc_feature (187)..(187): n is a, c, g, or t
  misc_feature (192)..(192): n is a, c, g, or t
  misc_feature (197)..(198): n is a, c, g, or t
  misc_feature (208)..(208): n is a, c, g, or t
  misc_feature (218)..(218): n is a, c, g, or t
  misc_feature (221)..(221): n is a, c, g, or t
  misc_feature (242)..(242): n is a, c, g, or t
  misc_feature (279)..(280): n is a, c, g, or t
  misc_feature (287)..(288): n is a, c, g, or t
  misc_feature (291)..(291): n is a, c, g, or t
  misc_feature (460)..(460): n is a, c, g, or t
  misc_feature (678)..(678): n is a, c, g, or t
ggtgaagtacaccttcagcttagtccattctcctaagtaaagcctganggaaaactctttacacctaattcnttgtggaaaanngntcaactagccatttcccaggctatagaccannngtncaatnnggngtctngncttaggggcgggggggggggggggntacatttnanattgatcaggnggnggggngaggnngtgcctaagnaatgagaaanggnttgctctaagcaagctgtggngaggcacaggatgactagggaatggcagagaacaggnnggccaanngtnagttcaagcaaccagctgagaagcaggagtctaaaaagccccaaacagaacacctccatggattcagggaagggctgaggcactgcctttctagtatgtgccaaaaaaaacataactctgaattggggcccaggggactttgagtttgtatggggagggaaaaggagtnagcagttctcctcccctccccacagccttaggccaacacaaactgcaaattggtaagcagcaccttaatacctcttgtgacagttacggctgaagtggcagggtcaagcttgtaggtgttggcatccccctttttatatcggtcccggaagacatagatgctcccgttacagctggcaatcttccagagggatggggcagagctccaggcctcagganggc

SEQ ID NO: 671963 - DNA, 249 bp, Homo sapiens
  misc_feature (2)..(2): n is a, c, g, or t
  misc_feature (13)..(13): n is a, c, g, or t
  misc_feature (34)..(34): n is a, c, g, or t
  misc_feature (53)..(53): n is a, c, g, or t
  misc_feature (76)..(77): n is a, c, g, or t
  misc_feature (84)..(84): n is a, c, g, or t
  misc_feature (107)..(107): n is a, c, g, or t
  misc_feature (114)..(115): n is a, c, g, or t
  misc_feature (119)..(119): n is a, c, g, or t
  misc_feature (148)..(148): n is a, c, g, or t
  misc_feature (156)..(156): n is a, c, g, or t
  misc_feature (172)..(172): n is a, c, g, or t
  misc_feature (181)..(182): n is a, c, g, or t
  misc_feature (185)..(185): n is a, c, g, or t
  misc_feature (200)..(200): n is a, c, g, or t
  misc_feature (203)..(203): n is a, c, g, or t
  misc_feature (214)..(214): n is a, c, g, or t
  misc_feature (227)..(227): n is a, c, g, or t
  misc_feature (237)..(237): n is a, c, g, or t
anaaatgggctanattttctacccgggaaaactncgatagcccgtatgaaacntaagggtcgaaggtggatttagnngtaaacngagagtagagtgcttagttgaanagggccnngaancgcgtacacaccgcccgtcaccctccgcnagtatacncaaaggacatttaacnaaaaccccnncgngtttatatagagganacnaagtcgtaacntggtaagtgtacnggaaagtgcncttggacgaggg

SEQ ID NO: 671964 - DNA, 681 bp, Homo sapiens
  misc_feature (1)..(1): n is a, c, g, or t
  misc_feature (66)..(66): n is a, c, g, or t
  misc_feature (68)..(68): n is a, c, g, or t
  misc_feature (70)..(70): n is a, c, g, or t
  misc_feature (76)..(82): n is a, c, g, or t
  misc_feature (85)..(85): n is a, c, g, or t
  misc_feature (89)..(89): n is a, c, g, or t
  misc_feature (91)..(91): n is a, c, g, or t
  misc_feature (110)..(110): n is a, c, g, or t
  misc_feature (123)..(125): n is a, c, g, or t
  misc_feature (145)..(145): n is a, c, g, or t
  misc_feature (148)..(149): n is a, c, g, or t
  misc_feature (151)..(151): n is a, c, g, or t
  misc_feature (289)..(289): n is a, c, g, or t
  misc_feature (658)..(658): n is a, c, g, or t
ncgtcgataatcaaatgttatatatcaacatcgtaatcatcataatcatatagaactgttccagangnanaaaggnnnnnnntgngtgntngctttatagtcatacatangccacagcccctnnngtgggtgtgggtgggggggnttnntntgttcttcatttcaataattttgtcacctcaagaatgtgatataaatgcgatcatacagtatgtgaccatttgagactggtttttttttgttcaccataatacccctgaggtacaaccaagttcttgtatcaacagtnagttccttttcattccagagcagtattccaagtcatggatggtttgtttaaccatgtacctgttgtaggacatctgggttgtttccagtttggggctattacaaataaagctcctatgaatatttgagtacaagtacaatataggttttcatttctctggaatgaatgtccaggagcacaactgctgggtcttatgtttaacttgattaaaaaattatgtttaacttgataagaaattcataaactctttcccagagtggctgtaccattttacattcctgtcagcaatgtataaaatatccagtttgtatcctcatcagtatttggtattttcactattttttctttagccattgagataagtaagtnatagcctcgctgtggtttcaatt

SEQ ID NO: 671965 - DNA, 136 bp, Homo sapiens
  misc_feature (1)..(1): n is a, c, g, or t
nagacccttcggttgtgatcagagaagctcctgaggctttggtgtcagcgttttgggggtttgtttttgtgttgtgtttctgagatggagtctcgctctcgtcgcccaggctggagtgctgttgcgtgatctcagt

SEQ ID NO: 671966 - DNA, 915 bp, Homo sapiens
ggagtggactgtgaagaaacatggcggccggacgttgacttcgaaatgtgtacttccctggtgtccgcaggacctccaccttcgccctcaccatcatcgtgggcgtcagtgtcttcgagcgcgcttcgatcaaggcggcggacgcatatctacggaccacattcaacgaggggaagctgtggaacacacattcaggcacaggtatgagaacaagtagttcctgtggaggggccccccatccgaggccagagaggacccagggtccaaccccaagcaagttgttgtgcccaagagctgtggagcccttcagttgggaaggattgaagtggttacaggggtacctctttcaggtggacccaccaatgtcggtgtgttggggcagggaaaaggcgtttttaattttaccaaaaaaaaggagtcttttaacccttttctgggtggggtaggtatagcgaaacggtatggttaaagggtcaggaagtgtgctccagggaaacattaacattgtggaattgtgcccttgtagaaacaaaactcacaaaagaagaaataaacgaatagcaaaacatattttgtgctgcggacgagcactcggcccgatgagaaaaaacggtttgtttctagaaacaccacatttcttgttgttggcgccgcgctgccccccgtcgaagaggtctatgtgcgtaccacgctgtggccacaaccgagcgggtggcccacagagagagcatcgtggcggcgctacgaccacttgcgggctggtgtgtattcctcacacgaaattacaacgacggccggggggcacacacggacgctgttgttgggacacaatccccgaggtgggattcaggagagaactactcgggggcgatttcacacggagcggtcaggaagtctattattaaatgccgccgt

SEQ ID NO: 671967 - DNA, 797 bp, Homo sapiens
ggttgagaccagcctgaccaacatggtgtaaaaccccatctctactaggaatacagaaaaattagctgggtgtggtggtaggtgcctgtggttccagctgctcaggaggctgaagcacaggaatcgcttgaacccaggaggtggaggttggagtgagccgagatcatgctactgcactctccagcctgggctacagagtgagactctcaaaaaaaaaaaaataataataataagagaaaatagacaaggtctccaggctggtcaactcctgggcctcaaattgatccttcccacctcagcctcccaagcagccgggacatacaggcaaacattcaccatgtccagctgtccccagattacataagtcgggtcttactcttgccccaaaacctcaaaaaggcatgaagccagacccactgaagtgccagtcaacccagacacctctgggcctgcctgtggctctgtggccctcctctgtggcggcaggacctttgtggggcttccagagccctgatcatggggcccagagcgggagcatggtccacatttccacaggccccaaaagccttcaaagatcgggtcaaaggacgctgggacctcccgtgaggcaacagaaagcaggcgcacatgacagcaccccacacacgggctacagaacaggtaaccaataacaccacgacacagaaagaaggaaccaacaaagaccacagaccatacaacctatgacacaaacaaccaacacaacaatgaacacagacccacaaaccaaaagaaacaaaagaaacaacacacaacca

SEQ ID NO: 671968 - DNA, 358 bp, Homo sapiens
aatgtgaatgtactatctcacttttttttctgagatggagtctcgcccgttgccaggctggagtgagtggcgcgatctaggctcaccgcaagctccgcctcccaggtgccaggaattctctgcctcagcctcccaaatagctgggattacacccgccaccaagcccagctaatttttgtatttttagtagagatagggttttgccatgtcggctaagctcgtctgctaaccctagagctgacaggaaggctttggggttgggcggttttacggggaaaatactctgtaacagcgtttttcctttactctcacatggccactcaataccggtattgagtggccatgtgactgagcgact

SEQ ID NO: 671969 - DNA, 387 bp, Homo sapiens
tcctacacttactattctgtcaactttctcgtaccgtatgatcggctgccaacatcactgactgtcaatgattttagacgccctcattaattctgaccatgctcgacggtttaaaatggcatacaataaaatatcatataaacacttgctgggattacaggcgtaagccaccacgcctggacctattagggatctctagaagccgcaagcctcttccttgtcatagctttttcctttgtgtaaaccattaatgcttcagtataaataatatcaatttaaaaactgcctaagatttaaaagtactatgcaaattacaaactgcttgggtatctagatcacaataaagcagagcaaagaagtaactttaggaatgaaggggatcctcta

SEQ ID NO: 671970 - DNA, 1012 bp, Homo sapiens
tccaacctggcgcgttgaacagaggcaagacaccacagtgcgtgtaaccaactaccaatgccaatgcggccagtcccctcatagttgctggctacaatgtgtctggctctgtccgaagtgatggggagcccatgaacggggtgaagtttcttctactatatcttctttagctaactaaagaggatgtcctgggctgcaattgtctcaccagtgcctgggtatccagccccaagacgagagtctggtgtataagtagctacacggtctccagagcaagatggctcgctcctctattctattccttgccaagatgggcgcgctacactgtgatatccgtactatcgaggggagaggattaccttatgatgatggcgcctacacagactatgacattcagagcggagcatgacagctatgcaaacatcgagcccgagataccacagtcatgggatactccgtaccacacgggagggactagaacggaaacagaaggacactggtgtaccaccaagcacagcagacacccatgacataaccaaatcaaagttaaaaccacaagctgatggctcatacagcctcgagacaccataaccaacagggacatacagcatccatgctcagaaagagcaccactacatcgacacaggacaacatcaaaatggcagcgacacacacatcacatggcatgaacaagccgacaccagggataaaaagaacacggaacggaataacagacaacaggaaacagcgaaccgcacacaccacctgaacaaaacaagacgaccgcaactcagaaaagacaagcctggaaacgagggaaagacgaccagcacaaagggacaaagccaacccaggacctcgcacagaacgaaagaacgcagacaaacacaacagaaagagaaacacgaaatacccaaaacaacaaaacaccgccacacaaaacaagaacacaagaccacacaaccccacacacaacaacacaaaaccgaagcaccagaccagacgacaacac

SEQ ID NO: 671971 - DNA, 120 bp, Homo sapiens
ttttaattttcaaaacttaagttttattagcaaatcctcttttctgtaagacttagctaagaagggggaaattttttcccaaaatttttttgaaaacatttggtgttggaactgcccaat

SEQ ID NO: 671972 - DNA, 948 bp, Homo sapiens
  misc_feature (763)..(763): n is a, c, g, or t
  misc_feature (766)..(767): n is a, c, g, or t
  misc_feature (805)..(805): n is a, c, g, or t
  misc_feature (826)..(826): n is a, c, g, or t
  misc_feature (832)..(832): n is a, c, g, or t
  misc_feature (835)..(835): n is a, c, g, or t
  misc_feature (841)..(842): n is a, c, g, or t
  misc_feature (851)..(851): n is a, c, g, or t
  misc_feature (854)..(854): n is a, c, g, or t
ggggagatgacacaaaaccaaaccatatcaggtctttaaagagttaagttaaaataagctctttaaagtgggccctaatccagtatgactggtgttcttataagaagaggagatttggtcacagacatggttgcatgcagaataaagacttttcgaggacacactgagaaggcagccatctgcaaaacaaggaaagagtcctcagcagaaaccagtcctgcagactccttgatcttggacttccagccactgcaattgatgtcaagcttcagcacccttgcatctctggataaatgaaatgtcaccccagctgccgtccttgttcagatctgtgcaataaagagcaaagcataaaaccaagtcaaggctttgagggagtgacctacaaaatgcataatgtgaaacaatgcaaaagcgaaaggtgcaaaatccccatcaaagagctggaggctgacagatgcgccagtgataattcccatcttccaacacaggagcacagcttccattttccataacagaacaacagccagagcagctggaaggcagggccgcatcccagacttccaccaacaatgggatgagacttgacatctggaatcacaaccacaacagacctgagagacccaccagcttgatgacaagcttcttctttcaaagaaaggtatcagtctgggggacctagtgctgcaaaccatgacaaattaagtgtggcatccctcacttgcataatggaactcagtgatatttttaattaacaagagtnatnntatgtaagcttctctcattcctccactgtgcgtgctcngggggctggtggtgaggacangcgacnacngctgtnncgggaagcntcnagacacaggcagtccatgacgtctagagatccagtgacctgtagaaacacgactgccgcgaaaagtattcctacaacaggttgccaatagcaac

SEQ ID NO: 671973 - DNA, 124 bp, Homo sapiens
attagggtcacacgcggctattggcgacgcggttgaacagctttgcgtcgagggtggccatagccttgccgccgacagtgccgccagccgagaaaccggtgatgtggctgcggtaggtgcggcg

SEQ ID NO: 671974 - DNA, 159 bp, Homo sapiens
ggcaccttgctgttacatcattggtgggtcggttcttccaacccagggccgcatgtggcgctcggcgctgcaacatcttgtgtgtgtagtgctcagtgtgggcaagttgttgcatcttccaccacggcctgcaggttgtggcagctgtccagggcacag

SEQ ID NO: 671975 - DNA, 827 bp, Homo sapiens
  misc_feature (726)..(726): n is a, c, g, or t
  misc_feature (742)..(742): n is a, c, g, or t
  misc_feature (760)..(761): n is a, c, g, or t
  misc_feature (763)..(763): n is a, c, g, or t
  misc_feature (779)..(779): n is a, c, g, or t
  misc_feature (781)..(782): n is a, c, g, or t
  misc_feature (790)..(791): n is a, c, g, or t
ggggagatgacacaaaaccaaaccatatcaggtctttaaagagttaagttaaaataagctctttaaagtgggccctaatccagtatgactggtgttcttataagaagaggagatttggtcacagacatggttgcatgcagaataaagacttttcgaggacacactgagaaggcagccatctgcaaaacaaggaaagagtcctcagcagaaaccagtcctgcagactccttgatcttggacttccagccactgcaattgatgtcaagcttcagcacccttgcatctctggataaatgaaatgtcaccccagctgccgtccttgttcagatctgtgcaataaagagcaaagcataaaaccaagtcaaggctttgagggagtgacctacaaaatgcataatgtgaaacaatgcaaaagcgaaaggtgcaaaatccccatcaaagagctggaggctgacagatgcgccagtgataattcccatcttccaacacaggagcacagcttccattttccataacagaacaacagccagagcagctggaaggcagggccgcatcccagacttccaccaacaatgggatgagacttgacatctggaatcacaaccacaacagacctgagagacccaccagcttgatgacaagcttcttctttcaaagaaagtttaggcggtcatgaccatgggatgctggaccaggatggtaagcttcaggaaacagaatctgganaatgcccagctgctcncacaggaagcatcagggnnanaagaagaagaggtgtnanntctgcctnntgctctgtgggattcctttcacatctcctttgcttc

SEQ ID NO: 671976 - DNA, 327 bp, Homo sapiens
cactatcctccaggagagagagggaaactggggtcatcactatcctccaccaggagagagagggaaactggggtcatcactatcctccaccaggagagagaggtaaactggggtcatcactatcctccaccaagagagagaggtaaacttgggtcatcactatcctccaccaggagagagaggtaaactggggtcatcactatcctccaccaggagagacagggaaactggggtcatcactatcctccaggagagagagacaaactgggatcatcactatactccaggagagagagggaaactggggtcgacgcggccgcgaattta

SEQ ID NO: 671977 - DNA, 104 bp, Homo sapiens
acgtatcatagaagagcttatcagctttcatgatcgcgcctcatatcatttgccttatctgcttcctagtcctgtatggccaatacctgagtgactcacaacaa

SEQ ID NO: 671978 - DNA, 203 bp, Homo sapiens
tggacatctagaggacccccttgtgatctcatattggtcacgcatctcgtaagaatgcggctcatgtccacgccaggtgctgcgtccatctccacattgacatctaccacccacctggcctactcagtggctattcatctcctcctacgtgtttcttcttcatggtaggccaggctcctcctgccaggctctcaatcttgcat

SEQ ID NO: 671979 - DNA, 110 bp, Homo sapiens
cttgtcctgcctttggactagctgactctagaccatctcgcggttcctgcggatagcacagcacaagatcatactgaagcccaccagcatcatgagggcgccggtccgat

SEQ ID NO: 671980 - DNA, 532 bp, Homo sapiens
gtgttcttgatgacccccgatgagtaaatcttgtgagacgttgggtagcaagatcagtccactgcactccagcctgggtgacagagcgagactctgtctcaaaagaaaagaaaatggaacatagaacatttcaaacctgagaaatacataaggaaaatggaacatagaacatttcaaacctgagaaatacataaggaaatttgtagacagacactgctttctttaaaagaaagaaaacaggtgtctgcttatccctgtagccagaggatctacatcttctgggggagaaaaacaagggtggaaagtgtaattcaccaaatctcatctttcagcccccataaagacctcacaccctcctgctgctgtgggactcaggaggattttgactaaggaaagtattttaatctcagtaacactgagacatccaacctgagaggaaagtgaggggcaatgaggcaggagttctcctttggtgtgggctcctgggagggctgttgccctgttgtgcaggagcagtagctcctcgggcagg

SEQ ID NO: 671981 - DNA, 161 bp, Homo sapiens
tcgcggtatgcctcgtttgattgtacaaatgaagatgggacgcctatattaaaagcctagaaaaaagtcaggctgttgtcccgtctctgatgcccctccatataccgctacatctgaatccagcacaatattgaatttccctcatccgcgtatcccaggac

SEQ ID NO: 671982 - DNA, 161 bp, Homo sapiens
cgctgagaggactgtatcagcagagaagtgacctggcgagaggtggaagtgcactgaagtggaacgctgagcttatcctgtgtggcctgcaggtgcttccccaacttcagcatcctctagctggccggtccatatgacaccttcattgagcacctcccagg

SEQ ID NO: 671983 - DNA, 142 bp, Homo sapiens
tcagtctacgaacaactctgtgttacaatattctattatgggatcttgaagatccttacttgcttctcctacgccaatgagtctggaagccattatcacaattcactgaatagaattacaggcttactctcgattgtgttct

SEQ ID NO: 671984 - DNA, 334 bp, Homo sapiens
tatatcaggggagagttgactccactacctgctctgcccaaatccttcccctttccaagaagagtttgccatctcctagttttcttttttcttaaccaaactaagtttagccttttaatccttcaccctcctccacttctaatgccattgcttctctgtatgcttattgtattttccatgctatatgactttcagctggttatttacagtatgtaagttttaatatcctgtaaaagggggataataatagcatccgtttgataaagatgttaaagatactaaatgacactgtccatgttaaataactttttgagatatcttggggtaccgagct

SEQ ID NO: 671985 - DNA, 291 bp, Homo sapiens
tgtagccagaccggcccgagcggtgactgcaggtctgtcaacgggtcgcggagttcaaggccgacttggacatactcaacttccttccagccgtctagtttggaatatgggagtactcgtaccaccggttggagaacatactctttgccaaaccgggaatgatgtgactcggtcagtaacggcccaacctgggcttctggaaattcgggaagtaaacgagagatctggagtagccgacggggtaccactgactactgaaacaccagtcaccgtggacgcggcttgtttaca

SEQ ID NO: 671986 - DNA, 124 bp, Homo sapiens
aagagtacgagtctcgtacctcaagatgccgatgtggtgccaacgtctcctccacagcatcggcaataggcgcctcgtgcatggacaccgactcgatgtcgacgagtcgacgaacgagctcgtg

SEQ ID NO: 671987 - DNA, 753 bp, Homo sapiens
  misc_feature (113)..(113): n is a, c, g, or t
  misc_feature (715)..(716): n is a, c, g, or t
  misc_feature (719)..(719): n is a, c, g, or t
  misc_feature (722)..(722): n is a, c, g, or t
  misc_feature (748)..(748): n is a, c, g, or t
atagaaaccttcttttttttttataggaggggggagaaaaaaaaaaaagagggggggggggggttctttttggggtgggcgccaaagaaaaaaaaagagccccctcctttttnggggggctttttttttttggggaattaaatttttctcttttcggggggggggaggagttttctttttctcaaaacaaaaaaacaaagctttttttttcccccccctccggggggggcggagttaaagggaaagggggagggggccccccccccaaataaaaaaaaaagaggggggcgccaaaaaaaaaaaaaacccccccccctataaggggggtcttctccggggggggggcccccccttttgttgttttaccaaaaggggcgctctttagggcgggcgcgctgggtgacccaaaaaataaaaaaggtgtggtggcctccctcggggaggtgggggggggggcgccccccccccaatgggttttttcaagggttgtttgtgcacccgccgggccccgggggtgtggggcgacttaaaaagtggggggacaaaaaaagggtggggccccccccccgtatcctaaaccagggggtgggggggggtaaaccccaagccccgggccgaaaggccccccaacaaaaagggcccagggcccattccccttctcttccaaacaaagggttccaaggagggaggaatcttacaaaaatttgggcagttnnccnttnaacggggagatgcgccccaccctgtntgttc

SEQ ID NO: 671988 - DNA, 625 bp, Homo sapiens
gagtagttggccaactaccatacctcattgcgtcgatcgacagtacttacctggggacaatgacatagtgtctctgctattcccgtataagtcaccaaaatgctttaggccataatgttagtcccagtgctctatacgttttaaaggccagggagtcacccctacactaagtcccatctccagagataccctggtatgcactgcagcctacttaccaacaggagtaccactgtggaccagacagcagtcaacactacagatccaaagagtgtcaaaaccatggaaaacaaaaactttccttcacatgcactgtagaacactactgcctgtccctttaatcaatcaatacccgtactcctaaaataaagagaaattataaccccaagatatgtacaaagcatctccccttcccccaactttcttcgcctgatcccctatcactgaggtctccctctgagtgctgcgccacaatcctccttagctggagactaccgtatcttccactagaggcaccatggagtcatacctctaccatgtgggcttcttccaagtccaaggtgaagggcaagccccgaacgtctctaatgtgcaccgtgttcaaagtgaaggaggtataagaaggaca

SEQ ID NO: 671989 - DNA, 150 bp, Homo sapiens
attccaccatcgatggagtatgcgtacgtctcccagtaaaagggacatataataacatctcaggacctttcagggacgtctgcacgttacttggggcgcagcacagtggacgcggctgggtccagggcagtttctcctcaccgcgggtcc

SEQ ID NO: 671990 - DNA, 202 bp, Homo sapiens
  misc_feature (14)..(14): n is a, c, g, or t
  misc_feature (16)..(16): n is a, c, g, or t
  misc_feature (121)..(121): n is a, c, g, or t
ctactagaaaaaancnagagctttattattctcaacaccaatggcagcggtcttcataggacagaggagtgagttctgtcaacagacaggcggcccctacttccggcgatgaggggttccnaggccacgatgactgagtcccgcgaggacatcttggagatgtagcggtctttgttactggcttggacttcttcttgccctt

SEQ ID NO: 671991 - DNA, 186 bp, Homo sapiens
  misc_feature (144)..(144): n is a, c, g, or t
  misc_feature (155)..(155): n is a, c, g, or t
gcgcctagcggactcttcgacggtgtctgtgactgtgtggtatagtggggggcatccatatagtcactccaggtcatggagggtcttctactataaggacttttcgcttcgaagcgaagcgttctcacactcatgaaaattatntactattactngctgttagcagaaactgaattgaggctacag

SEQ ID NO: 671992 - DNA, 163 bp, Homo sapiens
gatctagaggatcccgatggccacattctgagcatgagtgtactgagggcccgaagctctacaatgggctggttgctggcctgagcgccaagtgagctttgcctctgtccgcatcgtgctgtatgattctagtcaaacagttctacaccaagggctctgagca

SEQ ID NO: 671993 - DNA, 191 bp, Homo sapiens
ttatcttccgtgcccggtcttgactaccatattttaaattggctggaggacttttttgttctcttctttttttctttttttaataccatcccgctcttatttcagaataaaaaaaaattttaaggtatgttgagtaagaatctataaagcaatgaaaatgcaagatcaatatctatgggcacggaagatca

SEQ ID NO: 671994 - DNA, 1849 bp, Homo sapiens
gcgacggcgccttcgcgaaacactatgctaatggcatggtgccgcggtcctgtcttgctgtgcctgcggcaggggctcggaaccaattcattcctgcacggcctggggcaggagcccttcgagggagctcggtcactgtgttgcaggtcctcgcctagagacctgcgagatggagaaagagagcacgaggcggcacaaaggaaagccccaggagcagagtcttgcccatctctccctctgagcatctcggacattgggactggatgtctttcgtcactggaaaacctcagactgccgacgctgcgggaagagtcatcacctcgagagctcgaggactcgagcggagaccagggccggtgcggtcccacacaccagggatccgaggatccttcgatgctctcgcaggcccagtccgctaccgaggtcgaagagcgtcacgtctccccttcttgttcaacttccagagagagaccctttcaggctggggagctgattttagctgagactggggagggagaaacaaaatttaagaaattatttaggttgaacaacttcggactcttaaatagtaactggggggcagtcccgttcggcaagatcgtggggaagttccccggccagatactgaggagttccttcggtaagcagtacatgctgaggaggccagccttggaagactatgtagtattgatgaaaagagggactgccataacattcccaaaggatattaatatgattctctcaatgatggatatcaacccaggtgatactgttttggaagctggctcaggctctggtggaatgagcttatttttatccaaagcagttggatcacaaggacgagtcataagttttgaggtacgaaaagaccaccatgatctggctaagaagaattacaaacactggcgtgattcatggaaattaagtcatgtagaagagtggccagacaatgtggattttattcataaggacatttcaggagcaaccgaagacataaaatctttaacatttgacgcagtagctttggatatgttaaatcctcatgttactttgcctgttttttacccacatcttaagcatggtggtgtatgtgctgtatatgtagtaaacatcacacaggttattgaacttttagatggaattcgcacctgtgaacttgctctttcatgtgaaaagataagcgaggtcattgtcagagattggttggtttgccttgcaaaacagaaaaatggaattttagctcaaaaagtagaatctaaaatcaacacagatgtacaactagattctcaagagaaaattggagttaaaggtgagctgtttcaagaggatgaccatgaagaatcgcattctgattttccatatggatcatttccctatgttgctagaccagtacactggcaacctggtcatacagcttttcttgtcaagttgaggaaggtcaaaccacaacttaactgagtactccagatgacagtaactgacttgaagatggaaaaatatcaaaatagaactttatattgaaaatcactgcttccatagattggcatttttagctattactatgacttatataacttatacatataattttgaaaataacaactaaaagatgtataacatagcaaaactgcttaaacatcccattttgacacttgtcttgcagttagtttgacattttgtagttaatgattccaaattggtttagttgggccatctcattcttcacttcctgtaaaccactccatagatttgtctttcttcaagaaattagttttctttcctttatttgattgatggtcattgactactgaaataaaatatgcattttaagataaaaaaaaaaaaaaca

SEQ ID NO: 671995 - DNA, 1582 bp, Homo sapiens
gcgacggcgccttcgcgaaacactatgctaatggcatggtgccgcggtcctgtcttgctgtgcctgcggcaggggctcggaaccaattcattcctgcacggcctggggcaggagcccttcgagggagctcggtcactgtgttgcaggtcctcgcctagagacctgcgagatggagaaagagagcacgaggcggcacaaaggaaagccccaggagcagagtcttgcccatctctccctctgagcatctcggacattgggactggatgtctttcgtcactggaaaacctcagactgccgacgctgcgggaagagtcatcacctcgagagctcgaggactcgagcggagaccagggccggtgcggtcccacacaccagggatccgaggatccttcgatgctctcgcaggcccagtccgctaccgaggtcgaagagcgtcacgtctccccttcttgttcaacttccagagagagaccctttcaggctggggagctgattttagctgagactggggagggagaaacaaaatttaagaaattatttaggttgaacaacttcggactcttaaatagtaactggggggcagtcccgttcggcaagatcgtggggaagttccccggccagatactgaggagttccttcggtaagcagtacatgctgaggaggccagccttggaagactatgtagtattgatgaaaagagggactgccataacattcccaaaggatattaatatgattctctcaatgatggatatcaacccaggtgatactgttttggaagctggctcaggctctggtggaatgagcttatttttatccaaagcagttggatcacaaggacgagtcataagttttgaggtacgaaaagaccaccatgatctggctaagaagaattacaaacactggcgtgattcatggaaattaagtcatgtagaagagtggccagacaatgtggattttattcataaggacatttcaggagcaaccgaagacataaaatctttaacatttgacgcagtagctttggatatgttaaatcctcatgttactttgcctgttttttacccacatcttaagcatggtggtgtatgtgctgtatatgtagtaaacatcacacaggttattgaacttttagatggaattcgcacctgtgaacttgctctttcatgtgaaaagataagcgaggtcattgtcagagattggttggtttgccttgcaaaacagaaaaatggaattttagctcaaaaagtagaatctaaaatcaacacagatgtacaactagattctcaagagaaaattggagttaaaggtgagctgtttcaagaggatgaccatgaagaatcgcattctgattttccatatggatcatttccctatgttgctagaccagtacactggcaacctggtcatacagcttttcttgtcaagttgaggaaggtcaaaccacaacttaactgagtactccagatgacagtaactgacttgaagatggaaaaatatcaaaatagaactttatattgaaaatcactattacttatatgatatgtctccatacccattacaatctccagcattccccctc

SEQ ID NO: 671996 - DNA, 943 bp, Homo sapiens
  misc_feature (827)..(827): n is a, c, g, or t
  misc_feature (829)..(829): n is a, c, g, or t
  misc_feature (852)..(852): n is a, c, g, or t
  misc_feature (856)..(857): n is a, c, g, or t
  misc_feature (863)..(863): n is a, c, g, or t
  misc_feature (872)..(872): n is a, c, g, or t
  misc_feature (874)..(874): n is a, c, g, or t
  misc_feature (877)..(877): n is a, c, g, or t
  misc_feature (882)..(882): n is a, c, g, or t
  misc_feature (887)..(888): n is a, c, g, or t
  misc_feature (894)..(895): n is a, c, g, or t
  misc_feature (905)..(906): n is a, c, g, or t
gcgacggcgccttcgcgaaacactatgctaatggcatggtgccgcggtcctgtcttgctgtgcctgcggcaggggctcggaaccaattcattcctgcacggcctggggcaggagcccttcgagggagctcggtcactgtgttgcaggtcctcgcctagagacctgcgagatggagaaagagagcacgaggcggcacaaaggaaagccccaggagcagagtcttgcccatctctccctctgagcatctcggacattgggactggatgtctttcgtcactggaaaacctcagactgccgacgctgcgggaagagtcatcacctcgagagctcgaggactcgagcggagaccagggccggtgcggtcccacacaccagggatccgaggatccttcgatgctctcgcaggcccagtccgctaccgaggtcgaagagcgtcacgtctccccttcttgttcaacttccagagagagaccctttcaggctggggagctgattttagctgagactggggagggagaaacaaaatttaagaaattatttaggttgaacaacttcggactcttaaatagtaactggggggcagtcccgttcggcaagatcgtggggaagttccccggccagatactgaggagttccttcggtaagcagtacatgctgaggaggccagccttggaagactatgtagtattgatgaaaagagggactgccataacattcccaaagggtagctttggatatgttaaatcctcatgttactttgcctgttttttacccacatcttaagcatggtggtgtatgtgctgtatatgtagtaaacatcaccggtntngactttagatggatcgactggantggnnttcagngaagatagngngcntgccnatggnnggttgnntgaacaaaannggtttgccaaagggattaatacgggtcgattgaaagg

SEQ ID NO: 671997 - DNA, 872 bp, Homo sapiens
gcgacggcgccttcgcgaaacactatgctaatggcatggtgccgcggtcctgtcttgctgtgcctgcggcaggggctcggaaccaattcattcctgcacggcctggggcaggagcccttcgagggagctcggtcactgtgttgcaggtcctcgcctagagacctgcgagatggagaaagagagcacgaggcggcacaaaggaaagccccaggagcagagtcttgcccatctctccctctgagcatctcggacattgggactggatgtctttcgtcactggaaaacctcagactgccgacgctgcgggaagagtcatcacctcgagagctcgaggactcgagcggagaccagggccggtgcggtcccacacaccagggatccgaggatccttcgatgctctcgcaggcccagtccgctaccgaggtcgaagagcgtcacgtctccccttcttgttcaacttccagagagagaccctttcaggctggggagctgattttagctgagactggggagggagaaacaaaatttaagaaattatttaggttgaacaacttcggactcttaaatagtaactggggggcagtcccgttcggcaagatcgtggggaagttccccggccagatactgaggagttccttcggtaagcagtacatgctgaggaggccagccttggaagactatgtagtattgatgaaaagagggactgccataacattcccaaaggtaatgcgatggagataaggtgtgtattggtttcaggaggggcaaagacagatgcagtactcagtcctgattaatgtattcaaagacatctcagaacgtttggattttttattgtactcaggcttttaaaataaaccaatggttataac

SEQ ID NO: 671998 - DNA, 97 bp, Homo sapiens
gggcgttcgcgggggcctggtgctctaaaacccaccctcccccaaatctgttttcatgtaaaagacaaataaatgatgacttcccccaaaaaaaaaa

SEQ ID NO: 671999 - DNA, 1278 bp, Homo sapiens
tggcctagccctacctgtttcggcccggaactccccgaaggccgtcggtgccactcccagcccatgtgggcccccgctgggcttgccactgcctgtcccccatgctccccgttcctgctgggctttacacctcgtccagtggtgtgtgctttcttgatgcctgccctgctcctgtgcccactctctgcatgcctcatcctgccagctctggggccccactgttccccactccctgtgctgtgctgtgtgggtgctagcccccggagggggctttggctggagctttgggcctgctgtgtggtgcccctgtgggcctgtgcggtgtgccgtgggctcaatcgtggatcgactgcgtggactgcacgtgtcatgccttgtgcggctgcgccactgtccagtgggccctctcagacccagaccagaaggcctccttgagaacgcttcatctgaaattattaacccactatcttgccgtgaatgggcaatgagtccctcgcaaccgggctacaatctccaaggatacccaacctctcgttaccagacaattggaataattccctccgcactcatctaatatcatccccttggtagtacccacaagggaacactccgggagaattagcagcccaaataagttcggacagtgagtggcgagcacgaaactccttatggtggtaagcttcggcgacttcatagggacattcgacgagaaccaaaccctcacacttccaccaaactatcccccaaaccccaaacttgaaactaggcagcgagattccccctttgaacttcgccccaaaatgacagaggaccccagggcgccctcttggcgccttatacgagcacttaccccttagaaccgactacacatctccacatcccacaaatgtggtttggggattaacatataacgaaatacaaaatgactatcatcgccattggataccccacacatacatctagacgcccgggattacacaaactataatagcaaaactagcaccacaccaaatagggcatgtagcacccttagccattcacacacattgtgggaaaagcagcttggacatttgaactgcccagaaccgtgacgcacaaacgagcaacgcctgcgccctcgagcccggcccccaccccacgtccaccaccgcacacatggacaaccaacaccccaacacgggcacaccccacgccacgccacggccagacacacactaaacccgccggggcacacccaacaataagaccaaccaggcccacacttccccataaccccca

SEQ ID NO: 672000 - DNA, 886 bp, Homo sapiens
ggcggggagcctacggtccctgcagtgcctgctgctgaggaggccaccgaagctcggggacgcgaggagccggcgtggccctggaaaggacgccccgatccggacgctggtgcagcgcatccaccagctgcaggctgagctgcgcgcagggcttcccgccgactgaggaaggccacccgccagtaacctgcgcaaggggccctgaatacggattcggcggcgctaaccgggaggcaacagtgcaacgggggttgaccccagggcccttcgccggcccgcctcggcggaaaggtggcgggcgggtggggaagcaagaagcttgggggcggggccctccgcaagggacaagccggtggctcgccgggccaacggtgcgcagccttgcaggagctggaggcaaacggcggtggcgcacgggtggccctgcctgcaggtttgattggagaacgccagaagcgtgggcgggggccagggaggcacgctgtcacggatgcccagcagctgaacaattgaggggtactttaaacacccatggggggccgatcagccgaggttcctccagggaccatgaggttggatggggaaatctgccgagtgatggggggccccagggattgcgccgaggaagatgggacacggggcggattggcggccaagcccaagccctaaactgcaagcttgttggggtcggcgccccattgggcttgttgaccttccgtggagtcaaggacacttccaaaataaaagaagtcctccttggtacacaaacaagcaaacacacagagacgcacgaccacagcgaacaacaagacaaagtctgggcggccgaaagttacaacactgggcggggccagaagagaaggtcaggcgaacaccgacaaaggga

SEQ ID NO: 672001 - DNA, 933 bp, Homo sapiens
ggacctgtcccaggtggtagccagaccgggcaccggcaaccaggtgataatgtttccaggacatataaatgggtttttcgtttgaagtaaaataaggacttaaggttttcttctctaaattaccttttcttgtcaagttgaggaaggtcaaaccacaacttaactgagtactccagatgacagtaactgacttgaagatggaaaaatatcaaaatagaactttatattgaaaatcactgcttccatagattggcatttttagctattactatgacttatataacttatacatataattttgaaaataacaactaaaagatgtataacatagcaaaactgcttaaacatcccattttgacacttgtcttgcagttagtttgacattttgtagttaatgattccaaattggtttagttgggccatctcattcttcacttcctgtaaaccactccatagatttgtctttcttcaagaaattagttttctttcctttatttgattgatggtcattgactacttcagaaccagtataagcttgagaaggatcacctattatgtccattgacagtgagttgtatgagtcctgagaatgtttttctgtcacccctgctgtatgactggataaagatgatgatgaagacaatcccagtctaacatatcttctttttttaccacagagtgaacaatctactggtgtggcactaggtccccggggcagctgaacttcatctctgttgtagtttctgacagctccactgtgatgaacagaacgttctctttgccagatataatgggttggtgcaatggccataacctgcggaagcccggggctgcgcgggagagggccgggcaacggcggtcaaggctccgtcgcagcgctcctggcctcagacggttgctcgtcggtcgctagccagcagcggtacccccgct

SEQ ID NO: 672002 - DNA, 1823 bp, Homo sapiens
gcgacggcgccttcgcgaaacactatgctaatggcatggtgccgcggtcctgtcttgctgtgcctgcggcaggggctcggaaccaattcattcctgcacggcctggggcaggagcccttcgagggagctcggtcactgtgttgcaggtcctcgcctagagacctgcgagatggagaaagagagcacgaggcggcacaaaggaaagccccaggagcagagtcttgcccatctctccctctgagcatctcggacattgggactggatgtctttcgtcactggaaaacctcagactgccgacgctgcgggaagagtcatcacctcgagagctcgaggactcgagcggagaccagggccggtgcggtcccacacaccagggatccgaggatccttcgatgctctcgcaggcccagtccgctaccgaggtcgaagagcgtcacgtctccccttcttgttcaacttccagagagagaccctttcaggctggggagctgattttagctgagactggggagggagaaacaaaatttaagaaattatttaggttgaacaacttcggactcttaaatagtaactggggggcagtcccgttcggcaagatcgtggggaagttccccggccagatactgaggagttccttcggtaagcagtacatgctgaggaggccagccttggaagactatgtagtattgatgaaaagagggactgccataacattcccaaaggatattaatatgattctctcaatgatggatatcaacccaggtgatactgttttggaagctggctcaggctctggtggaatgagcttatttttatccaaagcagttggatcacaaggacgagtcataagttttgaggtacgaaaagaccaccatgatctggctaagaagaattacaaacactggcgtgattcatggaaattaagtcatgtagaagagtggccagacaatgtggattttattcataaggacatttcaggagcaaccgaagacataaaatctttaacatttgacgcagtagctttggatatgttaaatcctcatgttactttgcctgttttttacccacatcttaagcatggtggtgtatgtgctgtatatgtagtaaaatggaattcgcacctgtgaacttgctctttcatgtgaaaagataagcgaggtcattgtcagagattggttggtttgccttgcaaaacagaaaaatggaattttagctcaaaaagtagaatctaaaatcaacacagatgtacaactagattctcaagagaaaattggagttaaaggtgagctgtttcaagaggatgaccatgaagaatcgcattctgattttccatatggatcatttccctatgttgctagaccagtacactggcaacctggtcatacagcttttcttgtcaagttgaggaaggtcaaaccacaacttaactgagtactccagatgacagtaactgacttgaagatggaaaaatatcaaaatagaactttatattgaaaatcactgcttccatagattggcatttttagctattactatgacttatataacttatacatataattttgaaaataacaactaaaagatgtataacatagcaaaactgcttaaacatcccattttgacacttgtcttgcagttagtttgacattttgtagttaatgattccaaattggtttagttgggccatctcattcttcacttcctgtaaaccactccatagatttgtctttcttcaagaaattagttttctttcctttatttgattgatggtcattgactactgaaataaaatatgcattttaagataaaaaaaaaaaaaaca

SEQ ID NO: 672003 - DNA, 1823 bp, Homo sapiens
gcgacggcgccttcgcgaaacactatgctaatggcatggtgccgcggtcctgtcttgctgtgcctgcggcaggggctcggaaccaattcattcctgcacggcctggggcaggagcccttcgagggagctcggtcactgtgttgcaggtcctcgcctagagacctgcgagatggagaaagagagcacgaggcggcacaaaggaaagccccaggagcagagtcttgcccatctctccctctgagcatctcggacattgggactggatgtctttcgtcactggaaaacctcagactgccgacgctgcgggaagagtcatcacctcgagagctcgaggactcgagcggagaccagggccggtgcggtcccacacaccagggatccgaggatccttcgatgctctcgcaggcccagtccgctaccgaggtcgaagagcgtcacgtctccccttcttgttcaacttccagagagagaccctttcaggctggggagctgattttagctgagactggggagggagaaacaaaatttaagaaattatttaggttgaacaacttcggactcttaaatagtaactggggggcagtcccgttcggcaagatcgtggggaagttccccggccagatactgaggagttccttcggtaagcagtacatgctgaggaggccagccttggaagactatgtagtattgatgaaaagagggactgccataacattcccaaaggatattaatatgattctctcaatgatggatatcaacccaggtgatactgttttggaagctggctcaggctctggtggaatgagcttatttttatccaaagcagttggatcacaaggacgagtcataagttttgaggtacgaaaagaccaccatgatctggctaagaagaattacaaacactggcgtgattcatggaaattaagtcatgtagaagagtggccagacaatgtggattttattcataaggacatttcaggagcaaccgaagacataaaatctttaacatttgacgcagtagctttggatatgttaaatcctcatgttactttgcctgttttttacccacatcttaagcatggtggtgtatgtgctgtatatgtagtaaacatcacacaggttattgaacttttagatggaattcgcacctgtgaacttgctctttcatgtgaaaagataagcgaggtcattgtcagagattggttggtttgccttgcaaaacagaaaaatggaattttagctcaaaaagtagaatctaaaatcaacacagatgtacaactagattctcaagagaaaattggagttaaaggaagaatcgcattctgattttccatatggatcatttccctatgttgctagaccagtacactggcaacctggtcatacagcttttcttgtcaagttgaggaaggtcaaaccacaacttaactgagtactccagatgacagtaactgacttgaagatggaaaaatatcaaaatagaactttatattgaaaatcactgcttccatagattggcatttttagctattactatgacttatataacttatacatataattttgaaaataacaactaaaagatgtataacatagcaaaactgcttaaacatcccattttgacacttgtcttgcagttagtttgacattttgtagttaatgattccaaattggtttagttgggccatctcattcttcacttcctgtaaaccactccatagatttgtctttcttcaagaaattagttttctttcctttatttgattgatggtcattgactactgaaataaaatatgcattttaagataaaaaaaaaaaaaaca

SEQ ID NO: 672004 - DNA, 341 bp, Homo sapiens
tccgcgtgatgacgcatgttgtagctgctgctggccaccacgaacgatatggcatgtcacatcgttgaagcactgcatccacttgcggcgttcatcgcgctggccacccacgtcaacacatgtggtaagttgactttgtccacctggcaacttggtctcaaagattccagaattcatggacacggcagcgaatctggtcctgatcgcctcggcacatagtctgcctgcttgatcacttcgatcttgtccaggacgtactgcgcactgtccatcagctggtactcgtttgagcgttcgtatcacgcacgcactccttcatcctcccacatagccttggcatg

SEQ ID NO: 672005 - DNA, 296 bp, Homo sapiens
tctagaggatcccatcacatccattgcccctagattgaccaaagttacatgatgcaggtgtgaagagaaacctgatgtcacatacagtgctgttggtggctgtaaggaacatgattgcgaaactgcgcgaaactgcatccctttaaacacttcccattttttattttcctttttttttgttttttgagacatgggtttcactcctgtgtcacccagtgctggacgttcatgttgtgctgtgactctctgtgctcactgtgcaaccctcttgccatcccggtggttcaatgctgagt

SEQ ID NO: 672006 - DNA, 1530 bp, Homo sapiens
gcgacggcgccttcgcgaaacactatgctaatggcatggtgccgcggtcctgtcttgctgtgcctgcggcaggggctcggaaccaattcattcctgcacggcctggggcaggagcccttcgagggagctcggtcactgtgttgcaggtcctcgcctagagacctgcgagatggagaaagagagcacgaggcggcacaaaggaaagccccaggagcagagtcttgcccatctctccctctgagcatctcggacattgggactggatgtctttcgtcactggaaaacctcagactgccgacgctgcgggaagagtcatcacctcgagagctcgaggactcgagcggagaccagggccggtgcggtcccacacaccagggatccgaggatccttcgatgctctcgcaggcccagtccgctaccgaggtcgaagagcgtcacgtctccccttcttgttcaacttccagagagagaccctttcaggctggggagctgattttagctgagactggggagggagaaacaaaatttaagaaattatttaggttgaacaacttcggactcttaaatagtaactggggggcagtcccgttcggcaagatcgtggggaagttccccggccagatactgaggagttccttcggtaagcagtacatgctgaggaggccagccttggaagactatgtagtattgatgaaaagagggactgccataacattcccaaagggtagctttggatatgttaaatcctcatgttactttgcctgttttttacccacatcttaagcatggtggtgtatgtgctgtatatgtagtaaaatggaattcgcacctgtgaacttgctctttcatgtgaaaagataagcgaggtcattgtcagagattggttggtttgccttgcaaaacagaaaaatggaattttagctcaaaaagtagaatctaaaatcaacacagatgtacaactagattctcaagagaaaattggagttaaaggtgagctgtttcaagaggatgaccatgaagaatcgcattctgattttccatatggatcatttccctatgttgctagaccagtacactggcaacctggtcatacagcttttcttgtcaagttgaggaaggtcaaaccacaacttaactgagtactccagatgacagtaactgacttgaagatggaaaaatatcaaaatagaactttatattgaaaatcactgcttccatagattggcatttttagctattactatgacttatataacttatacatataattttgaaaataacaactaaaagatgtataacatagcaaaactgcttaaacatcccattttgacacttgtcttgcagttagtttgacattttgtagttaatgattccaaattggtttagttgggccatctcattcttcacttcctgtaaaccactccatagatttgtctttcttcaagaaattagttttctttcctttatttgattgatggtcattgactactgaaataaaatatgcattttaagataaaaaaaaaaaaaaca

SEQ ID NO: 672007 - DNA, 1623 bp, Homo sapiens
gcgacggcgccttcgcgaaacactatgctaatggcatggtgccgcggtcctgtcttgctgtgcctgcggcaggggctcggaaccaattcattcctgcacggcctggggcaggagcccttcgagggagctcggtcactgtgttgcaggtcctcgcctagagacctgcgagatggagaaagagagcacgaggcggcacaaaggaaagccccaggagcagagtcttgcccatctctccctctgagcatctcggacattgggactggatgtctttcgtcactggaaaacctcagactgccgacgctgcgggaagagtcatcacctcgagagctcgaggactcgagcggagaccagggccggtgcggtcccacacaccagggatccgaggatccttcgatgctctcgcaggcccagtccgctaccgaggtcgaagagcgtcacgtctccccttcttgttcaacttccagagagagaccctttcaggctggggagctgattttagctgagactggggagggagaaacaaaatttaagaaattatttaggttgaacaacttcggactcttaaatagtaactggggggcagtcccgttcggcaagatcgtggggaagttccccggccagatactgaggagttccttcggtaagcagtacatgctgaggaggccagccttggaagactatgtagtattgatgaaaagagggactgccataacattcccaaaggatattaatatgattctctcaatgatggatatcaacccaggtgatactgttttggaagctggctcaggctctggtggaatgagcttatttttatccaaagcagttggatcacaaggacgagtcataagttttgaggtacgaaaagaccaccatgatctggctaagaagaattacaaacactggcgtgattcatggaaattaagtcatgtagaagagtggccagacaatgtggattttattcataaggacatttcaggagcaaccgaagacataaaatctttaacatttgacgcagtagctttggatatgttaaatcctcatgttactttgcctgttttttacccacatcttaagcatggtggtgtatgtgctgtatatgtagtaaagaagaatcgcattctgattttccatatggatcatttccctatgttgctagaccagtacactggcaacctggtcatacagcttttcttgtcaagttgaggaaggtcaaaccacaacttaactgagtactccagatgacagtaactgacttgaagatggaaaaatatcaaaatagaactttatattgaaaatcactgcttccatagattggcatttttagctattactatgacttatataacttatacatataattttgaaaataacaactaaaagatgtataacatagcaaaactgcttaaacatcccattttgacacttgtcttgcagttagtttgacattttgtagttaatgattccaaattggtttagttgggccatctcattcttcacttcctgtaaaccactccatagatttgtctttcttcaagaaattagttttctttcctttatttgattgatggtcattgactactgaaataaaatatgcattttaagataaaaaaaaaaaaaaca

SEQ ID NO: 672008 - DNA, 2794 bp, Homo sapiens
gcgacggcgccttcgcgaaacactatgctaatggcatggtgccgcggtcctgtcttgctgtgcctgcggcaggggctcggaaccaattcattcctgcacggcctggggcaggagcccttcgagggagctcggtcactgtgttgcaggtcctcgcctagagacctgcgagatggagaaagagagcacgaggcggcacaaaggaaagccccaggagcagagtcttgcccatctctccctctgagcatctcggacattgggactggatgtctttcgtcactggaaaacctcagactgccgacgctgcgggaagagtcatcacctcgagagctcgaggactcgagcggagaccagggccggtgcggtcccacacaccagggatccgaggatccttcgatgctctcgcaggcccagtccgctaccgaggtcgaagagcgtcacgtctccccttcttgttcaacttccagagagagaccctttcaggctggggagctgattttagctgagactggggagggagaaacaaaatttaagaaattatttaggttgaacaacttcggactcttaaatagtaactggggggcagtcccgttcggcaagatcgtggggaagttccccggccagatactgaggagttccttcggtaagcagtacatgctgaggaggccagccttggaagactatgtagtattgatgaaaagagggactgccataacattcccaaaggatattaatatgattctctcaatgatggatatcaacccaggtgatactgttttggaagctggctcaggctctggtggaatgagcttatttttatccaaagcagttggatcacaaggacgagtcataagttttgaggtacgaaaagaccaccatgatctggctaagaagaattacaaacactggcgtgattcatggaaattaagtcatgtagaagagtggccagacaatgtggattttattcataaggacatttcaggagcaaccgaagacataaaatctttaacatttgacgcagtagctttggatatgttaaatcctcatgttactttgcctgttttttacccacatcttaagcatggtggtgtatgtgctgtatatgtagtaaacatcacacaggttattgaacttttagatggaattcgcacctgtgaacttgctctttcatgtgaaaagataagcgaggtcattgtcagagattggttggtttgccttgcaaaacagaaaaatggaattttagctcaaaaagtagaatctaaaatcaacacagatgtacaactagattctcaagagaaaattggagttaaaggtgagctgtttcaagaggatgaccatgaagaatcgcattctgattttccatatggatcatttccctatgttgctagaccagtacactggcaacctggtcatacagcttttcttgtcaagttgaggaaggtcaaaccacaacttaactgagtactccagatgacagtaactgacttgaagatggaaaaatatcaaaatagaactttatattgaaaatcactgcttccatagattggcatttttagctattactatgacttatataacttatacatataattttgaaaataacaactaaaagatgtataacatagcaaaactgcttaaacatcccattttgacacttgtcttgcagttagtttgacattttgtagttaatgattccaaattggtttagttgggccatctcattcttcacttcctgtaaaccactccatagatttgtctttcttcaagaaattagttttctttcctttatttgattgatggtcattgactacttcagaaccagtataagcttgagaaggatcacctattatgtccattgacagtgagttgtatgagtcctgagaatgtttttctgtcacccctgctgtatgactggataaagatgatgatgaagacaatcccagtctaacatatcttctttttttaccacagagtgaacaatctactggtgtggcactaggtccccggggcagctgaacttcatctctgttgtagtttctgacagctccactgtgatgaacagaacgttctctttgccagatataatgggttggtgcaatggccataacctcctcacaacatcgcctgcttacaatagccctatagtcaattctatcccagagctggtcccttaactttaagaaattagggaacaattttctccagtttttccctaaagcccatggaaaaatttcgtacttggtttcttcttcatcttcttcaactgtattagccagatacagagcaataaagaaatttatcctggtatgctcacttatagtaaatttagccctcttgaaataaacaaaggtcatagccaaaagatacttgtctgcaattttacagcagcagtccatccacaagaaatcttgaattaaatcgtcatcaaataatttaaagaaagcagtcatatcctgacgctgtataaccagacaaggtcctttggggcgtttagatttgttgttattatgtgtatttttttcaaatgcttgccaattatctttacaaataggacgcttcagagtaatgggctttttaggctgatgtgatctatttgaccctgattttacataaacagtgacagtaggtggtgtctcacaacacatctgattgtgcctcattttggtttcccaatattcctgcggaagcccggggctgcgcgggagagggccgggcaacggcggtcaaggctccgtcgcagcgctcctggcctcagacggttgctcgtcggtcgctagccagcagcggtacccccgct

SEQ ID NO: 672009 - DNA, 542 bp, Homo sapiens
tggactgtatgtactgtacagtgtgtggggagtaggtgtgtggtgtgtggtgtgtggggagcatgtatggggtgtgtgatgtgtgtggtgctgtatgtgtgtggtgtatgtgtagtagattcatgtgtgtggtgtgggggtgtgtgcacgtgtgcacatactgtgtggtgtgtgtgatgtctgtggggggtatgtttgcacatggtgtgtacacagtgtgtgtggtgtcagaggtgtgcatgtgtgcacatggtgtgtgtacagtgtgtggggtgtgtgcatgtatacatggtgtgggtgcagtgtggtgtctgtgtgtggtgtctggggtgtgtgtgcatgtgcacatggtgtgtgtgcatggtgtgtgcatgtatacatggtgtgtgtgcagtgtgtggtgtctgtggtgtctagggtgtgtgtgcgtgtgcacataatggggtatccacagctcagcttcaggtacagaaggctttctccattgacattattcgacacaaagattcaatggatgaactcttcagtcaccgtagtgaaat

SEQ ID NO: 672010 - DNA, 106 bp, Homo sapiens
ctagaggatccccagctctgagcgagtcctgagcccgcttatacttattttatggtctcgtccagatcctctggcttattttatggtcttgtccagaccctcgtgg

SEQ ID NO: 672011 - DNA, 968 bp, Homo sapiens
  misc_feature (2)..(2): n is a, c, g, or t
  misc_feature (64)..(66): n is a, c, g, or t
  misc_feature (69)..(69): n is a, c, g, or t
  misc_feature (72)..(74): n is a, c, g, or t
  misc_feature (78)..(78): n is a, c, g, or t
  misc_feature (83)..(83): n is a, c, g, or t
  misc_feature (85)..(85): n is a, c, g, or t
  misc_feature (90)..(90): n is a, c, g, or t
  misc_feature (92)..(92): n is a, c, g, or t
  misc_feature (95)..(97): n is a, c, g, or t
  misc_feature (99)..(100): n is a, c, g, or t
  misc_feature (112)..(112): n is a, c, g, or t
  misc_feature (126)..(127): n is a, c, g, or t
  misc_feature (130)..(132): n is a, c, g, or t
  misc_feature (135)..(135): n is a, c, g, or t
  misc_feature (145)..(147): n is a, c, g, or t
  misc_feature (153)..(153): n is a, c, g, or t
  misc_feature (155)..(155): n is a, c, g, or t
  misc_feature (157)..(158): n is a, c, g, or t
  misc_feature (160)..(160): n is a, c, g, or t
  misc_feature (163)..(163): n is a, c, g, or t
  misc_feature (166)..(167): n is a, c, g, or t
  misc_feature (170)..(170): n is a, c, g, or t
  misc_feature (172)..(172): n is a, c, g, or t
  misc_feature (174)..(176): n is a, c, g, or t
  misc_feature (180)..(184): n is a, c, g, or t
  misc_feature (186)..(187): n is a, c, g, or t
  misc_feature (192)..(192): n is a, c, g, or t
  misc_feature (195)..(195): n is a, c, g, or t
  misc_feature (227)..(227): n is a, c, g, or t
  misc_feature (266)..(266): n is a, c, g, or t
  misc_feature (271)..(273): n is a, c, g, or t
  misc_feature (275)..(275): n is a, c, g, or t
  misc_feature (277)..(277): n is a, c, g, or t
  misc_feature (280)..(281): n is a, c, g, or t
  misc_feature (284)..(284): n is a, c, g, or t
  misc_feature (287)..(287): n is a, c, g, or t
  misc_feature (292)..(292): n is a, c, g, or t
  misc_feature (302)..(302): n is a, c, g, or t
  misc_feature (305)..(305): n is a, c, g, or t
  misc_feature (307)..(307): n is a, c, g, or t
  misc_feature (312)..(312): n is a, c, g, or t
  misc_feature (314)..(317): n is a, c, g, or t
  misc_feature (319)..(319): n is a, c, g, or t
  misc_feature (322)..(322): n is a, c, g, or t
  misc_feature (324)..(324): n is a, c, g, or t
  misc_feature (326)..(326): n is a, c, g, or t
  misc_feature (328)..(328): n is a, c, g, or t
  misc_feature (330)..(330): n is a, c, g, or t
  misc_feature (334)..(335): n is a, c, g, or t
  misc_feature (337)..(338): n is a, c, g, or t
  misc_feature (341)..(341): n is a, c, g, or t
  misc_feature (346)..(346): n is a, c, g, or t
  misc_feature (348)..(348): n is a, c, g, or t
  misc_feature (351)..(351): n is a, c, g, or t
  misc_feature (358)..(359): n is a, c, g, or t
  misc_feature (362)..(362): n is a, c, g, or t
  misc_feature (373)..(373): n is a, c, g, or t
  misc_feature (695)..(695): n is a, c, g, or t
  misc_feature (701)..(701): n is a, c, g, or t
  misc_feature (734)..(734): n is a, c, g, or t
  misc_feature (759)..(759): n is a, c, g, or t
  misc_feature (774)..(774): n is a, c, g, or t
  misc_feature (777)..(777): n is a, c, g, or t
  misc_feature (783)..(783): n is a, c, g, or t
  misc_feature (788)..(788): n is a, c, g, or t
  misc_feature (844)..(844): n is a, c, g, or t
  misc_feature (848)..(848): n is a, c, g, or t
  misc_feature (878)..(878): n is a, c, g, or t
  misc_feature (964)..(964): n is a, c, g, or t
cngtattactgttcgttttacactgtatctcttaggaaatggtgagagccatccacacaatgtnnnttnaannnagtngcgantngtatngnagnnntnngaagagggaganaaaaaatgaggatnnttnnnaanatatatatannnttgagngntnngngtnatnnganantnnnaccnnnnntnncaatnagngagagagccacatttcccctgagatgttacgnaaaagtttgaggttgagatgacatatctgacactctgtngtgannntnanaanntantanaggtnatattcgaangangncagtngnnnncnaangnananangcanncnnganctagnanagngaagagnnggnggagccttatnatgatggggagtcttgttctgacatctttggaaaaactgtccacagtgtgaagtcatcaacttgttatcctggtttacagtttgagtagctgttgtaatggtgtcgaacattttggtgagatactgagtggctcacatgtacaggtacaagggttttcccatgaaatttacatcgagttgtccacctccagcttatagggcttctggaacagagtgggtcttgctcttcgtgattccatgggagagaatggaattggaggaactagtagaattcagggtaatatccagtcagagactaatgactgtaatagatatggagctntccatnccagtggctgagttacgaacagagaaagcatanagcccactatgctttgtagttattngggggatagagagcnttngacctnatagntgaaacttcccattaattgtccaagaatattgtacacgtgggaaagactcggcganaggnacaaatagaggttttctcctgaaaggtaanaggtgaataaagggtaaatgctggggaggtctagaccatagaggacattcagggtgaatgggtcactacggatgccacaatatcgntccc

SEQ ID NO: 672012 - DNA, 944 bp, Homo sapiens
  misc_feature (131)..(131): n is a, c, g, or t
  misc_feature (134)..(134): n is a, c, g, or t
  misc_feature (144)..(144): n is a, c, g, or t
  misc_feature (158)..(158): n is a, c, g, or t
  misc_feature (190)..(191): n is a, c, g, or t
  misc_feature (193)..(193): n is a, c, g, or t
  misc_feature (210)..(210): n is a, c, g, or t
  misc_feature (221)..(221): n is a, c, g, or t
  misc_feature (230)..(230): n is a, c, g, or t
  misc_feature (265)..(265): n is a, c, g, or t
  misc_feature (303)..(303): n is a, c, g, or t
  misc_feature (321)..(321): n is a, c, g, or t
  misc_feature (330)..(330): n is a, c, g, or t
  misc_feature (334)..(334): n is a, c, g, or t
  misc_feature (337)..(337): n is a, c, g, or t
  misc_feature (346)..(347): n is a, c, g, or t
  misc_feature (355)..(355): n is a, c, g, or t
  misc_feature (357)..(357): n is a, c, g, or t
  misc_feature (371)..(371): n is a, c, g, or t
  misc_feature (373)..(373): n is a, c, g, or t
  misc_feature (390)..(390): n is a, c, g, or t
  misc_feature (427)..(427): n is a, c, g, or t
  misc_feature (525)..(525): n is a, c, g, or t
  misc_feature (533)..(533): n is a, c, g, or t
  misc_feature (547)..(549): n is a, c, g, or t
  misc_feature (551)..(551): n is a, c, g, or t
  misc_feature (557)..(557): n is a, c, g, or t
  misc_feature (559)..(559): n is a, c, g, or t
  misc_feature (562)..(563): n is a, c, g, or t
  misc_feature (577)..(579): n is a, c, g, or t
  misc_feature (586)..(587): n is a, c, g, or t
  misc_feature (590)..(590): n is a, c, g, or t
  misc_feature (597)..(599): n is a, c, g, or t
  misc_feature (606)..(606): n is a, c, g, or t
  misc_feature (622)..(622): n is a, c, g, or t
  misc_feature (636)..(636): n is a, c, g, or t
  misc_feature (641)..(641): n is a, c, g, or t
  misc_feature (650)..(650): n is a, c, g, or t
ttgcaatagatcttctgaccctccactgtggactcaatagcagggagatgaagaggacagtgactgagagaccaaaagtggccagccccctaccccatcctgttcccctgtccttacagtctctgggccanatncccacctcgnatatcttgttctanttagttaggccctgcagtaccctgttctcctnntnagcatgcttcaaagganccccacagtcnggaatccancccagtcttgtttttaccaccacttgatgcaaaanagtaagaagtcttgaacgtgtgtgctgtacaaaggaantgcagagatatacgtccngatgcagtntcanctnttgggactnnggcttggncnattacttctgactntnctcactcgtctctcctngccacccgcccgtgtgcacccataaatctggtgtganccacagactcgctagtagccggctcatgcacttcctgcaggtgtcctgcatctgtgtccatgctgtgtgacacactatcctggcagtgtgcaggcccntgttggancagggcctagccgnnntnccttgngnacnnttgtatgctttcannnaagcacnntgntggacannngcgaaangggctgaagatagacncagccttaccagangtggntgagacacncttaagctgtagttcccatggcatgtagtcagataagtcatgccgtctctcaacaactactctatcagcaaaagagtcctctgccatcgaaggtgtgactcctggcagccttccgtgctgcgctctaattggaccctggcggtttgagcaggtgcgctattcccgggaggtagtctccagctgacgggcgccgggacaaggggactccaaccaccccccgcggtttgcccagaaaattagaaaacgagacaaaagaagaggcgatccggcgaacacttcatccataaagggcaa

SEQ ID NO: 672013 - DNA, 334 bp, Homo sapiens
gcccttcttattttgttgacatacaccatacatacaaaaagtcacacgtcgtaagctatccagctatatgaatatttgtaatgtgaacacatttgtttaaccaccagactcctgtcatcaaacaaagacaataccccacgacctctttctaggtattggttatccccacaggtcaccattattctgatttctaatcagattattttgcatatttagaactctatataggtagaatagtgtgcgtccttttatgtctgtattttcattcaccacatgaatattactttctttattagatgcaatagaagtcaaattggaattaagactggtcctg

SEQ ID NO: 672014 - DNA, 172 bp, Homo sapiens
  misc_feature (73)..(73): n is a, c, g, or t
  misc_feature (115)..(115): n is a, c, g, or t
atggcataggcttcttgggatttaaataggaacagttcttgaagatgggatgggcaactggcattaacctctngcagccaccgataaaccaaatgatttcacttgtcataccaantgggaggtcggaaaagcctggttgatcccccactggcattcccaagcccgggcccgg

SEQ ID NO: 672015 - DNA, 840 bp, Homo sapiens
agcggagtaatagtgttttaagaatatttcagcgtagtagaggatttaagcagatcgctttgcctactttaattatatgaaataccaggaggtcagatgtttaacctctttcaacatatctgtttcttttcctgcagaaacagatgattatgctgagattatagatgaagaagatacttacaccatgccctcaagtaagtaaacttctgattttgttcttgctcagacttgacagatgcctcctggcatttaaaagttattgatacttactgtctttttagagccatttttaatacttccttggatgctgaacagaaatattcttttcaacctttaccattctatattacttacatatgcccactctaaggtcagaagcctaaaactcaaatatctgtaataatttttagttacaggatttttgtaatcttgttttctgactctatcataatagaacctttattgattagggtattttctgtctgtagaaaattagtattattggttaagtatatatgtgaatgtgtgtgtatatacacacacaatatatatatccatatatgtataatacacatacatacacacacgtatacccatactttcacacacatatattcaaaaatttgcattttccccctttaaattgtttattctttgttgccattgactaacccattacaaatagctccataaccatcgtcagcttgtacacctcaggcatgggaaggtgtggggagaagaaaccagaactcttaaaggaccttcctacagcctggaaatgtcagaatctggttctctctgtgatgtgcaggttgtgattaaggacaatcttgaagcccg

SEQ ID NO: 672016 - DNA, 519 bp, Homo sapiens
tgaggaaggagaatcgcttggaatacgggaagtggaaggtagtgaggcgagatcacgccactgcactccagcctgggcaagaaaagcgaaactccccatccaaaaaaaaaaatttgtggtaaaatacacataaatttaactatcttcatcatttctacctgtatggcccagtggtatggaggacattcataccatcagacaacataaccaccatccatccatctccagaggtctccatggcaaaagtgaactctacccattaaaccataattccctgttcccctctacccccaagcccggacaaccaccattctaccttttcggtgatttaaactatccttaagtccctcacagaagcggaatcatagtgttggtcttttggtaagtggcttattccactgagcaaaatcctcaaggttcatccatgttatatagcacgtatcaaatttcctttccatggctgaattaatgtcccatggtacgtacgccaaattttccttatccatctgttgatggaca

SEQ ID NO: 672017 - DNA, 4580 bp, Homo sapiens
ggtagtcgtggcgctctcgaggccctgccatgagcaagctcttaactcttcaggtctgcacgtcctacgcccaccgtccagtgctactctcagctcggagttcagcttcgggctgccaagagccagcaacctggtgtcagaggctcggtcccacaacgctctgcgggccgcggcgcctgctgggagtgtgtaagtccccgatctgcgtactgcgttcgccggagggggagggcggagctgccggcgtgccgggctgggctggcagctagagtgggtgcgatagccgcctccgcctctgccgctccgccgtcgcctcctccgcccgggccgttcgctgctgcgcggggagagcgaggcggggccgccggggccgccatggagcccgactcggtgattgaggacaagaccatcgagctcatgtgttctgtgccaaggtctttgtggctaggctgcgccaacctggtagagagcatgtgcgcactgagttgcctgcagagcatgcccagtgtcagatgtctccagataagtaatggaacatcatctgtgatcgtctccagaaagaggccatcagaaggaaactatcaaaaagaaaaagacttgtgtattaaatattttgaccagtggtctgaatcagatcaagtggaatttgtggaacatcttatttcacgaatgtgtcattatcagcatggacatattaactcttacctgaagcccatgttgcagcgggactttattaccgctttaccagagcaaggcttagatcacatagcagaaaacattctttcgtacctggatgccaggtctctgtgtgcagcagagctggtatgtaaagaatggcagcgagtgatctcagaaggaatgctttggaagaagctgattgaacgaatggtacgcactgatcccctatggaaaggactttcagaaagaagagggtgggatcagtacctgtttaaaaacagacccacagatggccctccaaattcattttataggtcattatacccaaagattatccaggatatagagactatagaatctaactggcggtgtggacgacacaacttgcagaggattcagtgccgctctgaaaatagtaaaggtgtctactgtttacagtacgatgatgaaaaaattatcagtggcctacgagataattctattaagatatgggataaaaccagcctggaatgtttgaaagtgttaacaggacacacaggctctgtcctctgtctgcagtatgatgagcgtgtcattgtaactggctcttcagattctacggtgagagtgtgggatgtgaacacgggtgaagttcttaacacattgatccaccacaatgaggctgtattgcacttacgcttcagcaatggactgatggtgacctgttccaaggaccgctccattgctgtgtgggacatggcttctgcgaccgacatcactttacgccgtgtcctggttggccaccgggctgccgtcaatgtagtagactttgacgacaagtacatcgtgtctgcctctggtgacaggaccatcaaagtctggagcacgagcacctgtgaatttgttcgtactctcaatgggcacaagcggggcattgcctgtctccagtacagggatcgcctggttgttagtggatcatcagataataccattaggctctgggatattgaatgtggtgcctgtttaagagtcctagagggacatgaagaattggtccgatgcatccggtttgataacaagaggattgtcagtggggcctatgatgggaaaattaaagtttgggacttgcaagctgctcttgaccctcgagccccagcaagcacattgtgtttgcgcacattggtggaacattctggacgtgtgtttcggctccagtttgatgagtttcagatcatcagcagctcccatgatgacactattttgatttgggatttcttaaatgtgcctcccagtgcccagaatgagacccgttctccctccagaacatacacttacatctctagataacagtctgcactttcacccgtttcagggttttctagtcttgaactactggctacgtggctaccaaatgcctaagggagttcgttcacagctgagttatgaagctggaattggttctagacgctgggtagatgcaaagcagcctaactcttcaagtaccgacatttctcacctctgattccggctctcctttgagaaggagaccttagcttccccggcttcaagtagaacagaagcccgtttccttccctcatcagtgaaaaaatctaatgtttcaaatgtaaattgttcatagaaaaggaacatagaatctgttttacagaagtaaatcgaccgtcaagagaagacttggcctctaatttatattgctttgcactttggtttgatattaagaaacagcattcttcttcagtgaaattttgggtgccaaacacctacccagaatgtccagggctttcattttcaaaagttagcattctccttttgaccgtccaagtcattatgaattctgacttgttgtattaggaacatgttggacagtggaaaattttctctggattgttttagtaatatttttgggattatacttcctttctgtaccaatttcttttaatttaaagaactataagtcagttatattatctaccaacaggtaatatagctctttcttttattaactgttctctgtcccccaaccatctcctgatatttggtagagtaacacctttatacgtgtgcttgcctcctaatttaaaatactgtattcgcatgtagatataatgtacataacagtttaacctcaaagttgctggagtcagggccccctgtgcttgagacactaatacagagtgtgttcgcacttagccatgggctgggctcaagaacctgatacctgggttgatgtggattacctagaacccttcctgcagtattcatacagtgtttttattttgttgttgtcattgcgtgtgtgtggtttgtgtgtgtttttaatgagaatcttgttttaaaatgtaatttctaaggtttaacaccaaaatgttttatttgttgtggagtatatattatacaatagagaggtaccttaaacattttttgttcttattctttttctcataagtactcctgagtacaagtggtcacctcccatagtattcatttggcttcgctgtcaaaaatcattattctgtgcagtcgtggccctgggaaggggaaataagaaggccctgttgacgggctgtcttggctctggaattcatgcatcctggccttgccaaggttctggcagggcctgctggtgtgttggagcctgcagggcaggtcaggctggttcagaggcccatgctgaggggtgggtgctctgaagtggagtgaagcctcaagcccatgaatgccaccccagtcatctctggtgtcagctgctgctgtggccccagcaggttctcaaagctcccaagtcctccctacgacacagcccaaatgtgtaaatggcactgttgccctgacagtgcatggaaaggacgttggcatccaattggcactccttctcccttattcaatattaggtttgatttgcccttcgccattgtttccaaagatcaaggaatgtcaataacattttaaaggaccaataaacagcctcctataaagtaaacctcttcccgtggaagcacactctactactaaagggaaggcccctgggctctgatttgtcctttgcattgagaacggtgtggggatcagtgtgtgtgtatgtgatttgtttattgagttggctttgcttttttagtttttcttttaaaaataaaatccttccttcccatgttactaaattaatttatgtttttgagaggttgagtctcaaagtgtaaacaataaacctccattcataaggtggatgttgtaagcttgatggtggttgtgaaagtgatttagctttgaccacttttcatcctacagcttcaatatcaaactggttaggaaagcccagggggaagggagggggcaggggaggaggcaattctgaatgaatgaatggattttttgttgtttttgcatgtttaatatagaagttcccctcgttccttgggagatgatggcctttgaatatgcagacaacctttgaattgtgcctactaaattatagcaggggactttggcacccaaggagttctgactttctgggattataatagtaattcccagccatactctggactttattttgctaaccataactgagcaaatgtaaattactgctatattaatgttttaaagcactgggatagtctaattctaacttgtaattaattatgtttgccaattatctgtttgaaataaatttgtgtctgaacagctattgaaactgttaaattgtacagatattattcatgacagctttgtactgtggaatgtgcttaataaaaaacaaaaaagtttgacttttgtccagtaaattgctaagtaatgtcaataaatcgagtatgggtattatgcagtgcacctaatctggcttcatgcaattgttacttcagctactgattcaaagccaatactcttaataaagtgttgcaatactc

SEQ ID NO: 672018 - DNA, 1538 bp, Homo sapiens
  misc_feature (537)..(537): n is a, c, g, or t
  misc_feature (558)..(558): n is a, c, g, or t
  misc_feature (1374)..(1374): n is a, c, g, or t
  misc_feature (1402)..(1402): n is a, c, g, or t
  misc_feature (1416)..(1416): n is a, c, g, or t
  misc_feature (1500)..(1500): n is a, c, g, or t
  misc_feature (1532)..(1532): n is a, c, g, or t
ccttatcataaattaaatatgtatttattttagtaaagtagcacaggtgcttaacaactgattgagtaaatccaggatcaaatgtaggaaataatgccttagaatctaattgcatgtggctttctgttttcactgcatttcaattacagtttccagaactgggttaaaaatattttttacattggtttcaagataatacgattgatggaggaaaaggggttaaactgatggtgttttgaaagcctaaagcatgaaatatttttagatttttatgagtcagcttcagtactcaaatatttgtgattgtgctgcttgtaccagtttggcacttaatgcttgacaagataactttcatttgctgttccaaagtgtgctgtattaaaaagaggaaacagacttcttggttatctccattttctaatcttcatccctgtactttccttaatattgattcttctgtttttccttgcatttttgataagtatattaggaaataaagctggtgatagcagaatagttaaatttctaaaatataanccccactttgactcctaccgntgcctgaggcctgggtccacccaggttgcttctcctcctgaccccactctataggattcagctttgaatattagtaaagtctataagctcttaatttagaccctgaatttacagttactaatggtaaataatttaaccgccagatgacttttagggccttatattggcccagggctatacctgttagtgggcctatttttccaaacttctgagtttggtaaaattcgccttatgaatgaggcagaaaactagtaattcatttcggaaatatgtacaagtttatccggctatgttcaatggacttcattgggaagaatgagaactgtacaatatgtatcacgtggtatttattaacctttgagttaggaatatgacttgattttcaggcactcatcactagaaagcactcacaagagcttctgattggaagagaaagatgattagattaccctgtaagaagccagcagaaattgatgctatcactttaggaaaggcgatcctgcctcctccacgggtgtgagtgaatcccctcttccctttacacaattaatggatggtttataattaattgttaaatgacttccctttttgctaagtgaccttaagtgagtcatttcccttctgtcttatctcttaagtggctgtattacttgttcaatgaagtaatgtaggttaaaatacactgatccttattaagaaggtgtgggcaggtgcggtggctctagcctgtaatcccagcactttaggaggtgggaggattgcttgagcccaggagttagagaccagcctaggcaacataacaaaaccctgtctctncaaaaaataaaaaaattagccaggcatngtggttcactcctntagtccctgctactcaggagcctgaggtggggaggattgcttgagcccaggagtttgaggttgcagtgacctgtgattgtgccnctgcactccagcctgggtaacagagcaagacnctctca

SEQ ID NO: 672019 - DNA, 4478 bp, Homo sapiens
ggtagtcgtggcgctctcgaggccctgccatgagcaagctcttaactcttcaggtctgcacgtcctacgcccaccgtccagtgctactctcagctcggagttcagcttcgggctgccaagagccagcaacctggtgtcagaggctcggtcccacaacgctctgcgggccgcggcgcctgctgggagtgtgtaagtccccgatctgcgtactgcgttcgccggagggggagggcggagctgccggcgtgccgggctgggctggcagctagagtgggtgcgatagccgcctccgcctctgccgctccgccgtcgcctcctccgcccgggccgttcgctgctgcgcggggagagcgaggcggggccgccggggccgccatggagcccgactcggtgattgaggacaagaccatcgagctcatgataagtaatggaacatcatctgtgatcgtctccagaaagaggccatcagaaggaaactatcaaaaagaaaaagacttgtgtattaaatattttgaccagtggtctgaatcagatcaagtggaatttgtggaacatcttatttcacgaatgtgtcattatcagcatggacatattaactcttacctgaagcccatgttgcagcgggactttattaccgctttaccagagcaaggcttagatcacatagcagaaaacattctttcgtacctggatgccaggtctctgtgtgcagcagagctggtatgtaaagaatggcagcgagtgatctcagaaggaatgctttggaagaagctgattgaacgaatggtacgcactgatcccctatggaaaggactttcagaaagaagagggtgggatcagtacctgtttaaaaacagacccacagatggccctccaaattcattttataggtcattatacccaaagattatccaggatatagagactatagaatctaactggcggtgtggacgacacaacttgcagaggattcagtgccgctctgaaaatagtaaaggtgtctactgtttacagtacgatgatgaaaaaattatcagtggcctacgagataattctattaagatatgggataaaaccagcctggaatgtttgaaagtgttaacaggacacacaggctctgtcctctgtctgcagtatgatgagcgtgtcattgtaactggctcttcagattctacggtgagagtgtgggatgtgaacacgggtgaagttcttaacacattgatccaccacaatgaggctgtattgcacttacgcttcagcaatggactgatggtgacctgttccaaggaccgctccattgctgtgtgggacatggcttctgcgaccgacatcactttacgccgtgtcctggttggccaccgggctgccgtcaatgtagtagactttgacgacaagtacatcgtgtctgcctctggtgacaggaccatcaaagtctggagcacgagcacctgtgaatttgttcgtactctcaatgggcacaagcggggcattgcctgtctccagtacagggatcgcctggttgttagtggatcatcagataataccattaggctctgggatattgaatgtggtgcctgtttaagagtcctagagggacatgaagaattggtccgatgcatccggtttgataacaagaggattgtcagtggggcctatgatgggaaaattaaagtttgggacttgcaagctgctcttgaccctcgagccccagcaagcacattgtgtttgcgcacattggtggaacattctggacgtgtgtttcggctccagtttgatgagtttcagatcatcagcagctcccatgatgacactattttgatttgggatttcttaaatgtgcctcccagtgcccagaatgagacccgttctccctccagaacatacacttacatctctagataacagtctgcactttcacccgtttcagggttttctagtcttgaactactggctacgtggctaccaaatgcctaagggagttcgttcacagctgagttatgaagctggaattggttctagacgctgggtagatgcaaagcagcctaactcttcaagtaccgacatttctcacctctgattccggctctcctttgagaaggagaccttagcttccccggcttcaagtagaacagaagcccgtttccttccctcatcagtgaaaaaatctaatgtttcaaatgtaaattgttcatagaaaaggaacatagaatctgttttacagaagtaaatcgaccgtcaagagaagacttggcctctaatttatattgctttgcactttggtttgatattaagaaacagcattcttcttcagtgaaattttgggtgccaaacacctacccagaatgtccagggctttcattttcaaaagttagcattctccttttgaccgtccaagtcattatgaattctgacttgttgtattaggaacatgttggacagtggaaaattttctctggattgttttagtaatatttttgggattatacttcctttctgtaccaatttcttttaatttaaagaactataagtcagttatattatctaccaacaggtaatatagctctttcttttattaactgttctctgtcccccaaccatctcctgatatttggtagagtaacacctttatacgtgtgcttgcctcctaatttaaaatactgtattcgcatgtagatataatgtacataacagtttaacctcaaagttgctggagtcagggccccctgtgcttgagacactaatacagagtgtgttcgcacttagccatgggctgggctcaagaacctgatacctgggttgatgtggattacctagaacccttcctgcagtattcatacagtgtttttattttgttgttgtcattgcgtgtgtgtggtttgtgtgtgtttttaatgagaatcttgttttaaaatgtaatttctaaggtttaacaccaaaatgttttatttgttgtggagtatatattatacaatagagaggtaccttaaacattttttgttcttattctttttctcataagtactcctgagtacaagtggtcacctcccatagtattcatttggcttcgctgtcaaaaatcattattctgtgcagtcgtggccctgggaaggggaaataagaaggccctgttgacgggctgtcttggctctggaattcatgcatcctggccttgccaaggttctggcagggcctgctggtgtgttggagcctgcagggcaggtcaggctggttcagaggcccatgctgaggggtgggtgctctgaagtggagtgaagcctcaagcccatgaatgccaccccagtcatctctggtgtcagctgctgctgtggccccagcaggttctcaaagctcccaagtcctccctacgacacagcccaaatgtgtaaatggcactgttgccctgacagtgcatggaaaggacgttggcatccaattggcactccttctcccttattcaatattaggtttgatttgcccttcgccattgtttccaaagatcaaggaatgtcaataacattttaaaggaccaataaacagcctcctataaagtaaacctcttcccgtggaagcacactctactactaaagggaaggcccctgggctctgatttgtcctttgcattgagaacggtgtggggatcagtgtgtgtgtatgtgatttgtttattgagttggctttgcttttttagtttttcttttaaaaataaaatccttccttcccatgttactaaattaatttatgtttttgagaggttgagtctcaaagtgtaaacaataaacctccattcataaggtggatgttgtaagcttgatggtggttgtgaaagtgatttagctttgaccacttttcatcctacagcttcaatatcaaactggttaggaaagcccagggggaagggagggggcaggggaggaggcaattctgaatgaatgaatggattttttgttgtttttgcatgtttaatatagaagttcccctcgttccttgggagatgatggcctttgaatatgcagacaacctttgaattgtgcctactaaattatagcaggggactttggcacccaaggagttctgactttctgggattataatagtaattcccagccatactctggactttattttgctaaccataactgagcaaatgtaaattactgctatattaatgttttaaagcactgggatagtctaattctaacttgtaattaattatgtttgccaattatctgtttgaaataaatttgtgtctgaacagctattgaaactgttaaattgtacagatattattcatgacagctttgtactgtggaatgtgcttaataaaaaacaaaaaagtttgacttttgtccagtaaattgctaagtaatgtcaataaatcgagtatgggtattatgcagtgcacctaatctggcttcatgcaattgttacttcagctactgattcaaagccaatactcttaataaagtgttgcaatactc

SEQ ID NO: 672020 - DNA, 3950 bp, Homo sapiens
agcggatgttctaagtacttccacagcaaacaagacccaggctcaggcctcaggcctgaaacctgaggctgcaaattgacaaaccagcttctgatttctaatctctcttccaaaacgtagcaaggcttagatcacatagcagaaaacattctttcgtacctggatgccaggtctctgtgtgcagcagagctggtatgtaaagaatggcagcgagtgatctcagaaggaatgctttggaagaagctgattgaacgaatggtacgcactgatcccctatggaaaggactttcagaaagaagagggtgggatcagtacctgtttaaaaacagacccacagatggccctccaaattcattttataggtcattatacccaaagattatccaggatatagagactatagaatctaactggcggtgtggacgacacaacttgcagaggattcagtgccgctctgaaaatagtaaaggtgtctactgtttacagtacgatgatgaaaaaattatcagtggcctacgagataattctattaagatatgggataaaaccagcctggaatgtttgaaagtgttaacaggacacacaggctctgtcctctgtctgcagtatgatgagcgtgtcattgtaactggctcttcagattctacggtgagagtgtgggatgtgaacacgggtgaagttcttaacacattgatccaccacaatgaggctgtattgcacttacgcttcagcaatggactgatggtgacctgttccaaggaccgctccattgctgtgtgggacatggcttctgcgaccgacatcactttacgccgtgtcctggttggccaccgggctgccgtcaatgtagtagactttgacgacaagtacatcgtgtctgcctctggtgacaggaccatcaaagtctggagcacgagcacctgtgaatttgttcgtactctcaatgggcacaagcggggcattgcctgtctccagtacagggatcgcctggttgttagtggatcatcagataataccattaggctctgggatattgaatgtggtgcctgtttaagagtcctagagggacatgaagaattggtccgatgcatccggtttgataacaagaggattgtcagtggggcctatgatgggaaaattaaagtttgggacttgcaagctgctcttgaccctcgagccccagcaagcacattgtgtttgcgcacattggtggaacattctggacgtgtgtttcggctccagtttgatgagtttcagatcatcagcagctcccatgatgacactattttgatttgggatttcttaaatgtgcctcccagtgcccagaatgagacccgttctccctccagaacatacacttacatctctagataacagtctgcactttcacccgtttcagggttttctagtcttgaactactggctacgtggctaccaaatgcctaagggagttcgttcacagctgagttatgaagctggaattggttctagacgctgggtagatgcaaagcagcctaactcttcaagtaccgacatttctcacctctgattccggctctcctttgagaaggagaccttagcttccccggcttcaagtagaacagaagcccgtttccttccctcatcagtgaaaaaatctaatgtttcaaatgtaaattgttcatagaaaaggaacatagaatctgttttacagaagtaaatcgaccgtcaagagaagacttggcctctaatttatattgctttgcactttggtttgatattaagaaacagcattcttcttcagtgaaattttgggtgccaaacacctacccagaatgtccagggctttcattttcaaaagttagcattctccttttgaccgtccaagtcattatgaattctgacttgttgtattaggaacatgttggacagtggaaaattttctctggattgttttagtaatatttttgggattatacttcctttctgtaccaatttcttttaatttaaagaactataagtcagttatattatctaccaacaggtaatatagctctttcttttattaactgttctctgtcccccaaccatctcctgatatttggtagagtaacacctttatacgtgtgcttgcctcctaatttaaaatactgtattcgcatgtagatataatgtacataacagtttaacctcaaagttgctggagtcagggccccctgtgcttgagacactaatacagagtgtgttcgcacttagccatgggctgggctcaagaacctgatacctgggttgatgtggattacctagaacccttcctgcagtattcatacagtgtttttattttgttgttgtcattgcgtgtgtgtggtttgtgtgtgtttttaatgagaatcttgttttaaaatgtaatttctaaggtttaacaccaaaatgttttatttgttgtggagtatatattatacaatagagaggtaccttaaacattttttgttcttattctttttctcataagtactcctgagtacaagtggtcacctcccatagtattcatttggcttcgctgtcaaaaatcattattctgtgcagtcgtggccctgggaaggggaaataagaaggccctgttgacgggctgtcttggctctggaattcatgcatcctggccttgccaaggttctggcagggcctgctggtgtgttggagcctgcagggcaggtcaggctggttcagaggcccatgctgaggggtgggtgctctgaagtggagtgaagcctcaagcccatgaatgccaccccagtcatctctggtgtcagctgctgctgtggccccagcaggttctcaaagctcccaagtcctccctacgacacagcccaaatgtgtaaatggcactgttgccctgacagtgcatggaaaggacgttggcatccaattggcactccttctcccttattcaatattaggtttgatttgcccttcgccattgtttccaaagatcaaggaatgtcaataacattttaaaggaccaataaacagcctcctataaagtaaacctcttcccgtggaagcacactctactactaaagggaaggcccctgggctctgatttgtcctttgcattgagaacggtgtggggatcagtgtgtgtgtatgtgatttgtttattgagttggctttgcttttttagtttttcttttaaaaataaaatccttccttcccatgttactaaattaatttatgtttttgagaggttgagtctcaaagtgtaaacaataaacctccattcataaggtggatgttgtaagcttgatggtggttgtgaaagtgatttagctttgaccacttttcatcctacagcttcaatatcaaactggttaggaaagcccagggggaagggagggggcaggggaggaggcaattctgaatgaatgaatggattttttgttgtttttgcatgtttaatatagaagttcccctcgttccttgggagatgatggcctttgaatatgcagacaacctttgaattgtgcctactaaattatagcaggggactttggcacccaaggagttctgactttctgggattataatagtaattcccagccatactctggactttattttgctaaccataactgagcaaatgtaaattactgctatattaatgttttaaagcactgggatagtctaattctaacttgtaattaattatgtttgccaattatctgtttgaaataaatttgtgtctgaacagctattgaaactgttaaattgtacagatattattcatgacagctttgtactgtggaatgtgcttaataaaaaacaaaaaagtttgacttttgtccagtaaattgctaagtaatgtcaataaatcgagtatgggtattatgcagtgcacctaatctggcttcatgcaattgttacttcagctactgattcaaagccaatactcttaataaagtgttgcaatactc

SEQ ID NO: 672021 - DNA, 1062 bp, Homo sapiens
  misc_feature (857)..(857): n is a, c, g, or t
  misc_feature (919)..(919): n is a, c, g, or t
agcggcgtggatgagggaacattctgcagtataaagggagcaggaaggcgggagacagcgcagtttgaatcgcggtgcgacgaaggagtaggtggtgggatctcaccgtgggtccgattagccttttctctgccttgcttgcttgagcttcagcggaattcgaaatggctggcggtaaggctggaaaggactccggaaaggccaagacaaaggcggtttcccgctcgcagagagccggcttgcagttcccagtgggccgtattcatcgacacctaaaatctaggacgaccagtcatggacgtgtgggcgcgactgccgctgtgtacagcgcagccatcctggagtacctcaccgcagaggtacttgaactggcaggaaatgcatcaaaagacttaaaggtaaagcgtattacccctcgtcacttgcaacttgctattcgtggagatgaagaattggattctctcatcaaggctacaattgctggtggtggtgtcattccacacatccacaaatctctgattgggaagaaaggacaacagaagactgtctaaaggatgcctggattccttgttatctcaggactctaaatactctaacagctgtccagtgttggtgattccagtggactgtatctctgtgaaaaacacaattttgcctttttgtaattctatttgagcaagttggaagtttaattagctttccaaccaaccaaatttctgcattcgagtcttaccatatttaagtgtactgtggttcaaagaagctattgattctgaagtagtgggttttgattgagttgactgttttttaaaaaactgtttggattttaattgtgatgcagaagttatagtaccaancatttggttttgtacagacattatttccactctggtggataagttcaataaaggtctatccnaaaaaaaaaaaaatcgaggttttgcggggggagaagggtttaaaggccatgcatgtgtctaaccgttttaaagggacatgcgggccaatgggttattcaccgtatcttgctattgaagaagcagaaggaagagaaaaaagaat

SEQ ID NO: 672022 - DNA, 4545 bp, Homo sapiens
ggtagtcgtggcgctctcgaggccctgccatgagcaagctcttaactcttcaggtctgcacgtcctacgcccaccgtccagtgctactctcagctcggagttcagcttcgggctgccaagagccagcaacctggtgtcagaggctcggtcccacaacgctctgcgggccgcggcgcctgctgggagtgtgtaagtccccgatctgcgtactgcgttcgccggagggggagggcggagctgccggcgtgccgggctgggctggcagctagagtgggtgcgatagccgcctccgcctctgccgctccgccgtcgcctcctccgcccgggccgttcgctgctgcgcggggagagcgaggcggggccgccggggccgccatggagcccgactcggtgattgaggacaagaccatcgagctcatgaacacttcagttatggcagatcccacatgaagatgagtccccgaacgaacacctactctttggcacgataagtaatggaacatcatctgtgatcgtctccagaaagaggccatcagaaggaaactatcaaaaagaaaaagacttgtgtattaaatattttgaccagtggtctgaatcagatcaagtggaatttgtggaacatcttatttcacgaatgtgtcattatcagcatggacatattaactcttacctgaagcccatgttgcagcgggactttattaccgctttaccagagcaaggcttagatcacatagcagaaaacattctttcgtacctggatgccaggtctctgtgtgcagcagagctggtatgtaaagaatggcagcgagtgatctcagaaggaatgctttggaagaagctgattgaacgaatggtacgcactgatcccctatggaaaggactttcagaaagaagagggtgggatcagtacctgtttaaaaacagacccacagatggccctccaaattcattttataggtcattatacccaaagattatccaggatatagagactatagaatctaactggcggtgtggacgacacaacttgcagaggattcagtgccgctctgaaaatagtaaaggtgtctactgtttacagtacgatgatgaaaaaattatcagtggcctacgagataattctattaagatatgggataaaaccagcctggaatgtttgaaagtgttaacaggacacacaggctctgtcctctgtctgcagtatgatgagcgtgtcattgtaactggctcttcagattctacggtgagagtgtgggatgtgaacacgggtgaagttcttaacacattgatccaccacaatgaggctgtattgcacttacgcttcagcaatggactgatggtgacctgttccaaggaccgctccattgctgtgtgggacatggcttctgcgaccgacatcactttacgccgtgtcctggttggccaccgggctgccgtcaatgtagtagactttgacgacaagtacatcgtgtctgcctctggtgacaggaccatcaaagtctggagcacgagcacctgtgaatttgttcgtactctcaatgggcacaagcggggcattgcctgtctccagtacagggatcgcctggttgttagtggatcatcagataataccattaggctctgggatattgaatgtggtgcctgtttaagagtcctagagggacatgaagaattggtccgatgcatccggtttgataacaagaggattgtcagtggggcctatgatgggaaaattaaagtttgggacttgcaagctgctcttgaccctcgagccccagcaagcacattgtgtttgcgcacattggtggaacattctggacgtgtgtttcggctccagtttgatgagtttcagatcatcagcagctcccatgatgacactattttgatttgggatttcttaaatgtgcctcccagtgcccagaatgagacccgttctccctccagaacatacacttacatctctagataacagtctgcactttcacccgtttcagggttttctagtcttgaactactggctacgtggctaccaaatgcctaagggagttcgttcacagctgagttatgaagctggaattggttctagacgctgggtagatgcaaagcagcctaactcttcaagtaccgacatttctcacctctgattccggctctcctttgagaaggagaccttagcttccccggcttcaagtagaacagaagcccgtttccttccctcatcagtgaaaaaatctaatgtttcaaatgtaaattgttcatagaaaaggaacatagaatctgttttacagaagtaaatcgaccgtcaagagaagacttggcctctaatttatattgctttgcactttggtttgatattaagaaacagcattcttcttcagtgaaattttgggtgccaaacacctacccagaatgtccagggctttcattttcaaaagttagcattctccttttgaccgtccaagtcattatgaattctgacttgttgtattaggaacatgttggacagtggaaaattttctctggattgttttagtaatatttttgggattatacttcctttctgtaccaatttcttttaatttaaagaactataagtcagttatattatctaccaacaggtaatatagctctttcttttattaactgttctctgtcccccaaccatctcctgatatttggtagagtaacacctttatacgtgtgcttgcctcctaatttaaaatactgtattcgcatgtagatataatgtacataacagtttaacctcaaagttgctggagtcagggccccctgtgcttgagacactaatacagagtgtgttcgcacttagccatgggctgggctcaagaacctgatacctgggttgatgtggattacctagaacccttcctgcagtattcatacagtgtttttattttgttgttgtcattgcgtgtgtgtggtttgtgtgtgtttttaatgagaatcttgttttaaaatgtaatttctaaggtttaacaccaaaatgttttatttgttgtggagtatatattatacaatagagaggtaccttaaacattttttgttcttattctttttctcataagtactcctgagtacaagtggtcacctcccatagtattcatttggcttcgctgtcaaaaatcattattctgtgcagtcgtggccctgggaaggggaaataagaaggccctgttgacgggctgtcttggctctggaattcatgcatcctggccttgccaaggttctggcagggcctgctggtgtgttggagcctgcagggcaggtcaggctggttcagaggcccatgctgaggggtgggtgctctgaagtggagtgaagcctcaagcccatgaatgccaccccagtcatctctggtgtcagctgctgctgtggccccagcaggttctcaaagctcccaagtcctccctacgacacagcccaaatgtgtaaatggcactgttgccctgacagtgcatggaaaggacgttggcatccaattggcactccttctcccttattcaatattaggtttgatttgcccttcgccattgtttccaaagatcaaggaatgtcaataacattttaaaggaccaataaacagcctcctataaagtaaacctcttcccgtggaagcacactctactactaaagggaaggcccctgggctctgatttgtcctttgcattgagaacggtgtggggatcagtgtgtgtgtatgtgatttgtttattgagttggctttgcttttttagtttttcttttaaaaataaaatccttccttcccatgttactaaattaatttatgtttttgagaggttgagtctcaaagtgtaaacaataaacctccattcataaggtggatgttgtaagcttgatggtggttgtgaaagtgatttagctttgaccacttttcatcctacagcttcaatatcaaactggttaggaaagcccagggggaagggagggggcaggggaggaggcaattctgaatgaatgaatggattttttgttgtttttgcatgtttaatatagaagttcccctcgttccttgggagatgatggcctttgaatatgcagacaacctttgaattgtgcctactaaattatagcaggggactttggcacccaaggagttctgactttctgggattataatagtaattcccagccatactctggactttattttgctaaccataactgagcaaatgtaaattactgctatattaatgttttaaagcactgggatagtctaattctaacttgtaattaattatgtttgccaattatctgtttgaaataaatttgtgtctgaacagctattgaaactgttaaattgtacagatattattcatgacagctttgtactgtggaatgtgcttaataaaaaacaaaaaagtttgacttttgtccagtaaattgctaagtaatgtcaataaatcgagtatgggtattatgcagtgcacctaatctggcttcatgcaattgttacttcagctactgattcaaagccaatactcttaataaagtgttgcaatactc

SEQ ID NO: 672023 - DNA, 545 bp, Homo sapiens
agaatgagaaaggatgatactgagaagacaaagggaaaaagtagactgcatgcccctctaccaaaagtgttgtttgttgactttcgatttttcgaaagcgagaaaagataaagagctcttgacctgttttgtaagctagatatgtaatttgagtgttcattttgtcacatttctcactaaacggtcaaagctttcagcatcaactaattgtttctaatgcattccagcctttgggatttcagcctgaacaacctctcccctgctggcaaaattattgctttggttcagttcttagggcatccacccttctactgatttgtgatgactagccactgacaaggtggaaggcctttgaaagcactgcataacttccactgatgatgagatcacataccaaatgcacataatccggtaaatgagcaaaagtagaccttttatcatcttcccatggcatgtttcttttctcttgctaaaactttatacctcctacgtggatatttttctacctgtctgctttctactattaaaagaactataacctcaaa

SEQ ID NO: 672024 - DNA, 768 bp, Homo sapiens
  misc_feature (689)..(690): n is a, c, g, or t
agcggcgtggatgagggaacattctgcagtataaagggagcaggaaggcgggagacagcgcagtttgaatcgcggtgcgacgaaggagtaggtggtgggatctcaccgtgggtccgattagccttttctctgccttgcttgcttgagcttcagcggaattcgaaatggctggcggtaaggctggaaaggactccggaaaggccaagacaaaggcggtttcccgctcgcagagagccggcttgcagttcccagtgggccgtattcatcgacacctaaaatctaggacgaccagtcatggacgtgtgggcgcgactgccgctgtgtacagcgcagccatcctggagtacctcaccgcagaggtacttgaactggcaggaaatgcatcaaaagacttaaaggtaaagcgtattacccctcgtcacttgcaacttgctattcgtggagatgaagaattggattctctcatcaaggctacaattgctggtggtggtgtcattccacacatccacaaatctctgattgggaagaaaggacaacagaagactgtctaaaggatgcctggattccttgttatctcaggactctaaatactctaacagctgtccagtgttggtgattccagtggactgtatctctgtgaaaaaacacacatttggccttttgatttattagcaattgaggtatttggnnaccgggggctcaaaaaaacttttaatcttcaaggggtttaattgttgaccgttttaccgtggggttttatttgggtgc

SEQ ID NO: 672025 - DNA, 4609 bp, Homo sapiens
ggtagtcgtggcgctctcgaggccctgccatgagcaagctcttaactcttcaggtctgcacgtcctacgcccaccgtccagtgctactctcagctcggagttcagcttcgggctgccaagagccagcaacctggtgtcagaggctcggtcccacaacgctctgcgggccgcggcgcctgctgggagtgtgtaagtccccgatctgcgtactgcgttcgccggagggggagggcggagctgccggcgtgccgggctgggctggcagctagagtgggtgcgatagccgcctccgcctctgccgctccgccgtcgcctcctccgcccgggccgttcgctgctgcgcggggagagcgaggcggggccgccggggccgccatggagcccgactcggtgattgaggacaagaccatcgagctcatggcactcatcactagaaagcactcacaagagcttctgattggaagagaaagatgattagattaccctgtaagaagccagcagaaattgatgctatcactttaggaaaggcgatcctgcctcctccacgggtgataagtaatggaacatcatctgtgatcgtctccagaaagaggccatcagaaggaaactatcaaaaagaaaaagacttgtgtattaaatattttgaccagtggtctgaatcagatcaagtggaatttgtggaacatcttatttcacgaatgtgtcattatcagcatggacatattaactcttacctgaagcccatgttgcagcgggactttattaccgctttaccagagcaaggcttagatcacatagcagaaaacattctttcgtacctggatgccaggtctctgtgtgcagcagagctggtatgtaaagaatggcagcgagtgatctcagaaggaatgctttggaagaagctgattgaacgaatggtacgcactgatcccctatggaaaggactttcagaaagaagagggtgggatcagtacctgtttaaaaacagacccacagatggccctccaaattcattttataggtcattatacccaaagattatccaggatatagagactatagaatctaactggcggtgtggacgacacaacttgcagaggattcagtgccgctctgaaaatagtaaaggtgtctactgtttacagtacgatgatgaaaaaattatcagtggcctacgagataattctattaagatatgggataaaaccagcctggaatgtttgaaagtgttaacaggacacacaggctctgtcctctgtctgcagtatgatgagcgtgtcattgtaactggctcttcagattctacggtgagagtgtgggatgtgaacacgggtgaagttcttaacacattgatccaccacaatgaggctgtattgcacttacgcttcagcaatggactgatggtgacctgttccaaggaccgctccattgctgtgtgggacatggcttctgcgaccgacatcactttacgccgtgtcctggttggccaccgggctgccgtcaatgtagtagactttgacgacaagtacatcgtgtctgcctctggtgacaggaccatcaaagtctggagcacgagcacctgtgaatttgttcgtactctcaatgggcacaagcggggcattgcctgtctccagtacagggatcgcctggttgttagtggatcatcagataataccattaggctctgggatattgaatgtggtgcctgtttaagagtcctagagggacatgaagaattggtccgatgcatccggtttgataacaagaggattgtcagtggggcctatgatgggaaaattaaagtttgggacttgcaagctgctcttgaccctcgagccccagcaagcacattgtgtttgcgcacattggtggaacattctggacgtgtgtttcggctccagtttgatgagtttcagatcatcagcagctcccatgatgacactattttgatttgggatttcttaaatgtgcctcccagtgcccagaatgagacccgttctccctccagaacatacacttacatctctagataacagtctgcactttcacccgtttcagggttttctagtcttgaactactggctacgtggctaccaaatgcctaagggagttcgttcacagctgagttatgaagctggaattggttctagacgctgggtagatgcaaagcagcctaactcttcaagtaccgacatttctcacctctgattccggctctcctttgagaaggagaccttagcttccccggcttcaagtagaacagaagcccgtttccttccctcatcagtgaaaaaatctaatgtttcaaatgtaaattgttcatagaaaaggaacatagaatctgttttacagaagtaaatcgaccgtcaagagaagacttggcctctaatttatattgctttgcactttggtttgatattaagaaacagcattcttcttcagtgaaattttgggtgccaaacacctacccagaatgtccagggctttcattttcaaaagttagcattctccttttgaccgtccaagtcattatgaattctgacttgttgtattaggaacatgttggacagtggaaaattttctctggattgttttagtaatatttttgggattatacttcctttctgtaccaatttcttttaatttaaagaactataagtcagttatattatctaccaacaggtaatatagctctttcttttattaactgttctctgtcccccaaccatctcctgatatttggtagagtaacacctttatacgtgtgcttgcctcctaatttaaaatactgtattcgcatgtagatataatgtacataacagtttaacctcaaagttgctggagtcagggccccctgtgcttgagacactaatacagagtgtgttcgcacttagccatgggctgggctcaagaacctgatacctgggttgatgtggattacctagaacccttcctgcagtattcatacagtgtttttattttgttgttgtcattgcgtgtgtgtggtttgtgtgtgtttttaatgagaatcttgttttaaaatgtaatttctaaggtttaacaccaaaatgttttatttgttgtggagtatatattatacaatagagaggtaccttaaacattttttgttcttattctttttctcataagtactcctgagtacaagtggtcacctcccatagtattcatttggcttcgctgtcaaaaatcattattctgtgcagtcgtggccctgggaaggggaaataagaaggccctgttgacgggctgtcttggctctggaattcatgcatcctggccttgccaaggttctggcagggcctgctggtgtgttggagcctgcagggcaggtcaggctggttcagaggcccatgctgaggggtgggtgctctgaagtggagtgaagcctcaagcccatgaatgccaccccagtcatctctggtgtcagctgctgctgtggccccagcaggttctcaaagctcccaagtcctccctacgacacagcccaaatgtgtaaatggcactgttgccctgacagtgcatggaaaggacgttggcatccaattggcactccttctcccttattcaatattaggtttgatttgcccttcgccattgtttccaaagatcaaggaatgtcaataacattttaaaggaccaataaacagcctcctataaagtaaacctcttcccgtggaagcacactctactactaaagggaaggcccctgggctctgatttgtcctttgcattgagaacggtgtggggatcagtgtgtgtgtatgtgatttgtttattgagttggctttgcttttttagtttttcttttaaaaataaaatccttccttcccatgttactaaattaatttatgtttttgagaggttgagtctcaaagtgtaaacaataaacctccattcataaggtggatgttgtaagcttgatggtggttgtgaaagtgatttagctttgaccacttttcatcctacagcttcaatatcaaactggttaggaaagcccagggggaagggagggggcaggggaggaggcaattctgaatgaatgaatggattttttgttgtttttgcatgtttaatatagaagttcccctcgttccttgggagatgatggcctttgaatatgcagacaacctttgaattgtgcctactaaattatagcaggggactttggcacccaaggagttctgactttctgggattataatagtaattcccagccatactctggactttattttgctaaccataactgagcaaatgtaaattactgctatattaatgttttaaagcactgggatagtctaattctaacttgtaattaattatgtttgccaattatctgtttgaaataaatttgtgtctgaacagctattgaaactgttaaattgtacagatattattcatgacagctttgtactgtggaatgtgcttaataaaaaacaaaaaagtttgacttttgtccagtaaattgctaagtaatgtcaataaatcgagtatgggtattatgcagtgcacctaatctggcttcatgcaattgttacttcagctactgattcaaagccaatactcttaataaagtgttgcaatactc

SEQ ID NO: 672026 - DNA, 810 bp, Homo sapiens
ccctttaattcacgccctcatcttttacacactaacacgcttggtaaatattgggcgcccaataatattgtttgttctgccccaattaccctgcgtatattttcagcgcggtttaatttgtctctacatatgtctgcaaccacgtatttttttttaatatcatctcattggttgtcaaatatagtgagatataatcattttcttaaaaaagctcgtttcgatcatccttctctttactagtggtgatttcacctcccccactatagtttgtcttgtatattagtagaatctgcatctggtggtatcatgctttcctcatcagcaaattgatttctctttctcttactatggggtggcttcgcggcacgcccgccgctgtgtgggtcttcacatcgtcgtcgctggtacattgtcctccacgcgccaccactttttgtgtgcagagcccgcagggaggtcggtggtggtgatatctctctccctgtgtagggtgctcacgcgggaggtttcgtagcgttctcctcccctgtgtccccacacactgtggtgtgaaccctccctgtcgtcttcctgctgtagtacaagacttagtaattatagcgcccggcgttgttgtgtgcactgtcgccgccgtaatatccccactatcttcggaggagcgttctgcgcacaggtgcagcttcctctatagtaccccactgagggcccgagattctcctcccgtttatgcccaataggtcgccttcacttccgcgccttcccgtcctcttggggccccccatggcgcctcagccttttttttttcaaaac

SEQ ID NO: 672027 - DNA, 1134 bp, Homo sapiens
  misc_feature (1)..(1): n is a, c, g, or t
  misc_feature (68)..(68): n is a, c, g, or t
  misc_feature (112)..(112): n is a, c, g, or t
  misc_feature (126)..(127): n is a, c, g, or t
  misc_feature (155)..(156): n is a, c, g, or t
  misc_feature (215)..(215): n is a, c, g, or t
  misc_feature (225)..(225): n is a, c, g, or t
  misc_feature (245)..(245): n is a, c, g, or t
  misc_feature (251)..(251): n is a, c, g, or t
  misc_feature (271)..(271): n is a, c, g, or t
  misc_feature (309)..(309): n is a, c, g, or t
  misc_feature (328)..(328): n is a, c, g, or t
  misc_feature (347)..(347): n is a, c, g, or t
  misc_feature (372)..(372): n is a, c, g, or t
  misc_feature (387)..(388): n is a, c, g, or t
  misc_feature (390)..(390): n is a, c, g, or t
  misc_feature (415)..(415): n is a, c, g, or t
  misc_feature (439)..(439): n is a, c, g, or t
  misc_feature (445)..(445): n is a, c, g, or t
  misc_feature (454)..(454): n is a, c, g, or t
  misc_feature (465)..(465): n is a, c, g, or t
  misc_feature (468)..(468): n is a, c, g, or t
  misc_feature (480)..(480): n is a, c, g, or t
  misc_feature (1062)..(1062): n is a, c, g, or t
  misc_feature (1065)..(1066): n is a, c, g, or t
  misc_feature (1070)..(1074): n is a, c, g, or t
  misc_feature (1081)..(1081): n is a, c, g, or t
nacttttccgcacatgcctgtgcctatctgagtatgatgccatggatgtgcccgagaacagcatctgnatgtggaacacaacctgttcaagcaacgactagataaagatggncacccccgtgagcnncagaggctgagccggcatgagcttgggnnaaagtcggaggtgaccggtgtttgacccctgactcccctggacccctgatccgctgtgnagagcctgcntatggctgctgtaggccagnaagatnatccaagtgcctgttaaccnccctgttgaaagaatggtgccggggaggccactatccncccgttagcaggcctgggncccttccaaagcacccccnagcatcacctatttgcagccagctncccgcccgcagcagnncnttccagccccagcaagcatgccagncagccagcaagcaatgaaggctgnccaggntgtatggcnttcttggaagntcnaataagcgtggnccgagaaacttcccactttgcccctgggaagagcttccagcagtcccatgtgcacgtccatgacttgcagagctttggccttgacaacatcaacatgacccactacatccagcacctgtcatttggggaggactatccaggcattgtgaaccccctggaccacaccaatgtcactgcgccccaagcctccatgatgttccagtactttgtgaaggtggtgcccactgtgtacatgaaggtggaccggagaggtactgaggacaaatcagttctctgtgaccagacatgagaaggttgccaatgggctgttgggcgaccaaggccttcccggagtcttcgtcctctatgagctctcgcccatgatggtgaagctgacggagaagcacaggtccttcacccacttcctgacaggtgtgtgcgccatcattgggggcatgttcacagtggctggactcatcgattcgctcatctaccactcagcacgagccatccagaagaaaattgatctagggaagacaacgtagtcaccctcggtgcttcctctgtctcctctttctccctggcctgtggttgtcccccagntannccannnnncacctcntaggacagctccagccacaggttgataaatctattgattgattgtgatagtaa

SEQ ID NO: 672028 - DNA, 4198 bp, Homo sapiens
ttttgttgaagaaagctggatacagtaaacggaaagaatcttggaagatgcttgactgctgtcttttctcagactagtctgaactggaaaacccccattcattctggattggtggatctgaagtacaaaatattttccagataagtaatggaacatcatctgtgatcgtctccagaaagaggccatcagaaggaaactatcaaaaagaaaaagacttgtgtattaaatattttgaccagtggtctgaatcagatcaagtggaatttgtggaacatcttatttcacgaatgtgtcattatcagcatggacatattaactcttacctgaagcccatgttgcagcgggactttattaccgctttaccagagcaaggcttagatcacatagcagaaaacattctttcgtacctggatgccaggtctctgtgtgcagcagagctggtatgtaaagaatggcagcgagtgatctcagaaggaatgctttggaagaagctgattgaacgaatggtacgcactgatcccctatggaaaggactttcagaaagaagagggtgggatcagtacctgtttaaaaacagacccacagatggccctccaaattcattttataggtcattatacccaaagattatccaggatatagagactatagaatctaactggcggtgtggacgacacaacttgcagaggattcagtgccgctctgaaaatagtaaaggtgtctactgtttacagtacgatgatgaaaaaattatcagtggcctacgagataattctattaagatatgggataaaaccagcctggaatgtttgaaagtgttaacaggacacacaggctctgtcctctgtctgcagtatgatgagcgtgtcattgtaactggctcttcagattctacggtgagagtgtgggatgtgaacacgggtgaagttcttaacacattgatccaccacaatgaggctgtattgcacttacgcttcagcaatggactgatggtgacctgttccaaggaccgctccattgctgtgtgggacatggcttctgcgaccgacatcactttacgccgtgtcctggttggccaccgggctgccgtcaatgtagtagactttgacgacaagtacatcgtgtctgcctctggtgacaggaccatcaaagtctggagcacgagcacctgtgaatttgttcgtactctcaatgggcacaagcggggcattgcctgtctccagtacagggatcgcctggttgttagtggatcatcagataataccattaggctctgggatattgaatgtggtgcctgtttaagagtcctagagggacatgaagaattggtccgatgcatccggtttgataacaagaggattgtcagtggggcctatgatgggaaaattaaagtttgggacttgcaagctgctcttgaccctcgagccccagcaagcacattgtgtttgcgcacattggtggaacattctggacgtgtgtttcggctccagtttgatgagtttcagatcatcagcagctcccatgatgacactattttgatttgggatttcttaaatgtgcctcccagtgcccagaatgagacccgttctccctccagaacatacacttacatctctagataacagtctgcactttcacccgtttcagggttttctagtcttgaactactggctacgtggctaccaaatgcctaagggagttcgttcacagctgagttatgaagctggaattggttctagacgctgggtagatgcaaagcagcctaactcttcaagtaccgacatttctcacctctgattccggctctcctttgagaaggagaccttagcttccccggcttcaagtagaacagaagcccgtttccttccctcatcagtgaaaaaatctaatgtttcaaatgtaaattgttcatagaaaaggaacatagaatctgttttacagaagtaaatcgaccgtcaagagaagacttggcctctaatttatattgctttgcactttggtttgatattaagaaacagcattcttcttcagtgaaattttgggtgccaaacacctacccagaatgtccagggctttcattttcaaaagttagcattctccttttgaccgtccaagtcattatgaattctgacttgttgtattaggaacatgttggacagtggaaaattttctctggattgttttagtaatatttttgggattatacttcctttctgtaccaatttcttttaatttaaagaactataagtcagttatattatctaccaacaggtaatatagctctttcttttattaactgttctctgtcccccaaccatctcctgatatttggtagagtaacacctttatacgtgtgcttgcctcctaatttaaaatactgtattcgcatgtagatataatgtacataacagtttaacctcaaagttgctggagtcagggccccctgtgcttgagacactaatacagagtgtgttcgcacttagccatgggctgggctcaagaacctgatacctgggttgatgtggattacctagaacccttcctgcagtattcatacagtgtttttattttgttgttgtcattgcgtgtgtgtggtttgtgtgtgtttttaatgagaatcttgttttaaaatgtaatttctaaggtttaacaccaaaatgttttatttgttgtggagtatatattatacaatagagaggtaccttaaacattttttgttcttattctttttctcataagtactcctgagtacaagtggtcacctcccatagtattcatttggcttcgctgtcaaaaatcattattctgtgcagtcgtggccctgggaaggggaaataagaaggccctgttgacgggctgtcttggctctggaattcatgcatcctggccttgccaaggttctggcagggcctgctggtgtgttggagcctgcagggcaggtcaggctggttcagaggcccatgctgaggggtgggtgctctgaagtggagtgaagcctcaagcccatgaatgccaccccagtcatctctggtgtcagctgctgctgtggccccagcaggttctcaaagctcccaagtcctccctacgacacagcccaaatgtgtaaatggcactgttgccctgacagtgcatggaaaggacgttggcatccaattggcactccttctcccttattcaatattaggtttgatttgcccttcgccattgtttccaaagatcaaggaatgtcaataacattttaaaggaccaataaacagcctcctataaagtaaacctcttcccgtggaagcacactctactactaaagggaaggcccctgggctctgatttgtcctttgcattgagaacggtgtggggatcagtgtgtgtgtatgtgatttgtttattgagttggctttgcttttttagtttttcttttaaaaataaaatccttccttcccatgttactaaattaatttatgtttttgagaggttgagtctcaaagtgtaaacaataaacctccattcataaggtggatgttgtaagcttgatggtggttgtgaaagtgatttagctttgaccacttttcatcctacagcttcaatatcaaactggttaggaaagcccagggggaagggagggggcaggggaggaggcaattctgaatgaatgaatggattttttgttgtttttgcatgtttaatatagaagttcccctcgttccttgggagatgatggcctttgaatatgcagacaacctttgaattgtgcctactaaattatagcaggggactttggcacccaaggagttctgactttctgggattataatagtaattcccagccatactctggactttattttgctaaccataactgagcaaatgtaaattactgctatattaatgttttaaagcactgggatagtctaattctaacttgtaattaattatgtttgccaattatctgtttgaaataaatttgtgtctgaacagctattgaaactgttaaattgtacagatattattcatgacagctttgtactgtggaatgtgcttaataaaaaacaaaaaagtttgacttttgtccagtaaattgctaagtaatgtcaataaatcgagtatgggtattatgcagtgcacctaatctggcttcatgcaattgttacttcagctactgattcaaagccaatactcttaataaagtgttgcaatactc

SEQ ID NO: 672029 - DNA, 951 bp, Homo sapiens
gacctctgggatgggcggtgcatgcctgtggtactcgcagtgcagaagggtctctggctcagtaagcgcctccgcatcatgtgggggcctgggttcccagccacggggttgtttccgcgcggggtcgtccggctgtgttgacagcaggccggtgtgcctcttcttggctgctgtcggcttctgcttcggtgggtgtacgccatggccttggcgctgcgttaattgagccttcctcgggatccgagtggagcatgctgggttttcccagctatcagcctggaaagcgttggcggggatatgggcttgccgtttctggcctacctcgggtgtgattcatgcctcgcaggtattcgagttgcaggtttgcctgactggtccggtgagcctgaagagtgttcgcgttgtgcgtaggcaagatccgccctttggtacgtcgagtcataggctgccgagactcaggtagctgacgaaggagattaaagaatctgcgtagacgttccactaggattcccactgtcttgggggatctatgatgccggatccttgcgtttctgagattctattttacaacgtgcatgcttaacatacaaatagataaaaagcacgaactgtgaggggtggcatatcggtcgctaccggaaaactcgctatgggggcgcggcatgtgccaacgcgatgcttggtatgccggatgtcaacctttcgctgcggcctccctgagtcaaatctcgggggtcacgtgttagtgtcaccttggggttcggcaatccgattctcatctggggatcctggtggggccacaaccggttggggctggtcaggcgggtcccccttgggggtgtggggcgcaccctgggccgattgacgctcgcctgggcccgccctgagccaaccgggggggggacccccggcggggggccatccgggagggggccagccgggggcgcaaaa

SEQ ID NO: 672030 - DNA, 860 bp, Homo sapiens
  misc_feature (138)..(138): n is a, c, g, or t
  misc_feature (165)..(165): n is a, c, g, or t
  misc_feature (171)..(171): n is a, c, g, or t
  misc_feature (180)..(180): n is a, c, g, or t
  misc_feature (191)..(191): n is a, c, g, or t
  misc_feature (194)..(194): n is a, c, g, or t
  misc_feature (206)..(206): n is a, c, g, or t
  misc_feature (788)..(788): n is a, c, g, or t
  misc_feature (791)..(792): n is a, c, g, or t
  misc_feature (796)..(800): n is a, c, g, or t
  misc_feature (807)..(807): n is a, c, g, or t
caaagaggtgctgaggcaaaagatatcaagtgctgtaacacctgtcacgatgtgctgtaggcatatagtggatgggggtgtgcgttcaagaacccagatactcccgagcagtgccggagagagggcttcagccagaanatgcaggagcagaagaatgaaggctgnccaggntgtatggcnttcttggaagntcnaataagcgtggnccgagaaacttcccactttgcccctgggaagagcttccagcagtcccatgtgcacgtccatgacttgcagagctttggccttgacaacatcaacatgacccactacatccagcacctgtcatttggggaggactatccaggcattgtgaaccccctggaccacaccaatgtcactgcgccccaagcctccatgatgttccagtactttgtgaaggtggtgcccactgtgtacatgaaggtggaccggagaggtactgaggacaaatcagttctctgtgaccagacatgagaaggttgccaatgggctgttgggcgaccaaggccttcccggagtcttcgtcctctatgagctctcgcccatgatggtgaagctgacggagaagcacaggtccttcacccacttcctgacaggtgtgtgcgccatcattgggggcatgttcacagtggctggactcatcgattcgctcatctaccactcagcacgagccatccagaagaaaattgatctagggaagacaacgtagtcaccctcggtgcttcctctgtctcctctttctccctggcctgtggttgtcccccagntannccannnnncacctcntaggacagctccagccacaggttgataaatctattgattgattgtgatagtaa

SEQ ID NO: 672031 - DNA, 461 bp, Homo sapiens
gggtctgccacagcatgggtgactcttaaaaccatgtctaagtgaatagaagccccgcataaggatcacatagtgcatgaattcactgctatgaaatgtccagaacaggcaaatatctagagacagaaagcagattaacagttccctagggcgccactgcagtccgcagtccggcctgggcaacagagcgagactccgtctcaaaaaaaaaaaaaaaaaaaaacggtcccctaggcctagggggttgggttggaccagattcccggggtgagggcaagggggtcccaggtgttcctttgggaaggttaattaaagattttcctaaaattggacttatgtggtgatggattgcacacactcgtgaattatacgtgaaaccacatgtgaccattttaaaatgtggattaactctcattccaggttttgacttacatatcctgaataagggttgttttctttaa

SEQ ID NO: 672032 - DNA, 795 bp, Homo sapiens
  misc_feature (723)..(723): n is a, c, g, or t
  misc_feature (726)..(727): n is a, c, g, or t
  misc_feature (731)..(735): n is a, c, g, or t
  misc_feature (742)..(742): n is a, c, g, or t
tgaggcacagagaggtctgggggatttgcctctccccaggctagtgtagcaggcctggggctgcttagatttcaatgcgcctgctctttgattgctgcccttctactcgcgttgttatccgttcctcgcgggtgcccgactcgtcatgcctgccatcactgttcttctgctggtctgcctgcggctgggcggtctaggcaaggcagagtctctgtgtacccgctcgctcaaggctgcccatggcctgtggatcagcatctcgagcagagtggtcaggatgacgatggggctgaggccagagtgaagtcaggtcagccttggtgcgtctttggagagctgcttctcagcctggaccccctgtgagaacacccacctaaatgctgccaggagaggtactgaggacaaatcagttctctgtgaccagacatgagaaggttgccaatgggctgttgggcgaccaaggccttcccggagtcttcgtcctctatgagctctcgcccatgatggtgaagctgacggagaagcacaggtccttcacccacttcctgacaggtgtgtgcgccatcattgggggcatgttcacagtggctggactcatcgattcgctcatctaccactcagcacgagccatccagaagaaaattgatctagggaagacaacgtagtcaccctcggtgcttcctctgtctcctctttctccctggcctgtggttgtcccccagntannccannnnncacctcntaggacagctccagccacaggttgataaatctattgattgattgtgatagtaa

SEQ ID NO: 672033 - DNA, 602 bp, Homo sapiens
  misc_feature (17)..(17): n is a, c, g, or t
  misc_feature (19)..(19): n is a, c, g, or t
  misc_feature (22)..(22): n is a, c, g, or t
  misc_feature (132)..(132): n is a, c, g, or t
  misc_feature (136)..(136): n is a, c, g, or t
  misc_feature (143)..(143): n is a, c, g, or t
  misc_feature (397)..(397): n is a, c, g, or t
  misc_feature (459)..(459): n is a, c, g, or t
gcacgagtgtggaatgncnccnccacaaatctctgattgggaagaaaggacaacagaagactgtctaaaggatgcctggattccttgttatctcaggactctaaatactctaacagcagtccactggaatcnccancactggncagctgttagagtatttagagtcctgtatctctgtgaaaaacacaattttgcctttttgtaattctatttgagcaagttggaagtttaattagctttccaaccaaccaaatttctgcattcgagtcttaccatatttaagtgtactgtggttcaaagaagctattgattctgaagtagtgggttttgattgagttgactgttttttaaaaaactgtttggattttaattgtgatgcagaagttatagtaccaancatttggttttgtacagacattatttccactctggtggataagttcaataaaggtctatccnaaaaaaaaaaaaatcgaggttttgcggggggagaagggtttaaaggccatgcatgtgtctaaccgttttaaagggacatgcgggccaatgggttattcaccgtatcttgctattgaagaagcagaaggaagagaaaaaagaat

SEQ ID NO: 672034 - DNA, 1177 bp, Homo sapiens
attatggatttagtatccaaaagacaagtgtttttaaaaagaacctattaccatacttcgtgtatctgttctatagagttaaaccttttaacttccatgagccaccatgcccggacccttattttactttatcctcctgattatttgaattatgttacactaagcatgtattttataatcaaaaataattaagatttaaaaccaatgtatttgactactaagaacagcaaattatataaatcagttgcacatcacataatgttgttaacagaggctgtttagcactaatttgaccaaatctatagtcaaagtttgcattctacttgaatttatttggaaatttgctgttgtattacttattctttgccttgttctctgtgaagtcctttcctaaaaaagaaacttatacaatttagttcacaaaactaacgttgaccgtctttctctgtcagcaaatgaaaactaaatcatctatcacttgagaaataattctgatactcttcattcctataacagtacttaccgcatagacctcataggatggtcgaacttatgctgccacatatcagtacaccagtaaccacagctagctgtaaacattcgaacaattcagttcagtcaaactagccatctttcaagtgctcaacaggcactggtggcctatcggttaccctaactgacccagccaattcataggctaatggcccgtcatcatagaaaaggtctaattggacaaacatcgggtctaggacactctaatgtagcacttgacccgttaacaaacaatccattaaggagttatatgcgcaaggtaaacgtgactaaatttgacataacgtcaggctggcgacaaaaaggcaaagctgaagtcgcaccagacacacaagaggtatcacaggtaccgcacagagcaacacggaggcgcacagggaaaaacctgcccacgataccgtgaaaacaccaagacgtcgaaaaaaaccaaacaggggagcagctaataaatctcaaggaaaacagacaacgagccaccacgcaggtcaacggcccacaaggccgacatagcgcggcacgacacaaggcggagacatgatagtgtagcaccatggtggaagcaaccatgagacatcaatacaagcgaggcacacgacccagtacagacgagaagccacagacgagc

SEQ ID NO: 672035 - DNA, 500 bp, Homo sapiens
agggctagggatcgctccggagctaccggttaacatggaagtatacatgcactctggaaagtgcactttccagaggtgagaaaacaaaaaagacatacacaatgctgagattatcaccaataacatcccagacctcaaatatgagagggagacagtcctggagccacagagaagtgaaaaacccagaagcagataataagagaattggactttctatttcatttattttgagagagaatctcactttctatctgcagtgcccctcccagaaatctgcccaggaccacacttacccaccaacttatggtttctactacactggaaaaagtaagatcaaggtggacaaccagcttccctaccacctggggttaactggcaggagatctatccctgcctcaactgacaggaagcatcaggaacacccaaagggagacatatccctgaggacaggcagacacaaaggacgcagagaatgactaccatccccagtcctggaaact

SEQ ID NO: 672036 - DNA, 1075 bp, Homo sapiens
  misc_feature (870)..(870): n is a, c, g, or t
  misc_feature (932)..(932): n is a, c, g, or t
agcggcgtggatgagggaacattctgcagtataaagggagcaggaaggcgggagacagcgcagtttgaatcgcggtgcgacgaaggagtaggtggtgggatctcaccgtgggtccgattagccttttctctgccttgcttgcttgagcttcagcggaattcgaaatggctggcggtaaggctggaaaggactccggaaaggccaagacaaaggcggtttcccgctcgcagagagccggcttgcagttcccagtgggccgtattcatcgacacctaaaatctaggacgaccagtcatggacgtgtgggcgcgactgccgctgtgtacagcgcagccatcctggagtacctcaccgcagaggtacttgaactggcaggaaatgcatcaaaagacttaaaggtaaagcgtattacccctcgtcacttgcaacttgctattcgtggagatgaagaattggattctctcatcaaggctacaattgctggtggtggtgtcattccacacataccacacaaccacttaacacacaaaaaaaaaaaaaaaaacaacattaatcactgtctaaaggatgcctggattccttgttatctcaggactctaaatactctaacagctgtccagtgttggtgattccagtggactgtatctctgtgaaaaacacaattttgcctttttgtaattctatttgagcaagttggaagtttaattagctttccaaccaaccaaatttctgcattcgagtcttaccatatttaagtgtactgtggttcaaagaagctattgattctgaagtagtgggttttgattgagttgactgttttttaaaaaactgtttggattttaattgtgatgcagaagttatagtaccaancatttggttttgtacagacattatttccactctggtggataagttcaataaaggtctatccnaaaaaaaaaaaaatcgaggttttgcggggggagaagggtttaaaggccatgcatgtgtctaaccgttttaaagggacatgcgggccaatgggttattcaccgtatcttgctattgaagaagcagaaggaagagaaaaaagaat

SEQ ID NO: 672037 - DNA, 1429 bp, Homo sapiens
  misc_feature (138)..(138): n is a, c, g, or t
  misc_feature (165)..(165): n is a, c, g, or t
  misc_feature (171)..(171): n is a, c, g, or t
  misc_feature (180)..(180): n is a, c, g, or t
  misc_feature (191)..(191): n is a, c, g, or t
  misc_feature (194)..(194): n is a, c, g, or t
  misc_feature (206)..(206): n is a, c, g, or t
  misc_feature (1224)..(1224): n is a, c, g, or t
  misc_feature (1286)..(1286): n is a, c, g, or t
caaagaggtgctgaggcaaaagatatcaagtgctgtaacacctgtcacgatgtgctgtaggcatatagtggatgggggtgtgcgttcaagaacccagatactcccgagcagtgccggagagagggcttcagccagaanatgcaggagcagaagaatgaaggctgnccaggntgtatggcnttcttggaagntcnaataagcgtggnccgagaaacttcccactttgcccctgggaagagcttccagcagtcccatgtgcacgtccatgacttgcagagctttggccttgacaacatcaacatgacccactacatccagcacctgtcatttggggaggactatccaggcattgtgaaccccctggaccacaccaatgtcactgcgccccaagcctccatgatgttccagtactttgtgaaggtggtgcccactgtgtacatgaaggtggaccggagaggtactgaggacaaatcagttctctgtgaccagacatgagaaggttgccaatgggctgttgggcgaccaaggccttcccggagtcttcgtcctctatgagctctcgcccatgatggtgaagctgacggagaagcacaggtccttcacccacttcctgacaggtgtgtgcgccatcattgggggcatgttcacagtggctggactcatcgattcgctcatctaccactcagcacgagccatccagccatcctggagtacctcaccgcagaggtacttgaactggcaggaaatgcatcaaaagacttaaaggtaaagcgtattacccctcgtcacttgcaacttgctattcgtggagatgaagaattggattctctcatcaaggctacaattgctggtggtggtgtcattccacacatccacaaatctctgattgggaagaaaggacaacagaagactgtctaaaggatgcctggattccttgttatctcaggactctaaatactctaacagctgtccagtgttggtgattccagtggactgtatctctgtgaaaaacacaattttgcctttttgtaattctatttgagcaagttggaagtttaattagctttccaaccaaccaaatttctgcattcgagtcttaccatatttaagtgtactgtggttcaaagaagctattgattctgaagtagtgggttttgattgagttgactgttttttaaaaaactgtttggattttaattgtgatgcagaagttatagtaccaancatttggttttgtacagacattatttccactctggtggataagttcaataaaggtctatccnaaaaaaaaaaaaatcgaggttttgcggggggagaagggtttaaaggccatgcatgtgtctaaccgttttaaagggacatgcgggccaatgggttattcaccgtatcttgctattgaagaagcagaaggaagagaaaaaagaat

SEQ ID NO: 672038 - DNA, 153 bp, Homo sapiens
ccggacctctctgctccagagtgctggattcgaggctgacccaccagcctggccactgaaaatattcaaattgactaaaactgtatttacaaagatctagagatttcaactataacgctcacaggaggaaactcaggaaaaggtagtatagtg

SEQ ID NO: 672039 - DNA, 229 bp, Homo sapiens
gggcccgggttttaaaaatttaacctttggggtttggggtccccccccagggctcccgcccccctttttggttgggttttgggacctttttggggtttcggttttggcccaagggttaaaaaacccccgtttggggttttttttttttttgggaaggggggttggggtaaggggcccccggttcttttttttttttttggcccttcccttaaaaaattttttgagggga

SEQ ID NO: 672040 - DNA, 265 bp, Homo sapiens
attgctgctgttcttgaggttccccgacggcaggtccagctatgactggtagccctcacacgataactagtagataataacatatatccaacccttggtaaatgccaggactcatcctaagagcctacatcgataaactcctttaatcttcacaacagctgggaaatatatatatatacttatcactccttttacagggtgagaaaacttaagggacagtacagattatctcccttgcccgtaggctcagagaagcttgtaagcc

SEQ ID NO: 672041 - DNA, 699 bp, Homo sapiens
  misc_feature (277)..(277): n is a, c, g, or t
gaaaccagcaagccaaaagacagcatgacaaaatagagaaattcagtcacgtagggaaatgcacagtgaaacagcaccctgagatacctcttcacacccaccgggattgtgataactgatcaatagtgacaaggacccatacaagtgtgtatgaggacatagagaagctagaaaccttgtacacttgctggtgggaatgtgacactatggcaggcactgtagaaaacactatggaggttccgcagaaagatcaaggctctagaatcaactatatgancctagcaagttccattgtcgtagggaatataccccaaaacagacttgcattcacaacagtactgagaacaaatagcacatacagtgcagcatgttcacaggcaggcgttcgtttacaatagcgaaaagctgtggacaacagctcacatgtgtcatcactgagttaatggataacgccaatagtcggcgattgtgcatcacatgcacatattatctcagctattaaaagaaggaactgacgtactggatacagtggtgacaacctggcatcaactctgtaacaaaacaggtgctatggtgaaagaagacagaagctatcaccatatttgatgggaagtgactgcttcactgtgtacaagtcgctcttgaccaggtgaaacgtgcggaatacgaaaagtgacctagacaccatgggatagccag

SEQ ID NO: 672042 - DNA, 860 bp, Homo sapiens
  misc_feature (1)..(1): n is a, c, g, or t
  misc_feature (221)..(221): n is a, c, g, or t
  misc_feature (229)..(230): n is a, c, g, or t
  misc_feature (300)..(300): n is a, c, g, or t
  misc_feature (305)..(305): n is a, c, g, or t
  misc_feature (309)..(310): n is a, c, g, or t
  misc_feature (312)..(313): n is a, c, g, or t
  misc_feature (316)..(316): n is a, c, g, or t
  misc_feature (324)..(324): n is a, c, g, or t
  misc_feature (331)..(331): n is a, c, g, or t
  misc_feature (333)..(333): n is a, c, g, or t
  misc_feature (341)..(341): n is a, c, g, or t
  misc_feature (346)..(346): n is a, c, g, or t
  misc_feature (348)..(348): n is a, c, g, or t
  misc_feature (360)..(360): n is a, c, g, or t
  misc_feature (371)..(371): n is a, c, g, or t
  misc_feature (378)..(378): n is a, c, g, or t
  misc_feature (389)..(389): n is a, c, g, or t
  misc_feature (402)..(402): n is a, c, g, or t
  misc_feature (413)..(413): n is a, c, g, or t
  misc_feature (420)..(420): n is a, c, g, or t
  misc_feature (553)..(553): n is a, c, g, or t
  misc_feature (587)..(588): n is a, c, g, or t
  misc_feature (670)..(671): n is a, c, g, or t
  misc_feature (694)..(694): n is a, c, g, or t
  misc_feature (738)..(738): n is a, c, g, or t
  misc_feature (761)..(761): n is a, c, g, or t
  misc_feature (792)..(792): n is a, c, g, or t
  misc_feature (796)..(796): n is a, c, g, or t
  misc_feature (838)..(838): n is a, c, g, or t
nctttttgtacattaaactttagcagcaagaacattgttttctcttagatttgcagtagctttggggcaaatgataaatcctctggaactgccattggtaactcaacaatgatgaaaagaactaaacaacaaatgaataaattaacctcaacatagcaatttccagtccacacaatatggggcagtttgtaataagactcggtgaaaatcctgtctctgcnacttggcnngctgtgcagctatgggcaagttattcaactctcctaacctcaatctccccatctaaaaatggggcatcgnggggntgtnncnnggnttacgtgngtcggtntntacgaagngcttngntcagtacctggnacacagtaaanggttgtnactccacaganacttttatttgtnaatggtaaatnctctggnaacggtgactatgctcacttgccccattatcagccaaaaccaaaatgtgacaatattggtcttacctatgtggtttctgttttattgagaatagctagtgcactgcttattattttttccacgttttaagctnacagctttattgagctgtaattcatataccaaannattcaccctcttacagtccagtggtttttagctctattcacagcattgtgcaatcaccaccatctaattcagttccccccgnngcaactcagtgcccactaaccgncactcctcaccctagccctaagtgaccaccaatctgctttttgnctttatgagtttgcttattaggncctttcatatacatggaatcctacaacatgnggcnctttgcctctggcttctttccctggcacaatattttcaaggntcatccatgttgcagcatgtgc

SEQ ID NO: 672043 - DNA, 196 bp, Homo sapiens
gcatacagattctctgtctcacaattcggagaccatcagagctgtgaatagtgttacagtgaggcggcatcatagtccgcgtatcacgtctgaccagtatgggctcaattctgctaagggatatatgacgtgtgatgagctgacacagaggcagactgctgaaagagaacgcgtggtgggtcgagctcgatcgtaa

SEQ ID NO: 672044 - DNA, 377 bp, Homo sapiens
tcgtgtctatgccacgatcctacctcctctagactatggagcagacccagagcctctcacctgtaccatagcctacctcctatgacattgacagactcagatcctcataccagggccagatcctacttcctcagatattgacagatccagatccttatacccatgctcagatactacctcttcatctactgacagacccagatcctcataatcctaatgggccagatcctgccttctcagacatgaacagacccagatccttatacctgctccagaccctacctccgcagacatgaacagacccagatcctcatactcatgccagatcctacctcctcagacacggacagactcagatcctacctcctcagatatgg

SEQ ID NO: 672045 - DNA, 809 bp, Homo sapiens
  misc_feature (97)..(97): n is a, c, g, or t
  misc_feature (104)..(104): n is a, c, g, or t
  misc_feature (207)..(207): n is a, c, g, or t
  misc_feature (222)..(223): n is a, c, g, or t
  misc_feature (265)..(265): n is a, c, g, or t
  misc_feature (267)..(268): n is a, c, g, or t
  misc_feature (270)..(270): n is a, c, g, or t
  misc_feature (372)..(372): n is a, c, g, or t
  misc_feature (382)..(382): n is a, c, g, or t
  misc_feature (390)..(390): n is a, c, g, or t
  misc_feature (422)..(422): n is a, c, g, or t
  misc_feature (504)..(504): n is a, c, g, or t
  misc_feature (560)..(560): n is a, c, g, or t
  misc_feature (568)..(568): n is a, c, g, or t
  misc_feature (571)..(571): n is a, c, g, or t
  misc_feature (585)..(585): n is a, c, g, or t
  misc_feature (621)..(621): n is a, c, g, or t
  misc_feature (646)..(646): n is a, c, g, or t
  misc_feature (665)..(666): n is a, c, g, or t
  misc_feature (720)..(720): n is a, c, g, or t
  misc_feature (745)..(745): n is a, c, g, or t
  misc_feature (805)..(805): n is a, c, g, or t
ggctccgggcttcctgcaagccgaatttagctctgccaagccacgtggaccgcagcgggctcggcagaggccgagcctgggagacgccggaggcggnctgcggngcggggacctgatcggcgccccgagaggagctccccgctctactggacgcggccctcaagctggcggggctaaggaaaaacgcccgggaggcccgggagccantggggtccgtttcannaggaagacgggcacgcaccgagaggatggccgatgccccgcngnncncgagtcgggggcacggtggggagaaggggccgatcccctgctggcgaccgggcagagcacccacttcctctaagggcgcgggactcgaagtgggatttaggnagggggaaangaggagcntgggctggaagactcttgcggccagaaccgcnttcagagccacaaagccgggcactgcggccggccctggtcccggccccggccctggcccagcccttgccctgagctcgcctnccgccgctttttccttaccagatgcggaggctgcggctggatacttggggtttgcngattacgnttncatgttattcagcnctccctcttttacagggaagcgggggcggtggaganttcttttgctgaaaggcagagtgcngcgctttttccttgctccnnctggagagagatcaaccttttgcagtggaaggggagagtcccccagcctttgtntcatcagacggctgctgtagtacanggattcaggccagggcccgcatggccggacttcttggttcaaatcctgcactgccactcnacgg

SEQ ID NO: 672046 - DNA, 836 bp, Homo sapiens
ctccgtgtggggtgcgcaggagtgtcgcccggcgcgtcactgtctgtggtctggtgcgagccactgtgtggtgccgccgcagcaccatgtgctgaccaccgtcagcactcagcgcgggccggtgtacatcggtgagctcccgcaggacttcctccgcatcacgcccacacatgcagcatgctggcatgtgtccatgctgtgactgcccatgtgctgttgccagcgagctgcaatgtactgtgaggtgctgcagtgtgtgcacctgtggtgtgcctgactgaacatcactggtgtgtacagtgcaaagtttggccaatgaattactgtgcatgaccctgcatggacccctactgcctgactgctgcctgtgtgctaacgctgggttgtacggaagactgcccactggcacacaattgtgctgccaagaatccccgcttgtgaactaatggtcatccactgcacgtgtgcccccgagtgcgtggacctctttctatctctgatgatcttctgatgatgagagcccttctccatgtgacgacctgcattgccttggacccacatcaccatcccgtgagtccctgagtgcatgggctatgggtgtgctgtgaccaagtcggtacacgccttgagcagcgtcagtgccaggggtgtgactcaacaatgtgccttggcattgatcaaacctcgctctatgtctcttactggcgcctgctttccagccttgccactggtgattgccaaccccagccctgtgtgtccttgactgccaaacaggtgtaccagcactgggctggtatggcgtaatgtgcccatcacagggatgccggtgctctgta

SEQ ID NO: 672047 - DNA, 338 bp, Homo sapiens
ccgtttccccctaaaaatcaatcactccctactttgtaatctcagtagtaactttctatctctcacattctgatctacattatgtgtgaagttcattttctacacctccttaaaggtggaaaatgtctcagtgcagtatctagaaaaatcactggcataatgtctaataaatatttgttaaattacaaaaaaaatgggattcaccattcacttctccccgaagtgtcttgatcttatgttttaatcagatttatacttacagcaaaactataatgttcttatatgcccattattttctaaagcagtattaggacttgtaagacaagatggggccggct

SEQ ID NO: 672048 - DNA, 628 bp, Homo sapiens
agcgggtcggcagcgctgctcctggagccgctggagggtgcgggtttgtgctgcggtggtttctgtggcggttgctgtggcggcgtttggcggttggagacgaaatccaggtacttcactagactggtaccttctgccaccatgggggagcttttccggagtgaagaaatgacactggccctagctttttctacgagtcgatgaggctgcttagttgttgtgtcagtgaattagtaggaacttggcacggttcaggtttcgtgacttaaactccagatgtgaatgctttgtccaacggtaacactttgtgcactgacagcttagcacgatgtgcacaggacaatggaatcgaacgcttcgatttgtggagaactgagatagagcaaagctaacattccgattatggacaccggtgaataacccagaggttcccttcccccgggacatgattgacttagaggccatagttttgacgaagattgacaatgaactgaaggaaatcaactacaaatccaggaagctctgaagagaaacttcctggaactggccgaattacaatttatacttcgcagaactcagcaatttgttgatgagatggcggatccagacttgttggaagagtcctcat

SEQ ID NO: 672049 - DNA, 100 bp, Homo sapiens
tcatcaacccttcatcaatcccggaacactctattaaacatgatttacttatatgactaaaacaaataaatgaatgtccatgtggatagggtttcgatga

SEQ ID NO: 672050 - DNA, 552 bp, Homo sapiens
cgcggtggctcacgcctgtaatcccagcactttgggaggccaaggtgggtggatcacagggtcaggagattgagaccatcctggctaacacagtgaaaccccatctctactaaaaatacaaaaaaattagccgggcatggtggcaggcgcctgtagtcccagctacttgggaggctgaggcaggagagtttcttgaacctgggaggtggaggttgcagtcatgcgactctaccccagcctgggtgacagcaagattctgtctcaaaaaaattacaactaacaataaaatacaaatacacagacatcagtcatcggctttagggcccaccctaatctattcactgacctcatcttaacttgatcgtatctacaaagcactctatccccacaataaggtcaccatttctgagcgttctagtggcacattaaaactcggggtacaggcggaatggctatctaaccccagtaccacttcgaggttcaagaattcaacctaagcctttacctgtacagctctccgggccattcaaggaccattacaccacaacgact

SEQ ID NO: 672051 - DNA, 141 bp, Homo sapiens
cttgggtaagttactggacctcttggaggcccagggtctttatctgtaaatgggatgaggatggactcttcatggggctgcaatgtaacaacacatagaggcgacacggctggtccatacgaggcgaggcactctcctaaa

SEQ ID NO: 672052 - DNA, 461 bp, Homo sapiens
catctctccccctttcctggagcctccctattccctgagacataccatatggaaattaggccaattaataaccccacaatggcctctaagtgttccagtgaaagaaagagttgcacatccctgactgtaaatcaaaagctagaaatgatcaagcgtagtgaggaaggctgaaacaggccaaaagacaggcctcttgcaccagttagccatgttgtgaatgcaaaggaaaatttcttagaggaaatcagaagtgctaccccagtgaataaaaaaatggtaagaaagtgaaacagccttattgctgatagggacaaaatatgaatggtctggatggaagatcaaaccagtcacaatagtcccttaagccaaagcctaatccagggcaaggccctaactctctcaactctatgaagtctgagagaggtgagaagtttgaaagtagcataggttagttcatgagg

SEQ ID NO: 672053 - DNA, 375 bp, Homo sapiens
gagaaacgctgtgacgttgatatgtactacagatatataattatgcggacttaagagctacaagagtagtttagagagaacggatatctaagtgcgctataaggatgttacagcaagtgagtaccagaagcttcacattctctaataggagaggacttagagaaacgatagatgatgctgccagaaaccagatgtgagcatagctgagtaggcatgactcgcacctgcgcaggagaactatgtatccgccagctctgatacagatatgagttgtgattagaggacgcctagctgtgtcagagagaccataatgagtagagaattcattgggagcagacgatcatgcttataagctctggaagcctatcatcgttt

SEQ ID NO: 672054 - DNA, 185 bp, Homo sapiens
tgcactgtagatcgctctgcacctagatcgctctgacctgtagatccctcagcacttaagttacagttagtctctaatgtgctttgaagcttgctttagcagttccaggtctcttctgcggacaggggtggctcggggacaaccatattcgtccagctgcaaaggtatggagcgatctacagggg

SEQ ID NO: 672055 - DNA, 270 bp, Homo sapiens
  misc_feature (63)..(63): n is a, c, g, or t
  misc_feature (96)..(96): n is a, c, g, or t
  misc_feature (111)..(111): n is a, c, g, or t
  misc_feature (115)..(115): n is a, c, g, or t
  misc_feature (119)..(119): n is a, c, g, or t
  misc_feature (123)..(123): n is a, c, g, or t
  misc_feature (165)..(165): n is a, c, g, or t
  misc_feature (181)..(181): n is a, c, g, or t
  misc_feature (184)..(184): n is a, c, g, or t
  misc_feature (193)..(193): n is a, c, g, or t
  misc_feature (197)..(197): n is a, c, g, or t
  misc_feature (200)..(200): n is a, c, g, or t
  misc_feature (205)..(205): n is a, c, g, or t
gtcctgagtcccggagagagctccagcaataggggccatgtcgccatagccccagcctctcgntccgcagcctcagcagcgtcccagccggctggnttcatagctcgggtncatngcancatngttcctgggttgagggggcaatcgggcacgctcctccccatnggttgccatcatgttnatnggatatcgnactntgnccagnacctcaatgaccttaggaggggacttcagctcagctgcgatttacttccggagggcgcatcacca

SEQ ID NO: 672056 - DNA, 467 bp, Homo sapiens
  misc_feature (13)..(13): n is a, c, g, or t
  misc_feature (38)..(38): n is a, c, g, or t
  misc_feature (63)..(63): n is a, c, g, or t
  misc_feature (69)..(69): n is a, c, g, or t
  misc_feature (289)..(289): n is a, c, g, or t
  misc_feature (354)..(354): n is a, c, g, or t
  misc_feature (455)..(455): n is a, c, g, or t
  misc_feature (457)..(457): n is a, c, g, or t
aacccgtctcctnaaaaaaaaaccccaaaaaaattaantttttctttttcccaaaggtgcccnaggccnacccccctatgtcacgccctgaaagtagttattgagaaaagtcgtcccctttcccccttttcctataacccaaatagacaggaatggaagattctccctcggggcctgaaagcttgcgggatgaataactcctcctcctcaggcccagtccccaaggtacaaacttgcacccagcagcaagatagcagaggcaggaagagagctggctggaagacacgtnccccctgaagatcaagagggaggtcgccctggtactacatagcagtcacgttaggctgggacaantcctgtttacagaggactataaaacccctgccccatcctcacttggggctgatgccattttaggcctcagcctgtctgcatgcaggcgctcattaaaaccnantgttgctcca

SEQ ID NO: 672057 - DNA, 104 bp, Homo sapiens
gtcgtccgaggctgtccgccgcttgccaccattcacccgagtaccccgggaccccgccgcgtcctgcggggagaatatgttgcttgaagttctgctgattaggg

SEQ ID NO: 672058 - DNA, 374 bp, Homo sapiens
tcgacctctccacccagaaacttccaggcagctcagccttcaggcaacagagagttattagaaaccccacaaagttctcctgccaggagcggtggctcacacatgtcttcccagcactttgggaggctgaggcaggagaatcgcttgaggccaagagttcgagaccagcctggccaacatggagaaaccccatctctactaaaaatacaataattagccgggtgtggtggcgcccacctgtaaccccagctactttggaggctgaggcagaagaatcgcttgaacctgggaggcggaggttgcagtgagccaaggtcacaccactgcactccagcctgggtgacagagcgagactccgtctcgtcgacgcggcc

SEQ ID NO: 672059 - DNA, 247 bp, Homo sapiens
  misc_feature (11)..(11): n is a, c, g, or t
tgtgtcaaatnagactggagttacagcaaaggacttcccacattccttgcactcataaggcctttctactgtgagttcttcgatgctgaaggagagaatggcttcagctaatttttaccacattccttgcactgatctccaggatgaactcatgtgtttcttgagactggagctttcagcaaaggatttcccacattcagtgtgctcataaggcttttacccagtgtgaattccttggtatgaacac

SEQ ID NO: 672060 - DNA, 893 bp, Homo sapiens
  misc_feature (628)..(628): n is a, c, g, or t
  misc_feature (763)..(765): n is a, c, g, or t
  misc_feature (767)..(767): n is a, c, g, or t
  misc_feature (803)..(803): n is a, c, g, or t
  misc_feature (859)..(859): n is a, c, g, or t
tggctgctgcgtgggagtaggagggcgcttccggtggcggactgcagtgccgtggcgggcggggtgcggggctgcggctgcggtggcgcagcaggcaggtcagcgggactatgatctcctggtgtgtctggcggggggatctggtggcctggcttgtgccaatggatgtgcctgctcagctgggaacggaatggtgtcctgtggtggactacgttggaaccttctccccaaggcaccctgtgtgggtgcctctggctggcaacctggctgttcaactgttggtgcttgcaatccccaagaagctgatgcaccaggctggcactgctgggaggcctgatccaagatgcccccaactatggctgggaggtggccagccgtgccgcatgactggaggaagatggcagaagctgttcaaaatcacgtgaaatccttgaactggggccacgtgtccagcttcaggacagaaaagtcaagtactttaacatcaaagccagctttgttgacgagcacacggtttgcggcgttgcaaaggtgggaaagagattctgctgtcagccgatcacatatcattgctactggagggcggcgagataccccacgcacatcgaaggtgccttggaatatggantcacagtgatgacatcttctggctgaaggaatcccctgggaaaaacgttggtggtcggggccagctatgtggcctgggagtgtgctggcttcctcaccgggattggggctgggacaccaccatcatgatgcgcannncncccttccgcggctttcgaccagcaaatgttcctccntggttcataggaggcacatgggcatcttcatgggcacccggtttccttgagggggntgttgccctttccggcgggttcagggaggcttcc

SEQ ID NO: 672061 - DNA, 468 bp, Homo sapiens
  misc_feature (82)..(82): n is a, c, g, or t
  misc_feature (242)..(242): n is a, c, g, or t
  misc_feature (306)..(306): n is a, c, g, or t
accatattgatattggaaactatttgattgctgtggtactggcgattaggcttacgctacggtgactattagacaatatacngtttattagagaattgctttggaattgttgctgatatgcggcggtgctgggtataagagcatgtgctggagataagtaccttttgctgtggaaaatgggaaccgggtaaattgttgcaaagatagtgatgtgatggggtgacacccggtcaaggggtgtncctggcaaaatgggcacgtggcacagcctaattggcgcgtttgggtgccggatagaatgccgtnaaaaaaaaatatgcacgaggggaggggtggtaagatcgatgaacggggggcaaaaaagcgatatttgcatttagcgggcggtaaacagagggtataataagcttgagccttgagagtgcttaggcagaagaatcgtgctagaacgaggggtaagatggagac

SEQ ID NO: 672062 - DNA, 329 bp, Homo sapiens
ggctcggtacctaccttcctgctccccatagtaaccttgctcgtgtaatccgtcaccgcagttgtgagaccgaacatgaaggattgcatccacccgagtgactggtgccatagtcctatccttggtgcatcaccccaagtccttcgacgtagtcctcataggtgccctggtgcctagtcctcggcgactgtctgcagcatgggcagaaagtgctcaaagtccagcaccttcacattcatctcatcactcttggggttccccaggaccttgagcacctcggcgttggtagggttctggcccagggccctcatcacatccccacactggct

SEQ ID NO: 672063 - DNA, 424 bp, Homo sapiens
tacatggtcggacattaacaagcagtgagtaaggctggttgattccaatgcagttaatgcgctatccacgtctccgaaggacaactggaacagaagacagccatgtcactcctgtagaaagtcctatccccttgttttgcattgctaaaggaactgcattccagaagccactgagaaatacttaggaggaacagacgacactttcaaaaagaaagacctgttcctggacttgatagcagatgtgatgtttggtgtcccatctgtgattgtggcccggagccacagagatgctggagaacccacctacatgtatgagtttcagtaccgtccaagcttctcatcggacatgaaacccaagacggtgataggagaccacggggataagctcttctccgactttgggggccctatatttaacagaggg

SEQ ID NO: 672064 - DNA, 465 bp, Homo sapiens
cctcaaggtccttagccccaagggctttaggtggtcagaatggcaaatgagcattctcttcaacatagtcactagctgcatcaatctctaacattaagagtccgcctgcccttttaagccaggcattgatttctcctctctagctattaaagatttagatggcatcttcttccaatagaaggctgttttgtctacacactgaaaatctgatatttaatgtagccactttcaaatcaatgaccttagctagatcttctgaataacttgctgcagcttctatattagcacttgctacctcaccttctatttttatgttatagagaaggtttctttccttaaacctcatgaatcaacccctgctagcttcaaccttttctgaagcttcctcacttctctcagccttcatgtaattgaagagagttagggtcttactctgaattaggctttggcttaagggacccttgg

SEQ ID NO: 672065 - DNA, 154 bp, Homo sapiens
ggggttaaaaaaattttttttccggggccgcccccgtttaaatgaaaatttttttccccctgggccccttgccccttaaaaaaaaccacctggggggaaaaaaggggccaaaatttccaaaaaaaagaccgtttttggggggggggtgtcctta

SEQ ID NO: 672066 - DNA, 138 bp, Homo sapiens
tctagaggatctcgccacggtaattgccacggagattaacttgtgcttcaaggcagctggagcagggcaattacacttactccaactgatttctgggtgtagaggatgcagaggctacaagatggagagcaggagggg

SEQ ID NO: 672067 - DNA, 546 bp, Homo sapiens
gtgaggtgcataaggctatgtatagatgaggtagtctggctttaatatcgggtgtggaggccacccggcaaagtgtttggtaacaagattaggtatatccaaagcagagtaaattggacagtgtaatcggacaggcaaagaagtctctggaattcagctttagtgggtgtctctcagttggtatgtaatgtggactctcagagccagcagacaggccagggggccactagtgaggtcagggggggggagggcccatcacaacacaaaggggggagggacggctcatccggggcgggagggaggacagggcacagtctcattcatttacagccagtgagagctggagtatagcaatggcccaaagaggaagatgggccaaggctcctagagagttttatctggagcccgcagacctgagtggtggatccagaacggacgatttaacaggacgcagcatcagctggcagacagcagcccagagaccagtatagtgtggcaacctacttctgaaaactagcttgaggccagagagtccttatgtgccag

SEQ ID NO: 672068 - DNA, 1163 bp, Homo sapiens
  misc_feature (29)..(29): n is a, c, g, or t
  misc_feature (147)..(147): n is a, c, g, or t
  misc_feature (157)..(158): n is a, c, g, or t
  misc_feature (228)..(228): n is a, c, g, or t
  misc_feature (241)..(241): n is a, c, g, or t
  misc_feature (251)..(251): n is a, c, g, or t
  misc_feature (287)..(287): n is a, c, g, or t
  misc_feature (313)..(313): n is a, c, g, or t
  misc_feature (315)..(315): n is a, c, g, or t
  misc_feature (320)..(320): n is a, c, g, or t
  misc_feature (410)..(411): n is a, c, g, or t
  misc_feature (784)..(784): n is a, c, g, or t
  misc_feature (795)..(795): n is a, c, g, or t
  misc_feature (804)..(804): n is a, c, g, or t
  misc_feature (823)..(823): n is a, c, g, or t
  misc_feature (872)..(872): n is a, c, g, or t
ctgctgatttgctgctgtgagtgaccccnctgctgtgtggtgctgtgctgtgctgtgcctgtgatgcccctgagtgatgtgccctgatgctgtcccctgtgcctgctgctgtgcatgctggcccccggcccgatggagaccccgccngtgggacccnngcccgcaatgactcgctgccgcccacgctgaccccggccgtgcccccctacgtgaagcttggcctcaccngtcgtctacaccngtgttctacngcgctgctcttcgtgtcatctacgtgcagctctggnttggtgctgcgttaccgccacaagcngntcagntaccagagcgtcttcctctttctctgcctcttctgggcctccctgcggaccgtcctcttctccttctacttcaaagacttcgtggcggcnnattcgctcagccccttcgtcttctggctgctctactgcttccctgtgtgcctgcagtttttcaccctcacgctgatgaacttgtacttcacgcagaactctctgaagaaagtaccggtattgtccccattttccagaggaggaaactgaggctgagaggtcgtagatgacttgctcaaggtcacactgtcagtgcatggtggagctggcgattcaacacacatctgtgctgtctgagtgtgattttcaaagccaagtcaaaatattctccagaattactcaaataccggttgcccctctacctggcctccctcttcatcagccttgtttccttgttggtgaatttaaacctgttgcttgtgctggtaaagacnggaaatggganaggaaggtnatcgtctctgtgcgagtgnccattaatgacacgctcttcgtgctgtgtgccgtcctctctctccatcntgtctctaaaatctctaaggatgtcctttagccaacagtttactttggagtccaaggggctcctccgtgtgtcaaggtgacttgcatcgggtgttcaccgtgattcttgtttacacccttctggcgcctgtacaacgctgttaatcctgtcatttcttccagaaacaggaagcgtccattcctgtgaattatgactgctcccatgtttcagcccggcaaattttgacaactcacgtggaaatgcggaaaacgattatgggagggcgcacatgaagggaaccttacacaact

SEQ ID NO: 672069 - DNA, 409 bp, Homo sapiens
gtgtgccaccacacccagctattttttattttttatttttagtggagatggggtttcgccatgttggccggagtggtttggagctcctggcgtcaagtggtcctcccacgttggcctctcagggtggtgggattgcaggcgtgagccaccacgtttagctgagtataattttaaatagccctatgtgtccagtggcccctttattgggcagtgtagatctaagattaattcctcccctgtttcgcattcatcaaagacatacctatgagttggcaacccgcagggtggataacgggccagtggtgataaaatcaaagaataggtaatgtgactctcatccagttaacaatcagcaaggttcttcagagcctaattaatgtttaattctaaataaattgcaacaattaag

SEQ ID NO: 672070 - DNA, 990 bp, Homo sapiens
  misc_feature (117)..(117): n is a, c, g, or t
  misc_feature (127)..(128): n is a, c, g, or t
  misc_feature (198)..(198): n is a, c, g, or t
  misc_feature (211)..(211): n is a, c, g, or t
  misc_feature (221)..(221): n is a, c, g, or t
  misc_feature (257)..(257): n is a, c, g, or t
  misc_feature (283)..(283): n is a, c, g, or t
  misc_feature (285)..(285): n is a, c, g, or t
  misc_feature (290)..(290): n is a, c, g, or t
  misc_feature (380)..(381): n is a, c, g, or t
  misc_feature (611)..(611): n is a, c, g, or t
  misc_feature (622)..(622): n is a, c, g, or t
  misc_feature (631)..(631): n is a, c, g, or t
  misc_feature (650)..(650): n is a, c, g, or t
  misc_feature (699)..(699): n is a, c, g, or t
ggctgagcgcgatgcgcggagacccccgcgggtgcggcggcgtgccgtgagccccgatgaggcccgagtcgtcccggcctgcgctggagcgcccccggcccgatggagaccccgccngtgggacccnngcccgcaatgactcgctgccgcccacgctgaccccggccgtgcccccctacgtgaagcttggcctcaccngtcgtctacaccngtgttctacngcgctgctcttcgtgtcatctacgtgcagctctggnttggtgctgcgttaccgccacaagcngntcagntaccagagcgtcttcctctttctctgcctcttctgggcctccctgcggaccgtcctcttctccttctacttcaaagacttcgtggcggcnnattcgctcagccccttcgtcttctggctgctctactgcttccctgtgtgcctgcagtttttcaccctcacgctgatgaacttgtacttcacgcaggtgattttcaaagccaagtcaaaatattctccagaattactcaaataccggttgcccctctacctggcctccctcttcatcagccttgtttccttgttggtgaatttaaacctgttgcttgtgctggtaaagacnggaaatggganaggaaggtnatcgtctctgtgcgagtgnccattaatgacacgctcttcgtgctgtgtgccgtcctctctctccatcntgtctctaaaatctctaaggatgtcctttagccaacagtttactttggagtccaaggggctcctccgtgtgtcaaggtgacttgcatcgggtgttcaccgtgattcttgtttacacccttctggcgcctgtacaacgctgttaatcctgtcatttcttccagaaacaggaagcgtccattcctgtgaattatgactgctcccatgtttcagcccggcaaattttgacaactcacgtggaaatgcggaaaacgattatgggagggcgcacatgaagggaaccttacacaact

SEQ ID NO: 672071 - DNA, 224 bp, Homo sapiens
tgtgatgcatccacaatagtggacctaagggattgctgacatgctattgtgaggctttaaagacagcagcatttatatataacgtgactgctgtgaggttcattctcaccgttttgcttgcatctttttgtattctagttgtgtccccaaggaaggatgagactagctctgaagtaagttgaaattcctgctcaaaggttaaagcatggatgtcccatgatacg

SEQ ID NO: 672072 - DNA, 106 bp, Homo sapiens
ggataaagaagctttcagaagtttctaacttacaacctagcttcagattttttgattccccagccaccaagtttaaattcattttgggagccttaccttttccatg

SEQ ID NO: 672073 - DNA, 329 bp, Homo sapiens
gaataggatgtgtctttatatagtagctgcagagtctgaggacggtgggagagcacatggtcagactgagattgaatgactaaacagtaggaaattaactttggtggggcatcatttatctattcaagtggacactggagaccatcatttggttggagtgagttttttgtttttttgcattgtgtgggaggtagtgagaagtgaagccagctggacttctgggtcgggtggggacgtggagaacttgtctgtctcacaaaaggattgtaccaggcgcgaatcagcactcggtaactaggatggtaaaatgcaccaatcagtggtctgtc

SEQ ID NO: 672074 - DNA, 182 bp, Homo sapiens
aggttagctgatccgcttaagcagcaggatccgtatagcacaggagtttgaggttatagtgagctaactgcaccactgcacttcagcctgggcaacagagcaagaccctgtctcaaaaacaaacaaacaaaacaaaagtaaacaaagtatgaaaattctcttagtttttatcttgtatttga

SEQ ID NO: 672075 - DNA, 828 bp, Homo sapiens
  misc_feature (151)..(151): n is a, c, g, or t
  misc_feature (295)..(295): n is a, c, g, or t
  misc_feature (312)..(312): n is a, c, g, or t
  misc_feature (360)..(360): n is a, c, g, or t
acccccagcatgcctgtttccgcacaatgttcagcatgatccgtgcccctccaggccccacacctgtttcttggcatgtcttttgtatgcagcccacaagtttcctggctttcatgatattcatgtgctgggtgggtgactttttccctgnctggccgcggctagaaccaaagcagtatccttacaataatctgtacctggaacgaggcggtgatccctccaaagaaccagagcgggtggttcactatgagacctgaggaggcttcaagggttgcgtggttctcaaactaggacnccctcactcctacaaancgagggcgcgccccccccataataaaactcattgcttgtaaattactnaaaatccccggccgcctttggcctcacgtgggggagctctactgcccgctccccttcagcgaccgcttaacccatgcaccctgcgctactggcttcgctgctcttcagtctactggcctaccgcgcgcggtcccggcatcactccaaggaagttaacactgtgcatcaccccactcaatggagttagccggcgagctcccccctcatgattcccggcaattcccgagtcagccccaccttagccatgccgccatgccgcgtatacactcccgaaccagttatcgaacctagcccgagagaagaaaggcccacattccggatctgacgcacccagtcacataacctattcagtgggaacacctccccacccgccccgggacgtacccatcataaccacagatggaccaccacgctctctctttcgccacacgagacgatatctgtacccacccctgtatatgtgctagg

SEQ ID NO: 672076 - DNA, 167 bp, Homo sapiens
tatttgtgtaaacaacctagcgcagttgtgggaacccggaacaaaagttggggggggggcaaaggggagggaaaaggacaaaaaacccactaaatacgtccttccgacctttgctaatgcagatgggcaaatagggaaaatcctggttcttttatttagcgccggaa

SEQ ID NO: 672077 - DNA, 1057 bp, Homo sapiens
agaaactgggctcagctcagtacttcgactactgtgattatctatattggtatgactcagtctattaaaactccattagggtagattctgtttataccacttgaatgtctccagtactcgtgccggtacctgggacatttaatccgcgtgtgcagttgcacccctgggagtatctgtagacagacctcactatagcccaaattgttccatatccatctatccttattctcgacttatctcgaagaactgaggaactaataccagaaatgtacgtttaattcgggataacatgatttgcaatacgtgtcgtgagatccaactctcactggcaatggctaatgtcatacaaacaaataggggggacatcggggatcaccttagaagacaacacacgaaactcggtgttgaactcctctatacgagactaaccgcttgccccttgcagacaatgccactaacccgccaattggcttatagcttgctctgcgtcgactatccgcgctcacgttatagttcacttccttttgaaaacttttagcaccgaattaaaccctctttgggacacactcggtaccaagctagcaactatacttgggcttggctctgggggggtattcacagggcagattttactagcgtttgctaagtccgaccgaaaagtctcgtgtaaattgtggttaaagagaaagcggggcatacactgaagagtaatatgcccttgtaatttggggacatgtgtgggtaagaggccttggaagtacgtacctctggagcttggtctttcagaggttaacttaacttcaagggggtggtgacaaaaataggtcgtgacgtttatatgagacccgaatagtttctccacgttccaggaccaatgtggtgccatagggcggtaattcccccgtttatcggcctgataacccaggatttgtcctgttataagcgtttctgctatacccctgtacagttgaacacctccatggttatagcatggggtacacactgcggatgttagaacccaatcgtttacgctggcaattaccatgcttcgcggggg

SEQ ID NO: 672078 - DNA, 250 bp, Homo sapiens
gttgttgactctagtaggatcccctattattgtatgatgttatgtttggggtaatttatgttacacagtaaaataactaaccaataaaaatagctgagaatattctgagaagtacaatcaagaggcacttgccatacactgctaaaatatgtggctagaattaccctcacagaaaaaaataagatctttattatacaccatacacaaaaataaaatttagacagacaaagattacacacttaaaaaactg

SEQ ID NO: 672079 - DNA, 190 bp, Homo sapiens
ctctcctccatgtcagatcagctacacagcatctgtcgtggttggcagtctccgtgtactcgcctctcttacttcccctggtggagtcagtcaagaaaagcatgtggatggatcccttatgaagcagctataggcaaactggacccaaccgatggtttcttcttcacgaaccaacagaccggtcttaccg

SEQ ID NO: 672080 - DNA, 193 bp, Homo sapiens
agaagcgacgggcaacaaagaacttccctgagacggggtaatttataaagcaaagaggtttgaattggactcagagttccacatggctggggaggcctcaggaaactgacagtgagtggcgtgaagggtaagggagggatgtcttacatgagcagcaggcaagacgagagcatgtgaaaaaggaactgatcga

SEQ ID NO: 672081 - DNA, 190 bp, Homo sapiens
tctagaggatctccagttccttctctaaatttccagtaaggtaatgcttattttaacaacttatttaaaactcgaattcgcttttttttttttgggaactttggtggcccgggttagattacgggggggcattttgggttcatggaaccttccccttcccgggtccaggtgttggtctggtttcggcttc

SEQ ID NO: 672082 - DNA, 1962 bp, Homo sapiens
  misc_feature (14)..(14): n is a, c, g, or t
  misc_feature (553)..(553): n is a, c, g, or t
  misc_feature (765)..(765): n is a, c, g, or t
acggtcccatcacnaataaggtgatgtattggtttgtacttacatcgtcggtagatgtgtcgtgctcgttgcttcatcactgtcgtgtgggttcacccactcactattgttgctggatccgaggtggtttgtcgtcatatgcgtcgcctcttgctgctcccttcctcgtgggagatgaatatgcttggtgatcatcgatttggttgtgttatcacgacgggccttcgctttgtagtatgttttctgcgtctcactcattgtgtgtggttggtgacccaccaccaccccccactcctgcggtggggtgtgtgtttttacccccacccttgtggtgctggcgcaccacatccacgtgatgtgggggggtgtctaccaaaccaaactgtcgtcgtcctcagtgttctctcgctgggtggacgccaatgtacagtaaaatgatggttcgttctgtctgcgcagccagttgtgggttgcgaccacgtagcagaatagaggggtggtcccaccctgcttttcaccgacgactgtgtgttccacacactatgttgtgtgngtgtattatacagcccgccggcggatggttgttgtgccactccccatgttgctttactacagacccgccccctctggtggggggtatgtctcccctccctccccgcgagttgttttggatgaggggctggtcgtctcgtcaacaacagcggctgctccgtcctggggagtgattgttcttccttcaccccacaccacaacaaggggtggttntgtgtctgttgatgaggttcgcccactacataggaagacacatagattagtgttggggtctgtgctccctcctcgttggggaaagacctccccccctcgactccactccctcgcgccccgaagttatttagcacctctccaccacacgcgctggggggtggactagctggtttgtgcttttatccacaccggcggtggtggtcgcggtagaggggtggctccacccccactactaagagcgagaagagtaggtttctctgctgcagtggagaggcaccccacaagagtgtgggttcgtgtgtattatcatccgcgtgtccgagctatgatcaccacatcggagtaccacaggacgcgcgcagtatactcttttttgtgtgatgagaaagtggaggagtgttctcctccccccaccacactactgctgttcttctatcagcagagctacacacgcgcgctcttgtgtggtgagaggacaacacttccaccccccctgcttcggcggtgtggtcactcaccacagcagcagtgtgtcgacacgctcgtctcccctgctctctgctctggcgcccacacaagtcccacaccccctcttcccacagcgagagtctctctctctagcgggccactctctctcgcgagagacacactgctttctctctctgcacacacacattttgctccccgcgccgagagagacactctcttctctctcccactcggtgagacacacacacgcgcgcgcgagggcactctctggaccagagagagtgagagagtgtgtctcctccgcgcgcgctctgagagagagaccacacactctgggcgcagacctctctcttctctctctagagttatctaccccgcgctctccccgcagagagcccccccaccacaaagagagagagggagagaggtgttttcgcgctggagagggaggctccgcaagagaggggcctctaagagccagaacaccccctcatcccaccccgcaggtgttttccgcagttcaccctctaacactgcttttatactccccagccccctcttccctctctccccccgcggaaattgtgggtttctcgccctctctatattttttttttgttttttttttgcgggggggtgtttaaacaaacagccccgcaacaatatagagcccccccaaaaaaaaatttttttttgaaaaaaaaaaaa

SEQ ID NO: 672083 - DNA, 730 bp, Homo sapiens
  misc_feature (538)..(538): n is a, c, g, or t
taaaaaaaaaaaaagtgtttattataggcaacacccccaatggaaacgggtatttgtctacaccaagggagtcgcaattttccatctcccaattgggcgggcctcaaccttgaggcagaatccacttgggcagaaaagatgcctttctagagaaggcaagagctcccctgacggggcataaagataggtctcagattggatcttagtgtcaagtggtaaagaccatatgtagtccatagaaggctctagtggcttttcaggcgcgtggagctcgcccaacaagcaagaatgtggacaacggattaagacggtgggaggagcctccacaaaaatctccccgacaagaaccatctacagcgcaggctggacagaaaccagaccccccgtgcgcgacatataacacgcgtttgatatctccagcgtgcgaacacccaactcaagccagcaaaaacagcactgtgcacaaaacgaccccgtgagaacccatttccgagtggctcaccacaacaagaatctcgcatatttccctcagagaganacacacatattttctcgttggggggtctcccccccgagtgtgtctttcattctggcagacagaggagctttccttgtcacgccccctctttgacaccaggaacttgagaggattggatccatactttactaaacaaacggggtcgacatagaataaatctcccgagggtgctttttcaatcatctcgcttcg

SEQ ID NO: 672084 - DNA, 550 bp, Homo sapiens
tcaattctgcaccacagccaacatcatagtgaataggcaacagctggaaacattcctcttgagaactggaacaaggcaaggatgccctcttttaccactcctattaacatactactgagataaaatgcatccaaataggaagacaggaaatcaaacttctctgtttgcaaatgatatgatcctataccccccaaaaacccacagtctctgttgaaaagctcctgataaacaactttagcacagtttcaggacagaaaataaatgtacaaaaattaggagcatttctatacacgaataatatccatgcagagagccaaatcaggaaggcaatcccattcacaatagccacaaaaagaataaaatatctaggaatatagctaaccaggagatgaaagatctctacaatgagttacaagatgctgctgggaaaaaaaaaaccaaaacaacaaaaacagagatgatacaaatgaagggacaacatttccatactaatggataggaagaatcaatatccttaaaaggggcctactggccaaatcaatttacagat

SEQ ID NO: 672085 - DNA, 553 bp, Homo sapiens
  misc_feature (553)..(553): n is a, c, g, or t
cgtctctactaaaaatataaaaattagctgggtgtggtggcaggagcctgtaatcccagctacacaggaggctgaggcacgagaatcacttgaactcaggagatggaggtttcagtgagccaagatcacaccactgcactccagcctggcaacggagcgagactccatctcaaaaaaaaaaaaggtaagaaagaaaaggactcccttaaaatgggaaagaaaaatcataaaatattggagctgatgcctgtatatagaatattaagcgtttctcgaaaagctgttctatgtttggctggtaatttaagtcttatatctcttccttaaggtggagaaacaaagtaccaatttggaagggatttttttaatttggtctttagggttcctggtcagtagaaaataaccattatgtgctaaccaaatttctggtgaacaaatggtttccatgggtaatcattaatatctaactataacctcccccaatagtttatgaacgagtacacctgaaatgccactatggtggaaatcggatactcggtactcggtgcaaaan

SEQ ID NO: 672086 - DNA, 1220 bp, Homo sapiens
  misc_feature (1220)..(1220): n is a, c, g, or t
ggcaagaatgtggacgagtggaaaatcagtgaaaatgtttccaacctggtgattgaggacacagagctgaaagcaggtggcttacatatacaagtgtgtcaacacgacattgcaatatcaagggcaaaagttaactccattacatgtagataatctgtgtaagcaaagcttgagcctggatattcgcatgacgtggtggagcattgtggagataatcaacaggtaaggatgtcaaactttcaggtaatgggtaaagtgccaaccaatatccatcaactaaaacagatggcgtgccatgcgtatacctgagcaatgaattccctggcattgtgaagatatgtcagtgccaacatcgttccgaggatgacatgtcctcagttcctacagaaggcggatgactttacatgaagttcccagttcctgagcagttcaatgaccctatggaacgggcagaagttggtctaccacagtgacagaagattgctggatgagcgaagtgccactgggttctttgccctccgcttcacaccatgggataaatctgtatcaagacggttcttttctagatttcctctacttttggctcttaaaactgcttctctgctctgagaagcacaggtaccttgacttcactgaaatatacctcaggctgaacatttgggtgggatagcacgtcagttgatcttctggaggaaggtgccagttatccatatcaggtcaaacaagccgcaggtccattccttaagaaatgccgaactaagactgatgatgccttttaagctctgagccttggggggggttattgtacccaccaaaagtccctggtgacgaaacaaggccctgggaataaaagattcgcacgtttgtccgccggggtatcctctgttcgtgccacagagcggtaaggtgaggcacactcgtggttgttccccaggtctttctatccagcccaattataatcggcgtgagaaaaacgggcacaaggggtggttgtccaaccaagagaagggggcctttaaaacaaccacgggggtctgtagcaaccaatataatataatagagtggggtcgggaagaagaaaagacgaatccatgatgagctcccaaccaagaggagcagccttgctccctaggcgtacaacagcaaacaagagatgacgagtgctaagctcaagcgatctgcaaaaatcttgtatcttcctattactatcatcattgcgn

SEQ ID NO: 672087 - DNA, 557 bp, Homo sapiens
catatcttagacagatagagaacatatgtatactaaaaccaaagtagcctaatgaatctgatcacttaaaaggcaaataccagcaacataaatttcattgatagtatacacatatagcatctgtgtatgcatattacatatatatatacacacacacacaaatatgtagacataaatcccgttgaaatgtaggcaggaaatccttccgtgaattataaatgaacaacttcacattaagaattacatataaagcttatagtaccaggacatatgcaactgtcaaaattaaactagcacatatgatgtcaaaacagacatatcaaaagcacaaaccggcaagaattacatcaccacaagtttgaaaatattaggaatggcttaccttctaatattcagaataatgtgtacaaaactgagtgtattagcgactaagtgtagcgacaattgaatgaatatacgcctacaaacattgatctaagatatcagtggtccactataaccatctgactgaacattatttaaatgactttataaaggatagtactgtatactgaact

SEQ ID NO: 672088 - DNA, 239 bp, Homo sapiens
acgtggagtggtgctcatagaacttgtactcggctcctggaagcgcagcattcccgtcggcttgagggctgtcgtcgggctcgcgcacgatcgtacctctggggatcttgcagatccagtccagctgtgtgtcgcactgcatgggcacccactgcagggaggccaggtccagcaccgcacagcctcggatgtcgtcgtcgtcgtgccggctccggtcgaaattgtggtattgtgtttgc

SEQ ID NO: 672089 - DNA, 207 bp, Homo sapiens
gactcacaggatcccgtgacgcggtttgtgtatcgagggagagtgacggatatcggagtctggggcacgggtggagatggggagtgctagatgtgcggtggtggccttaggagttcatgggaggggtcgattggccggggcgcgagagcgtgatcgcaggcaaaggaaccgatgtgtccggggctgacggatacacaagccgcttca

SEQ ID NO: 672090 - DNA, 184 bp, Homo sapiens
tgaggggactgtccgtaagctacaggacagcgagatggtcctatctgccacttattacccactcacatgcacaggaagacctggttactgatgatacataataaatgaattgctaacatattaaacagagaatgaagaaaaaagaaacatggcaccagaaaaatataacatgatgattgggaaa

SEQ ID NO: 672091 - DNA, 119 bp, Homo sapiens
cgcacgtcaccgacatgggtgctgcctgtgccccgtactcccaattcattccctagcctgcaaacctttccaagttctcacgtcaggcctttgagaattctttccccccctcgcgccat

SEQ ID NO: 672092 - DNA, 225 bp, Homo sapiens
taatcgagctcggcccactttgactgggcattagagctggggtgatagggtgcctgactgctgtgtgagaccctgctggaagccgtggctgccagcgtggagtctgctgtgggttaagtccggcagtttcacagcctgcctgctgctcccgacttcagctcagtgctggcccagaacaggtttctcctggagctacagatgagctcttattgcccaggctggagt

SEQ ID NO: 672093 - DNA, 640 bp, Homo sapiens
  misc_feature (119)..(119): n is a, c, g, or t
  misc_feature (185)..(185): n is a, c, g, or t
  misc_feature (221)..(221): n is a, c, g, or t
  misc_feature (255)..(255): n is a, c, g, or t
  misc_feature (282)..(282): n is a, c, g, or t
  misc_feature (284)..(284): n is a, c, g, or t
  misc_feature (293)..(293): n is a, c, g, or t
  misc_feature (295)..(295): n is a, c, g, or t
  misc_feature (300)..(300): n is a, c, g, or t
  misc_feature (302)..(302): n is a, c, g, or t
  misc_feature (305)..(307): n is a, c, g, or t
  misc_feature (310)..(310): n is a, c, g, or t
  misc_feature (313)..(313): n is a, c, g, or t
  misc_feature (353)..(353): n is a, c, g, or t
  misc_feature (358)..(358): n is a, c, g, or t
  misc_feature (366)..(366): n is a, c, g, or t
tggaaatggagtctcgctctgtcgcccggctggagtgcagggtgtgatctcggtcgctctaacctctgcctccagggttcaagcgattcttctgctgcagcctcccgagtagctgggantccaggtgtgcgctaccacgcccggctgattttcgtatttttagtagagacggggtttcaccatgntggccatgatggtctcaatctcttgacctcatgatncgcctgccccggcctctcaaagtgctgggtttgnaggcatgagccactgaacccggccttnantaggttagntntggtntngtnnngtnttntggcactccagcctgggtgacagagcgagactgcctcaancaaancaaacaanaagagacagcctgtgtattagtaagattacttacagtcccaaggggcaaaacccagttcatactactttaagcaaacagtaagaacttactggccaggtgtctggagaggccaggttagtgcaggcatggctggatgcaggcctcaagggtgctgtaagaatcagctctccagatcatcagtctggtgacttgagtggtcatctggggtgctttatatatgccaacggttggtcccctcccttggacttgggtggttctgcgattacaaccgtg

SEQ ID NO: 672094 - DNA, 252 bp, Homo sapiens
aatgactggtgcatagatatagctacgcaagggaaagatgaaaaattataaccaagcataatatagcatggactatcccctataccttctgcatgatgaattaatctagaaataactttgcatggagagccaatagctaagacctcccgaaaccagagcgagctatctaagaagagctaagagagcacacccgatctgatgtatgcaaatagtgagaagattgctaggtagaggcgacgaacctaccgagcc

SEQ ID NO: 672095 - DNA, 159 bp, Homo sapiens
gtcccggagagctgagcagtcaaggatgtgtgacttcaaccgaggacaagaccgagagttcaaggaggccttccaagctgtttgaccgaacaagtaatggccaaggatccctgttcaaggccagtttgggattggtatagggccctggcaagaacccta

SEQ ID NO: 672096 - DNA, 162 bp, Homo sapiens
cccacaggcagtagcacagcagcaggcagtcagtcttggcagaggacgggcataaaagacaccgaatggtcagattccaggaagacccgcaggcagcagcagcagccaggatggaacgatggtcagactcacggcaggacgtggccatggtacgttaacagg

SEQ ID NO: 672097 - DNA, 1056 bp, Homo sapiens
ggacgcgtgggtccccactccaccttactaccagacaaccttagccaaaccatttgaccacaatataaatgtataggcgatcgaaattgaaagcctggcgcaatagatatagtaccgcaagggaagagatgaaagaatctataaccaagcataatatagcaaggactaacccctataccttctgcataatggaattaagctagaaataactattagcaaggagagccaaagctagggacccccgtaaaccagacgagctacctaatgaacagactaaagagagaccacatcccggtactatgtagcaaaatagtgggaagatttatacgtagaggcgacaaacctaccgagcctggtgataggctggttgtccaagatagaatcttagttcaactgtaacatttggctccacaagaagacctctaaaaatccccttgtaagattgtaactgttcagtccacagaggaacagctcttgtggacactaggaaaaaacctggtagagagagtaaaaataatgacatggacccatagttaggtcctaaaacacgtcgaggcaccaattatgaatgccgtgcaagctcaacacccactacctataaaaatcccacaaatataactggaactcctgcacacaccaatttggatgcaatctatcgacctatggaaagagctatatgtgagtataaggtaccgtgaacacttctcctccgaataaagccgggtcggataagacacccggacgggacaatgaccagcgcaagatctacaatcagcccaaccaaggtatataccctcactggcgaccaacacaagacatccccatacggaaggttaaaaacacgaaaagggaccggcaaaacttccggcgtacaagacaaccccacagccccgataagccgcgggccgaccagctacccgcgcggggcccaccgcaggggaacaacgatctcaaagacagaaagcacagagcaacacaaacaaccccgcaagcgacacaagaaagaggataggacacagcaacgaaggaggaccccaaaaccaagaacgccagacg

SEQ ID NO: 672098 - DNA, 620 bp, Homo sapiens
gaggccgccgctttggagaagttcagcgggtcgatggtcacgtcctggtaaatcgaggagacgagcacctcgtagccgatcgcgttgccgagggtgaccggggtgccgaactcgccggcagccttgatgaagacgatcagcgcgccgagtgaatagggcccgaccaccgcggggacgaccacgcggctgaactgctgccaccggctggcgcccgccacctgcgccatctccagctgcgaggcggggatcgacgcgaacgcgttgcgcaggatcaggtagagaaacggaaacagctcggcggccatgatgaaacccataccccacactgagttgatggcggaccggacggcgtcgccaagcatggggcccaaaagcatgtccgccacgccgcgcaggcgggtgaagtccatccacgccatcgccgcggcaaacggcggggtcataaacggcaccatgaccagcacttccacccatccggcgcgacgcatgggcgtccaggagcggaagaatgccagcggtgccgcgaacagggtggcgaaaaagacgacgaggacggaaagccagaccgtgttgcggatgacccgcagcatctccggacgcacaaggctatccagggcgga

SEQ ID NO: 672099 - DNA, 112 bp, Homo sapiens
  misc_feature (49)..(49): n is a, c, g, or t
ggcaccaggcccggaatcggctgagtcaagcgtctcgtggaggtctcancacagcttgggttgttgggtcatcatccaccacgggctgctgtaggggctggtcatagaactg

SEQ ID NO: 672100 - DNA, 187 bp, Homo sapiens
ggaggatgtcatctctacaaaaagcaaaaacaaaagtagctgggcatggtggcacacatctgtggtctcagctactcaggaggctgaggtggaaggattacttagaacctgggaaattgaggctgcagtgaccccatgatggtgccactgtattccagcctggggtacagaacaactactttgtctc

SEQ ID NO: 672101 - DNA, 1522 bp, Homo sapiens
ggggggaatctatggctgtgtgagggggctctgctgtggcgtgggacattcacatcatttcactctggtctgagtggtgggctgataaccatggtgggatggagcaccgctcatctatgctgatctccaggccccatgtggaacggatgtggagaggagagaagctgttcaagaccatcgttaagtgagcacaggggtcaggtagacgccatgggtgctcgtcaccttactcttgtcgcttgcagatgtggacgtgaggtggtcgtggctgttccagcaccctatttttgtttgcacgttcctgctgaagacagggatgatggctgaggccaacggtgcaactgtgcaacgtggcgatgggcatggagggcttgtagcacgggattgaatgtgaaggcacgaggatcatcaagtttgcaggttaaacaaaatgaaagacacattaaacagaaagaacaagacaaaaaaaaaggtgagaggagcgagcgcgagcaataaaaagaattatccctctccgagcggggccgcaaaaggcgaatcgaatgcgaggatgcccacaggagaatacacgaatggggaatgaaaatgaagggaagggcgccatgaaatgacaagtgaggaagacagaacaatgaaaaaacagtacgagaggacaaagggggaacaaggaccatgtgagagacaaacaggaattggaacaacgtggggcgacacaatgaagagagaaggaagcggggggacaccctttaggcatgaaacggcgggaccagcctgaacaccatccccacgtgggcgcggggtgtcaccccacaaacgatggggacaccagaaaacaatcacaacgaacacagggccggaaattcagagagagcgaaccagtcgacgcagcaaaaaaacacgtaacacaaagaaacgacacaggcgtgaccaagaaggggggctggaacgaccaaagcacggaaacatatggagcaagccgagagcaggggacacagattcagaggacccccagcgagtggatcacaaacaagaacgatcaacaacgaactcattgaccggacgggcaacaaaggagcgacaaaacgggcacgcgagatcgaagacacgcagagacagagagcgccacccacacaccacgcggacagagccctggacaggaagcagcacaaggcaccaaaaacacgagatgaccacacaccaccagcaaataacactagacaggaagacacacaaggaagccacacggcaagaaggaggagacggagcacacccagagacaagtaggaccaacgaccccgatagcggacacaacaaagagccgagcactacccaacacgcgccaacacccagaaaaacacaacgaacacacgacaggcaaggccacacagagccaaaaccacacgacgcggacggagagaggaaacgacgaggaggtacaaactcgcagtagacagaaacagaacgacaacgacagcagacgaagagcgacagaagaacacaaagcacaaacagcaaggaagag

SEQ ID NO: 672102 - DNA, 556 bp, Homo sapiens
caagtgaggtgatctcgaagccagcgtgttcacattcccacagatgcaccactccctacagcttcaggctgaagaatataccgcggatcagaggggcattgacaaacctggcttctgagtcaactcctgccttgaatcttgccatcaaggaacttccttcccggtggctccttgatcaagctagagactggtggaaccccaggaattttccttcccattctggcgtggctctttacactcttggattttactttattacttttactgcttctgtttcaccccagctgcctctcttgtcctgagggtaaggctggagtgacagtttccggccaacccccagcccaagaaagaggctgccggaaagaaaatgctgaccattggaggtgcccaacagtagaatgggctactgtgaggggtagtaagagccccatttctggaggtatgcaaatcttgactggacagccagctctgagattttatcagggcacttctatacctctgggacattggactggatcagccctgagccagattccactcctagcttaaatgagaa

SEQ ID NO: 672103 - DNA, 128 bp, Homo sapiens
tgagtgaagcgacattgacatgtctgaacagtgaaaacgcgtaaggcgccgctgcgggcgcgaaaccgggcgttgccgcgcgggcgggaaaacagtgctatgcccgtcgggcattaaaacaaatgggg

SEQ ID NO: 672104 - DNA, 330 bp, Homo sapiens
gtgagctgcaaagacgaacacccacacctcagctctatagtaacctaattctaattacctaataattctacttaatacagattatcgacaggacttacaccagttaataaaaatgatgaggctgggcatggtggctcacacctgtaatcccagcactttgggaggccaaggtgggcagatcacaaggtcaggagatcgagaccatcctggctaacacggtgaaacctcatctctaccaaaaatacaaaaggttagccgggcgtggtggcgggcgcctgtggtcccagctgctcaggaggctgaggcaggaaaatggtgtgaacccgggag

SEQ ID NO: 672105 - DNA, 307 bp, Homo sapiens
  misc_feature (245)..(245): n is a, c, g, or t
ggcctcgatttcagatccgggggctgagcttcggataggggggtgggaggcacaggaagcgccaggtcttgtttggttgaactgtgattccggggaaatagggcgtggggggcaattcccagaggtgaggcttgagggggggctttgccttcgggggggcccgggcctggaggtgtggggccctttattccaggtcccgggcggggtgaggccccacggggccgcgggggtccgctccccagatnacaacctccccacccccacggctccctcattacaggggcctcccccatggaaaaaaaaaaaa

SEQ ID NO: 672106 - DNA, 1340 bp, Homo sapiens
  misc_feature (214)..(214): n is a, c, g, or t
  misc_feature (1340)..(1340): n is a, c, g, or t
taaaaatttttaatctttatatttttacaacacgttgttacataataaaaaaccataaaaaactcaaacaattttaaataccccaataaaacttgtttgaatctccatttgtgcaaattttaaattttgtgtaaaaaatagccgtgctcacgtgccctccattatatatctctaagggtgtgccaaatgtgtgtttatatatatctccctattnttgtgtggcctcaccagatatactctcctctcaagaaaaaaacgaagattctccggcggtgtgaggtctctatacgctctctcaggatatttatgtagagactctccccaatataaatgcgcgtttgagagagagagctctctcacagagagggagagaaaaaaaacacagaggatatctctactacactataggggggggtctctactacgctgtagagaaatatattttatctctacacctctcacacaaaatgtgttgagaggcggcatagagaggtttatattatctcacacctctcccacaaaatataaggtgtgctgctctcggagagagcacctctctcaaaaaacaaagaaaacaacaaaagaagaaagaaaaacacagaagaaacacaaacaacaaagacagaacaaaagaaagaaaacaaaagaaagacacagaaagacaaaacaacaaacaaaaagaagggaggggggggggcgccacaaagagagacatatcccctcgcgcgagggggggggccccacaaaaagtgagagacaacaacacccaccagagaatgtgttgtaaaaaaaaagggggcgcgccccacaaaaaagagaggggacctatatatagaaacaagaggcaagcaggagcggcgcgaggccaataacacacaacgcaggaggggggagcggggagacaacacagcggtgtgagagtaggagcagctaccataaggggagggagaaggcaccccacaccacacggggggggggagcgggagagcacaaaaagaggggggagaaacacaccaccaccaccgaagagaagaaaaaaacaacgccgccgcggaggaggagatcaaataaacaaaacacagacgcgagcacagagagggctgagggaaaaacccacaacgagacgcagcaacagaaacgtcgcgcgagcgacgtagaagaaacagtggggcgcacaaggaggagaaaagacaggaacaacaaaccccggggcgggcaggcaagaccacgacaagcatcagcagagagaagcgcagagaaacaaaggacaaccagcgacgaacagcgagacgcgacgacgcgaacagaagaagcagaaacagcgcagccgagcgagcggn

SEQ ID NO: 672107 - DNA, 182 bp, Homo sapiens
gatcggtctgggcaggcctggaagaagtcattgcacatgagatgtgatgagtgccaggaaaacagcatactcctggaagtccaccgtgctggccactgttctcatccaggttgcccatcagcttcttcagcccctcctcatccactttctcccccacaaagctgggcagctccttggccgaa

SEQ ID NO: 672108 - DNA, 1144 bp, Homo sapiens
  misc_feature (382)..(382): n is a, c, g, or t
tctgtgaaggaacttgaagtgatgcatgtgtgaatttaaaataccgaagtcttaaagtgtggacctgggacgtgtagaaggagaaaaatgtaaagatgagaagaaataaaagaaacgcctttggtaagggtgggtttataaaacgccttatttcgcaaacctttataatctggtggttctctggcaatgtgccactcctttgttacgaggtgtttaagaagggttacacgagtgggtttacctttgtgccaccagcttctcgaggtgtttaagctctaacccgtgttctctttgtaaagccacccattgttcagatattataaaaagaattaggccagacagttctccttatagtttaaccattatttgtttgggtgacaantatatttttcccgtggtaccctttttgtgggtctccattataaattttgtgctcagttattttacaccaccaaagcgtgtgtttgtggcaaccaaaaaaaattttttttgtgggcattctcatttataattttaaagggctcacaaataaccattttttatttatagtggtggccctcattttatatatatttttccataattttaaacttatatgtctccaataacgtggatagtgtggtaccagcatattataataggtctctctcaagtatttattaggacttaatattttatacgttacacaaagaggggaacctgtgagcgttggcaactcatctgtgcggggcgccacacattctatagcgctataaagagacagaaaagagagccctctttctagtgggggtggtttctgcggggaccaccccttaacatcgtggggcaccacagcggcaattttttccacacaatcttccactaacatttcacaaatatgggggggttatctttcccccacatttatgggggggaaatcttcccaccatcgcgggggagaaccctttgggaataccggaactctgttgttggaaaacccggcgggattttttcgagagtggagaaaatccccaccattttctatcaaccgcggtgtgcctttaaggcgataaaaacgaggagggcgcgcgggtaaaaccaagcgggttgctgtgttacacccgtggaaaaaaaatctttctccgacaagggtctgtgttaaaaa

SEQ ID NO: 672109 - DNA, 103 bp, Homo sapiens
aagattgctacattagacggataactaccttgagagcaagctgaccttgggccagaggacgacataaaacacccagtgacactctagtggcccatagaattag

SEQ ID NO: 672110 - DNA, 403 bp, Homo sapiens
aaggtatgctctctcctcctgaacaggtgtgctcatcattgctgtgggcagaaagagccattctctcacctttcacccctagactctaccggcacagatgatagagatatggttagatagagacatggatagagcatgcacaggcaggacacagataggctctccaccacctgtgtccaaatatctcagatagtcatgtgtgttagcacgctctgaagttatgacacacgtgcagcctatagagcacttctggttcctctcgtgcatcttacatctaggacctggaagtctgcacaacccttgatatttattaacatttactgctcacctgttgtgtgggaagtcctatgacatgcatgtcgctcacattaacgtgcgcaactctcatatcaactctcgtgcc

SEQ ID NO: 672111 - DNA, 1201 bp, Homo sapiens
gatttctccacatggtcaggctggcctcgaactctcgacctcaggtgatccgcctgcctcggcctcccagggtgctgggattacaggtgtgagccactgcgccgcgacgatcccaatttgttaaaagtagttgatactagtgtcaacgattttcagaagcgatacgtggtagtagcagtacgtagtacgtgtgtcttccgtttgtatcgcgcgcgcgatttgattcgttaggattcgtgtcacacgtagtactacttttgaatcgacatgtggcccccccaggttattggatttatcgatactgtatgtactttggaccgggacgcgcaagtccgttgcatcctgatgtggcctcaagagacctggagcacgcatgcagagtgagatagtagacgtcatataggggcgatacaaggctggacaaaactacgtacagcgggacagctattcgacgcgcgagtaatttgccaacgagcgtgtaaaattgtacgatgtcgccggttgaggcacagtacaagggaccgccattaccatacccgaaaaggattaaggcaccatggcggagcaagttgtgacgcgagcacggggattggagggcaggaccaaaccgacactagaagcgaccgcacagctcgacaccgccgcccgagtatgggcccagctctaccaagacgatcgctggggactaccacgggcaataccacaattcagacgcgacgagagacacaccaggaggttagagctcgacaacacggagcacaccttacggatcgcgagcgcacatcacagacagataggagcaagcccagaggtatggaggtcagataggagcggaaccgaccccaacgaggggggacgaccgctctgggagcgatagacttgtatcatgatacaggagaaagcaaacgcgcgtttgaccacacgctgtcaaggcggaaacagcgaccacatacgaaccataacagcacgtggagctgataggggaaatttcggccgacgccgaagagcgcaccagttacgggggtgtctagggagtctactagatagggtgagggccaccccagtagcaccgaccgagttgcaaaaagaagacgagcgaggcgttgtaaacacgctttcatagggggaggcagcgcgaacaattgcgcacggtagaagccacgagacgagcgagcggtagaggcgagtaacggagctgagg

SEQ ID NO: 672112 - DNA, 144 bp, Homo sapiens
acgggatctacaactgcctggtggcttttcacaaaaagcagatgttcttcatgtactgtgatgtctgatgcaatgcatgctagaacacactggccattagctagtttactcgtaaagactaaacatagtcttggtgtgtgtggt

SEQ ID NO: 672113 - DNA, 935 bp, Homo sapiens
cccactaagtagatatgggtgaatcacgagtatgataataatcatataaagatttatgtgtggacgtggctcgtggcatagttctctgaaagttgcccagtttacgttgtggaccggtgtggctcagaataaatctgctggcacacactagaggtaatgtgatataaaatattggggtaagaattcggtgatcgtggagcacgtgagtacgatgaagtacgtgaaacaatagattaaagtcttagtgtacaagaaagaagacccaatggacgaggattttattacatgttagttcttggttcacatcaggataaagtataattaggcttacgtgatggggcatggggatgggatgttttttgctaacttttcttgcaacccctgtggttgggagtgttccggtctaacctgaaccatctggagaggacagtaagagggggtagtactcgaagataggtaactgtcaagcgctctggaggacctgtcgatcatactcggtgaaagtcctcatttgcgtcgagacgcacatagtgctagccttgaatacgcaagggtgtaccgaatgacaatgagacccttccagatgtcctctccatggttcagaactcgggaccgcattgttctggaaactgtacgccatcggccagagttccggccgtctgcttgtccgtggagccgttgatgcacggtgacagtcaggccttgttgcggcttgtcccggcaaacattggacgcactgagcatagccaatggaggtgttgcagaatagtcctgatcgacaaggaagctgtccttgcgacgggaaatcccgattgaggtctggacaccggcccgaaactcggtattccgcgcggagttgccactcacaagtggcagaactggatacaaacaacctgccctgcaacaaaaacagcgcatcgcgcacgaactagact

SEQ ID NO: 672114 - DNA, 431 bp, Homo sapiens
  misc_feature (3)..(3): n is a, c, g, or t
  misc_feature (31)..(31): n is a, c, g, or t
  misc_feature (122)..(122): n is a, c, g, or t
ccnatctagatgtgcccaactattctagganttgataaagggctaggagtaggaagttgggaagaaggggagggcgtagagctctagcatctaacaggccaattctttgctctgaaatgacnagccaaatgaataaaaacttgcttttacaatatttctgagctatcacttttttaagagaggattgggaggctaagagggcggatcacgaggtcggggttcgagaccagcctggccagcatggtgaaaccccgtctctactaaaaatataaaaattagccgggcgtggcggcgcgcgcctgtagtcccagctactcgggaggctgaggcaggagaatcgcttgaacccgggaggtggaggttgcagtgagccgagatcgcgccactgcactccaacctgggcgacagagcaagactccgtcctccgtctc

SEQ ID NO: 672115 - DNA, 155 bp, Homo sapiens
  misc_feature (9)..(9): n is a, c, g, or t
  misc_feature (128)..(128): n is a, c, g, or t
cgagtgtangggggtatcagcctctccacagctgacttatactggctttaagtgaccaggcagacgggacttccagaagtcatggccagtgctgacctctagctctcgccagtctctctgtgtcaccngcagactcacgggcacggggcctctca

SEQ ID NO: 672116 - DNA, 395 bp, Homo sapiens
  misc_feature (19)..(19): n is a, c, g, or t
  misc_feature (23)..(23): n is a, c, g, or t
  misc_feature (56)..(56): n is a, c, g, or t
  misc_feature (137)..(137): n is a, c, g, or t
  misc_feature (179)..(179): n is a, c, g, or t
  misc_feature (276)..(276): n is a, c, g, or t
  misc_feature (285)..(285): n is a, c, g, or t
  misc_feature (295)..(295): n is a, c, g, or t
  misc_feature (374)..(374): n is a, c, g, or t
cacagggcgtcccaaagtntttnttgaacaaaggcatgatcagtgttggtattgcnctgagactcatgccctcagccccgattcgggcacatggctcatgtcaaccactggaagtccctctggggcccacaaatgtntctagaccacaggaagagtcggcctggctccatgtgcctggngcctggggcagaaaggtggacggggcaatcagagtggtcaccatcggggagtacactttgcactccactcgagtctccagggatataagtcactggntcctaagtntcgctttctnagggccgttcttagagtctcctgtatgaaatcaggctacatccagagaaagttccagaaataagaaaagatgagatcgnctactgaccctcccatttttt

SEQ ID NO: 672117 - DNA, 220 bp, Homo sapiens
gccgctgctgctgcggtcgactctagacggactccccttatctgcctcgcctcccaaagtgctgggattacaggcatagccaccgtgtccggctgtatttcattttttattgctattacacatgcactatatgtatttctgtttctgattgtttagtgctgtatagaaatacaatttaattttgtgtatagatcttatatgctcttgtaaactcccatct

SEQ ID NO: 672118 - DNA, 345 bp, Homo sapiens
gtcccccgaatttaaaagtgtgatgtttgggttgaaatcgtgaaatccccacccgagaaattggggtgggttggggtttgggtaaaacatctttccccaaaaaagataaaccccaaatccctttccggggggtgggcccccattaaaaaaaaaagcccaaagttttcagggctttcgaggaaaggggttggccccgggcccccaagccctgtaaaaatcccccccctttttccctgggcccctcccccctccccccccctgattttttgggggggaatagggccagagggggttttttgggccccccctaggggctttcagggaataaaagctttttctccctta

SEQ ID NO: 672119 - DNA, 234 bp, Homo sapiens
cggacgcgtgggtcgacggacgcgtgggtcgacggacgcgtgggtcgacgaaatcgtgggaataccggagcgtcaccacgctggttttgacccaacccgtccgaattaaaggacacatatgacacctaagttcataatattaaaaaaaaacgagcggggccaataagaaacaaccaaagctgggaaaaagtaacattgtgcccctatttttaataaaaaagagagaaagaaatg

SEQ ID NO: 672120 - DNA, 171 bp, Homo sapiens
cctgtttaacttttgctttggaaaacacctgctgcccttttacatgctggagagcaccactgggctgtcctcagctagcaccagtggagggtgaatatagaccagacctagccagagtgaaattgcccaaaccagcagtctgaatctgacatccagcacgcctcacttgcc

SEQ ID NO: 672121 - DNA, 149 bp, Homo sapiens
  misc_feature (59)..(59): n is a, c, g, or t
  misc_feature (142)..(142): n is a, c, g, or t
atttcggcgcgagggagctcaggtggaaaaggagggagctgctctcaggctgcgtccanaaccagtgcccagggtctgatgagtctctcatcgcttgtaaagcctgagacagctgcctgtgtgggactgagatgcaggattncttaaaa

SEQ ID NO: 672122 - DNA, 756 bp, Homo sapiens
tgacgccggtgcagctggggtgtgtgccctggagtgccctgtgtggcccttgtgatggggaacctgcggtggcttcctgcggagtgtttcgtgcagtggcattcggggccggggtcgcggccgtggacggtggccggggccgaggccgcggagctcgctggagtgcaatggcctgaggataaggagtggatgccctgtcaccaagttaggtgcctgcttggtcaaggacatgaagatcaagtaccctggaggagatctatctcttctaccctgcccattaaggaatcagagatcattgatattcttcctgggggcctctctcaaggatgaggtaaagaagattatgccagtgcaagaagcagacccgtgccatggcagcgcaccagggttcaagggcaatagtagctaatcggggactacaatggccacgtcgggactgggtgtaaaaggtgctaccaagggagagtggccacacgccatccggtgggagccatcaatccttggccaaggatctccaatcagtacccccggtgactgcagaatgaggtaactcgggggggaaccaacaggaatccgggaaggcccacaacactatgtccccatttgcaatggttagaacactggccgggttagtcgatacctgtagtggaaccggccttcaaatcccttgcaaccacagagggcactgtggaattcggtataccgagacacttttagcctaagaaacatgaccacatcaatggagggaatagagta

SEQ ID NO: 672123 - DNA, 173 bp, Homo sapiens
  misc_feature (1)..(1): n is a, c, g, or t
ntgatgaggaacgtactgggatgaggaacgtcaccgggatgaggaacgtcactggtatgaggaacgtcactgggatgaggaacgtcactattctatctattttgtttgttttgttttgttttcctttccggttctgaaggacccacaaagtctacttttattgcttctgacaa

SEQ ID NO: 672124 - DNA, 214 bp, Homo sapiens
  misc_feature (178)..(178): n is a, c, g, or t
  misc_feature (198)..(198): n is a, c, g, or t
gtggttaggaagcaatttcccaatgtacctataagaaatgtgcatcaagccagcctgaccaacatggtgaaacccatctgtactaaacataaaaaaattagcctggcatggtggtgtacgcctgtaatcccagtgacttgggaggctgaggcaggagaatcgcttgaacccgggagcnggaggttgcagtgagctaanatcatcgcccccagtg

SEQ ID NO: 672125 - DNA, 135 bp, Homo sapiens
cggcgtacagcgggttggtgtcgttcgtcaacgcgctctacttcgccggggttcagcggggtgatcctgtcgatcatgccgatgctgatcctgcgcggcgcacgcaaacatggcgaccagacgccgcgctggcag

SEQ ID NO: 672126 - DNA, 165 bp, Homo sapiens
aatacggtggtgctgatggtgatgtctgctcccgggattaggaggcagaaggagatccttccgcggtgctagcgtgagatggatcctctcagtgcccaacagctggctgcggatgttggagttggagatgatggccgatatgtacaacagattgaccattgcttg

SEQ ID NO: 672127 - DNA, 770 bp, Homo sapiens
ctagtcacatgcctatgcagatgagtcaaacccaggcccatgacccgtatacacgggccctatcaggccctcttaagttgacctccggccgtagtccatggtgattaatcaagttccactcacataacgctcctcatactagtctctactataccgacactcgaaccatatatccaatgatggcgcgatgtaagcacgagtaagcacatgaccaaggccaccacactaccacctgtccgtcaaggcctgtcgatgacgggataatcctatattaattacctcagaagttttgtttcttacgcaaggatttcttctgagccttgttaccactccagcgtagctccctaccccccaattaggagggcactggcccccaacaggcatcaccccgctaaatcccctagaagtcccactcctaaacacatccgtattactcgcatcaggagtatcaatcacctgagctcaccatagtctaatagaaaacaaccgagaatccaaagatgaattcaagcactgctcattagcaatatttagctgggtctctattttaccctccgtacaagcctacagagtagcttcgagtctcccttcaccatttccgacggcatctacggctcaacatttgttgtagccacaggcttcgcatcggacttcacgtcacttaatggctcaactttcctcactatctgcttcatccgccaactaatatttcacttaatccaaacatcactttgttcgaagccgccgcctgatactacattatgtagatg

SEQ ID NO: 672128 - DNA, 198 bp, Homo sapiens
cagctgggacagctattaggtgttgttgatttggttaaaaatgtaagggatgatgctaataattaggccggggtgggtggatcacctgaggtcaggagttcaagaccagcctgaccaacatggagaaaccgtgtctgtaccaaaaatacaaaattaactggggtggtggcacatgcctgtattcccagcttgctcaga

SEQ ID NO: 672129 - DNA, 185 bp, Homo sapiens
cacactcaggaaacaagttataacggggcatcgtccaatatgaagatacatttgaatggtggcgcctgccatctgctaatagcagttcaaactaaagcgcttgtatcaagtccccaacacagtcaggagcaggctgtagtcacatctcttagacctaagagtacacagctgtcaggcaaagtcct

SEQ ID NO: 672130 - DNA, 156 bp, Homo sapiens
tggccttggggacaggggcccagggttaaacaagggtgggccgtttgctttggttcccacaaaaaaagcccctccccccagcccagtgccccccctgtttatttggggtgcctggcaaaaacccttgctgtttacaattaaaatgtttttccccca

SEQ ID NO: 672131 - DNA, 133 bp, Homo sapiens
ctcggcctatccggaatggcccgacggtactcggactcacccgatgcatacaccagatgataggatgtttcatgtgtgtgtatgcatcggggtagtccgagttacggcggggcatttcggataggccgagaca

SEQ ID NO: 672132 - DNA, 1004 bp, Homo sapiens
tacccagcaggtaagtcttaggccatcgcctgcggtgtctgtgaccctgtggagcagctgaagatccaatgattgcatcaaagcgttatgcccctgtctcatgcatactgtgacatggactgtgaagtgattgctatcatattttggcacctgcccttatccctgtctcagtgtacgaactgtaatacacattgaacgaaacagtccctttcccgaagtacagacataggcacgccaacatggtagcaacagaacgataaacctaagtcttgcagttccgcccatcgcactgaaactgcgtggtgggtgtaggcggcaggagctggcaacaaggcagtaagggggacggacgtgaacgtggtgcagcatgcttgcaacgaacgctctttacataccatctcttgccggtatcctatgtgtaaaccggcgactcagatgtccttgaagtactgtgaacgtggacattaatgaaatacacggaagaagactcaagaactaaacccggggccctctaacactcaactaccgcgcgttccatcaccgttaccaccgacatgcatgggggaggttacgaggaccggctcctgctcgtgaggcgccgagcacgtcgtagaacagacacggggtgaaggcagccgagagccgatgcagggcggtgtgagacccaatccgtgggggtggccagggcgccaaaggccaccccaaccctagaaaccccgaggagcctgcatagcaacccatggggggacatggagatacgaacccataaaagaaggaagtacgattgcgaaggagaatccgagacccgtccacaccaaacaaagccggctaaccagaagtgacaacccggcgcgacaaggcgccaaagacaacatatgtgcgccccaagggcgcggcctgagcagcgactaccagaagccactcggaaccacagagcacggccgggatagccaacaagaccagcagcccgacgcacagcacaagagtagcccacactatcacgg

SEQ ID NO: 672133 - DNA, 546 bp, Homo sapiens
aagcagtatcattactgtgtcttctagccagcaggcattggatcatcattaacaactatttcctacgtttttcctccatgctaggcttgggctggatacaggacattcagagctggcctgatggtctgtctaatgggaaagacggttcataattgactctggcgggttgtgtactcacttaaaaggttttttttttttttttggaacacagttctccctattgttgcccaagcttggaattgctaggttggcaatccttggctcacttcaaccctttggcttccgggggtttaaggggttttcctggcttcaggctcccgaaaaaaattaggattaccgggcgattaaccccgatattgcgcggcaaaacgttttttagctaaaaactctggccagttgggggaggttccgccctcctttgcgggaaaaaaacgggaagacgtcccatacttcggcggccggagggtacacacatatccgctttgaaagaagatctgcgattatcagatctctataaggcgtgggattcaaccgcgtgcttgctct

SEQ ID NO: 672134 - DNA, 1468 bp, Homo sapiens
ggcgcctccggttgtcgtacgtgattgctgcgctgcgacgtggtttttctgggcgaatcatctcgttcgagcgtgcgctccggtgacgttctgtgcagtctttgtgcttcgacgctttactctctgtcgtggtgacaccacttggacccgtggcccctccgtggctcttcgtgagggccgtggggtgcgccacaactcgttcttcttttttgggaggcccccggtttcccctccgggtcgcctccctgggttgtgtgtaaccagacccgcgggttgttgcaacgcccccggtgtggtgcgccggggccaccaccccaccgtagtgggccaatgggccaataagcctttccccccacaagtggaaactgtgtttccctgagggccacggggtggccgccgagggacgcgtcttcccatgttgtgcgccgcgtttttgggcacgccatctccgggtgtggcaccgctcgccccaggtgggtcttggccaagagtttccgcaaggtgctgcaacgcctggctgtgagaggtgaatccccgcgccccccccgcttggtttttccccgcacttgcagaacgagccgtgccgcggtgcctgtgttttttaaagcaacactttggggttttttcctccccatctccagggatttcttgtttcctctagcgattcttgttgccctctgtgtcgcaagatgggtgttcccgcggaggaggccccccggggaggcctcgcttcgcccctctgcgggcgcccccctcctaggtgggcgttttgcacgaccttcctgggcgttctgaggtcccacttgggcccccgggttgtggggcccggcaccaccgcctttttctgcgcacctctgtgcccggaggtttcacgtggccccacgggtcccctctgggccccctctttttgttcgtgaacagagttcaccacaggtgcacacacacgaagagggggcccccgctgctcctcgccctcggcttctgaaaagccccacatcgctgttctggcttgcgcccactcttttcggtgctttttaatgctttacaattattatatgaggagagcccacacgcgaggtccgttgctttcgagactccacgccactccacggggagcgaactgtctgacactctcttgggcgcacacacgacggaacttcacacttggtcccaacacacccgaaggcgcgagaccccgttcaaccacgccctctcacagtgcaccttcccacaagccccctcgccttgttctgtgccacttccgcggggcacagctcttgcgagggggtttgtctgtgggaatctggcgccactcgtccgggatcctccacgaaaccgcagaagcctctcccacgctcacacccctggaggacggccggctctttaatatgcacccacagggactcacacgctgggaacccccctcccacccacccgcccaccaattaagatcgcccccacctcacca

SEQ ID NO: 672135 - DNA, 497 bp, Homo sapiens
  misc_feature (14)..(14): n is a, c, g, or t
  misc_feature (416)..(416): n is a, c, g, or t
  misc_feature (423)..(423): n is a, c, g, or t
  misc_feature (431)..(431): n is a, c, g, or t
  misc_feature (453)..(453): n is a, c, g, or t
actggggcatggtnggggggggggtgaaagatacacttggacagggccaagaggcatttcactgccatgaaacaaggcagggaggggttctaatacacacaccagggggccctcctgcccctcagaggtcaaggggctgatcctatattggtatgaggaatggctttttttctgatgaccacatgtgggactatttcaaccgccacaagaaaccccagaagggtttttgttttgtttttttttttctttacttttttaataaaagtaaattaacacataacgaaattcagggttggtcccaacctagggccagatcctctggggtcggggggggaacagttgtcacatcaccacgcaggttacattcgtcttccactgggatgactagggcccccaggcagtaggcagtgacctgnctgcagnagagcagngggcagactccgctcatggggncagacaggctctgttgcttctcctcactggtcatggctttgcat

SEQ ID NO: 672136 - DNA, 190 bp, Homo sapiens
taacagttaagggtatctgggttcatactggaaaactaaactccatgcttatggctaaatgtggtctttgccaattaattttaaaatgcacgcattttataagaaattttacattatcaatggttccctacacgtattggttcgcgtaatttttgaaagtaaacgtcatgactcagtggtgctttggtgg

SEQ ID NO: 672137 - DNA, 812 bp, Homo sapiens
caaaaagacgtcggagaaaaagtgccgcgaaaaaaatggatgagttgcaatttctctcgggaagtggcgcgggtgtgggtgcgtggtgttgttgttcccaacgggccccggaaggcccaacttccgcggaagggcaacgcggcgcggataggcgaagcgccgtaggcccaagcggccgggggaaggacgacctcgttatcccgcgttccccgcacgcgctgtggactcgggaacgtgagtgtggccggggcctgtgcgggaacggtggcattggtgcggggggcctgtggaacttgtgcctataggaatttcccggaaccccggttacaaacaccaaagttgtgcccttcttccgaagcttaggccgcgggccgaagaagacgcccataagacttcgaagttgcggaactcgcgggattgggcgagacgggccgaatggggaatagtggggggggaagcgggtgcccccccgagccccaggaactcgggccacaccaagggagaagcccggaaacagcgggggccccccgtgggatgcaggcactggggaaaaagaagcacctcagcattggtgcccccgaggagccccccgggggaagaccctataatactaaacaggggcccacgggaagccgagaaaggcgggggcaatgtgcgcgggggccttggggcgggagaagggtgggaggagactgtgacccactactcaaggacagcacaccccaaaggacgatagtgagagccaataaaaagtcatgaggaatgggccccaaggagccccatgcatggcaatcagatggcatacccccggg

SEQ ID NO: 672138 - DNA, 554 bp, Homo sapiens
  misc_feature (15)..(15): n is a, c, g, or t
  misc_feature (20)..(20): n is a, c, g, or t
  misc_feature (62)..(62): n is a, c, g, or t
  misc_feature (510)..(510): n is a, c, g, or t
tgctggctagaccantttgnttccctggcttcagccccttttccaggagagtgaatggttcngtcttgctggcattccaggtgtcactgaggtatgaaaaaaaaaactgcagctagctcagtgtctgcccaaatggccacccagatttgtgcttgaaacccagatccctggtggcataggcaccggagggaatctcctggtctgctggttgcgaagacttggggggaaaagcgatagtatctgggccagggtgcactgttcctcatggcacagtccctcatggcttcccttggcctaggggagggagttcccagaccccttgtgctccccaggtgaggtgacaccctaccctgcttcagctcgctgtctgtgggctgcacccactgtctatccagtcccagtgaggtgaaccgggtacctctgttggaaatgcagaaatcacccgccttctgtgttgatctctctgtgagctgcagaccggagctgttccttttttggccatcttgcccntggttcctagtcaagcattttttaagagaggattttcatatagt

SEQ ID NO: 672139 - DNA, 1240 bp, Homo sapiens
agctgccgaagtcagttccttgctggagccgtgagctgggcgcggattcgaccgtaggcaccgaggacacgtcagaggaggcgccatgtcagaaccggctggggatgtccggtcagaacccatgtctgcagcaatgggctgccggcgcttctcttcggccgcagatggacagctgagcatgatgatcctgctgactgtgattgcgctaattggctgggctcgcgtccaggacggcccgtgactcgatgtgaacttcgactttgtcaccgagacaccactggagcgcggtgacttctgccttggtatgcgtgatggcgtggtggccttgtgggcatgttgccgaacgcgtctagcctttcccatcggtggccccggactatgccctggggagtgaggtctggggaggtaggctacggctgtccctgtctacccttcagcgctgtcatcgttgcttgtcgatgggtgaccaaggcagtatggtgacatggaccgattcgttcgggagctccattgctttatcttggtcactatagtttaacccgcgtttcgtttgcgcttctgcgatcaacagtcgcgagactgcccaattgtgcccttagagaatggtgtgttcactcacaatgtggttgggacccccttttgcgatggaagcttcgttcgaatgtggggttcgtggaagaaacaccgtgggacgtggggctaggtaacctcgaacggacgcaattttgcatgcgactggaaagttttcttcagttaaacgcagaatgtttcccctatatatattcccgatcgccgtgggtggtccggtcgcacgtaccttatttcattcgccaaaaacgggatgctggaacacatgtccgctcggttaaaagttcgcctgggccgcctaaccattagcggaatgattacccgctttggcgatcgacatcccccgttgctgcactacaactgtccgcggcagtgatatgcgggttagctcaccatatcatgagcagagcgcgtgtccgccgtcagtgtctatctatttaaatcgacacattcgtttatattacgatttgtgcccgccatttttagagggggttccgcatttccgcacggatgtattacattgtggcgttgtgattttggatatacgtcgtttttgtacgaatgtcgttgcgaaatttttacaacactatcgatcgtgtgtgtttgtggctttacatctcggcttaatacgtattggtgtcaacacagacac

SEQ ID NO: 672140 - DNA, 844 bp, Homo sapiens
  misc_feature (508)..(508): n is a, c, g, or t
gggagttttatatacacgccctttattttgtgttttcttctctattgggcggttttttttctggagcgcgggcactccgggaggatccccacacataaagggcgcacacctctatatttttttttttttttcctctccctaattggcccacaccacaccacgacgttgtggggaaagggagtagagagagaggttttgcacaaaagactgtccccacagtgtttgtttgccccccttggcgcccccttctttaaatgtttccgcacaaagcgtccgtcctttggggggcccccacacgtaattacaagtctgtttctggggaaactctctctttggcgcaccagagttttcctctgagagttgtctctgcgcctataaagagtggggcgccctccccaacgcgcagcactgtgtttgtgggggcaaaaagagagcgccccacaatggggggagcacacaccacaggtctagatgcccctagggacaccctgggggcgccacacataanacaccgggggcgcaaacacactctctgggcgtacacagagggccccacattgtggggcccctccccccacgttgtagaagagggcccccctgttttctggcccttgttccgcgtccagggccgccagaggcgcctggtgcccagaagagtggcgagagtggaatctcttcccgaggatttctttggcccgggcgcctccctctcctgccctgtttttggcgtttcatcttgcgctctccccaggtttacatgctccccttttcttggattttgggggaacctccccccccttatttaagattttttttgtgcccccttggggccgcatgggggcca

SEQ ID NO: 672141 - DNA, 674 bp, Homo sapiens
agccggaagaagcgtgcggttgccatgtaatatcctggccgctgcgggcgcgcgagcggctgagtgctggcgccggtggcgggcgcggagctggcaagcgggtggcggaggctgtgctgcctgactggtgactgcttgagtgcgctgcatcatgggtcgcgcggcgcccaggggagcctgtcgcctggctgcggtcctggtgcgtggatgtgctcgcgctggctgcgcgcggcatgtcatgtccggtgcgccgcggcatgaaatggaaggcatgcttctacaatggctgagtccatgcttggtcatgtgagaatgtgtcggatggggccgagggggaccaaggctggactgatgacttcaacaggatgactggaccgaatgaacggtggactgtcagccagccatatgggcggtgatcatgaagctgcttggtccacggatccagtcggagtacctgctaggcccaaagcccctaggtcacttcagcagtgagctaaaacggctgaaccatggccttcaagcaactgtgtggttcccaaatgaatcccagcggtgccctaggggttggaagcaatccccctgggtcgtatcgccagtcaaggtcggcggacgggggcatttcgtgtggcgatgttgcagttgaatccttgccactggggaacgggatgctgggg

SEQ ID NO: 672142 - DNA, 609 bp, Homo sapiens
gggcgagggggcggtcgccgccgccggccgcctccccgacaccgtcggaggacgaggagccggaggacgaggaggaggagagcggcagcggctgaggaaggtgaagaggagacggtggcgtcgcggggaggagtcggctgggcgtttcctgtcgcgaggctgcctccctggtgctcgggtcgggccttggacatgcagctgcctctgtgatctgcgactcctggatcgtgccgcctctcctcgggcacgtcagcgacttcgtagttcctctggactactgctacctcccgtggttaccgagatgagtcgcggggtgactgtgctgcccgtcctagcatcggcactactctggttttcagccgtacgtgaggcccatcgcgttcagccgtggtgcgctgcacgcaccctcagaacgcaagcctgtattacatagccatgcgaaagtccacggtagcttgaggggacccccttcggggaatggccggatggccttgggctagcccccaatcgttcccctgtcgccaggggcttgacaccgttccctgggcaccagtgaccaatcggcccggccgagaataccgatgctcacaagggtttcgccaggcacgc

SEQ ID NO: 672143 - DNA, 491 bp, Homo sapiens
gaaagtagcagagcatatatggacagtttgagtttttgtcgtcttagtgaggtgaatagatggggggaggagaaatagggtgaaggagtaggtaggggggcgcacacttgatatggaaggcttggtgatgagatgtcagaatttcttgtgttctgctcttaggggaggacgagcttatgatttttgactatccagtccctttgaaaggaggctccttgctgtatagcaaagcttcctcggtggcatgagttctggggtaggatggctgggatagcaggacggcgaggggcagagtgcagaagacagggaggcttctttggctgtacaccttcctctttagtcaaccgtgacagatacataaattcgtgagacctcgacctcgtccctagcacccgaaactctgtctctgctcccaagccaccagttttttccagctacggcggtctcctgataacggagagggcctgcgggttaagggtaccagtccttgg

SEQ ID NO: 672144 - DNA, 274 bp, Homo sapiens
actggccgtggttgaacagcgagatgacggaaagaccagcattcttaagaccttgggatgtgttacactgcgggtaagagaagacactatatcagagaccattataaatctatgattcactctcattattaaccaaaacttgttcacctttatttcatgtattatgggatccagcaaaacccatttatgggaccaaagaccctgcctgtattgttattactaatgcggattaggctgtgaaagtcaccaaatccccgccatggagtaaatggca

SEQ ID NO: 672145 - DNA, 1740 bp, Homo sapiens
gccgctttttttttaaaaccacagaaaactggaagtgggaaatcgacagaaaagaagaatcagatacttgacttaggaggcaaccctatctcttgagatttctctgaagagactcagaacagagattgagtttacctcagattcacccaagtataggccaaaatcgcgggcttctggaagagaaaagagttgttcattactatttctcttttgttagctggtattggcaagccaaggaaagaccaaaactgtcaaggtaggccgagaaaagtaaacatcttttagcaaggcttttattttcaagaatattgtcgcatgtttcttttgcttttcttttgttgtgtaacaaaccaccccaaaacttactggcacaacaaccaccattttatttggtcataattctgcaatctgagcagggctcaactaggcagttcttacagtcatcttgctggtggtcattcatactactgctttcagccagcaggtgagaaatgagatcagctaggatactagcatggctaagcatctctctccatgtaatctcagaaattctccctctccatgtggcctcttttccactgggtctctctaggagaacggtcagattcttacatgatgatcctctctctcgaaaacacaaaagcataagttgtcgggcctttttgcacccagacctggaagagctttaatccctttgcattctctttgttaaaacaagctacaggcccaacccaaactgaaaggaaagtgacttcacacgagcatgaatgccatcaatgtaatagacaactaaaacattcaggccaatgttcagatgactggaatggacacaaccacaagaaactataaaatggctaaagcttgaagactgagcaattatagtcagattctattctctgttctttcccacaatgagagtcaatctacgttcaccaggaatcttaattataagtggaacctgttaatcacttaaaggccatatgaccttagacaagtcaattaatctctctaagcttcagctgctgtattgtaaaacaggaaaaattatacatgccctgcctgtcttagaggaacgctgtagaataaataagagctttgaaagctgtaaactgctatacaaatataaggaaatattatttagctgacaggatggtaagtataatcaacctagctaggctccattctcctccctattaataaaattataaccatcatcaattaccctatatgctaaatgactaccacagcaatattatatataatagcaagctaaaattacattatgttttgttactatgaagaataataacactaactacaatttattattgtccaattatatgtcaggtgctgttggttactttggataatctataacccttacaataactcaatacggtaggtattatccctcatttacaaataaagaaactgacacttggctactttaagtaacctgcccatagttacacagccagcaaatgaaaaatccattcttagcatctaatgcctaataggcacttgataaatatttgttggataaattaaagaacaaataaagccaaggctatctggctttaatgcaacgttgttcaaatatatcaaaggatttctctctcacaatccttatttttatatacagctattaaaactgtaatcatagcaaacacatctaactaacatgaacaatttaaccttccacatcaagaaaatagtttcccatctgaaaagtacattttt

SEQ ID NO: 672146 - DNA, 836 bp, Homo sapiens
ctcggtgttaggacattgcaggcttgtgtcgcagtcttgccgtggctggggtccgatgtggtccccggagcgggaggccgaggccccagccgggggacgaccccggcgggccttctgccccccgagtgggaggaggacgaggagcgcatgtccttcctgttctccgctttcaagaggagtctgcgaggtgaacagcaccgactggtgacagcaatgatggtgcttctgggctgcctgttgtgtgctgatgccacagcctgcctgccatgggtgtgtgttgtgctgcctgctgtctgctgtggacttgcagtgaggcctttcatgcgcaaggggagctgtccctgctggtggcttggccaccgtgttgctttgcagtgacctgcttgctgtcgatgtgtggagctgcagctgtggatgtcagacttcatggccagtgtagacagcagctggatctcctgggggtgtttggggtcttcctgctgaagcctctcaagtggactctttctaacatgctgggagataataagtgttccagctgaggaggtccttgtcgctgtggagctgttgaaggaaaagtgctgaggaggtgtatcgtctgtatcagaactcgcccctctcctcccaccccgtggttggccctgtcagagctcagcaccctactgtgctaactcctgcccagatgaggaggaccttctacttggtgttgctgcagctgcagaaggagaagatggtccagtcctcgagcaaacggggagaagattgggaagttgccaagggcacgtgccaggttctccagtcattgaacttaatttggggtgtccgtgttcaatgaaatc

SEQ ID NO: 672147 - DNA, 349 bp, Homo sapiens
tgccttagcacctttgaaaaaaatctcttggctattctggggggaagctatttctgaatcctgttgggttccattgatctatgtgcctatcccaccagtaaggcctgggttatcctgtttggcttggttgaaaaggaatacctgaggcaggataattaataaagaaaagaggtttatttggctcacggttctgcaggctatagaagaagcatggggccagcatctgcttctggggagggcttcaggctgtttccactcatggcagaaggggaaggggagtaaacatcccatgttcggagagaaggaaagagagaggagggaggcgccagattctttctaacagccagat

SEQ ID NO: 672148 - DNA, 315 bp, Homo sapiens
  misc_feature (306)..(306): n is a, c, g, or t
cacggcaggttgtactcgggcctgggggcttcggggctcaggtcccaagggagggtctgggtcaggccctaccattgaggaggtggattaggggcctttgttctttacgtatgtttgtctttagaggtggactgtgtgggactcaaggactttgctggctgttttccttatgttcatttctggcttcagtctgttggctggcttcacattcttggtaacagttaacgctgtaaccctgatggtaattacgctggcttcattatttttggtagtacaacgctgccgggtgggggtaccggagctcgnatattcgta

SEQ ID NO: 672149 - DNA, 503 bp, Homo sapiens
aagaactcttcatcttcaaactaaaacaatgtgcccactaaacactgattctccatatcttccctctctcaggcgcaacacccagcactctattttgtgcatcgtatcaagtgtattttaggtacctcgtgtaagtgaaatgagaccagatcatgctaagcctcacaacggtgatacgctctgagaaatgcatcattagacagttgtgtcattgtgtggacatcatagagtgtattcacacaaacctaggttgtgtaacacttacctcacacgtaggctatatggatagcctttggctcctgcgttacaaacctgtacggcattactgtactgaatactgtaggaaattataacacaatggtatttgtgcatctaaacacagaagaggtaatgcactgcactacaacattatgacagctatgatgtctctagacaataggaattttgcagctccatcataatcttatggggcaaccatggtatattcagtcccttattgactg

SEQ ID NO: 672150 - DNA, 157 bp, Homo sapiens
atccattgaggaccctgagccccgaagcaccccaggaccgggaacaacggcaaccatggtacaagatccgaatgactgatggggttacacacactgacatacaagaatcacttcctcattgtgcatcaaacctcgtccattctcggccaaaggtgta

SEQ ID NO: 672151 - DNA, 169 bp, Homo sapiens
gggggggggggggcccccccccccccccccaaaaaaaataggggggtggttttttaaatttttttttttcaaggggaaccggggggggttttttttggccccccccggttggggggcctttttttccccctataacccccccctttttttccccggggttgggggggga

SEQ ID NO: 672152 - DNA, 2180 bp, Homo sapiens
gtgaaattctgctccggacatgtcgggccctcgcgccggcttctaccggcaggagctgaacaagaccgtgtgggaggtgccgcagcggctgcaggggctgcgcccggtgggctccggcgcctacggctccgtctgttcggcctacgacgcccggctgcgccagaaggtggcggtgaagaagctgtcgcgccccttccagtcgctgatccacgcgcgcagaacgtaccgggagctgcggctgctcaagcacctgaagcacgagaacgtcatcgggcttctggacgtcttcacgccggccacgtccatcgaggacttcagcgaagtgtacttggtgaccaccctgatgggcgccgacctgaacaacatcgtcaagtgccaggcgggcgcccatcagggtgcccgcctggcacttgacgagcacgttcaattcctggtttaccagctgctgcgcgggctgaagtacatccactcggccgggatcatccaccgggacctgaagcccagcaacgtggctgtgaacgaggactgtgagctcaggatcctggatttcgggctggcgcgccaggcggacgaggagatgaccggctatgtggccacgcgctggtaccgggcacctgagatcatgctcaactggatgcattacaaccaaacagtggatatctggtccgtgggctgcatcatggctgagctgctccagggcaaggccctcttcccgggaagcgactacattgaccagctgaagcgcatcatggaagtggtgggcacacccagccctgaggttctggcaaaaatctcctcggaacacgcccggacatatatccagtccctgccccccatgccccagaaggacctgagcagcatcttccgtggagccaaccccctggccatagacctccttggaaggatgctggtgctggacagtgaccagagggtcagtgcagctgaggcactggcccacgcctacttcagccagtaccacgaccccgaggatgagccagaggccgagccatatgatgagagcgttgaggccaaggagcgcacgctggaggagtggaaggagctcacttaccaggaagtccttagcttcaagcccccagagccaccgaagccacctggcagcctggagattgagcagtgaggtgctgcccagcagcccctgagagcctgtggaggggcttgggcctgcacccttccacagctggcctggtttcctcgagaggcacctcccacactcctatggtcacagacttctggcctaggacccctcgccttcaggagaatctacacgcatgtatgcatgcacaaacatgtgtgtacatgtgcttgccatgtgtaggagtctgggcacaagtgtccctgggcctaccttggtcctcctgtcctcttctggctactgcactctccactgggacctgactgtggggtcctagatgccaaaggggttcccctgcggagttcccctgtctgtcccaggccgacccaagggagtgtcagccttgggctctcttctgtcccagggctttctggagggcgcgctggggccgggaccccgggagactcaaagggagaggtctcagtggttagagctgctcagcctggaggtagggcgctgtcttggtcactgctgagacccacaggtctaagaggagaggcagagccagtgtgccaccaggctgggcagggacaaccaccaggtgtcaaatgagaaaagctgcctggagtcttgtgttcacccgtgggtgtgtgtgggcacgtgtggatgagcgtgcactccccgtgttcatatgtcagggcacatgtgatgtggtgcgtgtgaatctgtgggcgcccaaggccagcagccatatctggcaagaagctggagccggggtgggtgtgctgttgccttccctctcctcggttcctgatgccttgaggggtgtttcagactggcggcaccgttgtggccctgcagccggagatctgaggtgctctggtctgtgggtcagtcctctttccttgtcccaggatggagctgatccagtaacctcggagacgggaccctgcccagagctgagttgggggtgtggctctgccctggaaagggggtgacctcttgcctcgaggggcccagggaagcctgggtgtcaagtgcctgcaccaggggtgcacaataaagggggttctctctcagaaaaaaa

SEQ ID NO: 672153 - DNA, 434 bp, Homo sapiens
ttagcatggtttctctaaggagctcattttttaaaattggacaatggtattagaaaccaagatctaggaaaccgtcattctcagcaaactaacacaagaacagaaaaccaaacaccgcatgttctcactcgtaagtgggaattgaacaatgagaacacatggagatagggaggggaacatcacacactggggcctgtcatggggttgggggctagaggacgggtagcattagaagaaatacctaatgtagatgacgggttgatgggtgcagcaaaccaccacagcacgtgtatacctatgtaacaaacctgcacattctgcacatgtaccccagaacttaaagcataattaaaaataataataataataggcaaggctctgagggaggcatctgtctaaaggcacgtgaccagcatttatggggagaggagaag

SEQ ID NO: 672154 - DNA, 475 bp, Homo sapiens
aggcagctgctgcctgcactacagagggcgacggtagcttgggcgcccagatggcggacgcatggtttgtggtggcctctgtgaagtgtgtgtgctccatcgcctgagggtcaccctggctggggccacataccccggtcttcctctgtctggagcctggatcagctggtattggacactattcagtctcaggtgatagagttcagttttcttatcccacccatgcacacaaaaaggtaactattctgtgaggtaataaacgtgttaagttgacttcattcatgtccactctgtcatccacaagtaaggctttcataacaatgacacagaaaattaatgttgctaaggatgtggagaagttggaggccctcatgatctggctgctatgactagaaaatgatgcccttgctgcggaaaacaatttggttgttcctcacagaatgagcgttgggtgaaaaatgacatcaagatgtcc

SEQ ID NO: 672155 - DNA, 755 bp, Homo sapiens
  misc_feature (251)..(251): n is a, c, g, or t
  misc_feature (254)..(254): n is a, c, g, or t
  misc_feature (279)..(279): n is a, c, g, or t
  misc_feature (286)..(286): n is a, c, g, or t
  misc_feature (301)..(301): n is a, c, g, or t
  misc_feature (304)..(304): n is a, c, g, or t
  misc_feature (308)..(308): n is a, c, g, or t
  misc_feature (338)..(338): n is a, c, g, or t
  misc_feature (345)..(345): n is a, c, g, or t
  misc_feature (354)..(354): n is a, c, g, or t
  misc_feature (360)..(360): n is a, c, g, or t
  misc_feature (370)..(370): n is a, c, g, or t
  misc_feature (394)..(394): n is a, c, g, or t
  misc_feature (422)..(422): n is a, c, g, or t
  misc_feature (437)..(437): n is a, c, g, or t
  misc_feature (504)..(504): n is a, c, g, or t
  misc_feature (515)..(515): n is a, c, g, or t
  misc_feature (582)..(582): n is a, c, g, or t
  misc_feature (595)..(595): n is a, c, g, or t
  misc_feature (642)..(642): n is a, c, g, or t
  misc_feature (689)..(689): n is a, c, g, or t
  misc_feature (693)..(693): n is a, c, g, or t
  misc_feature (695)..(695): n is a, c, g, or t
  misc_feature (697)..(697): n is a, c, g, or t
gatcctgagatcacgctctatgagaagggacataccacacgtaatgtatccacacacagagacccatgcgtacacagacgacacatactagacgactgagaccgagtgtgtacagtaggaccagcactcacacccatctagaagaagggagcccccggtataccaagcgagccacacgtgttcagacacacacatcacagaccttgactcactacactgaggcctttccatagctccacagcttcccaccnccnccccaccaaaccggggttctagagntaaggangggggagggtattanacngccncagtctgactcctcaacccagcagcaattngaggggntgagggggnagaggngctgcctttnggaggcccccttcacccgcagctntgatgcccttccccatcccccctgtccncaccatatgccttanccccattctacccccctgctatgcaagtgcccctgtggcttgtccccaaccccctcagcaacaaagntcagctggggnacgagagtaatttgaagaatgcttgaagtcagcgtcttccattccagaaagacccccattcttcctntgggggtatgatntggaagctggtttcagcccaggacccaccactgaggagaggatctanacaggtgggcctaattccaaggggcccttcctggcctggagaaggcntttnananacacacaacacataaacacacacacacacacacatatcacagttttcacacagccctt

SEQ ID NO: 672156 - DNA, 291 bp, Homo sapiens
  misc_feature (100)..(100): n is a, c, g, or t
ttttttccctaaaacccccccccccccttttttaaagggggggaaaacgggttccaaaaccttttttttcaatggcccccttaagtttttggggaaaaancgggtttttttaaccaagccctggtaaccccttccaaaggaaaggaaaatttttttgggccccccttggttttttttttgggggggggggttttaagtttttggtttttaaaaccgggcctttttttggggaaccccttgccccaaaatttttccccaattttttggccccctttaaaaagtttttttgga

SEQ ID NO: 672157 - DNA, 1021 bp, Homo sapiens
gctggaatgccatggcgcttatgctggcggtgctctttcggctgggccttcactacgctgtctcgtcttcagagcaatgaagattactttaaggatctgtgtggaccagatgctggggcgattggtaatgccatagggcaggctgactgcaaagcccaggatgagaggttctcagctcatcttgcaccctgggggtccttcatgaagcaacttcttgacattccccagtggctacatctttgaccggttcaagaccaccgtggcactcctcatagaccatactattttcgtacaaccatccgtcacatcgtcattcaatagcctatacaccgtcttgacaaggctacaggcgcgtggctggatccttcactgtgccatgctcaatgtcctcaacgcaattggaggagaactccgtgattctctccagtacagccaagaccttgacgagattggggaaccgtattagagccatacactgttcgagccatcatcgactactagtacagatggcagcaattatgacttcattccttcgcgtacgtcttccgttatcaattaacgctctctttgatgaaagaagtgcatcagccctcagaggcgctccttcatccttctatctactgtcgtgacagtacccttgggattgtagacacagcactattccatcctgaatgccccagggggtcacatcccataaccactgaccccccaactacagctattgggtctgtgccctgggaatggcaccacaagagtgaagcgcaaggaacacagctgagcattgaacaacagggagctaaaggtcacaaggagcttcctttccagcgaaggaagagaccccatgggcaggggccatgaagcaggaactcccgctcctttctggcagcttccgctttctctccggcgctttgccttggcaccttggtgtgggtgcctgtgcattccacgttggtgggcctaccgtcttcatttgggcactcctcagtcctttcttgacccagccatggccggtggtgccctt

SEQ ID NO: 672158 - DNA, 409 bp, Homo sapiens
gcctagtgactgctccggtgatgtactgtcttctggcaggtgtgctgctgctttctgcctggggtgacggctgctttcttggctggtgtggcatgtgcaacctttttgtgttggggaaacgaccaccttctttgctgaggttgcagcagccttcttgcccttatcttctgaggtatgacgacctcttctccactgctatcatcttctgcatctgctgacatttcctcatcttcactatcttcttctacctcctttggaggaggagccatttgcttggggtcaccttgattttgacctgccttcgggagctacaaccatgatggcggcggagtgtgaagcggacaagtggcgcagatgagtccagaagaagccaagcgacggcgatggcggccgcgggtgttgaagatcc

SEQ ID NO: 672159 - DNA, 292 bp, Homo sapiens
ctgtgctctacctggagctccttcggacagggtagaaagccgtttggtcgcgaatctgatgcgcttttccttgagctttttttcggggggcctgtgcgcccttgatgggcttgttcagggcttgcttggcgatggctgcattggcggaatcacaagatgagggaggagtttctggagcttctgctgcttcagatatttggcttggaaaaggtaccaggagaccttacctgtcgcctatcaacttctgtacctcggacttcatggcgctccgtactgcgttcccagaatttat

SEQ ID NO: 672160 - DNA, 393 bp, Homo sapiens
gctttgtctgtctgtccatccagctcacctgggctctgccctcccccctcaggcctgctgcacgaagcagggtccacagacgaccggattgtggtgccccagcggggccgctccacccgcgtgcccgtggccagtgtgctcatctgagaggctgccgctcacctacctgcacatctgccacagctggccctgggcccaccccacgaagggcctgggcctaaccccttggcctggcccagcttccagagggaccctgggccgtgtgccagctcccagacactacatgggtagctcaggggaggaggtgggggtccaggagggggatccctctccacaggggcagccccaagggctcggtgctatttgtaacggaataaaatttgtagccagaca

SEQ ID NO: 672161 - DNA, 363 bp, Homo sapiens
tcctaccccacgacctcctacccctcctgcctcgacacctccgtggggtcttactttctccctcccaactatctgcagtcctagtttcgtcctgtcttccctgggcttcactgctgtggcctttgtcacgggctccctggctctgtgggctccggcattcctgctgcgttcccgcgtggtccttggggagaccccaccctgccttcccggagactcctgctcttcctctgacaggtgcccagatggggctatgctggggggcctgcgggtggcagggctggagtgaagagcatctgtggctcagacccaggcagggagtttgactcctgacttcacaagctgcctgctctcctggaatctccg

SEQ ID NO: 672162 - DNA, 163 bp, Homo sapiens
aagattcttttcctgtgtatttctaccgccgcactcgtcctctcctttgctcgctcagccgcatttgttctgtacgtggtgatcgccagattattgctccaccgccggggcagccccaagggctcggtgctatttgtaacggaataaaatttgtagccagaca

SEQ ID NO: 672163 - DNA, 2387 bp, Homo sapiens
  misc_feature (180)..(180): n is a, c, g, or t
tctttttgacgctccagggaccgcagggtctgggaaagttcctggttactccggcgaccggccggccgtcacatgacatgtgagccctggcggaacgcccaagaggcttccgtagtcgggtggcaggtcacgtgtcgaaggcttgcccgcggggaccccttccaccctggctccagcgtnacatgaccggctttaagcaacatggcggctgccgtggtgcagcgcccgggctgagcgacagcaagtgcagcgggctcctaccccgggtgaggggtggcctccgcgtgggatcgtgccctcttcagcccgctcctgtccccgacatcacgtgtattccgcacgtcccctccgcgctgtgtgtctactgagacggggaggcgtgacagggcccgggtcccttctcagtggtgctctgtgcttcagggcaagctccccgtctccgggcgcacttccctcgcctgtgttcggtccatcctcctttctccagcctcctcccctcgcaggtgggatcgtcggtgggaccggagcgcgggcgggcgcggccccccgggaccatggccgggtccgacaccgcgcccttcctcagccaggcggatgacccggacgacgggccagtgcctggcaccccggggttgccagggtccacggggaacccgaagtccgaggagcccgaggtcccggaccaggaggggctgcagcgcatcaccggcctgtctcccggccgttcggctctcatagtggcggtgctgtgctacatcaatctcctgaactacatggaccgcttcaccgtggctggcgtccttcccgacatcgagcagttcttcaacatcggggacagtagctctgggctcatccagaccgtgttcatctccagttacatggtgttggcacctgtgtttggctacctgggtgacaggtacaatcggaagtatctcatgtgcgggggcattgccttctggtccctggtgacactggggtcatccttcatccccggagagcatttctggctgctcctcctgacccggggcctggtgggggtcggggaggccagttattccaccatcgcgcccactctcattgccgacctctttgtggccgaccagcggagccggatgctcagcatcttctactttgccattccggtgggcagtggtctgggctacattgcaggctccaaagtgaaggatatggctggagactggcactgggctctgagggtgacaccgggtctaggagtggtggccgttctgctgctgttcctggtagtgcgggagccgccaaggggagccgtggagcgccactcagatttgccacccctgaaccccacctcgtggtgggcagatctgagggctctggcaagaaatcctagtttcgtcctgtcttccctgggcttcactgctgtggcctttgtcacgggctccctggctctgtgggctccggcattcctgctgcgttcccgcgtggtccttggggagaccccaccctgccttcccggagactcctgctcttcctctgacagtctcatctttggactcatcacctgcctgaccggagtcctgggtgtgggcctgggtgtggagatcagccgccggctccgccactccaacccccgggctgatcccctggtctgtgccactggcctcctgggctctgcacccttcctcttcctgtcccttgcctgcgcccgtggtagcatcgtggccacttatattttcatcttcattggagagaccctcctgtccatgaactgggccatcgtggccgacattctgctgtacgtggtgatccctacccgacgctccaccgccgaggccttccagatcgtgctgtcccacctgctgggtgatgctgggagcccctacctcattggcctgatctctgaccgcctgcgccggaactggcccccctccttcttgtccgagttccgggctctgcagttctcgctcatgctctgcgcgtttgttggggcactgggcggcgcagccttcctgggcaccgccatcttcattgaggccgaccgccggcgggcacagctgcacgtgcagggcctgctgcacgaagcagggtccacagacgaccggattgtggtgccccagcggggccgctccacccgcgtgcccgtggccagtgtgctcatctgagaggctgccgctcacctacctgcacatctgccacagctggccctgggcccaccccacgaagggcctgggcctaaccccttggcctggcccagcttccagagggaccctgggccgtgtgccagctcccagacactacatgggtagctcaggggaggaggtgggggtccaggagggggatccctctccacaggggcagccccaagggctcggtgctatttgtaacggaataaaatttgtagccagaca

SEQ ID NO: 672164 - DNA, 2421 bp, Homo sapiens
  misc_feature (180)..(180): n is a, c, g, or t
  misc_feature (1268)..(1268): n is a, c, g, or t
tctttttgacgctccagggaccgcagggtctgggaaagttcctggttactccggcgaccggccggccgtcacatgacatgtgagccctggcggaacgcccaagaggcttccgtagtcgggtggcaggtcacgtgtcgaaggcttgcccgcggggaccccttccaccctggctccagcgtnacatgaccggctttaagcaacatggcggctgccgtggtgcagcgcccgggctgagcgacagcaagtgcagcgggctcctaccccgggtgaggggtggcctccgcgtgggatcgtgccctcttcagcccgctcctgtccccgacatcacgtgtattccgcacgtcccctccgcgctgtgtgtctactgagacggggaggcgtgacagggcccgggtcccttctcagtggtgctctgtgcttcagggcaagctccccgtctccgggcgcacttccctcgcctgtgttcggtccatcctcctttctccagcctcctcccctcgcaggtgggatcgtcggtgggaccggagcgcgggcgggcgcggccccccgggaccatggccgggtccgacaccgcgcccttcctcagccaggcggatgacccggacgacgggccagtgcctggcaccccggggttgccagggtccacggggaacccgaagtccgaggagcccgaggtcccggaccaggaggggctgcagcgcatcaccggcctgtctcccggccgttcggctctcatagtggcggtgctgtgctacatcaatctcctgaactacatggaccgcttcaccgtggctggcgtccttcccgacatcgagcagttcttcaacatcggggacagtagctctgggctcatccagaccgtgttcatctccagttacatggtgttggcacctgtgtttggctacctgggtgacaggtacaatcggaagtatctcatgtgcgggggcattgccttctggtccctggtgacactggggtcatccttcatccccggagagcatttctggctgctcctcctgacccggggcctggtgggggtcggggaggccagttattccaccatcgcgcccactctcattgccgacctctttgtggccgaccagcggagccggatgctcagcatcttctactttgccattccggtgggcagtggtctgggctacattgcaggctccaaagtgaaggatatggctggagactggcactgggctctgagggtgacaccgggtctaggagtggagtgggcactgatcgtagctaagctagtntgcactgaggtatgttgcaaggagaagccagagcaaaggaggatgccagtagagatgcagtccacatccagatttgccacccctgaaccccacctcgtggtgggcagatctgagggctctggcaagaaatcctagtttcgtcctgtcttccctgggcttcactgctgtggcctttgtcacgggctccctggctctgtgggctccggcattcctgctgcgttcccgcgtggtccttggggagaccccaccctgccttcccggagactcctgctcttcctctgacagtctcatctttggactcatcacctgcctgaccggagtcctgggtgtgggcctgggtgtggagatcagccgccggctccgccactccaacccccgggctgatcccctggtctgtgccactggcctcctgggctctgcacccttcctcttcctgtcccttgcctgcgcccgtggtagcatcgtggccacttatattttcatcttcattggagagaccctcctgtccatgaactgggccatcgtggccgacattctgctgtacgtggtgatccctacccgacgctccaccgccgaggccttccagatcgtgctgtcccacctgctgggtgatgctgggagcccctacctcattggcctgatctctgaccgcctgcgccggaactggcccccctccttcttgtccgagttccgggctctgcagttctcgctcatgctctgcgcgtttgttggggcactgggcggcgcagccttcctgggcaccgccatcttcattgaggccgaccgccggcgggcacagctgcacgtgcagggcctgctgcacgaagcagggtccacagacgaccggattgtggtgccccagcggggccgctccacccgcgtgcccgtggccagtgtgctcatctgagaggctgccgctcacctacctgcacatctgccacagctggccctgggcccaccccacgaagggcctgggcctaaccccttggcctggcccagcttccagagggaccctgggccgtgtgccagctcccagacactacatgggtagctcaggggaggaggtgggggtccaggagggggatccctctccacaggggcagccccaagggctcggtgctatttgtaacggaataaaatttgtagccagaca

SEQ ID NO: 672165 - DNA, 139 bp, Homo sapiens
ccggaagtattggacctctctagatctaaattattaacatttgccacattcttatttcttatctctggtgtatgtgctatgtgtggagacaggggtctcgctctggtgcctagggggtaccgagactcgcaaattcgta

SEQ ID NO: 672166 - DNA, 2691 bp, Homo sapiens
  misc_feature (180)..(180): n is a, c, g, or t
  misc_feature (2397)..(2400): n is a, c, g, or t
  misc_feature (2589)..(2589): n is a, c, g, or t
tctttttgacgctccagggaccgcagggtctgggaaagttcctggttactccggcgaccggccggccgtcacatgacatgtgagccctggcggaacgcccaagaggcttccgtagtcgggtggcaggtcacgtgtcgaaggcttgcccgcggggaccccttccaccctggctccagcgtnacatgaccggctttaagcaacatggcggctgccgtggtgcagcgcccgggctgagcgacagcaagtgcagcgggctcctaccccgggtgaggggtggcctccgcgtgggatcgtgccctcttcagcccgctcctgtccccgacatcacgtgtattccgcacgtcccctccgcgctgtgtgtctactgagacggggaggcgtgacagggcccgggtcccttctcagtggtgctctgtgcttcagggcaagctccccgtctccgggcgcacttccctcgcctgtgttcggtccatcctcctttctccagcctcctcccctcgcaggtgggatcgtcggtgggaccggagcgcgggcgggcgcggccccccgggaccatggccgggtccgacaccgcgcccttcctcagccaggcggatgacccggacgacgggccagtgcctggcaccccggggttgccagggtccacggggaacccgaagtccgaggagcccgaggtcccggaccaggaggggctgcagcgcatcaccggcctgtctcccggccgttcggctctcatagtggcggtgctgtgctacatcaatctcctgaactacatggaccgcttcaccgtggctggcgtccttcccgacatcgagcagttcttcaacatcggggacagtagctctgggctcatccagaccgtgttcatctccagttacatggtgttggcacctgtgtttggctacctgggtgacaggtacaatcggaagtatctcatgtgcgggggcattgccttctggtccctggtgacactggggtcatccttcatccccggagagcatttctggctgctcctcctgacccggggcctggtgggggtcggggaggccagttattccaccatcgcgcccactctcattgccgacctctttgtggccgaccagcggagccggatgctcagcatcttctactttgccattccggtgggcagtggtctgggctacattgcaggctccaaagtgaaggatatggctggagactggcactgggctctgagggtgacaccgggtctaggagtggtggccgttctgctgctgttcctggtagtgcgggagccgccaaggggagccgtggagcgccactcagatttgccacccctgaaccccacctcgtggtgggcagatctgagggctctggcaagaaatcctagtttcgtcctgtcttccctgggcttcactgctgtggcctttgtcacgggctccctggctctgtgggctccggcattcctgctgcgttcccgcgtggtccttggggagaccccaccctgccttcccggagactcctgctcttcctctgacagtctcatctttggactcatcacctgcctgaccggagtcctgggtgtgggcctgggtgtggagatcagccgccggctccgccactccaacccccgggctgatcccctggtctgtgccactggcctcctgggctctgcacccttcctcttcctgtcccttgcctgcgcccgtggtagcatcgtggccacttatattttcatcttcattggagagaccctcctgtccatgaactgggccatcgtggccgacattctgctgtacgtggtgatccctacccgacgctccaccgccgaggccttccagatcgtgctgtcccacctgctgggtgatgctgggagcccctacctcattggcctgatctctgaccgcctgcgccggaactggcccccctccttcttgtccgagttccgggctctgcagttctcgctcatgctctgcgcgtttgttggggcactgggcggcgcagccttcctgggcaccgccatcttcattgaggccgaccgccggcgggcacagctgcacgtgcagggcctgctgcacgaagcagggtccacagacgaccggattgtggtgccccagcggggccgctccacccgcgtgcccgtggccagtgtgctcatctgagaggctgccgctcacctacctgcacatctgccacagctggccctgggcccaccccacgaagggcctgggcctaaccccttggcctggcccagcttccagagggaccctgggccgtgtgccagctcccagacactacatgggtagctcaggggaggaggtgggggtccaggagggggatccctctccacaggggcagccccaagggctcggtgctatttgtaacggaataaaatttgtagccagacaccaaaaaaannnnctcgtctttctctgggtggcctctgatcttgcaccccgtcttcaccccagggctcctgaagactgtgggtcattcctcagggctctgggtgagtctctgcccttctgggctgggcgactgagatgggggactgctcttctccgagtgagctggctgagtgtgacccgtgagtcacacacccatgctctncctggagcctgtcaccttgcctcacaaggcctggctgaaggttgggggttggaactgcccctttcgtacccccagacgtgtctgttataacggatccgctaa

SEQ ID NO: 672167 - DNA, 125 bp, Homo sapiens
cccgactagcccgacagctgccctcagccaggcctgttggttggtgtctccatcggcctggtgacccccaatgtgccctggccccaacccgtccttcttttcagagtctgtctggctagtcgggg

SEQ ID NO: 672168 - DNA, 480 bp, Homo sapiens
agcaatcttggaaaggcccctaatctacctcctcaatgggggggcctgacccaaaccctcccttggtaccctgagccccgaagcccccaggcccgggaccaccggcaccctggtacagtccgctgatgatggggttacacacctgctccagctccttactcttgtgctcaaactcgtccttctggggcaaggtgttggcgtccagccacgagatgacctcttgacacttgttcagcaccttctttttgtacgcctcgctgatcttgcccttgagccccttatcctccacagggctcttcatgttgaaaggcgaagactccagggcgttttgggtggcaccctctttggcctgcaccctttcctcccgtttgttacttgtccccctcctggaccaaggccgcaaatttcttccttgtcaggcgggcctttttggttggtgggggcgaaattttcgtggctggcgcggcttttattccaggc

SEQ ID NO: 672169 - DNA, 2150 bp, Homo sapiens
  misc_feature (180)..(180): n is a, c, g, or t
tctttttgacgctccagggaccgcagggtctgggaaagttcctggttactccggcgaccggccggccgtcacatgacatgtgagccctggcggaacgcccaagaggcttccgtagtcgggtggcaggtcacgtgtcgaaggcttgcccgcggggaccccttccaccctggctccagcgtnacatgaccggctttaagcaacatggcggctgccgtggtgcagcgcccgggctgagcgacagcaagtgcagcgggctcctaccccgggtgggatcgtcggtgggaccggagcgcgggcgggcgcggccccccgggaccatggccgggtccgacaccgcgcccttcctcagccaggcggatgacccggacgacgggccagtgcctggcaccccggggttgccagggtccacggggaacccgaagtccgaggagcccgaggtcccggaccaggaggggctgcagcgcatcaccggcctgtctcccggccgttcggctctcatagtggcggtgctgtgctacatcaatctcctgaactacatggaccgcttcaccgtggctggcgtccttcccgacatcgagcagttcttcaacatcggggacagtagctctgggctcatccagaccgtgttcatctccagttacatggtgttggcacctgtgtttggctacctgggtgacaggtacaatcggaagtatctcatgtgcgggggcattgccttctggtccctggtgacactggggtcatccttcatccccggagagcatttctggctgctcctcctgacccggggcctggtgggggtcggggaggccagttattccaccatcgcgcccactctcattgccgacctctttgtggccgaccagcggagccggatgctcagcatcttctactttgccattccggtgggcagtggtctgggctacattgcaggctccaaagtgaaggatatggctggagactggcactgggctctgagggtgacaccgggtctaggagtggtggccgttctgctgctgttcctggtagtgcgggagccgccaaggggagccgtggagcgccactcagatttgccacccctgaaccccacctcgtggtgggcagatctgagggctctggcaagaaatcctagtttcgtcctgtcttccctgggcttcactgctgtggcctttgtcacgggctccctggctctgtgggctccggcattcctgctgcgttcccgcgtggtccttggggagaccccaccctgccttcccggagactcctgctcttcctctgacagtctcatctttggactcatcacctgcctgaccggagtcctgggtgtgggcctgggtgtggagatcagccgccggctccgccactccaacccccgggctgatcccctggtctgtgccactggcctcctgggctctgcacccttcctcttcctgtcccttgcctgcgcccgtggtagcatcgtggccacttatattttcatcttcattggagagaccctcctgtccatgaactgggccatcgtggccgacattctgctgtacgtggtgatccctacccgacgctccaccgccgaggccttccagatcgtgctgtcccacctgctgggtgatgctgggagcccctacctcattggcctgatctctgaccgcctgcgccggaactggcccccctccttcttgtccgagttccgggctctgcagttctcgctcatgctctgcgcgtttgttggggcactgggcggcgcagccttcctgggcaccgccatcttcattgaggccgaccgccggcgggcacagctgcacgtgcagggcctgctgcacgaagcagggtccacagacgaccggattgtggtgccccagcggggccgctccacccgcgtgcccgtggccagtgtgctcatctgagaggctgccgctcacctacctgcacatctgccacagctggccctgggcccaccccacgaagggcctgggcctaaccccttggcctggcccagcttccagagggaccctgggccgtgtgccagctcccagacactacatgggtagctcaggggaggaggtgggggtccaggagggggatccctctccacaggggcagccccaagggctcggtgctatttgtaacggaataaaatttgtagccagaca

SEQ ID NO: 672170 - DNA, 2231 bp, Homo sapiens
  misc_feature (180)..(180): n is a, c, g, or t
tctttttgacgctccagggaccgcagggtctgggaaagttcctggttactccggcgaccggccggccgtcacatgacatgtgagccctggcggaacgcccaagaggcttccgtagtcgggtggcaggtcacgtgtcgaaggcttgcccgcggggaccccttccaccctggctccagcgtnacatgaccggctttaagcaacatggcggctgccgtggtgcagcgcccgggctgagcgacagcaagtgcagcgggctcctaccccgggtgaggggtggcctccgcgtgggatcgtgccctcttcagcccgctcctgtccccgacatcacgtgtattccgcacgtcccctccgcgctgtgtgtctactgagacggggaggcgtgacagggcccgggtcccttctcagtggtgctctgtgcttcagggcaagctccccgtctccgggcgcacttccctcgcctgtgttcggtccatcctcctttctccagcctcctcccctcgcaggtgggatcgtcggtgggaccggagcgcgggcgggcgcggccccccgggaccatggccgggtccgacaccgcgcccttcctcagccaggcggatgacccggacgacgggccagtgcctggcaccccggggttgccagggtccacggggaacccgaagtccgaggagcccgaggtcccggaccaggaggggctgcagcgcatcaccggcctgtctcccggccgttcggctctcatagtggcggtgctgtgctacatcaatctcctgaactacatggaccgcttcaccgtggctggcgtccttcccgacatcgagcagttcttcaacatcggggacagtagctctgggctcatccagaccgtgttcatctccagttacatggtgttggcacctgtgtttggctacctgggtgacaggtacaatcggaagtatctcatgtgcgggggcattgccttctggtccctggtgacactggggtcatccttcatccccggagagcatttctggctgctcctcctgacccggggcctggtgggggtcggggaggccagttattccaccatcgcgcccactctcattgccgacctctttgtggccgaccagcggagccggatgctcagcatcttctactttgccattccggtgggcagtggtctgggctacattgcaggctccaaagtgaaggatatggctggagactggcactgggctctgagggtgacaccgggtctaggagtggtggccgttctgctgctgttcctggtagtgcgggagccgccaaggggagccgtggagcgccactcagatttgccacccctgaaccccacctcgtggtgggcagatctgagggctctggcaagaaatctcatctttggactcatcacctgcctgaccggagtcctgggtgtgggcctgggtgtggagatcagccgccggctccgccactccaacccccgggctgatcccctggtctgtgccactggcctcctgggctctgcacccttcctcttcctgtcccttgcctgcgcccgtggtagcatcgtggccacttatattttcatcttcattggagagaccctcctgtccatgaactgggccatcgtggccgacattctgctgtacgtggtgatccctacccgacgctccaccgccgaggccttccagatcgtgctgtcccacctgctgggtgatgctgggagcccctacctcattggcctgatctctgaccgcctgcgccggaactggcccccctccttcttgtccgagttccgggctctgcagttctcgctcatgctctgcgcgtttgttggggcactgggcggcgcagccttcctgggcaccgccatcttcattgaggccgaccgccggcgggcacagctgcacgtgcagggcctgctgcacgaagcagggtccacagacgaccggattgtggtgccccagcggggccgctccacccgcgtgcccgtggccagtgtgctcatctgagaggctgccgctcacctacctgcacatctgccacagctggccctgggcccaccccacgaagggcctgggcctaaccccttggcctggcccagcttccagagggaccctgggccgtgtgccagctcccagacactacatgggtagctcaggggaggaggtgggggtccaggagggggatccctctccacaggggcagccccaagggctcggtgctatttgtaacggaataaaatttgtagccagaca

SEQ ID NO: 672171 - DNA, 490 bp, Homo sapiens
  misc_feature (364)..(364): n is a, c, g, or t
  misc_feature (451)..(451): n is a, c, g, or t
  misc_feature (467)..(467): n is a, c, g, or t
  misc_feature (483)..(483): n is a, c, g, or t
tgatggagaccgggtttcgctgtgttggccgggctggtctccactgcctaaccgccgagtgatccgccagcctcggcctcccgaggtgccgggattgcagacggattaggttcactcggtgctcaatggtgcccaggctggagtgcagtggcgtgatctcggctcgctacaacctccacctcccagccgcctgccttggcctcccaaagtgccaagattgcagcctctgccaagccgccaccccgtctgggaagtgaggagtgtctctgccgggccgcccattcgtctgggaggtgaggagcccctctggctgggctgcccagtctgggaaagtgaggagcgtcttttgcccggccgccatctncattttagggaagttgaggaagcgcctttttccccgggccaccattcccattttagggaagttgagggagcgcttttttgcccgggncaacattcccttttanggaagttgaaggaagnctttttt

SEQ ID NO: 672172 - DNA, 421 bp, Homo sapiens
  misc_feature (108)..(108): n is a, c, g, or t
  misc_feature (223)..(223): n is a, c, g, or t
  misc_feature (414)..(414): n is a, c, g, or t
  misc_feature (418)..(418): n is a, c, g, or t
aaggtgttaggttccaaaaggctgcggaagagaataggctactgggaaaaacccaaaccccaacagaattcacgtcccaaaaatcccacattctcccatcgcttcctnaagccttttggctaagattaaagtattaaaaaaaaacccagctctgcccaggcgcagtggctcatgcctataatcccggcactttgggagtctgtggcaggaggattgcttgagnccaggagtttgagaccagcctgggcaacatagcgagaccccatctctacaaaagattaaaaattagctgcgtgtagtagcatatgcctttcaacgtagctactcaggaggctgaggtgggaggatcccttgagccgaggagtttgagtctgcagtgagctatgatcgcaccactgcattccagaccccatntttnaaa

SEQ ID NO: 672173 - DNA, 2218 bp, Homo sapiens
  misc_feature (180)..(180): n is a, c, g, or t
tctttttgacgctccagggaccgcagggtctgggaaagttcctggttactccggcgaccggccggccgtcacatgacatgtgagccctggcggaacgcccaagaggcttccgtagtcgggtggcaggtcacgtgtcgaaggcttgcccgcggggaccccttccaccctggctccagcgtnacatgaccggctttaagcaacatggcggctgccgtggtgcagcgcccgggctgagcgacagcaagtgcagcgggctcctaccccgggtgaggggtggcctccgcgtgggatcgtgccctcttcagcccgctcctgtccccgacatcacgtgtattccgcacgtcccctccgcgctgtgtgtctactgagacggggaggcgtgacagggcccgggtcccttctcagtggtgctctgtgcttcagggcaagctccccgtctccgggcgcacttccctcgcctgtgttcggtccatcctcctttctccagcctcctcccctcgcaggtgggatcgtcggtgggaccggagcgcgggcgggcgcggccccccgggaccatggccgggtccgacaccgcgcccttcctcagccaggcggatgacccggacgacgggccagtgcctggcaccccggggttgccagggtccacggggaacccgaagtccgaggagcccgaggtcccggaccaggaggggctgcagcgcatcaccggcctgtctcccggccgttcggctctcatagtggcggtgctgtgctacatcaatctcctgaactacatggaccgcttcaccgtggctggcgtccttcccgacatcgagcagttcttcaacatcggggacagtagctctgggctcatccagaccgtgttcatctccagttacatggtgttggcacctgtgtttggctacctgggtgacaggtacaatcggaagtatctcatgtgcgggggcattgccttctggtccctggtgacactggggtcatccttcatccccggagagcatttctggctgctcctcctgacccggggcctggtgggggtcggggaggccagttattccaccatcgcgcccactctcattgccgacctctttgtggccgaccagcggagccggatgctcagcatcttctactttgccattccggtgggcagtggtctgggctacattgcaggctccaaagtgaaggatatggctggagactggcactgggctctgagggtgacaccgggtctaggagtggtggccgttctgctgctgttcctggtagtgcgggagccgccaaggggagccgtggagcgccactcagatttgccacccctgaaccccacctcgtggtgggcagatctgagggctctggcaagaaatcctagtttcgtcctgtcttccctgggcttcactgctgtggcctttgtcacgggctccctggctctgtgggctccggcattcctgctgcgttcccgcgtggtccttggggagaccccaccctgccttcccggagactcctgctcttcctctgacagtctcatctttggactcatcacctgcctgaccggagtcctgggtgtgggcctgggtgtggagatcagccgccggctccgccactccaacccccgggctgatcccctggtctgtgccactggcctcctgggctctgcacccttcctcttcctgtcccttgcctgcgcccgtggtagcatcgtggcctgatctctgaccgcctgcgccggaactggcccccctccttcttgtccgagttccgggctctgcagttctcgctcatgctctgcgcgtttgttggggcactgggcggcgcagccttcctgggcaccgccatcttcattgaggccgaccgccggcgggcacagctgcacgtgcagggcctgctgcacgaagcagggtccacagacgaccggattgtggtgccccagcggggccgctccacccgcgtgcccgtggccagtgtgctcatctgagaggctgccgctcacctacctgcacatctgccacagctggccctgggcccaccccacgaagggcctgggcctaaccccttggcctggcccagcttccagagggaccctgggccgtgtgccagctcccagacactacatgggtagctcaggggaggaggtgggggtccaggagggggatccctctccacaggggcagccccaagggctcggtgctatttgtaacggaataaaatttgtagccagaca

SEQ ID NO: 672174 - DNA, 104 bp, Homo sapiens
acactacaggtgcgctgattcttttaagttttttagcagaaatgggatccagtatgctggccagactggtccccaactccgtggactgaatgcgatcctcccac

SEQ ID NO: 672175 - DNA, 2209 bp, Homo sapiens
  misc_feature (180)..(180): n is a, c, g, or t
tctttttgacgctccagggaccgcagggtctgggaaagttcctggttactccggcgaccggccggccgtcacatgacatgtgagccctggcggaacgcccaagaggcttccgtagtcgggtggcaggtcacgtgtcgaaggcttgcccgcggggaccccttccaccctggctccagcgtnacatgaccggctttaagcaacatggcggctgccgtggtgcagcgcccgggctgagcgacagcaagtgcagcgggctcctaccccgggtgaggggtggcctccgcgtgggatcgtgccctcttcagcccgctcctgtccccgacatcacgtgtattccgcacgtcccctccgcgctgtgtgtctactgagacggggaggcgtgacagggcccgggtcccttctcagtggtgctctgtgcttcagggcaagctccccgtctccgggcgcacttccctcgcctgtgttcggtccatcctcctttctccagcctcctcccctcgcaggtgggatcgtcggtgggaccggagcgcgggcgggcgcggccccccgggaccatggccgggtccgacaccgcgcccttcctcagccaggcggatgacccggacgacgggccagtgcctggcaccccggggttgccagggtccacggggaacccgaagtccgaggagcccgaggtcccggaccaggaggggctgcagcgcatcaccggcctgtctcccggccgttcggctctcatagtggcggtgctgtgctacatcaatctcctgaactacatggaccgcttcaccgtggctggcgtccttcccgacatcgagcagttcttcaacatcggggacagtagctctgggctcatccagaccgtgttcatctccagttacatggtgttggcacctgtgtttggctacctgggtgacaggtacaatcggaagtatctcatgtgcgggggcattgccttctggtccctggtgacactggggtcatccttcatccccggagagcatttctggctgctcctcctgacccggggcctggtgggggtcggggaggccagttattccaccatcgcgcccactctcattgccgacctctttgtggccgaccagcggagccggatgctcagcatcttctactttgccattccggtgggcagtggtctgggctacattgcaggctccaaagtgaaggatatggctggagactggcactgggctctgagggtgacaccgggtctaggagtggtggccgttctgctgctgttcctggtagtgcgggagccgccaaggggagccgtggagcgccactcagatttgccacccctgaaccccacctcgtggtgggcagatctgagggctctggcaagaaatcctagtttcgtcctgtcttccctgggcttcactgctgtggcctttgtcacgggctccctggctctgtgggctccggcattcctgctgcgttcccgcgtggtccttggggagaccccaccctgccttcccggagactcctgctcttcctctgacagtctcatctttggactcatcacctgcctgaccggagtcctgggtgtgggcctgggtgtggagatcagccgccggctccgccactccaacccccgggctgatcccctggtctgtgccactggcctcctgggctctgcacccttcctcttcctgtcccttgcctgcgcccgtggtagcatcgtggccacttatattttcatcttcattggagagaccctcctgtccatgaactgggccatcgtggccgacattctgctgtacgtggtgatccctacccgacgctccaccgccgaggccttccagatcgtgctgtcccacctgctgggtgatgctgggagcccctacctcatggcctgctgcacgaagcagggtccacagacgaccggattgtggtgccccagcggggccgctccacccgcgtgcccgtggccagtgtgctcatctgagaggctgccgctcacctacctgcacatctgccacagctggccctgggcccaccccacgaagggcctgggcctaaccccttggcctggcccagcttccagagggaccctgggccgtgtgccagctcccagacactacatgggtagctcaggggaggaggtgggggtccaggagggggatccctctccacaggggcagccccaagggctcggtgctatttgtaacggaataaaatttgtagccagaca

SEQ ID NO: 672176 - DNA, 228 bp, Homo sapiens
ccagggccgtagcccccaggaacccccagggattcccctttgggtagaggggtgtaggtgtcaagcctgagggcccctcgttggggttggagggagaccaggcctctgcggctgacctgcagataggccaaggctgtgggatgagtgactgactcagctctggggcttagtccgggatggggatgccccgccagcccaagcctcccctgcccctctgggagagaggaa

SEQ ID NO: 672177 - DNA, 523 bp, Homo sapiens
ctgatatattcttgaatttgcttgaacccggtaggtggtggtggcatggaactgggattgtactactggactttgtccagggtgacatggacaaactccatctgaaaaaaaaattaaattaaaaattaaagttaagtggctaatgccattaaaatgcacgctttgaatctaaactgccttggggaatctgaataggttctcctttgtataaataaaggttgttataaccttcttaaaaactcttttgatttatgatttcactgtgattattattctttgtaacaaatgctaactggtgaaaatgtaacataatacttttttaaaaaatttataatttaacaggaacgagggggaataatgtcacttacggaggtgtactgtttactaaacccagcttccggaatgggaattaggatagaaaaattaaatccttttttaaccaaattgtaaattttttaatacaaaatccctcaatttgaggaagggttgtgaatatcctttttttagaaccactgtggtactt

SEQ ID NO: 672178 - DNA, 225 bp, Homo sapiens
gcatggctgaggagtcggagaggctctgaggagtgttattcgcttgggagtctccaggccctccgaggtggacgcgtgcagacgggcactgaaccctgagccaggagtccgtcgtgcatgccgaaggctcctcgtactcaccccatgtggggtcttcagctactgaagaattctccctcgttcctgggccaggaagcgccacatcggtgaatctcgaaggcatgg

SEQ ID NO: 672179 - DNA, 742 bp, Homo sapiens
  misc_feature (2)..(2): n is a, c, g, or t
  misc_feature (61)..(61): n is a, c, g, or t
  misc_feature (106)..(107): n is a, c, g, or t
  misc_feature (113)..(113): n is a, c, g, or t
  misc_feature (124)..(124): n is a, c, g, or t
  misc_feature (427)..(427): n is a, c, g, or t
  misc_feature (440)..(440): n is a, c, g, or t
  misc_feature (449)..(449): n is a, c, g, or t
  misc_feature (458)..(458): n is a, c, g, or t
  misc_feature (464)..(464): n is a, c, g, or t
  misc_feature (737)..(737): n is a, c, g, or t
tnttcatcttttctttatggttcttcagtagaagccagaatcttgagttgcccagttaggngccttctgaaccttgctattcttgtttaaagtttctttcttcaannattcantggccaaccantcctggctttccacaagggaacggcgttttggtcttttcaatcacttgctgatagggtgagactgcattgttacccataaccacatgacctaatttagaatcaatcttggcatccagtcttgcatttctaatcaaatttacaatccaccttttcagcctttctttctggagtcatgttcaatttatctgccaacagtgtttaagtgtcgtgagtacacgtgggtggagtgcgacagaaaggtcttcaaaataatgaagagacgggcattttcaatgaaatcctcaagacaagccaccagagantcattcccagccntgattcacnttcccgcgnttttgngagcccctcaaagtcaaagtaacatataaacattcaacaaattctgtaattgggtctttatatgtgtaagactcctgttgaataactttaactagatcttttagaacctgccgacgttttcgaacatccttgtttgttatgactgctgtagtacaatagcgaagaatgtgtggacacattgtctgaattgcattaagatattgtggctgataaaggaagaggtcataatattatcgcgacctttggggtgattgaagaaacaaacagaaacantgaat

SEQ ID NO: 672180 - DNA, 468 bp, Homo sapiens
tttgcgctccatgtatgggctcacatgctcacagcatcatggtgtcagccactcttctcttgaaaccccgtgagtcgcaggacggccctgttctggtgctcctcatttcaatccctgggatcagtcaatgtctggagccaaggagtgcggttcacactgggtcttccttggaagtgagagggcgatccgaagaagttcctggcccagctcttgctgcctccctccagggccaaattcagccgatcgctcccggaaagtgacgcagacgctgtgctgggcctcgatgtgtctgcggtggatggcttgcttccagtggtgccttgccgcccctgactgggagagcttccatggggtcacggtccatgagccgaaccaaattcggtttcttcctcccgggtcacaaagtcctcgatcagcatcccctcctgggaatggggacatgtgccagccctcaaatcagactcctct

SEQ ID NO: 672181 - DNA, 923 bp, Homo sapiens
  misc_feature (545)..(545): n is a, c, g, or t
ggtcagaaaaacacacacacacacacacacacacacacacacacacacacacgaaaaacaaagaaaaaaggtgcttgcgctttctctaacttccccttggcgtctgttgtgtgagcacggctcgtgtattatcttcctcatatatatttagtgtcatgtattacttctctttgatagtgggatcgtgtaaaaaatagtgtatatcacagagatgtgccaatatatcttgaatagtgccaaagagggctattatgatgtcttctttcttctcgtgtgcctctgatgctccaccgtacagggatagtgcttgggagtgtcttctcgtgttatatataagggacttctcttttagagggcacaccacgtgtgcttcgtgttgtggtagtggtagttgtgcaaagatagtgtctctctgctgtgagggaatcctcttttacccattttgtgtgtgcaatcgttgtgggccctcagagagggtttcccccttcccttcccgctgttcctctcttttcttaattcatatatttcctgtagtgttgccaccngttgagccacgcacaacgagggtctatttctcccattgttgtacaaatagaacgacgatatttgtcgctcgttggttgttcttcaacaaagaagaagagcaaaaaaaagaaacagcaaaaaaacgaagttgtttgcgcgcgggccacgatccttgggtccaagaagagaagaaggtttttttaaaaagcccaaacttgtggtgtggggagccgcggggcccccacaataggtgttaatgatgcagacactgggtgtcaaaagggtgttcccccagaagggcaaccgctgcgggaacagcacatgggttggtgtgcgttctcctcaccaaataaaaaaacaccgcggggggacacgcgtggcttgttgaacccaactcg

SEQ ID NO: 672182 - DNA, 161 bp, Homo sapiens
ctcataccagaggcgacacagcaacactcacagctcccaccgtcagttcctgcccagcggctcacctgagcccctcctcctccaggttctggatagctcccagatgctgcctgtctcttcctcaacatcaaaagctgctcaggaaatacttttatttttaa

SEQ ID NO: 672183 - DNA, 187 bp, Homo sapiens
ctcctcgaggtctccagggtggcttgcctcgttgactctttcttcccgtcgtacagtagtgtgtggtgtcgtctgtgcatgctcattccatcaccctttcctggcacactgccaattatccagctatttccgggggagtcggccgtccgtgtcttgtgctgtctaatgaagagtacgcaggcagcag

SEQ ID NO: 672184 - DNA, 1181 bp, Homo sapiens
tgacagaagaatagaaaggcccccagtcctgggcaacatgtgtgaaaccccgttgtctacaaaaaaaaaaaaattgccaggctattgcattggtggggttgctccttgttggtggttgcaccaaggtctacttaggagacagaggcagaggacatttaccctgagcccaggaagttcaaggctgaagcgagcctgggtcatcacaatgtacaatgggactccagtccgtgggttgacagtaggagatactcctgcttcgtcaaacacaataaaaaataaagaagagaagaaataaaggcacccccgaggtggaactttggcctcggaagcgggcagagtttccccggggatgtgttgccaccgtttggtgcgctgcgtgagaagttcatttgttgcgtaccccgatgtgggtgtggatcgccagaacaagcactttgtggttaaccacggtgggaagacttttttaatcgggggcgaaactttctcacccagagggggttaaagaaaggcagtacgcattatcttgggggaacaagagtggggggcgtcccacaccgtggcgccacggagaccatttaccctataatgcacaaaaaaattttcctccaaaggtggtcccacaaggggacccgcctatttgtgacagagctgttggcgccctgggattgggcgtgacaacaccgtgtgtacaacagcattcacggtgtcaacccccatatctgcgtcattatgggcacctgtgtaccactacgtgtgtccccccagaagaacctccgtcggcaacagcccaccaggtggtcgcccgagaaggctgaataccccgagcaaacacgtcgggtacatacccgtgcaaaaatgcccctggagaaggccttgcagcaccgaatcaggggcccacacacccgtgttgatatatacacgtgcgcaccccgatttactcactgcggcgaaaatctaacgcaccgagcgaagcacacagtgcgcgcgtacacccccacgagggccccgccgcgccccccctaacgagaaagaggccaacactgcgaccccatggcggcacagagacacaccaacaaagagagcaccacggaccctccccaaaggccgagcacggggacgacaaaccgcgacccaccaagcaaacacatggcatagcacccacacaccaagaccaccaaacg

SEQ ID NO: 672185 - DNA, 539 bp, Homo sapiens
agcataatccttaggccttagagtcttgctcagacattttctggagaggatatttcccttccaattagtgaagtattgcaacagctgtgagagctagcccctaaagcccttctgggtcccattctcattcatgtaggctgtgccatgttaatggtgcccagtgagccttctagctcacagcactctgttagtggtcctgagaaacagatccatctccttcgagctgccgttgcccactttcttcccttcaggccacagcagacttttacgccacatgcttccattctccctgctctgcagggacaggacagaacctaaggaggctcagggaagggacctgggagggaacattgcaaggaagagatgggccatggagaggaagtatacaaaagtgacccagacaaagagattctttgggctttcatccacgtgaatgtgctgcttttcctctcctacttcgatacttccttctgattttacacatgttttgggattattcatgggcctggatatgatataaaaattaaagatttaaacca

SEQ ID NO: 672186 - DNA, 193 bp, Homo sapiens
tgccatatggacatctgagcagacaggggcgcggaggagagggcaggacaagaatgggagtgcagacagccgggctcccccttggttggaaaaggggcccagatgggcccagctgagaccacagtggcagcggggggtaataaccttgccccagcaggggagggaaggaacccccttggacttggcagcagca

SEQ ID NO: 672187 - DNA, 172 bp, Homo sapiens
actagcccctttttggggaaatacttttcctcctccctgtgttaactggggctgttggggacagggggtgatttttcagtgatttcctacagtgttgttccctccctcaagggtgggaggagataaacaccaacccaggaattttccataaatttttatttctttacctgga

SEQ ID NO: 672188 - DNA, 943 bp, Homo sapiens
aaactcgggagcagggtcttgaagaagtcgagccctaactgcgaagctcaccggtgtactggggcaagcgggagttcgtagatcacctggacaaagtggaccctgtagatggcgtggtgctgtgtggaccctgatctacctgaaggacgcgaaaagtgttggtgacccgtcaccatgcgacctctccgcgtagtgggcgtgaagaccgggatgtgctgggcgtgtgccttgcgcaaagacctggtgtcatcggccagctaccaggcgcgttcgtgcgcaggggcggcaggaagcggaggagcggagagacaaggaaggcgggtgaaggggtctgagcgggtactgagtggcccgcggcgtccgagggctggaaagggtgcacggtcacgcgtcataggggcagtcacatagtatcagcccaacgacgaggcagtgccgatcacgggcgtcgaaggcccggacgagaaagtgggagggaccaggtgagccggcgagactaattaggcgctggggtccggaatagggagtggccgattatccggcacgagggacccatcgaaggcgctcgcgggagacaagccatgagtgcgatggaccaggaggaccccaacggcgggggtcggcccgtcaaaagccgagactgtcgaagtgtgacgggatgccttgcaggaggccaagtacaggggccacacctgttccctgccggggctgaccggggcactctggccagctcgatgggggacgtaaccgaggcatcagggggtcggggagacaaaggaactgggggcccccgtggggcacgggcagcgtgggtgcagacctcgcaaggaagtgcgaacatcggcaaggctccccgcccaagagaggcgggggccgcccacaggcaggtgaaacagggcagggccttaggagaactccgcaccacctgtcgccccttgattaa

SEQ ID NO: 672189 - DNA, 146 bp, Homo sapiens
cggccgggctggccccggagggggtgctgagctggctggcgggcgggcacggctgctgctcactgctaccgctcctccgccagacagcgggcaaatgtgctggcccatttctatggggtgaagctggatgggcaaggtgcccatgc

SEQ ID NO: 672190 - DNA, 123 bp, Homo sapiens
  misc_feature (27)..(27): n is a, c, g, or t
gtgggtaatttgtgaaccttggagatncagcgtagagctttggtattaaaactgcaggactaggagaaaaatcaactgcttgccagatgttgtttgctatgctaaggagttaaaggaaggctt

SEQ ID NO: 672191 - DNA, 355 bp, Homo sapiens
acaaaaaacaaaatctgaagaccagtacaatttaattatctcatgagattttatattcttgacaaggtcaagaattgatgtctctatataaaaagctaagggtattctctagatctgattctgtgtaagcagtatcaaaccaacttagaattttacaattatgaaagcagtttcacccttgtgggtcccaggagcctctgggaccaggcagaatcatggaagggttaagggttacagttcaggggctgagggtgagtctatcatccactattccaaaagtttagttaaatgacctcaaagtatttctagagttttcctagtgaccctgcctcgtaaagctggggtcccgagctcg

SEQ ID NO: 672192 - DNA, 842 bp, Homo sapiens
ttcccccaaggctcagaataatttccggggcgcgtttgttcccccacgtttcccaacaagaccggttgaaaccattacaccattgtgtccgaaaaacagttaaccaatgtgccggattgttggttccctcacaagtttgaacttgtgttttcctccccgcccagttccccctctctggctaaaaagaccaccattggccccttaaatccttgcaagaaatgtgcccccctcttaaccccctgtacaaacggccgactaccacgggtcgctcccccataacaatataacggccgccaaattttacttgctttaccacgtaaaaaaagctgttgtcccaacggccccacccccccgcgagttttattctgttcttgccgtcaacaccccaaaaggatctttgtgctacatctcaccccacgcactgctgtgtccgtacacaaagttccactgcaccactcccccccaacctgggtctaagaaacactttattggctcgctcatccactgtggacactgtattcccccccccctttcagcatgcggacgaacaaatccatccgtcccttcctctcggttcacaaacagactgtatgcactccccctcttctctctggaccacagtagggcaccctgacttctaacagaaattgacctcttagcaaaaagtttataagtggctttttccggtgaacacgcgttaatcttctattcctccaaatggcccacaaccatttcagcacgttaaattttaagaacccgcctgttcattcatcataatgtgagccccaatactgggccgcctctccaaacaattcccttcaccccttcggcccccccccaca

SEQ ID NO: 672193 - DNA, 849 bp, Homo sapiens
  misc_feature (641)..(641): n is a, c, g, or t
tgcccgacgtccctttgggttcccctttttggggcccccccctggcccgggacaacagtttttacgccccggtactcttaccgggcccaaagtgggcaatcatcgacctgggttccctttattagggacctgtgatgaatgggccccacgagggggttcagctggtctcttacactttgagcccgctggcgatgtgaccctcgccccctgtgagaggcgggctctgtaccccgcccagtagcgggagagacccttttggagcgtttaaatattatttgatcgcccgaacccagtgtctcgcttcccacagacccccccagggtcgcgttgatacataccctaacacctggccattgtaaaaattccgggtgtgggggccgaccttcgggggccagagacacccccacctccgaccagccacgtactcatgcgtatagacattccacaccacgtccaagcgcggaacgtatctatacactccgattggatgcccattacattggcccacgcggaccagttacactagggagttaccagcgcgccgatccttatttttagagtgcacataatcgaaccatagggtgttacagacctcgatgttggatcaggacatacccgatgggcgcaccccgcttattaanaggtgtcgtttgttcgaacagatttaagtcctacgtgatctgagttctagacccggggttatcccggtcggtttttatttacttccaattcctccctgttcgaaaggacaagaagaataaggcctattctcccaagcgcctttccccgtaatgaaatcatttccacttagttttaaaccccccccccccccaggacagggttttttta

SEQ ID NO: 672194 - DNA, 972 bp, Homo sapiens
aatcccgccccttccttgtaaaaaacttagtgacaaaatagacaagttagcacatcttggctatgtaattcttgtaatatttatataggaagtgtcgaacgggaggtggcaagagtgtggaggcctgacgtgtgagggaggacaggcgggaggaggtgtgaggaggaggctcccgaggggaaggggcggtgtccacaccggggacaggccgcaggtccatgtccttattgcgctgctagcgtctgacttccaggcacgggtgggaaatattcacatcgcttctgtgtatctcttctcaccattgtatggctgctattggaggatcacgatgtacgtttaacaatgtcatatactgccatgtactagttgtagttgaactcttagacccatgtgtattacagatgcctattaacgtgtagtattgcatcacctacacacactgtgatcacagtgtatcgacctcaaggtgattactgctcctattccaaaacaggtggatgtaacacacacataccgtcatgcttcagttcagccatggtggacccagcggggccaggttctgccgtagcatgggcggcgagacacgcagggacgcgaacccaacaacaaggctggcagggggcaggcccgaagcacgagatgcgtgaacaaccggggccgggtgtcccagaacaaccagggctggagtcccctcacgatccaccccggcgcctgtggaatgctgggccttcacactggatcggggggcgaaaacacagcaaatcaaacaggcgggataacacgtggcataagcatgagacgcggcacataacacacagacccaccatcaccgcgtgcttcagggaccaccgggaggcccgaaggaccaacccgggaatcatggcaaacgcacgacacaggcacagcagaggacgcaacaccggcaccaacacagaacgcgaaacggcagacacaccacaaggcaacgaaaat

SEQ ID NO: 672195 - DNA, 188 bp, Homo sapiens
  misc_feature (62)..(62): n is a, c, g, or t
  misc_feature (128)..(128): n is a, c, g, or t
  misc_feature (136)..(136): n is a, c, g, or t
  misc_feature (141)..(141): n is a, c, g, or t
agctaatgcgagctgactgcattaggactgtgagctctgagcttcgatgccgattggctgantactcagtctactgcatggtcccctacgttttgcactgtgcaagtgggacgcatagtgcttacatntctttgcntggantgttccaatatttctgtcggccgctataacaaggcggggccgtgcga

SEQ ID NO: 672196 - DNA, 182 bp, Homo sapiens
ccccgatgcacagcctgctgccaaaaccacagctcactgccgcctccatagcccccagctgatcccccggacacaaacctgagttgaacatggtagagacaccactggcctcctacccagctggcaaggagccaccccctgaaaccacctaccatagcgtggcagatggagctactgcagtg

SEQ ID NO: 672197 - DNA, 133 bp, Homo sapiens
gatcttgcaggtaacacacagcgaaacgaaggtactgacccgtattggttttaaaaccttcacgaatgagatcggcgggcgatgcgccgggctcacagcggaagacgacggcggacgtggcgtgcatttgtcc

SEQ ID NO: 672198 - DNA, 612 bp, Homo sapiens
  misc_feature (10)..(10): n is a, c, g, or t
  misc_feature (79)..(79): n is a, c, g, or t
  misc_feature (290)..(291): n is a, c, g, or t
  misc_feature (300)..(300): n is a, c, g, or t
  misc_feature (308)..(308): n is a, c, g, or t
  misc_feature (313)..(313): n is a, c, g, or t
  misc_feature (315)..(315): n is a, c, g, or t
  misc_feature (319)..(320): n is a, c, g, or t
  misc_feature (322)..(322): n is a, c, g, or t
  misc_feature (327)..(328): n is a, c, g, or t
  misc_feature (331)..(331): n is a, c, g, or t
  misc_feature (340)..(340): n is a, c, g, or t
  misc_feature (358)..(358): n is a, c, g, or t
  misc_feature (360)..(360): n is a, c, g, or t
  misc_feature (376)..(376): n is a, c, g, or t
  misc_feature (414)..(418): n is a, c, g, or t
  misc_feature (429)..(429): n is a, c, g, or t
  misc_feature (434)..(434): n is a, c, g, or t
  misc_feature (442)..(442): n is a, c, g, or t
  misc_feature (500)..(500): n is a, c, g, or t
  misc_feature (505)..(505): n is a, c, g, or t
  misc_feature (511)..(511): n is a, c, g, or t
  misc_feature (514)..(514): n is a, c, g, or t
  misc_feature (516)..(516): n is a, c, g, or t
  misc_feature (547)..(548): n is a, c, g, or t
  misc_feature (550)..(551): n is a, c, g, or t
  misc_feature (600)..(600): n is a, c, g, or t
attgttcttngatctttccatcagcccttatagtgcccaacaaggctttgtgctgtctgacgacattatacaaaaaaanattctcaaactttttaatctttctgggctccattttatcaatatatccccttacacccgcatatataacaaccactttttcttcaataaccataaaaaaatactatcctttcttcatcaactcaattaaacgcacaccacaactcaaaaattattaaataacaacatcaaaatcaaaaccaaactaaacaaaaacaacaacctcacaatannaaaaaaatnccaacttnataananctannanctacnncanaaccctaanttaaacaacaaatccaananaaaaaaaaaaaaaaanaacattaattacaaaacaaatacctttaataaaaaaannnnntttccaaaaanatctntccgtcantgatggaaatgacatttgttggaatgtaaacagacacatcaccagcctgtgtttctanaactngcaaancantnaaagagccaccaccaaaaacatcgttcattnnanntgctctctccagcaaccgggagtgtaggtagaacacatcaccaggatangcctcacgacca

SEQ ID NO: 672199 - DNA, 284 bp, Homo sapiens
  misc_feature (46)..(46): n is a, c, g, or t
  misc_feature (87)..(87): n is a, c, g, or t
  misc_feature (169)..(169): n is a, c, g, or t
  misc_feature (184)..(184): n is a, c, g, or t
  misc_feature (204)..(204): n is a, c, g, or t
gtgatctagaggatctctgtggctactgctggagactgggggtganccagtcccgaaggcactactggcagtcctacaaacagtatnctcagagataccatcagagaacaaacactaatgttaatttggccaattgagtgcttcatgcctttatgatgtacaggcttgncagagaagattcccngagagtaaatcatctttccnatccagaggaacaaagccttgtctactctacccaaggggggtaaccggagtctcggaacattacggtacattcatggggt

SEQ ID NO: 672200 - DNA, 311 bp, Homo sapiens
  misc_feature (196)..(196): n is a, c, g, or t
gctgcaaggcttaattccagatggatgatgttgtacacagttagagttctgactaatgttgtcttgcaagagggaattgaattaggcaacatggtttgtcataattttggaccactggacatctgtgagggttggcattcaggtgttgtggatgactctttcctaataaaccaaaatatatctcaccgactgcagncatgtgtagatatgtaccaggacatggaagggatgatcaggggcaggctttggtttgggagagttgggctgtgggagtgagtagatgtggtgtggtgggatttcaaggtcccagt

SEQ ID NO: 672201 - DNA, 395 bp, Homo sapiens
  misc_feature (1)..(1): n is a, c, g, or t
  misc_feature (7)..(8): n is a, c, g, or t
  misc_feature (46)..(46): n is a, c, g, or t
  misc_feature (87)..(87): n is a, c, g, or t
  misc_feature (93)..(93): n is a, c, g, or t
nttccgnncggaggccctaaatacttatcgccgcccgaccaccccnccacctcgcattttttaaaataccagcggccccccccccgncataancgcagatcaacctgaactctacgcctcctacgtacctgccatgtcttactactttaccgcatgatgttctttaagaactttccaaaactttcttcaccaatctcatgacagaggaacatccgagaaactataagctgcaaaccaacagggcccgatcttccttaacaatcaaaaacagactcgatactctagagcgtctgaaccaacgacagtcattacattgcaaaaaagtcaacatcactactgcacccccaaactgccactgaccaacaaattgctcccaccctaccaacttcccagac

SEQ ID NO: 672202 - DNA, 365 bp, Homo sapiens
catgcagcttggctgtgttccacgcaggatcaggtagaatttagcatcttccatttatttgttgtcacccttataaaccaccagatctgtgcctcccatcctgcagagttggtgcctatccgggtttcatcagtcttcatcgaaggccacccacatatgctcgcctccgattttatcttctgcgtttcctgaagatgacctgttgtcggaagcgtaaatcttatatgaacagcgtgtgacttcttctcatagcaataggataccttgaccagtctcataccaacagggctgcttgacttggtaatagactactgatttgtattctgaaatgccttcatatccagcaccagggtgaattgctttct

SEQ ID NO: 672203 - DNA, 332 bp, Homo sapiens
  misc_feature (332)..(332): n is a, c, g, or t
acttgggaggctgagttgggaggatcgctggagcccaggagtttgaggctgaccaagccatgactgcacctccacactccagcctgagacagagtgagaccctatctcttaaaaaaaaaaaaaaaaaaaaaaaaaaaaaaaaaaaaaaaaaaaaaaaaaaaaaaaaaaaaaaattgttggggcgcgggcacgcccgggcccgcaaaaaaccgtcttttcaaacactactgtggggggcgcgcgggggccccagtagagagagacacggggatactacggttgtccccgagggacactggggacaaaacagggggggagttctccaatataan

SEQ ID NO: 672204 - DNA, 573 bp, Homo sapiens
agaaggtttgtgttcccgacgccttggatagttggcatagtgctaaatgaaaagtggatctcagccccgaggaagggtcaccctcctagagatagctactacccctgtctcagtgagaccctgtgtatttctagatgcactgcttatgctttcaccaagacccaatggatgtgtgacatgtgatgtgatgccccctgcacatgtgacctaaagaatgctgtgaccatgaatgatgtgtgatcgctggaacatgcatgcatgtgcatggatcctgggtcctggatgacccctccgatgtggcttgcccctgaagatggggcttgtgccttgcgtcgtgaagttgatgtgaatgatggaacgacagaggactgaagacttgttgcgatcttggcccatgtgtacttgtgcctaatctcctccgtcacgaagtgccaaatgtgatggtatggttgcagtgtgatgtgatgtgttgcatgcaacattttacaattgcattcatggccctcttgtgactcatgatgtgaaatgagatatgaccatggagcttggggatgggacggtcttgggggatcg

SEQ ID NO: 672205 - DNA, 410 bp, Homo sapiens
gtccaggactgctgagacacatggtgatccccatctcttaaaaatataaaaatagctgggcatggtggcaggtgcctgtaatcccagctactcaggaggctgaggcacgagagtcgcttgaacccgggaggtggaggttacagtaagctgagatcttcccactgcactccagcctgagcgacagagtgagactccatctcaaaaaaaaaaaaaaaggggggattttaagcggggctatgatggatatgcgcttgtattgccacctaatcgaggtggttgaggtggaaggatctattggacccaaggatttggaggtggagtgagagtatgatggagcttgagaaacagattgagaccttgtttctcaaaaattgtgggaatttgtctcaggaagcttggggggatcttct

SEQ ID NO: 672206 - DNA, 1085 bp, Homo sapiens
ggaggctgggcggacagtgcgacattgacctgcggcagggagcagaggagcgagatgcagcaatgaaccacagccagcagcaatgtcagcgtaagtggaaacctcatgagggtgggtagacgagtcagaaaaaaagaactctggggcccgtagaaaaggagaaccaaatgaggtgagcgatgggggctggctgcgctgaatcaggtgggcccagcacctgtcgttgctcagcacacctggtttttgtcttgttggcagcactggggagtggccatgggccatgagctctggacccctgggtgcctgcttggccctgcagggaccgcatacagcttcggctgcttagaactactccccactggtccattgtctacatccaaggagtgcagggcaggtgctcctgggagtgctgataggacttcgactggtagttatccgttaagacgctttttaacaaagcttgtgcgtttcgctcatctgggctgagaaagggtaaacgcagggcaaagagtggctctggttcaggtcttataccagataagagactgcagggccaagccgtttacgtttacgcgtgaatagcggcacagcgtcatgcgtaaaccgtgaggcttaccaggccctgttctgcaatccataagagctctcaatagcgcgtggtcgagttggcccaaggcgaaccacgagcgcagagtgcgccatttgacacaaagtagagtacggcgtacacgtaagcatagaagatctggaatccatgccaagcgagccatttggcgcttgacgctctcagcggacgagcataagagtacgaacgggataaagaaggtacaggacctcgggcggagcaagtaggcccgatgaacgccaattgtcaattagaggcggagcacacaatctattagcagatccaggacatcaccatgcactagaacacgtgggcacctacgcgatagtcgcgcaccccagcgcggtccactaacggggccccagcatgaccacgagagaggtatgagagaaacgaaggtagatagcgcgcgcgcacccacaccagaattgatgaagcgcacagcgctaagtggccactg

SEQ ID NO: 672207 - DNA, 282 bp, Homo sapiens
aagctccgtaccttggaggctgcagtgcagtggtacaatcttgattcactgaaatctccacctcccaggttcaagcgattctcatgtctcagcccctggagtagctgggtgtataggcatgtgccatcattcccacctaatttttttttttgtatttttgggtagaagaattgggttttcaccattgtttggccgtggcttggttctcaaatttccgtgcccttcaaggtgtgactctggccccaaccttcgggccttccccaaaggtgcgtgggaattcac

SEQ ID NO: 672208 - DNA, 300 bp, Homo sapiens
  misc_feature (161)..(161): n is a, c, g, or t
cacctagtatttcagcacggactacagagcgagactctatcttaaaaaaaaaaaaaaaaaaagtaacttaggtgcagggtgtcctctgttattcactgagaaccgtgccccggttatgaggttgtaccagaaaggcaagtatttcactattgcacactaantcacctgctcaccctaagcattgacagccgagcctgtagccttgaaaggcctttgtgctttgacgggcaggttcttctccccaaaattgcagaccacgaccggtgcatggaaattgctgacccccgtgcgtggaaattg

SEQ ID NO: 672209 - DNA, 284 bp, Homo sapiens
ccgcccagtgtagctggcccatcgcatttgtcgttatagatactgtatgctagccgggcatcgtgtggatctcatcgcgatgggtcctaacacatattgtctgagcggctgaatatgaatagatacagtagaggcgctcctgctatatgatttggatccatgcgtcagttccacccagccacgggtagcatcctaatacgataaacgccagaagctagagcggcagcgaggctgtgagtggggcgtcgacgcgggtacggggtgccgagctcgaatccgggatc

SEQ ID NO: 672210 - DNA, 914 bp, Homo sapiens
tgcaggctgaaaaaatggcgccacccagtacccgggagccagggtcctgtcggcgacagcgcaacaaatccgacggagagatggtgctgccaggttcccggacgccgacagcttggtgaagttggctctgtgggtccgtggtggcagtcaccaaggcatctgggggcctaccacagttggcgatgagtatgatttttaccgaagttttcctggcttccaagcatttggcgaaacacagggagacaggttgcttcagtgcatgagcaagagtaatgcagtaccattgggtgtcgcagaaacattaaggatcgaagtaaaagtgacgtgagtgggaaagacaagttgtgatttactagtggatgccaattgatgtaattctggagagagggggtattttactggatgaagcctcaggtgtaaaaagaatcaaagctgtctcccctgcggatggaggtccccaaaagggtagtgtccagctggaacgtaaggcagagacatatggcaaaaaagcaaaatctgaactttccggctggttcatggcaaaaaatatcatcgacctcagctcaagttcgacgagacagattggcacttccacacacattttttcctaaatttttattaaaccaatgttcaagaactgtaccataagttgtttagggaagggggaccgccacaggatcgctgaagattggaggtccccggcggggaatatcatagagaagaccacggtgtgcgactgttggatcttttaaattgcaaaaactatcacggaggggggtcaggcaacccgtttagatatgaagacagcttataccggaaagcagagcaccgagagatggagatgtagagggccaataagcggaggcgacaatcaacagacacattctgagtttaataccctggagacattagta

SEQ ID NO: 672211 - DNA, 374 bp, Homo sapiens
ttagccactaaatttaacactaggccgggcatagtggctcacgcctgtaatcccagcactttgggaggccgaggcaggtgaatcacctgaggtcaggagttcgagaccagcctggcaaacacagtgaaaccccatgtctactaaaaatacaaaaattagccgggtgtggtggcaggcgcctgtagtccctactcgggaggctgaggcaggagaattgcttgaacctggggaggcggaggttgcagtgagctaagatcatgccattgcactccagcctggataacaggcgcgaatctccatctcaaaaaaaaaaaatttacacctaaaaatagttaaccggtaaatttcactttctgtatatattttactgctat

SEQ ID NO: 672212 - DNA, 525 bp, Homo sapiens
caggcccctgccctactgctggggctcagccgaccgctccgtcctccgcctggccaccgcgactccggccacgcacgtgtccacagatgtccggtgaactcccacgtgtgcgtcccacacgggtcggcctttcttccttgggctcgggccccggacacccaccctcggggacacgtatgtgcggggagcgcgcccggaaccgtcggggccgagcacggcgtctcacgccagagcagccgcggatcggagcatccgctggtccaggaccccccctcccgcccgcaggcacgttgttcgggcagctgtcaccatccctcggccgacgcagcacctctcgacccccgcagcccggaccgcgttcggatgggcgcagcagaagggagccgccgggcagacactcaccacgctcgccgacgccgaccgcgctcgcctgcccgccccagcgctcggccagcacctaggcggggagggcgcgtaccgcatcaggagccagcagcgacgcttccagccctcggggctcctacc

SEQ ID NO: 672213 - DNA, 670 bp, Homo sapiens
  misc_feature (16)..(16): n is a, c, g, or t
  misc_feature (19)..(19): n is a, c, g, or t
  misc_feature (63)..(63): n is a, c, g, or t
  misc_feature (90)..(90): n is a, c, g, or t
  misc_feature (94)..(94): n is a, c, g, or t
  misc_feature (96)..(96): n is a, c, g, or t
  misc_feature (109)..(109): n is a, c, g, or t
  misc_feature (111)..(111): n is a, c, g, or t
  misc_feature (113)..(113): n is a, c, g, or t
  misc_feature (126)..(126): n is a, c, g, or t
  misc_feature (131)..(131): n is a, c, g, or t
  misc_feature (169)..(169): n is a, c, g, or t
  misc_feature (174)..(174): n is a, c, g, or t
  misc_feature (184)..(184): n is a, c, g, or t
  misc_feature (192)..(192): n is a, c, g, or t
  misc_feature (197)..(197): n is a, c, g, or t
  misc_feature (199)..(199): n is a, c, g, or t
  misc_feature (208)..(208): n is a, c, g, or t
  misc_feature (213)..(213): n is a, c, g, or t
  misc_feature (215)..(215): n is a, c, g, or t
  misc_feature (217)..(217): n is a, c, g, or t
  misc_feature (221)..(221): n is a, c, g, or t
  misc_feature (225)..(225): n is a, c, g, or t
  misc_feature (227)..(227): n is a, c, g, or t
  misc_feature (242)..(242): n is a, c, g, or t
  misc_feature (248)..(248): n is a, c, g, or t
  misc_feature (254)..(254): n is a, c, g, or t
  misc_feature (257)..(258): n is a, c, g, or t
  misc_feature (263)..(263): n is a, c, g, or t
  misc_feature (278)..(279): n is a, c, g, or t
  misc_feature (284)..(284): n is a, c, g, or t
  misc_feature (301)..(301): n is a, c, g, or t
  misc_feature (305)..(305): n is a, c, g, or t
  misc_feature (308)..(308): n is a, c, g, or t
  misc_feature (310)..(311): n is a, c, g, or t
  misc_feature (317)..(317): n is a, c, g, or t
  misc_feature (320)..(320): n is a, c, g, or t
  misc_feature (328)..(329): n is a, c, g, or t
  misc_feature (332)..(332): n is a, c, g, or t
  misc_feature (341)..(342): n is a, c, g, or t
  misc_feature (351)..(352): n is a, c, g, or t
  misc_feature (356)..(356): n is a, c, g, or t
  misc_feature (358)..(358): n is a, c, g, or t
  misc_feature (366)..(366): n is a, c, g, or t
  misc_feature (370)..(370): n is a, c, g, or t
  misc_feature (374)..(376): n is a, c, g, or t
  misc_feature (406)..(408): n is a, c, g, or t
  misc_feature (418)..(419): n is a, c, g, or t
  misc_feature (429)..(429): n is a, c, g, or t
  misc_feature (437)..(437): n is a, c, g, or t
  misc_feature (440)..(440): n is a, c, g, or t
  misc_feature (449)..(449): n is a, c, g, or t
  misc_feature (471)..(471): n is a, c, g, or t
  misc_feature (495)..(495): n is a, c, g, or t
  misc_feature (543)..(543): n is a, c, g, or t
  misc_feature (610)..(610): n is a, c, g, or t
  misc_feature (666)..(666): n is a, c, g, or t
taccttctcgaaacanaanattttcctacctgcttatacttggtaaccgagggaatttctaanacttcttgctcatttctgagttttgtntttntntcctgacactatnantnctacttggttgcntcttnagggtctcttctgctgggtccccatgatttgtggctgntgttntgcacaaacnagtttctncagtnanaggagttcnttctnangnagcnattncntcttcttttgctgantctctnctaggntgnnttctnttgttttcaccactnntcttnagttcacctcactgagntctnttntnngcttanttnctcttttnntcnttgtttttnngcttcttgnngatngncttcatcngctncgtnnnttttttctcctggttctccctttttctatnnncgcggcattnntattggactngctcggcntcnattccctcngctacagattctggcacttttnggctacttgtgccacttctggatntgggcttttcgaaggcctgatctggctcgccaactcagttctagaacntagatctgatcagaaggatctattctttgtgccttgtggccacatcagctagcctctgctgtgtgcncgtgtacgtgtgttctgggagtggaggcagctttctcacagtgccttatccatgcnataa

SEQ ID NO: 672214 - DNA, 226 bp, Homo sapiens
agaggaggccagcttactagggggctccccatagatggggggacacgaggaataagcagtagcggggagaaacaggtgagtcatcttggtgagaagaggcaggtcctagaagtgccttgaggcttgcctaagtcctggcctgggcaggagtctggcggagcctctgaggtgacgagaccacctggctgggtgaatgtccagagggggggcagctcgcccctgagtt

SEQ ID NO: 672215 - DNA, 184 bp, Homo sapiens
agcattactctctcaggactaatttttctgttactttatctccttcgggtactcccattatgcatactctgggtgtgcttactagtgccccacataatgtcacggccctgttttcttaattcttccttccctcggatcctttagaaatgttacactctctatcaacctactcggctgagtcttg

SEQ ID NO: 672216 - DNA, 190 bp, Homo sapiens
acgagcttggtgggagccgtgcggttctcaggagtatgtacgccaacaacctggtgtatgacacctcgagacgagcgatgactatcacctcctaaatggacctagaggaaggcagtccaacgcgctgatggtcaggctgcaagactggtagcctgccgtaactgagcacgatcctcaagcaagacctaac

SEQ ID NO: 672217 - DNA, 138 bp, Homo sapiens
gtgcgttgcagcatcactgaggtctgggagtctgagacagcctgaccatcatggagaaacccgcatctctattaaaaattgcaaattggctgggcgtgctgctgggcacctgtgatcccatgctactctgtggagtgc

SEQ ID NO: 672218 - DNA, 790 bp, Homo sapiens
  misc_feature (35)..(35): n is a, c, g, or t
cacaccaccgcgccgatgaagcatcgtaatatgtngtgactcgagtatttaatgttacgtaagtacgcacgaaccagagacacgataacgtgacagtgctatcatatagtaaaacccagcccatgacccctaacaggggccctctcagacctcctaatgacctccggcctagccatgtgatttcactttcactccataacgctcctcatactaggcctactaaccaacacactaaccatataccaatgatggcgcgatgtaacgcgagaaagcacataccaagggcaccacacaccacctgtgcaaaaagggcttcgatacgggataatcctatttaatacctcagaaggttttttcttcgcaggaattttctgagccttttaccactccagactagcccctaacccccaattaggagggcactggcccccaacaggcatcaacccgctaaataccctagaagagccactcctaaacaacatacgattactcgcatcaggagtaataatcacctgagctcaccatagtctaatagaaaacaacccgaacccaataatttaaggactgcgtaatacaaatttaatggggccctaaattacccctctacaaagcctagagagaacttggggtccccttaacactttcgacgggatatacgggttaaaaatttttggaggcacagaggttcaacggagcctaagggattataggcgtaaaatttctcacaatatggggtaaacccgcaactcaatatttaatttacaaccccccttgggttctgcgccggccc

SEQ ID NO: 672219 - DNA, 626 bp, Homo sapiens
  misc_feature (51)..(51): n is a, c, g, or t
  misc_feature (60)..(60): n is a, c, g, or t
  misc_feature (178)..(178): n is a, c, g, or t
ccagctaacctgcccaggacttaacgactcgctccaggtgccgaaaggctnacagagcantacagggaactgctgcagtctttccagtcgaaagatgctcaacacctcattccctgctggagcaagctgaacgaccagttcaaactgggtttcccagttggctaaccttcacacaggncgaagacaagtacttaccttcgggtctccaccgtgaccacccattcctctgactcagaggtcccctcccgtgtcactgaggtggtggtgaagctgtttgactctgaccccatcacagtggtgttaccagaagaagtctctaaggataaccctaagtttatggacacagtggcggagaaggcgctacaggaataccgcaggaaaagccgtgcggaatgagatagaagcatcaccttcctatatgtaggagtgtctgggagggaatctcccagctccccgaggtggctgcagacccctagagaactccacatgtctccaggcgagtaggcctcacccaagcagcctgcccttcctctggattctgtacactaatgcctgcacttgctgctctcgggaagaactgattcccccacgcaactaatccaataaaagccccttgcgatacgtga

SEQ ID NO: 672220 - DNA, 631 bp, Homo sapiens
  misc_feature (333)..(333): n is a, c, g, or t
  misc_feature (359)..(359): n is a, c, g, or t
  misc_feature (399)..(399): n is a, c, g, or t
  misc_feature (457)..(457): n is a, c, g, or t
atgttcccgtcttcactgaagagttcttggaccaagacaaagcgcgtgaggcggagcttgggcgcgtgtgcggaagagtgaatggtggccttcgaggagcagaacgcggtactgcagaggcacacgcagagcgagtgagcagcgcagcgcgagcagtctggagcaggagctggcgctggaggagcggaggacgcgtggcagctgagagcaaggcagcgtcccagtgccggatgcggccaagggctgctcgaccgtgcacaaggatatcggcctatctagcttggccgggttgccgtggtgcacgaggggcggataaacggcgcgcagcttgcnttgggggcagctctcatgtggggganccctgtcgataaacatcttgtggcccccgtgggtactttnctctaacggtgtgaggtcccaattcggaagacgaccgaaacgcactcggtcctcaagncaggcaggagacatggcttcactcggttcactgtctattcagtaggtaaaactcgcctgggaccgcaggggtcagtccgagcgaatgtcactcttggtggagggaggttgcggcgttgggccccacggatggcagaagggagcaaagacttgttgagagcggtcggaccccttt

SEQ ID NO: 672221 - DNA, 970 bp, Homo sapiens
atggcacatgcggcgcaagtaggtctacaagacgctactgccccgtatcatagaaagagcttatcaacctttcaggatcacgccctcactgaatcgaatttgccttggtctgctgtcctagtcctgtatgcccttttcccataaacactcatgaatgaaaatcctaaggtaactactaatgatctcagacgctcaggacctacaaaccggtctgaactatcctgcccgccatcatcctaggtcctcatcggccctcccatgccctacgcgtcctttagataaacagacgaggtcaacggagtcccgtcccttaggcaatcaagatctattggacgagcatcatggtactgaaacctacgagatacgacccgaggttaggcggactagatcctgcaatcgtcctagcattacttgcctcacgcattattcctaggaaagccaggcgagcggcgagtccttggacgtggacgaatgcgaggtgaggcactgccccgattgaagcccccatgtcgtgatatatagtttacatcacaagacgtgttgcatctcatgaagctgggccccactattaggttaaaataaacagatgcaattcccggaagttacagctaaacactattatcgtacacgaccgggggtagactacggtcaaatgcgctgactttggggagcaacgcagagtagatgccaacgtctggagtaatcccctagaatctctgaatgggcccgtgggacctatagaaccgtctacgctgtagagcaggaacaaacatccaaagaacttgggccgggcggcctagacggtctaacctgggtgcgggccaggggaggaagccgccggccaagaccgcggcagggggtcaccaaaaccgccgacactcttgaaccaacgggggaccggacaaagccagcaaacccgggggaaaacaaacaaacacccgagaaacagaacaaacacttcaggagacaa

SEQ ID NO: 672222 - DNA, 183 bp, Homo sapiens
tcgatgtgatgatgcaaggctgactaaatgcacggccttcctcccatcaggagtttctttagttagagcacaattatcccaatgtatccttaatattgcctagcagtcttcttgagcattccccaaccctaccatcactagagaacttatttcccacctgctgctcctccgggccattcaacg

SEQ ID NO: 672223 - DNA, 140 bp, Homo sapiens
ctctatgaggatccccccgccgtaccacgttgctgcaactgcatcggacagcgagcttgatgcggcagaaggggctggtgtgagtgacactgctgatgtgcagctggtggcagtgtggacggaggagatcctggcgctga

SEQ ID NO: 672224 - DNA, 613 bp, Homo sapiens
  misc_feature (503)..(503): n is a, c, g, or t
  misc_feature (506)..(506): n is a, c, g, or t
  misc_feature (549)..(549): n is a, c, g, or t
  misc_feature (567)..(567): n is a, c, g, or t
  misc_feature (595)..(595): n is a, c, g, or t
  misc_feature (609)..(609): n is a, c, g, or t
caggaaagtacctgtgcagatgctggcacttaaggcctatggagaaaacatcaggtgttatagagagtctgttgtagggaattaacgaaaagaccactgagttaagtcaaagaatggtctatttgagtttaggtggtctggtttatggggaccctggctaaggagcatactccaaattcttggtgttaaccctctcagtagtcataagaatagtctccctggtgcactgtattctctcaaaggttttaaatgtttgcatgaagccatctttagaacgtcagatggtctctcttcaactggaatgacaagagctgaaagaaatgtgtgaccacgaggacaccgaaaccgatgagtgacatgctgagactggaaatccaaaatgatagtaacggagagtggcgctaacatcctaagttttggtcacactcttgcctaagtgacaacctgacaaagggggaattttttaaactgatgggaggccatttgtttggactgagcactangtnccaacagaccccgaacccacatgggtcctagaatagaccaggnttttgttttctcttgcanacagggactttcagcataaggtggtatnctcctcgtccttgntccc

SEQ ID NO: 672225 - DNA, 1379 bp, Homo sapiens
gtaactcacgcgtccgctcggacagtcggtcggagtggtttcctgcttcaacaggtgctatggactggaatcctggcgctcgttcgctcgacacactagagacgggacgctgccgctattagcagagccacttctcgttgctagccctctatcaaccagtaaccacgtcgtgagctgcctcgctagagggaccgcccagtacgaacagttccaagatgccctgcggctaggcctacacagaactgtcggtcacgacactggccattcatcgcatttaagatcagctctgacacaattagtatctgtaccacaacagtttccaatacatactggcaatagatgacggtccaaagaaaagcgtatcacaatctctacggaatctttccaccgatgggcctctgacactagtttcaaaacacagacgcaaagtacttctataacgctttgaggtacgtctttctttatctgtcgcgttacacctaagccgtttgtattaaccccattgctttctcaagatagttgctttgttcaaaccttcagccttatgtttgtcatcaccaggcaggcacctgcgacttgactaggagggcattttattgtcatattgaaaacacccgtcttatatgacaccaacaaccaaagtatacgtataatattcccattttccaaggcaccaaggagaaatcctatcttaggttggtaaggcaggacgcgtcagcgtggccaataatcctaggattggtcatatttggtaagtgtaacacaagacggtggcgacattggaatgcgcccctttgtcttgatgtaaaaacccttatacgctgggaacgacgaccttgggtgcaccgtaaaagctactttttcaccttcttgcagcaggcactttaggtttcacaccgcaacaacatacaccatggcattccatagcgtggaacttgaattgcttggcgccgctacagcaacggaccgcgacgttccttggaggcatttgcctcggaacctggcgccaatgcgcattgccttgggccaagcttatagcacacccttcttccgggcgaccaccttaccgagacaacttggttttgcacacatttttccgagccgacttctagtcacataaacgcgcataggacccaacacccttgtgaccggcatatatagcaccaacccgttggagataccctacacccgtttgcgaacgcacaatagtacgaaatagaccgtgtgtatacgaaccaccacttgtccaaagcaatcgatggacattgtgctttggcaaacaatatcttacaacttttgtgtgaccaccgtaaaagccgacactacaaatgtttatactaccctcggtgtggctaacacgtttggtaggtgccccacag

SEQ ID NO: 672226 - DNA, 171 bp, Homo sapiens
tccgtctgagcaagctgggaatgcagtccacctttattgggcgaaactcagtgtaactgttttaaataactcgtgcctgcccacccagtgcccggggggtcagacgatcatctccagctgcctgggcatactcgatgacctgtttggccagttctgtggcgagcctggtgg

SEQ ID NO: 672227 - DNA, 251 bp, Homo sapiens
cgataaacaggcgagaaggattgtcagagaacagtgcctatcgctggagcgttgtgacatcagaggagggaaggccagctctggagccgctcccgtcagggcatccagggagtctctaatgtactctgtcccctggggatttagaggaagtagtccagatggaacctgaagatgctacagaggaaagtcagtggatttctttgagctaggagaataagagtctggagactgggagccttcacttcggcctc

SEQ ID NO: 672228 - DNA, 199 bp, Homo sapiens
  misc_feature (102)..(102): n is a, c, g, or t
ttcattaccgcaaataaagtatatggcgacagaaattgaaacctggcgcagtagatctagtaccgccagggacagatgaattaattataaccaagcattatnatagcacggactatccccgtataccttctcgcatatatgaattaactcatgaatcttactgttgcaagggagagccataagctgagtacccccgata

SEQ ID NO: 672229 - DNA, 318 bp, Homo sapiens
ttttttccgggggcctctttttttcggcttcctcctcaaaaagaagggggggggcaaaataatttttttttggggggggggggggggggggtttccccccccaaagggggtttttttcccccccggccccgggtcttttttttaacaccgggccccttgtttgttggggggcccccctttttttttttggggaagggggggaaaaccccccccccccccctttttggtttttggggtttttcggggcccccccccccccggccccccttttgggggggttttttttttttttttttaaaaccccggggggggttttta

SEQ ID NO: 672230 - DNA, 969 bp, Homo sapiens
gcttcgccgcggagctacgaggctctgctagcacccagataggacccagatcgcccaggcaccgcccgacgccccgacggccgtcatcctgcgccatcccagaggcagggagttcgagcatcccccgcgcgcggcacactcctcggcggccaggagcggggaaagcgaagtgcgagagaccccggaccaccagcgctagtctactatcccgaccgcccgaaccaccactgacccaccttcacaccacagggcccttcctaatgggctctacggccgacagtccaaccaacaaccactccgccttcccacccctaatgactcatcacccgccaccaaccaccgcatcctcccgccaacctcgccataccaaccaccctccaccccgccatgacgcccactccggacaccacaccctttcccaccgcctgcgcgccctctccccccgcgcactgcgcccatccactccccctccttgccccacacctcccactaaccccacccccaccgcctcacccagccccccaacgcgcccctacccgcccctcgaacccgcaacaccgcggttcaaactccgcaccgcctccccctccacaccctcgcccccccctcgccacccccctccccacaccctcccccccacacgccacaactccacctcctcgccccaccctccaacccccctcctaccacccctccacacaccaccccacccttacaacccttccccccccccccgccaccccccccccctcacccctcccccccccctcacactctttcccccaacacccccccccccccccccccccaccctccgccaccccccccccccccccccttcccccccccaccacaacaccccctcacccccaacccccccctccaggccacacttctcccccatactccctccccccaccggtccccccgcccaacccccccccctctacccccccccccccccccccc

SEQ ID NO: 672231 - DNA, 493 bp, Homo sapiens
atctttactcagtaagcagggtcctcattcggaagtcgtccctcctcgaaatgcccattacactggaattatgtttcacataatcagagctcaataaatatctgtggaaataagtgaagtctcctatccttatatgtaatgagtatttccttgcaaaaattaaaaaaaatgaagcagagtaatttaatcaagtgggaagtagaacatgctagacaatttaccaaatagggtggaaaagaaccttagaaatgatctacttcaatgctttataaaacatgatctagatgttcacagaagtaaagcgatttgccacattccaaataattggtagaaaaggaaggtctaaaatctgctcctccgacttttagtccagtgcttgttctatacatgctgtttccttacatttttgagaaatgacagggatgtgtactgacaagctcagtggattaataagtatagaatggatttccattaaaggagagaggagaaaatt

SEQ ID NO: 672232 - DNA, 635 bp, Homo sapiens
catggtggctcatgtctgtatccccaaccggctatttttgtatttagtagagatggggttcgcgtgtacaggatggtcaggagtcaaaacagctgagcacatggtgagaccatctctacaaaaaatacaaaaattagccaggcatggtggtacacattgtagtctagctactggaggctaggcaggaagatccttggcacaggagtgaggctgcgggactatgatgtgccatgcactccagctgggtgacaaagtgagacctgttccaaaatatactaataaagtaagtcatggtggctaaggtgcgaatgaacttggtatagaaaaacagaagagatacttaagttaatgcccagaggctacgtggaatgagtagatttcactgcagcctctgcctcccggatggcattctcctgctcggctcccgtgcggattacaggctgggtgccactgtagcagtatcgaggctgcgcgagatcataaccagagggagtgcggagcggatcggcactgatcagccggtgaacgtgaatcgctcaaatatatataaacgaccagtggagctgtttactcagttaaacaaccaattgttagtaacatgattttctaatgagatcccatcattccatttaaac

SEQ ID NO: 672233 - DNA, 902 bp, Homo sapiens
  misc_feature (52)..(52): n is a, c, g, or t
  misc_feature (91)..(91): n is a, c, g, or t
  misc_feature (110)..(111): n is a, c, g, or t
  misc_feature (113)..(113): n is a, c, g, or t
  misc_feature (116)..(116): n is a, c, g, or t
  misc_feature (119)..(119): n is a, c, g, or t
  misc_feature (131)..(131): n is a, c, g, or t
  misc_feature (136)..(136): n is a, c, g, or t
  misc_feature (184)..(185): n is a, c, g, or t
  misc_feature (198)..(198): n is a, c, g, or t
  misc_feature (216)..(216): n is a, c, g, or t
  misc_feature (234)..(234): n is a, c, g, or t
  misc_feature (242)..(242): n is a, c, g, or t
  misc_feature (246)..(246): n is a, c, g, or t
  misc_feature (250)..(250): n is a, c, g, or t
  misc_feature (253)..(253): n is a, c, g, or t
  misc_feature (274)..(274): n is a, c, g, or t
  misc_feature (282)..(282): n is a, c, g, or t
  misc_feature (289)..(289): n is a, c, g, or t
  misc_feature (293)..(294): n is a, c, g, or t
  misc_feature (298)..(298): n is a, c, g, or t
  misc_feature (320)..(321): n is a, c, g, or t
  misc_feature (329)..(329): n is a, c, g, or t
  misc_feature (337)..(337): n is a, c, g, or t
  misc_feature (344)..(344): n is a, c, g, or t
  misc_feature (349)..(349): n is a, c, g, or t
  misc_feature (352)..(353): n is a, c, g, or t
  misc_feature (360)..(361): n is a, c, g, or t
  misc_feature (364)..(364): n is a, c, g, or t
  misc_feature (366)..(366): n is a, c, g, or t
  misc_feature (370)..(370): n is a, c, g, or t
  misc_feature (377)..(377): n is a, c, g, or t
  misc_feature (380)..(380): n is a, c, g, or t
  misc_feature (384)..(384): n is a, c, g, or t
  misc_feature (386)..(386): n is a, c, g, or t
  misc_feature (391)..(391): n is a, c, g, or t
  misc_feature (399)..(399): n is a, c, g, or t
  misc_feature (418)..(419): n is a, c, g, or t
  misc_feature (425)..(425): n is a, c, g, or t
  misc_feature (430)..(430): n is a, c, g, or t
  misc_feature (432)..(433): n is a, c, g, or t
  misc_feature (436)..(436): n is a, c, g, or t
  misc_feature (438)..(438): n is a, c, g, or t
  misc_feature (442)..(442): n is a, c, g, or t
  misc_feature (445)..(445): n is a, c, g, or t
  misc_feature (447)..(448): n is a, c, g, or t
  misc_feature (452)..(452): n is a, c, g, or t
  misc_feature (462)..(462): n is a, c, g, or t
  misc_feature (474)..(474): n is a, c, g, or t
  misc_feature (478)..(478): n is a, c, g, or t
  misc_feature (486)..(487): n is a, c, g, or t
  misc_feature (490)..(490): n is a, c, g, or t
  misc_feature (495)..(496): n is a, c, g, or t
  misc_feature (505)..(505): n is a, c, g, or t
  misc_feature (508)..(508): n is a, c, g, or t
  misc_feature (514)..(514): n is a, c, g, or t
  misc_feature (523)..(523): n is a, c, g, or t
  misc_feature (534)..(535): n is a, c, g, or t
  misc_feature (548)..(549): n is a, c, g, or t
  misc_feature (557)..(557): n is a, c, g, or t
  misc_feature (559)..(560): n is a, c, g, or t
  misc_feature (562)..(562): n is a, c, g, or t
  misc_feature (564)..(564): n is a, c, g, or t
  misc_feature (573)..(573): n is a, c, g, or t
  misc_feature (627)..(627): n is a, c, g, or t
  misc_feature (629)..(629): n is a, c, g, or t
  misc_feature (631)..(631): n is a, c, g, or t
  misc_feature (693)..(694): n is a, c, g, or t
  misc_feature (707)..(707): n is a, c, g, or t
  misc_feature (759)..(759): n is a, c, g, or t
  misc_feature (813)..(813): n is a, c, g, or t
  misc_feature (868)..(868): n is a, c, g, or t
gggaaaatattacgggtacacttggaaaagacatgatcaccaagtgaaaacnatctaaccagaaagctttaccgtcggtcagtcaagccgnccccgaaatccggggggcnngncangcngcggggccaaangggangggtaattagtattcctctccttcttcctcaccctctccttcaacagnntccacaccacccnccccataatccttctcangggcagccatatcttcangggcctcngttntttngcnttcctccatcccctcacccangtaccagngaacaanggcnngctnggcatacatcaggtcaaacttnnggtccagnccggcccnggcctcngcaanggnnggggggnngcncngcangcacacngcnctcngnacctnggccaggnctccaccaggcaccacggnngggggnggggngnnggngncaanctngnngccngggggggggnaatccagaaagngggngggggggnnggntttgnngggggcaanggnggcgtngacatcttngggaaccaggnnaccagggtacaannggcagcgngnnangnatttaccanggggggggtcacatttcaccatctggttggctggctcaaagcaagcattggttntntntgctacagaaagctgttcatggtaggctttctcagcagagatgacaggggcatatgtggccnnttggaagtggatnttggggtagggcaccaggttggtctggaattctgtcaggtcaacattcaggnctccatcaaatctcagggaagcagtgatggaggacacaatctggctaataaggnggttaaggttagtgtaggttgggcgctcgatatcgaggtttctacgacagatgtnatagatggcctcattgtctaccatgaaggcacaa

SEQ ID NO: 672234 - DNA, 361 bp, Homo sapiens
cagtccaacatccggggtgacagtgagactgtatcaaaaaaaaaaaaaaaaaaaatatgggtggggcacgggggctcatacctgtaatcccagcatttgggaaggctgaggggggaaaatcagtggaggtccggagttcaagaccagccgcgtcactatgatgaacccctgtctccataagaaaatacgaaattaagcggggcgtaccgggtgtgcctgtagtcccagctactggggaggccacagcaggagaattcgtttgaacctgagatgtgggaaccacaatccgggttcagtcaaagatccgggggtagtgagtccgtgggtggaatccagaaaattactttcacctccatcatgc

SEQ ID NO: 672235 - DNA, 447 bp, Homo sapiens
  misc_feature (1)..(1): n is a, c, g, or t
  misc_feature (291)..(291): n is a, c, g, or t
  misc_feature (366)..(366): n is a, c, g, or t
ncactattttgttttatttgtcttattcatataagaaggcaggaatgtcaggcctctgagcccgaggcccaggccatcgcatcccctgtgacttgcacgtatacatccagatggcctgaagtaactgaagatccacaaaagaagtaaaaacagccttaactgatgacattccaacattgtgatttgttcctgccccaccctaactgataaatgtactttgtaatctcccccacccttaagaaggtcctttgtaattctccccacccttgagagtgtactttgtgagatccnacacctgcccaccagagaacaaaccccctttgactgtaattttccattaccttccctaatcctataaaacggccncaccccatctccctttgctgactctcttttcggactcagcccgcctgcacccaggtgaaataaacagccttgttgctcaca

SEQ ID NO: 672236 - DNA, 781 bp, Homo sapiens
  misc_feature (608)..(608): n is a, c, g, or t
tatattttttagtgggagaggtttagtctacagtttttatttttagtcaccaaactgtagccaactcttgggtcattttctctgaaaaacatttggagatcatgacagcgtttggattaaaacatttctgttactttgcatgcaaactagtttactgtgttcacagagtggccagtcatgggaccataagcaacacctgctctttgagtgtctttcataccgttaccatcagcaccagaaactccaggtgccccaagcttaaagtaaaaatcctaaagtacgttggctcctcccatgcaatgtgctgggtccaaaccatgctgttaaatatcagaagtttctatggttatgattaaaaaattaaatgacaataatagccccaaaactatatatttttgatactatttaaccaagattatcacaaagacacagtatttgacacattgttattcttctatgttttataaatattttaatgtgacaggtagaatctgtactttttctgtagaacgtaatattttgaagtatatatatagttaaattatttatttcttaggtaatttaattaatttatctcaccattggtcagacatgattggctcatgctntgtaatcccagcaattttgggaggcccgaggcagggcagatcacatgaggtccaggagttcgggaacagcctggcgacatggggaaaacctggttctcataaaaattcaataagcccgtgtggtgcccctgcctttaatccagtacctggggcaaagggaaaaggccaattgg

SEQ ID NO: 672237 - DNA, 258 bp, Homo sapiens
taataatgtttgcaaagtagtgagttttttaatgctgcaagcattgcagagtttatcagctagcatattattattaaaaactcaacaaaacacagtctttttttttgtcccatttaatatcataggggacttacctgtttctgcttaatattgaatgtgttataatccattactgtacttatatattttgatgatcaaaattgtcctagatatggctaatagaagcaccttcgagctgatttcttggtccttttgaca

SEQ ID NO: 672238 - DNA, 1622 bp, Homo sapiens
  misc_feature (309)..(309): n is a, c, g, or t
ttgtggggggtgcgtcgcccccaacagactgttgttggtgcctgcatcgccatcaccagcgcctgctccttttttttgatggttgcgcgctgctgcctctctttatctgctgaggagagtggacttgctctcgtctcgggagttcgactcagtacgccactttcgttggtgttgtcggtgtcccgatcattcttctctcctcctcgccgtttttgttttttgtgcccggctcgcgcgtggtgttttttgttgcccccccccgcccccatccgttcgtgtgtgtgggtgactttcttctgctctcttcgncctctctgtctgtgttcgatggtgtgtttgtgtcctccacgacgacattactcattggttctcgtccgctgtcttgtggtggtggtgttgtgcttcaccactcgccgactcgcgactctacccgatcattagtgagtgggtggttcttctcctctgcgttctgtgactcttcttcttgtgtgtgttttttgtcgtctccccctcttttgtttggtgtgttagtgcagacgattgcggtgttgtgttgctccgcgccgccacctactcggcgcgtgtcttgttgttttctattttagtgcggcggttcctttttctctgtgtgctgggagtgtggtctgcggcccccgcctctcctcttcttttttcttctctccagtgggctgtgcttcgtgtttgtattcttttcgtgtgcttttctctccccgctcgcgctcgcttgttctctttttccctcttctcgcgctccgcggctgctcgcgctctgtggtttgacacccctcgcctcctcttcgttttcgttgtctacgacgcaccgacgcgcctgctcggctctttcctcggcgcggcgttgcgctatctcatcatctagtagtcagcgagaagagagtagtcgtcgtctctctctcgtctctctccgcttctctggtgtgtgctgcctgctctctctctctgtggtgtgtgcgctccctctctcttgctcagcacacactctctctctctctgcgccctctcctctctgtgctgtgtgctgcgctgctctctctctctggtgtgtcgccgcgctctctctcttctctctctctgcagcacatatatatttttgtgtgtgcagcgcacccaccccgcgtcgcggtgtctcgcccgccgcgcgcgggcgcgccgcctcgcgtctgtgttgtgttcgccccccgcccgcgcgcgcggtgtgtgtgtgttgtcgctccccctacgacacacaccctcgttgttctctctccccgcgcgtgttgtttcttctccccgcctcctccctctccccacaagagtgtgtgtttatataagagagaggcgcgcgccctctctctctctctctctcagagatcccccgcgcgcgggtgtcgccccccccgccctctgctgctgctgtgtgtgtgtgtgtgtttttgatatcacacacacgtcgtctctctctctcctcgccccccgggcccgcccctctctctctctttttcttttgtggtggtggtgtgtgtgtggtgcggagagagagagacttcttttcttttgtgtgtgagagagagaacaagaatgtttctctctctcacacagagtga

SEQ ID NO: 672239 - DNA, 288 bp, Homo sapiens
ggaccggtttgacgtggctctgatcacactacagctaagaccctaactgggattagataccccactatgcttagccctatacctcaatcagttaaatcaacaaaactgctcgccaggactactacgagccacaacttcatactcaataggacctggtggagcttcatatccctctagaggagcctgttctgtaatcgataagccacggtcaacccacaagccacggtcaaccacaagccacggtcaacccacaagccacggtcaacccacaagccacggtcaacccac

SEQ ID NO: 672240 - DNA, 149 bp, Homo sapiens
ctgcccatgtttgctccttatgtattgtttattcctatgcacgattatttgtgtttcttcttacctgtcctccatagtgtgctctagggtttgtgacgttagcaatgctgctggcttgaagtttgttagtctaggaggccagtgggact

SEQ ID NO: 672241 - DNA, 394 bp, Homo sapiens
  misc_feature (1)..(1): n is a, c, g, or t
  misc_feature (387)..(387): n is a, c, g, or t
  misc_feature (393)..(393): n is a, c, g, or t
natcataatggtggaatgtcatcagttaaggcaggaactggctatttcacttcttttgtggttctttagttgtttcaggccatctggatgtatacgtgcaggtcacaggggttatgatggcttagcttgggctcagagacctgacagtcataaacccataaatgtaaatataatgtttccctgagttctgtgagctgctccagcaaattagtggaacctgaagatggagccatgggaacctcagtttatagcttaatttagagctgttcattgaaggacaggttaaagaacttggggcttccaattggctttgaaagtcggggggcagtcatggagactgatccctcaccctgcaggatctgacactcaggtggataatgtcagaantgaatng

SEQ ID NO: 672242 - DNA, 344 bp, Homo sapiens
ttttttaagacagagtttcactcttgtcacccaggctggagcgcaatggtgcagtctcggctccctgtaacctccgcctcccaggttcaagcgattctcctgcctcagactcccaggtagctgggattacaggcacatgccaccatgaccggctaatttttatatttttagtagagatggggtttcaccatgttggctaagctggtcttgaactcctgacctcaggtgatccaccctcctcagcctcccaaagtgctgggattacaggcgtgacgagccacgcctagcctatttttcatactgaaagaaagatggattagaatgttagtgggcaagctctgaat

SEQ ID NO: 672243 - DNA, 1578 bp, Homo sapiens
  misc_feature (179)..(179): n is a, c, g, or t
ggtccaaacagaatataaccggagaagacaaggaggtcaaagtgatcagcgcatactatagcgttctgctacatcttgctggatgacatttcacataatagtgcttagttcccgcttagctcacatgatgtacacgtaacgcctgtggtttacatctgttgttgatgagtaagctgagncatgaattaggataatcgatctatctctctcagagaaatgacataataacacacacaagagaactctacttgcggcgctacttgtggcctgggggagaacaaaagataatccagtatctcctgtgacttcaaccatcttccagcgtgccatcctgtctcaggccaaacaattcggtcgtacaagatttgcgtcgcgaggaacctgcgccctatacaggtggcccccaatattacacccatggctcttagatagctcgtaccagttaccatagccccccgggaatggaaccgccacttgtggcgacacaagtgggggcaaccaacaacaaccggacgctttcctctaccaagggaacatagctattgcgagcgaccagattccgttccctcaactacacccaaacagaaagaagcaacgcgggaacaacctatcatgttcggtcacattcggcccacagcgggacggttaaccccaccatcggggcaaatctaatttgaaccgcggttcggaacttcccaagcaaaaagttccccttggccaaaccagaatgatgacaaacctcacttggcccccccaacagtttatcccgtcaccttcccccccatacataggggatacgccacggcacttctctaggggagacacgggcttcagcagcttatttcccccgacgtcgggcacccaaaaacgaacatatacaccgtcccaaacgaccgaagcagggcaattacccacaacaagaggacaccttccaacccataaacgatggaacacacgcccgacgccatattaaccacacgccaagggggcacgaataccaccgccgcagataccttataactttgggcacaacgccccgtccaaaacatggacgccgcgaaggaacaattacaaggctaggttagaaagaagtcgctattcgaaacgacagcttttcgcccccaaaggttccctctggggtgatatgggaacatacctttggcttagcccccattgggctgggttacggctacatagcggatcatattggaacgccctagcgtcggtgtgagatccttcggcgcatctatcgacgacccacttggagacagaggcactatggagaggcccccctatagtacgatggcctagagattgcccaggaaaaccccctggagagaaaactagacactacgtaacacagatgtgcacatggatgagtaacctaaatgagggcacctgcacacactataaaccttaggacatgacggagagaaaacaaaacaccaaacgaagtacttcgagacggcgaacacaacacgaacggcgacaccacagacatacgtacacaacccaacccgtgtagttataacagccacacgcacaccacactcgaagaacacgaccacccacacacac

SEQ ID NO: 672244 - DNA, 220 bp, Homo sapiens
tacatgattacgactcgagtgagtacccctcgataagggccacatggctcagtaaggcataccttattttattgcacttcagtttattgtgcttcacagataactgcatttttaacaaattgaaggtttgtggcaaccttgcattgagcaagtctttcagcatcattttttccgacaggatatgctcactttgtttctgtcacattttggccttatcgag

SEQ ID NO: 672245 - DNA, 133 bp, Homo sapiens
gaatattctatcagcatcccgttctagatggagttctgagagtagtaacctgtgcaaggagagacccggcaagaatccatccctgccccccgtctcctcggattgtcatccccttcctaccccagagcttcct

SEQ ID NO: 672246 - DNA, 443 bp, Homo sapiens
ctgtgtggaagtgcaacagtgatgcacaagtggaaatggacacctgacactttggctttctgatggttcactgtacacacattggtatcatgcacaaaataaaactaatgtataaaattacttacaggttatgtgtataaggtgaatgtgaaacagaaatgaattttatgtttaaactggagccccatccccaagtttaaacaaatcttccaaaatccaaaaaaaattgaaatccaaaacacttctggtaccaagcatttaggataagggagactcagcctatatatacattactcatttacaggcagcatgtgatccatactatgttgtacagaagtaggtgctacgactcaaataaaaaagagtgtgcaatacgatgtgcaacggtggaacacggtgactttgggcctgggtgatctgggacagtttcatgaagagggagg

SEQ ID NO: 672247 - DNA, 229 bp, Homo sapiens
gatcccggaggctgtgtgggaggacaggttcatggatagaggttgcggcgtgagggaggaagggtaagagtgaaggaatggccatcctggatccccacatttcagtctcagatgaggacaaatgggactcccacagcccccagaatcatcatgaaaacagcaaggatgcaggagtgagcttgatgcatggccccgagggtagcctcaagagccaataccatgccacatg

SEQ ID NO: 672248 - DNA, 383 bp, Homo sapiens
  misc_feature (34)..(35): n is a, c, g, or t
ggtcggtacctctagacatgcagataccaataanntatgaagagaatatattggcagagacactgccagcttggactgaaaggacagagccagtgcaagaggacaagacggctttgcacacccaaacttttacaggcaggaagcaggcagatgaaactgtggagctgcaaacatctttcatggaagaggtgggacgactcagggagagccatggagaatcattcatgaacaggagtaggcatcaaagagttcctagcatttctccaactggattacagaatttccacacaccagtgacttatatgtatgacttatatgtgcctcctgtcccctgccccacttttttttttttttgagacagagcaagactccatttcaaaaaa

SEQ ID NO: 672249 - DNA, 320 bp, Homo sapiens
ctatacaccgggactgagctatcatggtcgttagtattacactgccgcatcgtgctcccatcgggacacatccttcacatagcagacgatttcaccgatcactcccttaccatcagctcacttggtctaccagtggtactgaatctacgagtacaccgactaccgcggactaatcttcaactcctacatacttcccccattattcctagagggcaggcgagctgagactccttgacgttgacaatcgagtagtactcccgattgaagcccccattcgtataataataacatcacaagacgtcttgttagcgcagtgctgt

SEQ ID NO: 672250 - DNA, 307 bp, Homo sapiens
  misc_feature (142)..(142): n is a, c, g, or t
ctctagaggatctcaatgcagcggactcggcagcaggcgctcacggggctgctggagcgcatcagacctataggatgcggagtcgaggcaggtgctggtgctggatgaaagagcggcaggagctgaggtgcatcaccaaggncctagtcactgcgcagttcggcagcatcttccgcaccttccacaaccccgagctacttctcaaggcgcctcgtgcggcttctcttgactctacatggcctccgtcagctgcctggtcaactaccgcgtggacttcaccttctacccatgccgagtccgctgcatt

SEQ ID NO: 672251 - DNA, 174 bp, Homo sapiens
  misc_feature (5)..(5): n is a, c, g, or t
gttancacagggagtgaaataataagtgttgtctaggacgtgaagaaattggaatcctggagtcattgtacacgcctattagaatgtaaaatgatgaagcagtagcgtgaattaaggagtttgttgacccttcctctttgttctgtgagtcataacaaatgaaagcaggaatgg

SEQ ID NO: 672252 - DNA, 465 bp, Homo sapiens
tctctgttttgtatgctagtgtgttcctggcatctagaatagagcttgacactattcttggcacaagaagaaaaaaggatttgctttaaagagatcactggtgatcttggagaaacaaatttcagtaaatttaggggcaaagatcagattcccaaaagttatacaataactggatagttgagaaaatggaccaaaggaatgtacctgtttaatgtagtggtagatttacttccacaagtattgttgtctttgatttactaacatttttctattacagtaaaaattaggatcaactatgatgaaatgaaatttaaaaataaggtggtgcatgcctgtggtcccagctactcgggaggctgaggcgggagagttgcttgaacccaggaggcggaggttgtggggagcggagatcatgccattgtactccagcctgggcaacaagagcgaaactctgtctccaaaaaa

SEQ ID NO: 672253 - DNA, 141 bp, Homo sapiens
actttactgtttagaataaaggacacactataaaaagtgaacattatgcacatttccaagacaatatcaattccacggaatataaaattcataaataacatgaggaaaacctgtaacaagtgtacgaatttagcaccaaat

SEQ ID NO: 672254 - DNA, 1758 bp, Homo sapiens
ccccagatgagccctgagcagccccaccgccgccgccggctctagttaccatcacacccctgggatggatgccgcagctgcctgcagcctggtccctagtcaccatcacctgcaaccatgatgcatgcgatggccgagacccatgcatgcctgacctgcatgtcgaaccatggatgctgatgaaccctacataaggacatgtcagaaacactctacgaacaggacgattcactacaacatacaagatacatcgaacaactagaatgtacaatattacaccgccacgagcagaaaactacatacccactagaacctaataactctagacaccgcgcccgcaagatacccaccacacacgcacacccccccgccaacgccaacagcaccccacgcacagacacaccaacaacatacacgtctcccaaccaccaccacagcacaaccaccccagccccacctgccacacccaacctccacccacaaaacacacgcgcccaccaccacactcaacccaccgccatcatcacaaaacaacacaaataaataccatagaaccaccaaacttcaatctacaaaaaatcatatacaacacaccaaacatccactatcactcacccctcacacacaaacacatcctcaaacaccatccctcctcacaacaccctcccaccctactctccattctacatactgaccacatcctcatacctaccaccatcttacatcgcatacaaaccacacacaaccctccacctcccctcctccacttccacttctccctctccctctacacaaattctcccctacctatcccccctccacaccaacttgacgacacactaccacaagactaccagactcaatcaacaacaaccaccaagcaccacccactaacctacaccactccccctaactcaacttctccctatcataagcaatccatctacatcaacaaccatacactaccaccaacaccaatcactcaacgcacaatcacaacactcacacttctacacctcatcatctatccactaacacaacacatctcaccactccccttcaaactcactaatcactcccccccacactccaccctccaactctcccactcaatcacaccacaacaaaccaactccactatcaaccaccccacctcaaccaccccaacacaagcaactatacgaacacaacaatacagcaacacaacaccaacttcacacaatacacctcacttcgccaaccctcaacacaccaactatatatctcaaacttaaacccacaccagacatcacggggaaagacgtacagacacaccgcctacgcgcgcctcgacaatccgagctgccatacatcatacgctccatgcctgcacgctcacacaagccgggcgcaacacatagagtaggctggagcagaatcgatatccggcacacacgcaaacaacagctccaccacctcatcaactcactactatccacaccacacatacacccctcactaatacacatccctacttatccacataacaaaactaataagatgaataatctcaactacccacatcaccactcactcataactccagaaaccagcacaaatcaatactatatcacaatcatcacatcaatatctacctcacatcactcccactccatacctacatataaatctcttaaatacactacatctcacacacaaacccatcctctcaacacacaaccaccacacacacctcagacatcacattaaaatcaacaa

SEQ ID NO: 672255 - DNA, 930 bp, Homo sapiens
gcagcagcctccacaccccttgcgcgctggagcaaacgcgcctggccctggattcgtgtctgcatcgacgactctccaggctccggacacgatgcaggccatcaagtgtgtggtggtgggagatggggccgtgggcaagagctgccttctcatcgatctatatcagcaaccgcctttcgccgggagtagatactagtcccacacacagttgttttgacgagacgtacttcaggtcgcaactgatgagtagggtggtacagcaattaggcccatgttgtaatccgtggagtgcttggtgtgtgacatcatgtcatggcgctagagagagaacctacagacgcgtcttccgtgtctcgatcctccttatttcagcatgactggcacgtgtcttccctcaatcgtgtctttcttcctcttcgttcatgactccacggcctcattagtgagtaacgatccgcgccatgatggattcccataaggtgcggtatcatgtgccccagcacatccagtcatcctgggtgggcaccaagctggtacctgtgggacgagaaggacaccattctgatgaaattgaaggagaagaatgctggctcccagtcactctacaccgctagggggtctggcgactgtgtccaatggagatcgagtcggtgaagactacctgtagtgctcagctctcacccagatgaggcctgataatccgtgttcgacgaggcatccggtgccgtgctgtgtcctcagccctcgcggagctgatagcgcgctctgagctcctctaggggtttgctcccagcgctcccactagatgggtctgatcctccggatcccacccggagctgatggaaccgcggttggtctgtggtcctcctgtggggttcttgcgtgtgcgctcgttgaggcttctgtggagccctgagcggcggcatgggt

SEQ ID NO: 672256 - DNA, 292 bp, Homo sapiens
gatccctgtactctcaccgtaaaaggggtctggtaggacgtgatggaatttgccccgtctaatggaggagctggatggtcacggccactgtgtcctggcctggcggtgtgacggggatgctgcttggggagttgcagatcacggcctcgccctccacgcgggcggggtgtggcggcgactccccaaaaaggcatagcaactcgtcctcctcgctcagggcagggagggggctgacggtcagctgcacctccccctgggcccgccggctcatgttctacggcttcgtcggtca

SEQ ID NO: 672257 - DNA, 102 bp, Homo sapiens
acacacacatatatacatatatacacacacacacacacaaacaatgcccggctcttctatatgtatctgtgtgtgtgtgtatatatatatgtacagtcgacc

SEQ ID NO: 672258 - DNA, 389 bp, Homo sapiens
tcctcccccctgggcctcctaaagggttgagattacaggtgtgagccccggcatctggcttacttattttgtttattgtctgttccccaagaaggaaaagttttagagagcaaaaatttttgtttattttttttttttcccccttcccttttttcctcttttacttggttcactacggtattccccataaaaaatatttggcaaatagtgggggttcaaaatgttgaaggaatgaaagaaatttaaagccttgggtggcaaaataaaaggtatttttttttcctgtgggttagggcaaaaaaagttttgaaacccgtttttaaaaaatgcaaaggtcagggctttgccccgggaaaaaaaactgaaatgacttagggatttcaaaggca

SEQ ID NO: 672259 - DNA, 141 bp, Homo sapiens
  misc_feature (7)..(7): n is a, c, g, or t
tcaggtncacacgccaccggagaaggcattgctgtggctgtgatttaggccagcaactacagctgtgattcgacccctagcctgggaacctccatatgcctttagtgtggcccccttctccggtggcgtgtgaccgcagca

SEQ ID NO: 672260 - DNA, 914 bp, Homo sapiens
  misc_feature (7)..(8): n is a, c, g, or t
  misc_feature (17)..(17): n is a, c, g, or t
  misc_feature (158)..(158): n is a, c, g, or t
  misc_feature (218)..(218): n is a, c, g, or t
  misc_feature (264)..(264): n is a, c, g, or t
  misc_feature (283)..(283): n is a, c, g, or t
  misc_feature (330)..(331): n is a, c, g, or t
  misc_feature (340)..(340): n is a, c, g, or t
  misc_feature (343)..(343): n is a, c, g, or t
  misc_feature (346)..(346): n is a, c, g, or t
  misc_feature (355)..(355): n is a, c, g, or t
  misc_feature (358)..(358): n is a, c, g, or t
  misc_feature (360)..(361): n is a, c, g, or t
  misc_feature (364)..(364): n is a, c, g, or t
  misc_feature (499)..(499): n is a, c, g, or t
  misc_feature (533)..(533): n is a, c, g, or t
  misc_feature (548)..(548): n is a, c, g, or t
  misc_feature (553)..(553): n is a, c, g, or t
  misc_feature (558)..(558): n is a, c, g, or t
  misc_feature (560)..(561): n is a, c, g, or t
  misc_feature (565)..(566): n is a, c, g, or t
  misc_feature (570)..(571): n is a, c, g, or t
  misc_feature (573)..(573): n is a, c, g, or t
  misc_feature (578)..(578): n is a, c, g, or t
  misc_feature (582)..(582): n is a, c, g, or t
  misc_feature (585)..(585): n is a, c, g, or t
  misc_feature (589)..(589): n is a, c, g, or t
  misc_feature (595)..(595): n is a, c, g, or t
  misc_feature (600)..(600): n is a, c, g, or t
  misc_feature (602)..(602): n is a, c, g, or t
  misc_feature (606)..(607): n is a, c, g, or t
  misc_feature (645)..(645): n is a, c, g, or t
  misc_feature (657)..(657): n is a, c, g, or t
  misc_feature (661)..(662): n is a, c, g, or t
  misc_feature (672)..(672): n is a, c, g, or t
  misc_feature (677)..(677): n is a, c, g, or t
  misc_feature (684)..(685): n is a, c, g, or t
  misc_feature (693)..(693): n is a, c, g, or t
  misc_feature (695)..(695): n is a, c, g, or t
  misc_feature (700)..(700): n is a, c, g, or t
  misc_feature (711)..(713): n is a, c, g, or t
  misc_feature (775)..(775): n is a, c, g, or t
  misc_feature (794)..(794): n is a, c, g, or t
  misc_feature (893)..(893): n is a, c, g, or t
ctaatgnnctacaattngctttttccacaacttacaaaataataatctgatatttaaaatgaattggttttcattatgtaagtcgaaatggtaaaaaatcataatgacctatccgatgcatcatatatatgctattcagagaaactcaaatccccganttctcctgtggcatgttttatatcagacatttaaaatctgtttaccaagaaagaccaggnttttaactatatgtaggtttctgcttacagttgcaaactatcagangcctgtctatatgatagancccagataaacctgagatttagaaaagcaagtcatttattctcctgnngctgttttngtngcncttttgtgncangnntgnccctcctaatgctttactacacaacttaaccagatctatcagtcatgataaattagacccagtccatctttcaatccagtctactctggttctgaacatataaacacaaaacactacagatttattaatatagcnttttcccacaccctaaccctataaagactttaanagagaaaatttcatntaaangtttngnncttnncggnngnccttnccanctntgcnacaggnttggncnatgnnatagtactttcctagatgacatatcgagtcaacatgangccttagctganatgnntgattcaggntattnatgagannttctcacnantgatntgcatttaggnnntgattttgctttccttaaatagttcgaaggcttgaaaataaacttttttttgcatttctttnagaatgtttggtcattaanaacttttaaccttatcttcctcttctccttagcccttaacagaccaagtccattctatttggaaataacaagaacttgatcagattattaaatcttggnaacctcatttttaccttataa

SEQ ID NO: 672261 - DNA, 454 bp, Homo sapiens
  misc_feature (7)..(8): n is a, c, g, or t
  misc_feature (17)..(17): n is a, c, g, or t
  misc_feature (158)..(158): n is a, c, g, or t
  misc_feature (218)..(218): n is a, c, g, or t
  misc_feature (264)..(264): n is a, c, g, or t
  misc_feature (283)..(283): n is a, c, g, or t
  misc_feature (319)..(319): n is a, c, g, or t
  misc_feature (358)..(358): n is a, c, g, or t
  misc_feature (361)..(362): n is a, c, g, or t
  misc_feature (366)..(366): n is a, c, g, or t
  misc_feature (448)..(448): n is a, c, g, or t
ctaatgnnctacaattngctttttccacaacttacaaaataataatctgatatttaaaatgaattggttttcattatgtaagtcgaaatggtaaaaaatcataatgacctatccgatgcatcatatatatgctattcagagaaactcaaatccccganttctcctgtggcatgttttatatcagacatttaaaatctgtttaccaagaaagaccaggnttttaactatatgtaggtttctgcttacagttgcaaactatcagangcctgtctatatgatagancccagataaacctgagatttagaaaagcaagtcagntaggcgccggaggctgtgggagtggggcacgggggggtncannaagnaccctccgcaaggcgggacgacacaactgaaccagagcgatcaggcaggagaaaggagacccaggccagcgtgcaagccagncgacgc

SEQ ID NO: 672262 - DNA, 93 bp, Homo sapiens
ttttgtagaatttaaaatctggtgtttttctgaaaaaatatatataaatatattgctttatttgaaacaaattaaaatatgctgcatttgaaa

SEQ ID NO: 672263 - DNA, 319 bp, Homo sapiens
atgggtccagaagtgtgagcagaccgtattagtgataactacttaaagaaggcgatcaaaatttatttttatcatgccctctcacaggtttgtgttatacattgtagcccatattacttgtgttagtagtttagtctctattggtgacataatgacagtcgtgtatagtttctgttcaagaaacatatattgtacagttactttattcaaaatacctgccaaaggaaatggtcttcactttcgaatgacttttaaagcatgtattatttcgcacagagcaggagaagactttaatcagaatttgctgtgcccatttcaa

SEQ ID NO: 672264 - DNA, 102 bp, Homo sapiens
  misc_feature (16)..(16): n is a, c, g, or t
aggctccccctgtatnatgcaaaggtcacaagacagatgtatagatagatctaacgggctcacaaactagtagagtagaccctattttaaatcaatagctag

SEQ ID NO: 672265 - DNA, 617 bp, Homo sapiens
  misc_feature (617)..(617): n is a, c, g, or t
ctcagaggatcccttcgatcggcgggcaacttagattatcaatttttttttactatcagctattcgtgtgtattactaaaacattttttagatgactttttaaagtatatggagcagtcagcttatgaaagttcaaatgggtaaatctcttgtaatttagccttcatcgaataataggtaccagtgtattaaaaatgtgtatttttggcagccccttgaaccagagtaggttcagagaaactcccaaagttggtacttgagacacatcatgctggatgggtaacttccctccttggtgggggaacatgttggtgtcctattaacttaatgggatagatttttaaatatttcttattttgggcacacggaaagggtagttcgagtacagaactttgattgtgggtgtagatgcagagggaatgatgggtaaatttcctaggtttatgtgaatggagggggtgtatgcatttggaaacaatctactaacagatggtgctgaaatctattacctacatgttttctagtactccagcattatgttcatgacgcctccatataaggagtgtctctctggcacagttggtaagttgcccgacaatcggagggtaccgagctcn

SEQ ID NO: 672266 - DNA, 354 bp, Homo sapiens
gacctaaggatccggatagcgacatttcaagggcttactgggaatcacaagaacccaagtataagaaactcaagatgcattgaagaaaagatcatcattggtgaagtcgtgaacaaaattaaccgtgctaatgggaagagtacatctcgggattttcctcttaacaaaaaataatctccttcttggtgaccaaaagtctggaccaatcaagtccgaggttccactgggtggatgtggacccaggtataccatgagctcacaaaatggatgggttcttcgccgtcccactcaaagagggctcagaagcagccagtaaagggaagactttctcttcagcagtgatcacctgaattg

SEQ ID NO: 672267 - DNA, 826 bp, Homo sapiens
gatcagagctgagacgaccgcttgctgattcagttgcggcccctctcagtgagccggccttggctacttgtggtggcacctggtgtgaccagcaggcagtgaggagtgtagtgagcatggagctcgcaaggcctgaagtgtgcagttctccaaggacgagctgtgtctcgtgtgagtagaggcctcagaccgtccatactagcgaccgggtggagtgaactctgtcagccgagtgtacagccgagggtgacattgagcccctcagtgaggcggtcacggtcaggaacacccccgagaggcttgaggccgtgatgaaacccgggccgacattgacttgcgaacttagggccactacatggcttgccggggacaagaatcacccagcctgccattctacatttgcgacgttaccgtccggaagtctccatgggacttaaagttgaccatcggcgcagcatgacccacatggtgtcgctcggcagcattgcggaggaccaaaccagctgcgatgggcactttgccagttgggtgcacaatcggaagcaaagcattgccggtaaacgcagaggcgcccacaaaaggctcaaataaaagccacccttgcgcaaggacgagccctttacgaacgcgacggcgattaacaccttccgtggggcctaaccttacttgttacttctttggggcaagcatccctttcaaggggcctttcccaagatggagacggtccccaggaatacagcccccattcagacacacttgccagaaaaaggttctgcgacagaattgccttgaaaatgtcaagaaagattacagcaagggaacacac

SEQ ID NO: 672268 - DNA, 360 bp, Homo sapiens
  misc_feature (48)..(48): n is a, c, g, or t
  misc_feature (288)..(288): n is a, c, g, or t
  misc_feature (310)..(310): n is a, c, g, or t
  misc_feature (343)..(343): n is a, c, g, or t
accacgcatccgaccctgcttggaggaggcagtactagcagaggctangcttaagtctgggccgagtcctgattgttggtggttaagccactctgtcacatgaacaggaggatctcgggcacacatgtagcacaccgtgtgcatagattggtgtggcgctcaatagatatcgactccacttgtatgtaagggtgtgtttgccccagtctgatatactcgaggctgagacggcaggaggagggcatgatgatgctagtgtctactctgtatatagagagattcggggcncactcttcacacttggcctccntctggaggcgttgctcttgtaggatgagaaggntacacagggttgagatg

SEQ ID NO: 672269 - DNA, 371 bp, Homo sapiens
  misc_feature (96)..(96): n is a, c, g, or t
  misc_feature (99)..(99): n is a, c, g, or t
ccttatgaggatgaaaatgggattttggatgtaaaaatgccttcccatcccagtaccctgcctaaacaaaatgccttacctaatggcccgggccgncgngttgtcacgccctgtaatccccagcactttgggaggctgaggcgggcggatcgcttgaggtcaggagttcgagaccagccctggccaatatggtgaaaccctgtctctactaaaagtgcaaaaattacccgggcgtggtggtgagtgcctgtaatcccagctatccagaggctgaggcacaagaattatttgaacctgggaggtggagtttgcagtgagctgagattacgccactgcactccagcctaggcaaaagagcaagagtctgtctc

SEQ ID NO: 672270 - DNA, 888 bp, Homo sapiens
caatgtaggctgtcctggtcgagaactaatgtctggttgattccatgccgactcatttccacagcatgcacgggaaacctgaagatctgcagagactttaacctcggttggcatgtaactggcatagcgtaagcccatatctctagtcatcatgagcagttgctgttttaaaggcctttaccacgtatttctttctgttgagtgaggtgaaattcacataatttcattatattttttttttgagacagagtcttaccctgtcgcccaggctggagtgcagtggcgccatctcggttcactgcaagctccgcctcctgggttcacaccattctcctgcctcagcctctcgagtagctgggactacaggcgcccaccaccacacccggctaagtttttggtatttttagtagagacggggttatcaccgtgttagccaggatggtcttgatctcctgaccttgtgatctgccacctcggctcccaaagtgctgggattacaggtgtgaaccactgcacccggcaaaattagccattttaaggctaattttaagtattacaagttaagtaggtgagcagttcagtggcattagcacatttacagtagtgcataatcaccacctctgtctagttcccaaaacatttccatcaaccccaaaagaaaaaccagagctctttaagcggttccttcccattcctgtccgctaacccttgaacaccaatttttcatttggtcctgggaattacttccggggtattaataattttgaggacagctggtcttacccaggtgaagtacagtgggatgacagtgtcatgcagctcgattctgggcccacgatttccaccctgggtccgaggacgagaatacgggctgtgccccgatttttg

SEQ ID NO: 672271 - DNA, 90 bp, Homo sapiens
tagctgacatgtcagctccctgtccaagcagtattgggaggagagaggttcagggaagaatctggatctgaaagtctgtccctgcttttc

SEQ ID NO: 672272 - DNA, 231 bp, Homo sapiens
gaggtgctcttgaaggcggtcagttctactgcctcggtctcccttttagctgggcactgtacaggtgagctccactatgcctagctagtttttgtgatttcttacttgagacatgggtttcgccatgttggccaggctgttctctaactcctgacctcaggtgatcctcctgccttggccttcccagggtgctggaattacaggcgtgagccattgcgcccagtcccagtg

SEQ ID NO: 672273 - DNA, 1498 bp, Homo sapiens
  misc_feature (362)..(362): n is a, c, g, or t
  misc_feature (467)..(467): n is a, c, g, or t
gcagccacgtgagagctttgcttctgaccccgatcctctaccggcccgtgtgctggtgggtctagacactcatagagggatctgatatccgaaatgggctcatcaggggtcagacggcatctgtctagtagagtgtgcagctgaaagacacgtggagaccgatcatgcgaaaactcgaagcgtggataaccgcctacatggtaaaagtgtgacggatgatacattcctggtggcctggtactacgaagtaacatcatggctaagggttggatggcatagtgggtccagtgaaagtagcatcacgcgtcgagatcgatgggcgtctctatcttcatccttccaaggtcgaaagcagcacatanggtcgccatgcacattccgtcgtggtgcactgcgacgcgtcgagaggacacttgggttagggtcacgttagtgcgcgggctcacaagatacgcgaggtgttaganaaccctttcgcgttggtgacgacattagccctagatgggcattgtttgtgcttacgactttcgctcgatcagtgcaggtagatggggagcgcttacggagggtgcactatttcgcacacgttggcagggcgtgatctgtagggctaggagcatttgatacgaatcatccgcgatggtaagccgcccgttggctactatggcattgcccgcttacacgtggcccaatctcttgaaaatagttccgcgctattttgcaggaagctttcatgtgcataggcagtttctcagtagcggaggaaaagggaagaaaaacgtgggaaaccaaatgtaggaggcgagtaagagggagggggaaatgggatttggccaatgccagagaaccatttcccggcaaggacaatttcgcattcgtaacggaggagaggaggttatgctgcgcatgaggttagaagtaattcgttaaggcgattacacactttggtgggaggagacactaggatcaggaatcaggcgtgaaacttccgcacctggggtcgcgggccctttgcccggatcggcgtcacgcacatctcccttcaggggcgggcccaaattcctgtcgatcggcacttctacccccgtaggacgatccacatggcaccacgggggtcttgtcccccttatggccaactcccaggggcaccaggccaactggcacgtcgccagtctgggagcaaccacgaaggtggcgcctcacacccccgggcaacgcgtcctcagggggcggaaacaggcctccatagggtatccaaattaccttgcggtttcgccatttaacactccaaaccaattggcggcattggcgtaccagaagcgggtcttcagatctcccaaaagaacaatcgcggcccggagccgcccacacttacggtgcgagccttggacagcagcggcactgttagaacttcatagggggctataactcggactcgggtctcttaggggatttggggaactaccccccgaacttggctatgccctggggcggtgtc

SEQ ID NO: 672274 - DNA, 119 bp, Homo sapiens
aggatcccttcgaggacgatagaaagaaggaaaacaagcctgtgtactttccagcaatataacaaagaagctacttagccccccatgatgtacagcctttaagaaatgtgacacctcct

SEQ ID NO: 672275 - DNA, 358 bp, Homo sapiens
acagtaggatatggactccttgctcagtcaatgatctccggggacctccggccataagcccccatcctgctgagcgtgtggacccatggctgtccctggagaaacagccgtggtttcatggccccctgaatcaggctggatgcagagagcctcctgtccctctgcaaggaaggcagctacctagtgcggctcagtgagaccagcccccaggactgctccttgtctctcaggagcagccagggcttcctgcatctgaagttcgcgcggacccgtgagaaccagtgtggtgctgggccaacacagcgggcccttccccagcgtgcccgagctcgtcctccactacagttcacgcccactg

SEQ ID NO: 672276 - DNA, 1565 bp, Homo sapiens
  misc_feature (2)..(2): n is a, c, g, or t
  misc_feature (39)..(39): n is a, c, g, or t
  misc_feature (1120)..(1120): n is a, c, g, or t
tnagcaggcaggacgcagactagctgaacctagatcacntggcgacagggctgtgtctcgtctcgattctagtttgtattgtttgctcgctgtactctacttgtgtttgtgtcaaacaatcatactgtgctcttctttgtcgttaggtaagcttagtctcgctctcattgggggcgtggaagatttggtgacgtcctgcggcggagtactgcgtcgttaatggttgctgctgctactacttagtgtatgctcttcccatgctgtcgtttaggtgtgtttactacagagacagggtgtgtcgactgggtttcgaccaacggttgttctgcgcgccctacgaaaaaattggtgggcgccaacacaaggagcgacgaccaccgcggtgggagtatctttgtggacacacccgttgtggggagagtctcccccctcccctgtaccccggcacaacaggggcggtcaaaagcccacctgtccagagcccaccaaagcctttccggagaaggtgcacaacgggggcacagcccacttgtggggcccccacaagggggtattttgcaagaagaattctacccccaagagtttatccttgtagtatttgagaggcaccccgcgtttgggggttcaagaaggttcccaatacccttgggttgaacccaaagggggtccccccgggatccccgacaaaagtgttgtgaaagagacaacagaagcctcacaataggaacccctcttttctgggcgggaacgacccccatttgggaggaatttgtatatgggaccaccacgcgagtggtaaagcacacagttggggaggtcgttgtgaagagcatgtcactatcacgggggcgcacaaacacacagagcccaacattccaattagcttggcgcgcttcttaaactggggacactttggacccagggagctctgggagaaagaccgtgtgtttgggagcccaagatactccgtgggacccccacacaaccaaatatggggcgcgcacgtggcgttttactcgatagccccccacatggccaaagttgtatagcttaaccagacgttctccagccccgtgtgcgcccccacatcgaatcttgccgcgcctattgcgtttctggnttggggcgccagaattgggttgtggaatagccttctccacatcctctccgaggagatacattttctcaaggccagccctttaaaggtaacccagaccatgggcacacccacaccactcggtcggtgtttagacttagattaagagatttaccctcggaggactgcgcagactgggagacctcggagacccaatagggcaccagattcacacacattggaccagacaccaaagaatgtgtgggagaattggcatagcccttggaacttaagagacttctcaagttcaaggaagactgggctgggccgtatcccccgccctcttagtttttccaatgggggagggatacctgggcccagccaccaaaactttaaccaaagatgatagttaaaaatgaaaagcccaattaaaattctttggaaaagagcctggaggttcaaacgagga

SEQ ID NO: 672277 - DNA, 293 bp, Homo sapiens
tgcgatcacacgaactcagctggacttgcgtgacagtgacggccctccaagtgaagactggatgcagggtgcctgatggaacgcgtcacctatacccccatgacacctggcagctacctcatctccatcaagtacggcggcccctaccacatagggggcagccccttcaaggacaaagtcacatggccccgtttcgtcaggaaccacagcctccacgagacaatcatcagtgtttgaagacctcactgacacaaggccaccatgtgccccccagcatgggaccccggggtcct

SEQ ID NO: 672278 - DNA, 490 bp, Homo sapiens
  misc_feature (483)..(484): n is a, c, g, or t
tcgatctcggtacccgtcagacgctgaactatgtgaagggtagttcaaccgctgagattgattgattgattgattgactgagatggagtcctgctctgttacctaggctggagtgcagtggcacaatctcagctcactgcaacctccgcctcccgggttcaagtgattctcccaccctggcctcctgagtagctgggattacagggctgtgacaccacgcctggccacttttgtatttttagtagagacggggttttgccatgttggccaggctgctcttgaactcctgacctcaggtgattcacccgccttggcctcccaaagtgctgggattacaggcatgagccatcatgcccggcctgggaaatggatctttattaatatctttaagttctaaatgcccttctagcagctatatccactttcctatctttgtaccaaatcttccccattttcttttgcacatagttcagcgtctgacgnngatcct

SEQ ID NO: 672279 - DNA, 574 bp, Homo sapiens
gaatcggtcttccagcaggggatgaaaacaaatcttgatatttggcctctttaagaggcagccctggctgctttcttttctactgccctggaatgggtgttgctcttaggatgtatcccctcaaacctacctggtggttttgtgccttcccccactctcttctcatctttgtatatgacgaagtcaaaaaactcatcatcaggcgaccccctggcgggtgggtggagaaggaaacctactattagccccccgtcctgcaccccgtggagcatcaggccccacactttgcatccgacaccccccccctttttgtgtacttcagtcttggagtttggaactctaccctggtaggaaagccccccagcatgtggggaaacaaaacgtcctggaattaagcatgtagctttatggggggaggggggagggctgccttaaaaccctccatctgtggaaataccagcggggaaggtttttatgtgcccttttgtttttgtaaaaaaggaacccccggaaagactgaaaaaataccttttatatttggatttttccaaataaaaatggcttttttaatgga

SEQ ID NO: 672280 - DNA, 760 bp, Homo sapiens
tgatggtggagaagttgatttagacctggaaatactgaaagattttggatattactctttataaagacaacaatatcaccacggggcagatatatcagcatgtgatcaataaagagaggcgtggtgattacctggggaaaaccagtgcgacagttgtccctctacattcactgcatgctgtcccaggcagtgggttcatgcaatcaaagcccaaggtgccggtggcatggtcacataaggcaagcagcccccaaatatgcgttcattgagctgggcaggccacccattggagcaccatcgcaaggaatgccgtatgtggcaggcgtttagacacattcccagtttcaaggcgaacaacgagagaatttcttgtaatatccacgttagcctctgtcccacagctcagatgctaccgagagaacaaaaacaacaaagccacccaaaacagcgtccagcgcactgaggggtttaggcctgtctccagatctgctttgtctgccgaagttcaaccgcccattgcgatggccgtgacaggcgacgcatttctcatgtttgtacacgtgaacccctgaaacagagtccatatgtactcccatcgactgtaaactctccaaaattaccgaggttctcgtgctataaaagaggaaaaccaaccgcattgtgaccaacataacacggcacagatagcccaggcaccatcggagatactgaacagtcattagacaaaacagaggagaaataatgagaagaggttgaacgg

SEQ ID NO: 672281 - DNA, 875 bp, Homo sapiens
cttatgccccgcaccgttgggaactcctgttttcccccaatccgtttgggaaaacactggattgggacatccacgatactccgaccaaaattggggcctaacgtgcagatccctccttggttttgccgacctctatgggtaaatgtgcccccgttgttttccgacccgaatctttctcagggcgttttaagtgcccccctgtaggggcgggccgccccccgcatttcgtttcgtgcatacgcccaccaaaataatttttgtcgccctcccctgctttaaaaccaagagtgcgccttggggttaaacaagaaaccgccacctttttgaaaaatttataatgccccccccctccccgtaaagcggttacccccttttccccgcccttaagaagaattattagtttgacccctcgtgcttgcatatacgtcccacacttttccacccccaagatgcgggtgggtccccccctttaaagcactcttccttagaaatgtgcttttctataatatctaccattctaataatactcctgcttcatattcagaaaaataactttaatatctcggggacctactctccccgtgtttgaacacccacgcccacacatgctccctcccgtttctttgacttagacattcacacatgccgctctttcctaatagcgcaccagacggggtctaactctacatatcaactgtacccccaacattctcaatctaaactgtgccctccaatccatatcccctatcgtcttattatttttacccccgctcatcatgacaaagagttttctttttaatttctattgacaaccccttttcactggcgctacggggaaaaattaaaacattactccacccccctcacataacaaa

SEQ ID NO: 672282 - DNA, 346 bp, Homo sapiens
tcatggcagaagtatgcactttttgaagcagtcactggcaaaggatgggactgtgtgggccaacaggttcagccctggagatggatcccttcttctgggacagcaagacaaaacaacattccctttctcccctggcaatacccagccaaccttccagctatgaatctcccccacaggcaccctgtttcttctcatgacaactctgcactccattatccacctcctgggagcaaaccattttgtagcctattccaaaaagctcaagccagcacagacaccacagggcagcaaacgaaatctgaatctcaaagcttgccagaccagcagcgcccactgagaaactctc

SEQ ID NO: 672283 - DNA, 144 bp, Homo sapiens
gatgctgtttcgccgatgaagatgcgttttcgccgatgaagatgccgtttcgccgatgaagatgccgtttccgcgatgaagcatcgcggtgttcggcggatgggagataccggttccggatgaagatggcggttttcgggaaag

SEQ ID NO: 672284 - DNA, 428 bp, Homo sapiens
acggtgaggtacagctcataacaggtggcgcctccgcgagttgttctgttcctcccgtctggagttgttcctccctcctggttgggttcctagtctcgctggctttaggagtgaggcttcagaccttcgtggtgattgttacagctctcaggggcggcacggacccaaagagtcaacagcagcaacatttagcaggaagaacaaaggaactaagcttccacagcatgaaaagttgctgttgctggctgaggtggcctgcttttattcctttatctggccccacccacatcctgctgattggtccattttacagagagctgattggtccaatttgagagaatgctgattgttgtgtttacaaaccttcagctagacacagagtgctgattggtgcgtttacaatcctttggctagaggaaaagtttcca

SEQ ID NO: 672285 - DNA, 237 bp, Homo sapiens
gagtatgggctggcaagtcagtgcacctcatatatggcagccggaaagccgtgagtcagaggcccaagcaggctctgcttggagaacatcgccctgtacctcacccatatgctgaagatctttggggccgtagacgaggacagctccctgggattcccggtcggagggcctggaaccaagcctcaagtctcgaggccacatgtcatgccctaccttcaggtgtcatccagacttccg

SEQ ID NO: 672286 - DNA, 157 bp, Homo sapiens
aaagctgcgggcgagtcgacggcaaaggcagcgatgcagctagcatgcccgccattttccaaccccaagccttctgtcctcggcggatgggcgccttttgccgagcattttcgacacggagtctttatgttccttcttcgcgtcgtgaccatactgg

SEQ ID NO: 672287 - DNA, 359 bp, Homo sapiens
  misc_feature (168)..(169): n is a, c, g, or t
  misc_feature (237)..(237): n is a, c, g, or t
  misc_feature (300)..(301): n is a, c, g, or t
cctccgaagtgctgcgattacaggcgtgagcacctgtgcttggccagttctaggcattaagttctaattggttcatttggggactcgaaattctccattttattttattttattttttctgcttttgtcacaaaagcacagacattgcttaacaaagaggtctgagannggatatgaatgttaagctcagggacatagggtcaacacttttgagtgcacagactgggaacctggcanagttttaacaatcccctcccctattttcaccatcccttattcctgtagaagtagagcagatgnntacggtattcactgctatatggcttattacctttgtaggaattctaactgaagggctt

SEQ ID NO: 672288 - DNA, 882 bp, Homo sapiens
  misc_feature (198)..(198): n is a, c, g, or t
gtcactgcccctcatcccagatgacgaaggtagggcacggagcgtgagattcagttgtgacacggtagggatgagaaggctctcatgaacagtaagcgtactcccttctgcctcgaggtacccactattatgacctgctatttgattgccgcttatggctgtgctcatatgtgtatcctagacgtactgcgacttccntctagatagtacgacaggtatagaccctgttcagtaacgcaacgccaccttacaattagtgttccttctgcactgtcgtaaattagtgtactgtgtgtacacagtctgagccacgtgcacagtgtacaccgtgagccacaaaacacgagaacgtactgatcttaccagtgcggctacgtctacggctcagagcttacgttcgcattcacactgaaagttggcaaccttggcattatacatgccaattgaactagtgtgtgtgtggcaggagtcatgtaccctcacatcctttgtacaaatgacaattactcttaattccttcagatttataataactctgtactttggtttcatgggtgacatttgggaaggattggtttagaattaatggagtggcacattttgcagcctttttgcttgattgcatgtactggaaatgccctatattttcctgcaaaataagtactaaattcattatcgttaagcaaatgtacaatatgctcaggcaccgcagagagctgtgcacggagcccattgtgagcatcactttggaaagtagggctcttcaacagggaccttgaactttacagaaaggaacttctttttgccttctattgatcatatagactattcttggtaagtctgcccacatgtaataccggtaattcaagcggagaaccaatg

SEQ ID NO: 672289 - DNA, 810 bp, Homo sapiens
tcctcacccaggtggggctttaatggaaaaggcgcccccctcaggccgtgtaaccggtatattccccgcagggggataccaagccgctctccttcccggggtgggtgcttctgtgggctctcaaggtccccctcggtggtgtgtgaacccgggcgggccgaatgagcaaggatgtattattaaacgccacgaatggctccaggggcgcatgaacatctttgcgccctgttaaaaaatcccaagaaggagataccataccaaagaagtctgggataataaccctgggtagaaaacacgtggcgcaaaaggagaatcccggagacaaacctcagtactataaaagagaatctctgtggggaggcccgaccaccgctccgtgtcaccatctgtgggcaaggcacccccacagatgtgggaaaaaagccccccactcttaggagggtgctcccgagtgtgattcacaagagaggctcccccccctcttttttctcccccgggaaaaaattcgcggaccctgtggttatctgggcccatgtggttgcaacaaccgccgcctttgggggaggcgttgacaccttgtgctgatcccgtgaccccaagagggctttctttctgtgcccccttaaaagagggtgttgtcgcccctttagtggtggccccacgaccccttctttggggcttgaagcttctgagaggaaaaagggctcattgttcgccgtgtaccggaaaagatcttgcccatgtgtcttgtacccctggtggtagtgcttgtgacatctttgcaaagtgtggccccagtgtcccacgtct

SEQ ID NO: 672290 - DNA, 156 bp, Homo sapiens
tcacccaggctggaatgaaggatgcaatcttggtcactgcaacccacctcctggatgcaagtggttcttgtgcctcagctccccaagtggctgggactacaggcgtgtgccatcacactcagctaatttctgtatttttagtagaaatgggctttg

SEQ ID NO: 672291 - DNA, 104 bp, Homo sapiens
  misc_feature (10)..(10): n is a, c, g, or t
  misc_feature (13)..(13): n is a, c, g, or t
  misc_feature (104)..(104): n is a, c, g, or t
cttaaatgtngantgtaagcacattcatttttttaacttttaagttcagggtacaagtacagagtagttgaacagcgtggcatgatcagaacttcaagaagttn

SEQ ID NO: 672292 - DNA, 102 bp, Homo sapiens
cagtcaactgacatctgctctctaatcacatgatgtgatcctgtcattaaaatgattcctggcctgggacaaatgatcttgatgggtgtcgagacaatggta

SEQ ID NO: 672293 - DNA, 321 bp, Homo sapiens
  misc_feature (9)..(9): n is a, c, g, or t
  misc_feature (17)..(17): n is a, c, g, or t
  misc_feature (60)..(60): n is a, c, g, or t
  misc_feature (94)..(94): n is a, c, g, or t
  misc_feature (104)..(104): n is a, c, g, or t
  misc_feature (174)..(174): n is a, c, g, or t
  misc_feature (268)..(268): n is a, c, g, or t
  misc_feature (283)..(283): n is a, c, g, or t
  misc_feature (301)..(301): n is a, c, g, or t
  misc_feature (309)..(309): n is a, c, g, or t
tccccccgnccaccggnttcctctcccaccggttgcctgtccagaggtctgaaggcaccnacgagagccacgatgaccctctccccagggactngggctgcctnctggaaattcgagcctacagagaagctctgaaagctaaaataaaaccaggacctaggcctgaaaagctcnaagattgaaaaaagtgtggctgtataggagctgaccttcccccacgtaacgtagtcagatggttttcggccgaccaaccgtcggcccaggtgtncagttcggagctcgngcacttttcaaagcgagngaggagtnaggcacagaagt

SEQ ID NO: 672294 - DNA, 204 bp, Homo sapiens
atcctgaggcgcagggtgggttgatcgatgagtttctatctagtaatcttttccagtattaacaaggcactagttacatgacccttgctacaagccaaagggagggcagtatttttactggttatcttgtacgagtcagttctgcactagcactgttaaaccagacatctcaacgtgtatttggtttggtcccattttactggg

SEQ ID NO: 672295 - DNA, 117 bp, Homo sapiens
gaacgaacagtacacttcgagagaatttcagtgagtctggaataggcctgcccatcacgcattgagatgctctcgatggatgttgtgcgccggggagacacattgctctgtttctca

SEQ ID NO: 672296 - DNA, 870 bp, Homo sapiens
cccttttttattattattattttatgtgtagtcgtgcaggtaaaggcttactaaaagtgtgaaaacgtaggcattggtatcaaggcgacacaagcgaatttctcaggcatacgctccagtcaaaattcagaattgtgcaaacatcgcatcacacgtgtacaagggacaggttcaagggttagatcattgctcaggggtggccgcttccatatataagtgtgagctatagatgtaaggtgtgaaggcctaagcaaagtaaatgatgttaaaggggatataaggctgtaacggcccaggggtctatatatgggttagatatggattaaggctgagataggttatcagataaatatacacgtacagatatatgggagtataaagaggagtagttaggagtggtgccctttggtggatcaagacaaagcgtgggcctcaggagcctattattaacactctttcagacaccagcacaagcccgtaatatatcaacgtggacgcctcagattactatataaaggggggattcgcgccccatggagtctaaaaggtttaaaatcacgcataatatacagagagtgaggtatcggtctgtcacatattacgcagaatgcagggagttcccacaatcaatgcgggcttaaggccacccactacacccattaggcatcagaaagcccgcaagcaaccagagacaaaaacgggccaagcaaatcgtaaccaaacaacgacacaaaccaccacacaaaccgtcataaagacgagaccagcgatacacataagggctatacactaaaacaccacggaacaccaaaaagactccaaagaggggcacaaagggagagcaccaacagggggcaccaaatagcgcga

SEQ ID NO: 672297 - DNA, 113 bp, Homo sapiens
cgaacagtattcccgaagttctcaggatcacgggatatggactggttcgccgagatgcagcaggtaggcggccgcgccttctcacgcggagaactctgtcacgtcgcaggtga

SEQ ID NO: 672298 - DNA, 189 bp, Homo sapiens
aaattcccttatttggccaaatccccccaaaaaccccctttttggggtaaggttccctggggaacccttttccgttttcctgggaaggggtctttcctggggtagggggggaaatgttttaaaaatttttttaaaaaaaaattttttggggcgcccccttttaataaaaaaaaaccttgtttttttgga

SEQ ID NO: 672299 - DNA, 360 bp, Homo sapiens
gacgaccgacgtacgatttctgcaccttcgaagacttcgaagtcgctgtgtggcgagcgtgaagccaaagtgatcaaccgcttggccgtcgatcaacagcatcgccacggctgggcgagtaagctatggcccaacctgttgggcgaaattggtatttaccgggtcagcagccctggcctgaccgaccacaagattgccgtctaatcattttcaagagggacgctcatgagtcgtttggctgtttttctattgactgcactgcttggcgccaacgccatggccgccgacgttatcgaccctaatcgcacgaaggaattcggcgatattacggtgcgctacaacaccttcacctccagcttc

SEQ ID NO: 672300 - DNA, 651 bp, Homo sapiens
gtctgtcttgtcttaatctctagcaaagaagagtgctgcaacagagtatgacttttttctgggtccagaagctgaaactcaaggagttaagagctaactgtgcaaatatttccattgttttcttgataaggccccagtatcatttatttagagtcaagatgtgatgacatatactcttaaaacatcagaggctaacatataaataggatatatctagtagggaagaatgtgtggccattaggaaaaattgaaatgaatgacttgcacttacacatctgttaaggacctggggtcttagtgggtctcagataaatgggaatcggctaagtactgtgactgcaaaacagacatgaatctaacaggtagaatcgggtgaccaatatgagggattctctgctcgactctctagtctcatatagttgggaccctagattgatagaaacctttttaggaggctagacatggtggttcctacctgtaatcctagcactttgggaggccgaggcaggaggatcacttgagctcaggagttcaagaccagcccgggtaacgtgagacccaaatctatcagaaaaaacactcacaaaaaaaattttttgggggccctggcccggaaaagtttttaaacccattgttttggggcgggggcct

SEQ ID NO: 672301 - DNA, 141 bp, Homo sapiens
tcaagggcagccagagcccaaccagcagcctgaggctgcgacgccatctctgaggcccaaggccacagtgaaattcacagaaagcaacacagctgggaaaaggactcgatgtgaagagctaggaatagccaatacccacca

SEQ ID NO: 672302 - DNA, 1425 bp, Homo sapiens
tgatgtgtccctctgctggtgtgtcgctggatcgcctctcgcgtggtcatcctgccgtccgcgggatttatttctcccagaggggcttcctcgcgtgtgcggccgcagtctggggatctacatcccccgccctttttgttgcgccctcggtatatctcgcggggtcgttcccgcgccactccggggggcgcctgtcccccgggggttctccccccaactgtcctggtgagattgtgggtaatgagccgcttcttcctctggtcgcagcttcctcctccctaaggccaccacgtgtggcccaccgaaaccgacacattgttgggcccactggcgccccccccctggggtgtcctgggcccccttgggcttttttacctcctgcggggtgttctcccgtggtcctggctactccggtattgtggggattggacctcagacccccccgtagtcccacggtgccttgtgtggaggccccccggccttctacagggggattgggaaccccttcccacggacatggggcccccctccttgctggggtgcccttttcttgggaggacgggtacccatggagtgatccccccatagccccctggtggccccgcacacagaggggggccatggcccccctaaagcgccccctgctagttcgcctcgggaagatttggggacccccatgtctgcccaccccagcgcccccgctagtcgcccccactttcgctgggggcactttcctttgctcgggccccttgggtctggtccctctgggagaccttgttgggttcacctcgggagacctccttgggttcgccttgcctcggtagaatttttgggaagggaaaaaaagaggctctccacaattatgaacacacacagagggggagagttatcttctccacgggctcgcaccgcctaactcccgtgggtgcacccggacgctctctctgaatggatgaaccactctggttggtcccacgcttgattttttctccctctggggggtggcttcttgtccacaggagtttttttgggctcgcctcccgcgagtcaccacgctgttcttgggcccccgcgaaaggtgggtgacacactgtggattctctgttttttttgtggctcgtggaccacttctttcacaccacctgcctcttcttggcctctgccaagccttcgcctttggcttcgcgctttaggaggggcccggagcttcctttcttcgcttgcttggcacccactgcttatgaacaagggtccacgattatagatttttgactgaagtcactttctaaagtaaagttgccagacccctgtatactagacccctataatacttcatccccccccctcctaagaaataagaacccaccttatcacccccaagaaaattaataattccaactaatatttaacaaaaaaaaaaataaa

SEQ ID NO: 672303 - DNA, 709 bp, Homo sapiens
gactgagcggttgtggccgagttgacgacctccagacagcagtcggcttctctacgcagaacccgggagtaggagcaactcagaatcgaatctcttctccctcccacttcttgtaatcggcttctgtgagaaaccttaccatccaaacacgatggccagcaacgttaccaacaagagagatcctacgctaccatgaggctcccgtgtgtacattgggaatctcaacactcttgtggtcaagaaatctgatgtggaggcgatcgattccgagagtatggcacagattgtgggctagtctgttcataagggctttgccattcgttcagtatgttaatgagagaaatgcccgggctgacctgtagcagtgagaggatggtcagaatgattgctggccgaggtttagatattaacctaggcatgctgtagccaaaagtgacccgaggccacagcacggtgtgaacacgatctgaaagtaggaagcatgtaccgaggtcagtgaacagcaacacgccttctcccggtccccctctactcaggatcctcttagacttggactactgactatgcaacgggactattatgatacggatgtacaggacccagaaagtgtaacaccatcctcctcctattgcacgggctgatgcctcgaaacgtagcgtgtatccgacccactcacaagcgaaatgcataaacaagtgacagggactca

SEQ ID NO: 672304 - DNA, 1814 bp, Homo sapiens
ggaagcatgttcgactctaagtgtcaacaaaacgcgttcaagcctcaacaccctgtacctaaaccatcccatagagcgatatgaaccgtgaactctctctagctagcacccacacttggtgaccaactctttactcagcccatactacgatacgtacacatacaatgtatactgaataacgttgaatcagtgagaagatcaatgtgcgtccctcgcgacactaaagcgctgacggtttcatgagtatgagagacagacatgaaactcgcatgagatctaagcatgcccgctaaatgaatcctgaccacagtgcgaaagctagactagaactccatttgatttgacacctgcgaactcgttctagaagccctacatcgatcacggggctagttgctcgagtccacacgtggacataggcgtgtcagagacatgagatgcttcagcacatgtgagacgtcttgcgtggaaattctatagcgccacggcacttgattggatcgcgaaatataaccaattcatcgcgtctatgcaatcatccaaggtgaatttatgcatgtgacgaacgcaggacgtggcccttgagatgaaccaccaagtgttttacaacgtgcctcggcggtttagcgcctaaagcccgcgtgtccacaaaggcgattaggctactgacgatcgtcctggtgttcaccgttctaaacagtcagggaggcacctttggttattcgcaggattgggacctcccggactggggagtgcgattcccataccccctgggtcgctcgtctaactttgtttctcagaccccagggtgaattaccatctggaacacattggagccacttgctagaaacacttgaaggtgtcctgcgtgtgcagtggaacccatccaccgttatacggagaccgggaaatcagagtgcacggcccccttagggtggggcactggccgttttgcaaacattctatgagtctaacggattcggtcgccccacccaggataaagcggcgttacaagcgaagagaatcggcgacgaagccaagagggatccgcttaagagaacgtaaaccccaaaaaaaacccttagaggcagatattggaaaacataacttttgttccccgagtctcttgggggtgggcccggaaccccctttcggcggcacttcggatgagaaaaacctcatagaatcccttacgccggtaaatgcccatgttggacccataagcttaaaaaagaaactgttgaccacccacagagggtccctaataaaaggcaaggaaacacttaaacttaatttactttccaacatttggattccccaacatgaaagcttttggaacccaataccggaaacaaacagtataacccctaaggggggaactacaaccaggctgtcccaaaatcctatatattactataaggaagagtccccagtaattccaaagagaggcgtaggccggcatatacaagaaacccattcgcaaattgttttagaacaatcccaggagacaatctcccacgaagttggttgtgataccagccatatttaaaaagagaatcgggaaaatgatcacaacgaacagttagagaagcacccacagtgcgaacagaaacaatcaacaacccacggaaggtagacacacgagacaggatacatataaatatacatcaacaaagcatccacgtcgtacgaaagacgcacaaaacataagaccaccagacatatagactgctcccacgcacagtaaaatacttcactccgtaataaatcgatccacccagacgatgatgtgttaaaaccgaaacacataatacggt

SEQ ID NO: 672305 - DNA, 143 bp, Homo sapiens
ccgcgccagcttatctctggtcgttccagagacacctgctggctgtcttgggatgcgcccagccgtttgacgtggccactaccccagtgaagttctgccattcactggacatgatgctgaggacactgggcttcaacactgag

SEQ ID NO: 672306 - DNA, 303 bp, Homo sapiens
  misc_feature (43)..(43): n is a, c, g, or t
  misc_feature (187)..(187): n is a, c, g, or t
  misc_feature (252)..(252): n is a, c, g, or t
cagaaatcccagccaccttggaagctgaggtgtgaaaaatttnttgagcccaggagttcgaggctgcagtgagctatgatggcaccactgtactccaggctgggcaacagagagaccgcgtcttaaaaataaataaaaggccaggcaaggtggctcacacctataatcccagcactttgggaggctnaggcgggtggttcatctgaggtcaggagttcaagaccagcctggccaacatggtgaaaccctgtntctactaaaatacaaaaattagccagggatgattggttgggtgcctgtaat

SEQ ID NO: 672307 - DNA, 675 bp, Homo sapiens
ggacctgagtgctccactggcgacttgttgagtgggtcagtggagtggcctggcaaggggaggcaggagggtggcctggacctccccactacctcctgcagactttgagaagcccacagtggagacatccaccaccccagccatggtgccatactgtggtgtgtcctgacctgctgcccggctggaactggtggtgtgctcgtgcagtgctgaaggagcctgggaagggatgggagtgatacatggcaagcacatgtcttgagagaggtggcttggagccccggcacagatgactgaactgctgggtgtcccttcctgtggaccaagatggagaagtgtgttcctaagtggaggagacatgaaggaggcttgccgaatggctctgtgtggtgtcatcaccactctgcatcagctgcccttccaatggagcttctgcttgcttgctccatcctcccagacccctgtgcccaattcctcccctgcagatctgagagaggcaaaggtaatgttgcactgtgggcacattgacaggacacggaggaccacctcatcacagggttccctgcatggggatctgtaaagagaaaagtttctgcacccaccagagcaagagccaactgaaagcgtagacctgaaagaggtactcagccccttcctgctcctctgcctcatcag

SEQ ID NO: 672308 - DNA, 201 bp, Homo sapiens
gccaattttttgtattttcagtggaggcggggtttcgccatgttggccggacgtggtggtgtgtgcctgcaatcccagccacttgggcggttgaggcaggagaatcgcttgaacctgggaggtggaggttgcattgagccgagatggcgccactgcactccagcctgggtgacagagggaaactccgtctaaaaaaaaaaa

SEQ ID NO: 672309 - DNA, 127 bp, Homo sapiens
  misc_feature (19)..(19): n is a, c, g, or t
acgctgcacctggtgtcanattgctttgtactccatctgcctgtcgcagactgcccaccctgctgcaagaatacgtgcgtggagctggggatttggaattgtgccgggtgcggccatctatcgcaat

SEQ ID NO: 672310 - DNA, 2682 bp, Homo sapiens
agtgggcggttcggcggctctgggcgctgttgtttggtctttaggcctgcggaggggcgttatctggagggccgcgggtgcaggccgcagtgacagggccgctcgccccgctagtcctgcctgtctcccggtgcagctgtgttcgcggcctgcaggcccaacatggcgcaggaggtgtcggagtacctgagccagaacccgcgggtggcagcctgggtggaggcgctgcgctgcgacggcgagactgacaaacactggcgccaccgccgggattttttgcttcgcaacgccggggacctggcccccgctggcggcgctgcctccgctagcacggatgaagctgccgacgccgagagcgggacccgaaaccggcagctgcagcagctcatctccttttccatggcctgggcgaaccacgtcttcctcgggtgccgataccctcaaaaagttatggataaaatacttagtatggctgaaggcatcaaagtgacagatgctccaacctatacaacaagagatgaactggttgccaaggtgaagaaaagagggatatcgagtagcaatgaaggggtagaagagccatccaaaaaacgagttatagaaggaaaaaacagttctgcagttgagcaagatcacgcaaaaacctctgccaagacagaacgtgcatcagctcagcaggaaaacagttcaacgtgtatagggtcggccatcaaatcagagagtgggaactcagctcggagctctggcatctccagtcagaatagctctacaagtgatggagatcgatctgtttccagccaaagcagcagcagcgtttcctctcaggtaacaacggcaggatctgggaaagcttctgaagcagaagctccagataaacacggttctgcatcatttgtttccttgctgaaatccagtgtgaatagtcacatgacccaatccactgattctagacaacaaagtggatcacctaaaaagagtgctttggaaggctcttcagcctcagcttctcaaagcagctcagagatcgaggtgcccttgttgggctcctcaggaagctcagaggtagaattgccactattgtcttccaaacctagttcagagacagcttcaagtgggttaacttccaaaactagttcagaggcaagtgtttcatcatcagttgctaaaaacagttcctcatcaggcacatccttactgactcccaagagcagctcttcaacaaatacatcgctgctaacttccaagagcacttcccaggtagctgcatcactactagcttccaagagcagctcccagaccagtggatctctggtttccaaaagcacttccttagcaagtgtgtcccagttggcttctaagagtagttctcagactagcacctcacagttgccttctaaaagtacttcacagtcaagtgagagttctgtcaaattctcttgcaagttaaccaatgaagatgtgaaacagaagcaaccttttttcaatagactatataaaacggtggcatggaagttggtagctgttggtggctttagtcccaatgtgaatcatggagagctcctaaatgcagctattgaggctctgaaagcaacactggatgtattttttgtcccactaaaagaattggcagatctgcctcaaaataagagctctcaagaaagtattgtttgtgaattgaggtgcaagtctgtgtatttgggcactggctgtggaaaaagcaaagaaaatgcaaaagcagttgcatcaagagaagcattgaagttatttctcaagaaaaaggtggtggtaaaaatatgtaaaaggaaatacagaggcagtgaaatagaagatctagtactccttgatgaagaatcgaggcctgtaaacttacctccagcactaaaacatcctcaagaattactataatgtgtccaaaatatcactgcatacaatatctggtatttgaagagaaaaactgacttttgtatagtataaaacacaggctttcacaaattttgtattgctttttttccagttttgcagaaaatttacattctagttctcttcacacagtagcagttgtaaataatttatgaatgacagtacacattaaaaggtatgcattagcagcatattagtatgctgttttatttgctgaagaaaatactgtcttctatttttaatgatacattaggtacgatgtgtagttcggtagagtcctaaaatttttgtactactttcaatttggtgaaaatgtattaagttgtctaccatgttttcttttctagctgaataaaccacatcaaaggaaagggaccacagtatttgaatgtttgaaagtctgtaaagcttaaggttttaaaaatgttgcccgtaatgttgaacgtgtctgttaaaaaataaaagaaaaaatagttgcttcaaactatttttatgagaagttgtaagcattttttagatataaagcagtataaagtacttgttattttactctgaagttgtttaaaattcaccatgactttgaccgctgaagattctttaagcgggttaatttatgttttgaggtggaatacaatttacacttttttcttaaaaacatgaatgtgggtttctatattaagcatattttgtgactactattaacagattgatttgtttagatattaaatgctttaagctattttaccttttcaaaaaaaaaaa

SEQ ID NO: 672311 - DNA, 2651 bp, Homo sapiens
agtgggcggttcggcggctctgggcgctgttgtttggtctttaggcctgcggaggggcgttatctggagggccgcgggtgcaggccgcagtgacagggccgctcgccccgctagtcctgcctgtctcccggtgcagctgtgttcgcggcctgcaggcccaacatggcgcaggaggtgtcggagtacctgagccagaacccgcgggtggcagcctgggtggaggcgctgcgctgcgacggcgagactgacaaacactggcgccaccgccgggattttttgcttcgcaacgccggggacctggcccccgctggcggcgctgcctccgctagcacggatgaagctgccgacgccgagagcgggacccgaaaccggcagctgcagcagctcatctccttttccatggcctgggcgaaccacgtcttcctcgggtgccgataccctcaaaaagttatggataaaatacttagtatggctgaaggcatcaaagtgacagatgctccaacctatacaacaagagatgaactggttgccaagaaggggtagaagagccatccaaaaaacgagttatagaaggaaaaaacagttctgcagttgagcaagatcacgcaaaaacctctgccaagacagaacgtgcatcagctcagcaggaaaacagttcaacgtgtatagggtcggccatcaaatcagagagtgggaactcagctcggagctctggcatctccagtcagaatagctctacaagtgatggagatcgatctgtttccagccaaagcagcagcagcgtttcctctcaggtaacaacggcaggatctgggaaagcttctgaagcagaagctccagataaacacggttctgcatcatttgtttccttgctgaaatccagtgtgaatagtcacatgacccaatccactgattctagacaacaaagtggatcacctaaaaagagtgctttggaaggctcttcagcctcagcttctcaaagcagctcagagatcgaggtgcccttgttgggctcctcaggaagctcagaggtagaattgccactattgtcttccaaacctagttcagagacagcttcaagtgggttaacttccaaaactagttcagaggcaagtgtttcatcatcagttgctaaaaacagttcctcatcaggcacatccttactgactcccaagagcagctcttcaacaaatacatcgctgctaacttccaagagcacttcccaggtagctgcatcactactagcttccaagagcagctcccagaccagtggatctctggtttccaaaagcacttccttagcaagtgtgtcccagttggcttctaagagtagttctcagactagcacctcacagttgccttctaaaagtacttcacagtcaagtgagagttctgtcaaattctcttgcaagttaaccaatgaagatgtgaaacagaagcaaccttttttcaatagactatataaaacggtggcatggaagttggtagctgttggtggctttagtcccaatgtgaatcatggagagctcctaaatgcagctattgaggctctgaaagcaacactggatgtattttttgtcccactaaaagaattggcagatctgcctcaaaataagagctctcaagaaagtattgtttgtgaattgaggtgcaagtctgtgtatttgggcactggctgtggaaaaagcaaagaaaatgcaaaagcagttgcatcaagagaagcattgaagttatttctcaagaaaaaggtggtggtaaaaatatgtaaaaggaaatacagaggcagtgaaatagaagatctagtactccttgatgaagaatcgaggcctgtaaacttacctccagcactaaaacatcctcaagaattactataatgtgtccaaaatatcactgcatacaatatctggtatttgaagagaaaaactgacttttgtatagtataaaacacaggctttcacaaattttgtattgctttttttccagttttgcagaaaatttacattctagttctcttcacacagtagcagttgtaaataatttatgaatgacagtacacattaaaaggtatgcattagcagcatattagtatgctgttttatttgctgaagaaaatactgtcttctatttttaatgatacattaggtacgatgtgtagttcggtagagtcctaaaatttttgtactactttcaatttggtgaaaatgtattaagttgtctaccatgttttcttttctagctgaataaaccacatcaaaggaaagggaccacagtatttgaatgtttgaaagtctgtaaagcttaaggttttaaaaatgttgcccgtaatgttgaacgtgtctgttaaaaaataaaagaaaaaatagttgcttcaaactatttttatgagaagttgtaagcattttttagatataaagcagtataaagtacttgttattttactctgaagttgtttaaaattcaccatgactttgaccgctgaagattctttaagcgggttaatttatgttttgaggtggaatacaatttacacttttttcttaaaaacatgaatgtgggtttctatattaagcatattttgtgactactattaacagattgatttgtttagatattaaatgctttaagctattttaccttttcaaaaaaaaaaa

SEQ ID NO: 672312 - DNA, 250 bp, Homo sapiens
  misc_feature (72)..(72): n is a, c, g, or t
catcttatgctggctctcggctctgcgcgtcgttactacagtgacacaggctcacagtaaacaccagtatgnaggtaatacaacttctgcatccagacccagttcaagcgaccttttaacacctttagtgactatggggtgtcagtcacatttatcacgggctcaactgcaacaaaacacttccttgacagctccacaaactcagtgcacagtgaggaatcaacagtatcccattatgcggcccaggtgc

SEQ ID NO: 672313 - DNA, 110 bp, Homo sapiens
aatatgacacttgtaaatagttgtttcaaaatgaacagcgaagccttaactttaaatgacattgtattctcagacactgagtagcataaaaaccacatagaaaatatctg

SEQ ID NO: 672314 - DNA, 2618 bp, Homo sapiens
agtgggcggttcggcggctctgggcgctgttgtttggtctttaggcctgcggaggggcgttatctggagggccgcgggtgcaggccgcagtgacagggccgctcgccccgctagtcctgcctgtctcccggtgcagctgtgttcgcggcctgcaggcccaacatggcgcaggaggtgtcggagtacctgagccagaacccgcgggtggcagcctgggtggaggcgctgcgctgcgacggcgagactgacaaacactggcgccaccgccgggattttttgcttcgcaacgccggggacctggcccccgctggcggcgctgcctccgctagcacggatgaagctgccgacgccgagagcgggacccgaaaccggcagctgcagcagctcatctccttttccatggcctgggcgaaccacgtcttcctcgggtgccgataccctcaaaaagttatggataaaatacttagtatggctgaaggcatcaaagtgacagatgctccaacctatacaacaagagatgaactggttgccaagaaggggtagaagagccatccaaaaaacgagttatagaaggaaaaaacagttctgcagttgagcaagatcacgcaaaaacctctgccaagacagaacgtgcatcagctcagcaggaaaacagttcaacgtgtatagggtcggccatcaaatcagagagtgggaactcagctcggagctctggcatctccagtcagaatagctctacaagtgatggagatcgatctgtttccagccaaagcagcagcagcgtttcctctcaggtaacaacggcaggatctgggaaagcttctgaagcagaagctccagataaacacggttctgcatcatttgtttccttgctgaaatccagtgtgaatagtcacatgacccaatccactgattctagacaacaaagtggatcacctaaaaagagtgctttggaaggctcttcagcctcagcttctcaaagcagctcagagatcgaggtgcccttgttgggctcctcaggaagctcagaggtagaattgccactattgtcttccaaacctagttcagagacagcttcaagtgggttaacttccaaaactagttcagaggcaagtgtttcatcatcagttgctaaaaacagttcctcatcaggcacatccttactgactcccaagagcagctcttcaacaaatacatcgctgctaacttccaagagcacttcccaggtagctgcatcactactagcttccaagagcagctcccagaccagtggatctctggtttccaaaagcacttccttagcaagtgtgtcccagttggcttctaagagtagttctcagactagcacctcacagttgccttctaaaagtacttcacagtcaagtgagagttctgtcaaattctcttgcaagttaaccaatgaagatgtgaaacagaagcaaccttttttcaatagactatataaaacggtggcatggaagttggtagctgttggtggctttagtcccaatgtgaatcatggagagctcctaaatgcagctattgaggctctgaaagcaacactggatgtattttttgtcccactaaaagaattggcagatctgcctcaaaataagagctctcaagaaagtattgtttgtgaattgaggtgcaagtctgtgtatttgggcactggctgtggaaaaagcaaagaaaatgcaaaagcagttgcatcaagagaagcattgaagttatttctcaagaaaaaggtggtggtaaaaatatgtaaaaggaaatacagaggcagtgaaatagaagatctagtactccttgatgaagaatcgaggcctgtaaacttacctccagcactaaaacatcctcaagaattactataatgtgtccaaaatatcactgcatacaatatctggtatttgaagagaaaaactgacttttgtattgctttttttccagttttgcagaaaatttacattctagttctcttcacacagtagcagttgtaaataatttatgaatgacagtacacattaaaaggtatgcattagcagcatattagtatgctgttttatttgctgaagaaaatactgtcttctatttttaatgatacattaggtacgatgtgtagttcggtagagtcctaaaatttttgtactactttcaatttggtgaaaatgtattaagttgtctaccatgttttcttttctagctgaataaaccacatcaaaggaaagggaccacagtatttgaatgtttgaaagtctgtaaagcttaaggttttaaaaatgttgcccgtaatgttgaacgtgtctgttaaaaaataaaagaaaaaatagttgcttcaaactatttttatgagaagttgtaagcattttttagatataaagcagtataaagtacttgttattttactctgaagttgtttaaaattcaccatgactttgaccgctgaagattctttaagcgggttaatttatgttttgaggtggaatacaatttacacttttttcttaaaaacatgaatgtgggtttctatattaagcatattttgtgactactattaacagattgatttgtttagatattaaatgctttaagctattttaccttttcaaaaaaaaaaa

SEQ ID NO: 672315 - DNA, 254 bp, Homo sapiens
gcggggcggcctcccagatagggacgcattcgctaagtccgaggcggctgctcacctcactgagcccggctggacgtgggaccaccggtcgccgcgcccagggaaccaccaaggattcaagcggagcttacggccagcagtttctgcccgggccaacgcccgttccgggtagccgcgcgcaggccacttccggcagcggtgcaccatgggactgcagttcctggcaaaggttgagtcccgggcgtggcggcccc

SEQ ID NO: 672316 - DNA, 2534 bp, Homo sapiens
agtgggcggttcggcggctctgggcgctgttgtttggtctttaggcctgcggaggggcgttatctggagggccgcgggtgcaggccgcagtgacagggccgctcgccccgctagtcctgcctgtctcccggtgcagctgtgttcgcggcctgcaggcccaacatggcgcaggaggtgtcggagtacctgagccagaacccgcgggtggcagcctgggtggaggcgctgcgctgcgacggcgagactgacaaacactggcgccaccgccgggattttttgcttcgcaacgccggggacctggcccccgctggcggcgctgcctccgctagcacggatgaagctgccgacgccgagagcgggacccgaaaccggcagctgcagcagctcatctccttttccatggcctgggcgaaccacgtcttcctcgggtgccgataccctcaaaaagttatggataaaatacttagtatggctgaaggcatcaaagtgacagatgctccaacctatacaacaagagatgaactggttgccaagaaggggtagaagagccatccaaaaaacgagttatagaaggaaaaaacagttctgcagttgagcaagatcacgcaaaaacctctgccaagacagaacgtgcatcagctcagcaggaaaacagttcaacgtgtatagggtcggccatcaaatcagagagtgggaactcagctcggagctctggcatctccagtcagaatagctctacaagtgatggagatcgatctgtttccagccaaagcagcagcagcgtttcctctcaggtaacaacggcaggatctgggaaagcttctgaagcagaagctccagataaacacggttctgcatcatttgtttccttgctgaaatccagtgtgaatagtcacatgacccaatccactgattctagacaacaaagtggatcacctaaaaagagtgctttggaaggctcttcagcctcagcttctcaaagcagctcagagatcgaggtgcccttgttgggctcctcaggaagctcagaggtagaattgccactattgtcttccaaacctagttcagagacagcttcaagtgggttaacttccaaaactagttcagaggcaagtgtttcatcatcagttgctaaaaacagttcctcatcaggcacatccttactgactcccaagagcagctcttcaacaaatacatcgctgctaacttccaagagcacttcccaggtagctgcatcactactagcttccaagagcagctcccagaccagtggatctctggtttccaaaagcacttccttagcaagtgtgtcccagttggcttctaagagtagttctcagactagcacctcacagttgccttctaaaagtacttcacagtcaagtgagagttctgtcaaattctcttgcaagttaaccaatgaagatgtgaaacagaagcaaccttttttcaatagactatataaaacggtggcatggaagttggtagctgttggtggctttagtcccaatgtgaatcatggagagctcctaaatgcagctattgaggctctgaaagcaacactggatgtattttttgtcccactaaaagaattggcagatctgcctcaaaataagagctctcaagaaagtattgtttgtgaattgaggtgcaagtctgtgtatttgggcactggctgtggaaaaagcaaagaaaatgcaaaagcagttgcatcaagagaagcattgaagttatttctcaagaaaaaggtggtggtaaaaatatgtaaaaggaaatacagaggcagtgaaatagaagatctagtactccttgatgaagaatcgaggcctgtaaacttacctccagcactaaaacatcctcaagaattactataatgtgtccaaaatatcactgcatacaatatctggtatttgaagagaaaaactgacttttgtatagtataaaacacaggctttcacaaattttgtattgctttttttccagttttgcagaaaatactgtcttctatttttaatgatacattaggtacgatgtgtagttcggtagagtcctaaaatttttgtactactttcaatttggtgaaaatgtattaagttgtctaccatgttttcttttctagctgaataaaccacatcaaaggaaagggaccacagtatttgaatgtttgaaagtctgtaaagcttaaggttttaaaaatgttgcccgtaatgttgaacgtgtctgttaaaaaataaaagaaaaaatagttgcttcaaactatttttatgagaagttgtaagcattttttagatataaagcagtataaagtacttgttattttactctgaagttgtttaaaattcaccatgactttgaccgctgaagattctttaagcgggttaatttatgttttgaggtggaatacaatttacacttttttcttaaaaacatgaatgtgggtttctatattaagcatattttgtgactactattaacagattgatttgtttagatattaaatgctttaagctattttaccttttcaaaaaaaaaaa

SEQ ID NO: 672317 - DNA, 209 bp, Homo sapiens
aaggtgggatccgcaagatgatgggatggagtttgaggtgaacatacatgttccaggcacctgacttgcaggctgacatcatctgcatcacggggcctagctggaaatttgggacccgggacaaggctggacttgctggagcgtgtgaaggagctacaggcccgagcaggaggaccgggctttaaaggagttttaaggctgagtggcac

SEQ ID NO: 672318 - DNA, 1211 bp, Homo sapiens
agtgggcggttcggcggctctgggcgctgttgtttggtctttaggcctgcggaggggcgttatctggagggccgcgggtgcaggccgcagtgacagggccgctcgccccgctagtcctgcctgtctcccggtgcagctgtgttcgcggcctgcaggcccaacatggcgcaggaggtgtcggagtacctgagccagaacccgcgggtggcagcctgggtggaggcgctgcgctgcgacggcgagactgacaaacactggcgccaccgccgggattttttgcttcgcaacgccggggacctggcccccgctggcggcgctgcctccgctagcacggatgaagctgccgacgccgagagcgggacccgaaaccggcagctgcagcagctcatctccttttccatggcctgggcgaaccacgtcttcctcgggtgccgataccctcaaaaagttatggataaaatacttagtatggctgaaggcatcaaagtgacagatgctccaacctatacaacaagagatgaactggttgccaagaaggggtagaagagccatccaaaaaacgagttatagaaggaaaaaacagttctgcagttgagcaagatcacgcaaaaacctctgccaagacagaacgtgcatcagctcagcaggaaaacagttcaacgtgtatagggtcggccatcaaatcagagagtgggaactcagctcggagctctggcatctccagtcagaatagctctacaagtgatggagatcgatctgtttccagccaaagcagcagcagcgtttcctctcagagctgaataaaccacatcaaaggaaagggaccacagtatttgaatgtttgaaagtctgtaaagcttaaggttttaaaaatgttgcccgtaatgttgaacgtgtctgttaaaaaataaaagaaaaaatagttgcttcaaactatttttatgagaagttgtaagcattttttagatataaagcagtataaagtacttgttattttactctgaagttgtttaaaattcaccatgactttgaccgctgaagattctttaagcgggttaatttatgttttgaggtggaatacaatttacacttttttcttaaaaacatgaatgtgggtttctatattaagcatattttgtgactactattaacagattgatttgtttagatattaaatgctttaagctattttaccttttcaaaaaaaaaaa

SEQ ID NO: 672319 - DNA, 388 bp, Homo sapiens
cccaacacttttaaatttattagcaatatatcttttctgttgtggggtttgttttagtatgttttgtttttggtagatacagggtgtccctatgttaaccaggtggtttcgaacccctgggcccgagcaatccttctgccttggccccccaaagtaacaatactatctttgaaacatacaatggccaggcatggtggctcatgcctataatcccaggacttcggggggccaaggcaggagggttgatcgagccctggagtgtaaaaccagcctaggaaggctcaacataggaagatcccatctccacaaaaatacaaaaattatgggaggtcgcccaacactttttaaattttattagcaatattatcttttctgtgttgggcgataa

SEQ ID NO: 672320 - DNA, 150 bp, Homo sapiens
gtgtgtgtgctcatgtacccgtgctcatctgtgttgtgcatgtgggtgtgtgtgtacctgcatgcacacacatgcaggtacacacacacagacccgcatgcacacacatgcagggacagacacagatgagcacgggtacacacgcacaca

SEQ ID NO: 672321 - DNA, 477 bp, Homo sapiens
agggtttgatatttttattaaaactgaaaatacccatctccaaatggggaaaaaaattatatactgttaatgttaaaaacaaagttgattccaaccttttgagacataaacacaagcatgaggattatggacagaaacaaatccgtattccaggaacatccgttgattatcgggagggccgtaacaaatgaataccttttaatgctttctccaacgtgaaggcgttctaatttcgaaagaatgagtttctttattaaacgctgcttttacctggacatgtgggctatgatttaacaggtccaggtacggagcgagtgcacaggtgtacggctctgcagaaaggcattcccgctgcctgggcctcaagtacaccggtctggtgttgactgaacaccaagcccacaccagggcacttgtaccttaagatgctgacaacagctcttcccaaacagaggctggagaaaaaaaaaaaagatc

SEQ ID NO: 672322 - DNA, 659 bp, Homo sapiens
tgaggtgatctagaggatctcatgtagtcgctctcggctttcggctcggaggaggccaaggtgcaacttccttcggtcgtcccgaatccgggttcatccgacaccagccgcctccaccatgccgccgaagttcgaccccaacgagatcaaagtcgtatacctgaggtgcaccggaggtgaagtcggtgccacttctgccctggcccccaagatcggccccctgggtctgtctccaaaaaaagttggtgatgacattgccaaggcaacgggtgactggaagggcctgaggattacagtgaaactgaccattcagaacagacaggcccagattgaggtggtgccttctgcctctgccctgatcatcaaagccctcaaggaaccaccaagagacagaaagaaacagaaaaacattaaacacagtgggaatatcacttttgatgagattgtcaacattgctcgacagatgcggcaccgatccttagccagagaactctctggaaccattaaagagatcctggggactgcccagtcagtgggctgtaatgttgatggccgccatcctcatgacatcatcgatgacatcaacagtggtgctgtggaatgcccagccagttaagcacaaaggaaaacatttcaataaaggatcatttgacaactgg

SEQ ID NO: 672323 - DNA, 653 bp, Homo sapiens
gcggccgcctactactactaaattcgcggccgcgtcggctcggaggaggccaaggtgcaacttccttcggtcgtcccgaatccgggttcatccgacaccagccgcctccaccatgccgccgaagttcgaccccaacgagatcaaagtcgtatacctgaggtgcaccggaggtgaagtcggtgccacttctgccctggcccccaagatcggccccctgggtctgtctccaaaaaaagttggtgatgacattgccaaggcaacgggtgactggaagggcctgaggattacagtgaaactgaccattcagaacagacaggcccagattgaggtggtgccttctgcctctgccctgatcatcaaagccctcaaggaaccaccaagagacagaaagaaacagaaaaacattaaacacagtgggaatatcacttttgatgagattgtcaacattgctcgacagatgcggcaccgatccttagccagagaactctctggaaccattaaagagatcctggggactgcccagtcagtgggctgtaatgttgatggccgccatcctcatgacatcatcgatgacatcaacagtggtgctgtggaatgcccagccagttaagcacaaaggaaaacatttcaataaaggatcatttgacaactgg

SEQ ID NO: 672324 - DNA, 446 bp, Homo sapiens
  misc_feature (126)..(127): n is a, c, g, or t
  misc_feature (131)..(131): n is a, c, g, or t
  misc_feature (237)..(237): n is a, c, g, or t
  misc_feature (253)..(253): n is a, c, g, or t
  misc_feature (271)..(271): n is a, c, g, or t
  misc_feature (277)..(277): n is a, c, g, or t
  misc_feature (326)..(326): n is a, c, g, or t
  misc_feature (341)..(341): n is a, c, g, or t
cgttccacccggttactacacagatcaaagacgcccgtcggcttacttcgtcgttccgttcgtcgtccttaatgacagttaacacgtagtctcaccagacgtctctaggcgacccagacaattatnncctngccaaccccttaaacacccctccccacatcaagcccgaatgatatttcctattcgcctacacaattctccgatccgtccctaacaaactaggaggcgtccttgccntattactatccatccncatcctagcaataatccncatccnccatatatccaaacaacaagcataatatttcgccactaagcaatcactntattgactctagcgnagactctcattctacctgatcggagacacagtagctacctttacatcatggacagtagcatcgtactatactcacacatctatctatacactatctcctattgaa

SEQ ID NO: 672325 - DNA, 115 bp, Homo sapiens
ccccggccgccacaggcttctccatctggtcagcattcatcacatgtgatgcgttgcgaggaggcttgtatgggcatctcaatctcagagagtgtcagatttattcacttattat

SEQ ID NO: 672326 - DNA, 162 bp, Homo sapiens
ccatgtggggcttcactgaatatatctaaccagaattacaatatcaggagatgggtgagaggaagtaaattcagggggggcaggaggaagagaggattcaaaagataagggtggccgggtgcagtggctcacacctataatcccagcaggccgaggcgggca

SEQ ID NO: 672327 - DNA, 690 bp, Homo sapiens
gtaaaaggcataggacgagccgtgtggaatcggacgaggcctctctctctctctctctctctctctctctctcggctcggaggaggccaaggtgcaacttccttcggtcgtcccgaatccgggttcatccgacaccagccgcctccaccatgccgccgaagttcgaccccaacgagatcaaagtcgtatacctgaggtgcaccggaggtgaagtcggtgccacttctgccctggcccccaagatcggccccctgggtctgtctccaaaaaaagttggtgatgacattgccaaggcaacgggtgactggaagggcctgaggattacagtgaaactgaccattcagaacagacaggcccagattgaggtggtgccttctgcctctgccctgatcatcaaagccctcaaggaaccaccaagagacagaaagaaacagaaaaacattaaacacagtgggaatatcacttttgatgagattgtcaacattgctcgacagatgcggcaccgatccttagccagagaactctctggaaccattaaagagatcctggggactgcccagtcagtgggctgtaatgttgatggccgccatcctcatgacatcatcgatgacatcaacagtggtgctgtggaatgcccagccagttaagcacaaaggaaaacatttcaataaaggatcatttgacaactgg

SEQ ID NO: 672328 - DNA, 777 bp, Homo sapiens
tgaggtgatctagaggatctcatgtagtcgctctcggctttcggctcggaggaggccaaggtgcaacttccttcggtcgtcccgaatccgggttcatccgacaccagccgcctccaccatgccgccgaagttcgaccccaacgagatcaaagtcgtatacctgaggtgcaccggaggtgaagtcggtgccacttctgccctggcccccaagatcggccccctgggtctgtctccaaaaaaagttggtgatgacattgccaaggcaacgggtgactggaagggcctgaggattacagtgaaactgaccattcagaacagacaggcccagattgaggtggtgccttctgcctctgccctgatcatcaaagccctcaaggaaccaccaagagacagaaagaaacagaaaaacattaaacacagtgggaatatcacttttgatgagattgtcaacattgctcgacagatgcggcaccgatccttagccagagaactctctggaaccattaaagagatcctggggactgcccagtcagtgggctgtaatgttgatggccgccatcctcatgacatcatcgatgacatcaacagtggtgctgtggaatgcccagccagttaagcacaaaggaaaacatttcaataaaggatcatttgacaactggtgaaaaaaaaaaaacacaacaagaatggctaatggcattgctaagggagataaatcaggggggtaacagcggagggaacggggacaatataggtgggaaccttgcgagggaataaggg

SEQ ID NO: 672329 - DNA, 278 bp, Homo sapiens
ggggggggttttcttttttttcccctcccgggccttttccccccggtttatattttgcctttccctttaaaaaaacccccccccctttcccttttccccgggtgggggggcccttggggaaataaaggttccccttgggggggtgggggtttacccccccccccgttccccccctttttcccccccccgggggggggcctcccccgcccccccccccccccggttttttcccttggggggggggggggggggggggcccttttaaaccccccctttta

SEQ ID NO: 672330 - DNA, 914 bp, Homo sapiens
  misc_feature (692)..(692): n is a, c, g, or t
  misc_feature (694)..(694): n is a, c, g, or t
  misc_feature (914)..(914): n is a, c, g, or t
tgaggtgatctagaggatctcatgtagtcgctctcggctttcggctcggaggaggccaaggtgcaacttccttcggtcgtcccgaatccgggttcatccgacaccagccgcctccaccatgccgccgaagttcgaccccaacgagatcaaagtcgtatacctgaggtgcaccggaggtgaagtcggtgccacttctgccctggcccccaagatcggccccctgggtctgtctccaaaaaaagttggtgatgacattgccaaggcaacgggtgactggaagggcctgaggattacagtgaaactgaccattcagaacagacaggcccagattgaggtggtgccttctgcctctgccctgatcatcaaagccctcaaggaaccaccaagagacagaaagaaacagaaaaacattaaacacagtgggaatatcacttttgatgagattgtcaacattgctcgacagatgcggcaccgatccttagccagagaactctctggaaccattaaagagatcctggggactgcccagtcagtgggctgtaatgttgatggccgccatcctcatgacatcatcgatgacatcaacagtggtgctgtggaatgcccagccagttaagcacaaaggaaaacatttcaataaaggatcatttgacaactggtgaaaaaaaaacaaacaaaaacatcccacaaancnccccacaaccaccaaaccccgcagcaacgacccgagggcagcacagaagccgggaggggggcacaaacaaggaggaacaagacacacgacagcacggtcccagacaaagcgagagcagccacaccaagattcacgtacaacaaagagagtagaacccgagcagcaccaccaaaggagagccaagcaacacgaaagagccgagaacgcaccgggaaaaccn

SEQ ID NO: 672331 - DNA, 402 bp, Homo sapiens
tgaccctgggcggggaccgcgcacgggacggtggatggctgagtgcagcctgctgcaattcctctcttctcgggggaggaagcctaggagctggaatcagaaacacctgttagaacctgagctctgtcactctctcacttgtgcctggtgccagctccctttccctctctttgcctttgcttcctctctggaagaatgaagcatgcacgcatcaacccatctgcacggggagccgattcacagattcacatgagggaatgctttgaaaatatttccacacattgtaatgttcaaatatatgtgtgaggtaatccatcatcaattcactcaacaaacatatggttagtactattctaaggtgatgtgtgttcctaaaagtcacccttgttacacaaaatcaca

SEQ ID NO: 672332 - DNA, 843 bp, Homo sapiens
tgaggtgatctagaggatctcatgtagtcgctctcggctttcggctcggaggaggccaaggtgcaacttccttcggtcgtcccgaatccgggttcatccgacaccagccgcctccaccatgccgccgaagttcgaccccaacgagatcaaagtcgtatacctgaggtgcaccggaggtgaagtcggtgccacttctgccctggcccccaagatcggccccctgggtctgtctccaaaaaaagttggtgatgacattgccaaggcaacgggtgactggaagggcctgaggattacagtgaaactgaccattcagaacagacaggcccagattgaggtggtgccttctgcctctgccctgatcatcaaagccctcaaggaaccaccaagagacagaaagaaacagaaaaacattaaacacagtgggaatatcacttttgatgagattgtcaacattgctcgacagatgcggcaccgatccttagccagagaactctctggaaccattaaagagatcctggggactgcccagtcagtgggctgtaatgttgatggccgccatcctcatgacatcatcgatgacatcaacagtggtgctgtggaatgcccagccagttaagcacaaaggaaaacatttcaataaaggatcatttgacaactggaaaaaaaaaaacaacaacacagaacaccaacacaaccgcgaggcacaacaaagggccagaaaaagaagcaacaaaagagacaaagggaaaacagaccaggagaacaatatacgcaaaaacggacaaaaaggcggacccccaaagagagcacaaaaaaacacagaacacgggaaacacggaacaa

SEQ ID NO: 672333 - DNA, 80 bp, Homo sapiens
  misc_feature (47)..(47): n is a, c, g, or t
aatctcaaaagcccgtttattgtaacaagaattgttatgtattaatnctgcagttttcaataaagattgacttgtgttgc

SEQ ID NO: 672334 - DNA, 1004 bp, Homo sapiens
  misc_feature (450)..(450): n is a, c, g, or t
  misc_feature (806)..(806): n is a, c, g, or t
gtcagtgactcggagagtcatctcccgagaagagccagctccgcgtgtcgccccagcaggccttcaggaggcagagcaaacaccctgagtcacttccccatcgaatgccaggaacctccagcaacctgcccggtgggtccccggggggtttctgcaaacgagaaactgttatgagggtatcactcagttgagcatcagagtacgcctcctatgaagcgaacatggactttgaaatccaaagcaaaccagtcttggttgattctggtgggactccttgttgaatgacccggaggcattcgctggagtgccagcatgatattcctccgcagatagctcagccccggacatgacatggcagtgccgactctctgtccaagccaagactaattgaaccgattagttcaggagcattggtgacgaagctatccgcctcgatctgactctcctttntagggaatccaatcgatttggttgaattgatcgaggcccgttatgagttcgcgcctcgacgcaggatggaagaaggaacaaggacacttcatcgtgcagctcccgagagctagtgtgaccaaaagggcgtactacttccaatcgatgatgactggcttgctttacgaactggtgaggacacgtgaacatatccacgacagctccaaggcctcttgaaattattgactttgctggagacaaatgcgcccttgaaccctcgaatgtaattgcatacgaaaattacctcccctggttcttgaaaggaaaagttacatctaacccgctggtggggcactacaggatgctttagcccactnccagcggaatgatgcaaatacatttaagctttggaacacttgcaaaacaccattgccactcgggctggtttggggcagactgtgttgcgcaccgttcagtcacccgagggtgaaatcttcggacaatttcttagcctgagccaaattccacccttaaacaccaagatcccgaggcacaacaggcacgccacaaggatg

SEQ ID NO: 672335 - DNA, 385 bp, Homo sapiens
  misc_feature (1)..(1): n is a, c, g, or t
  misc_feature (52)..(52): n is a, c, g, or t
  misc_feature (150)..(151): n is a, c, g, or t
  misc_feature (265)..(265): n is a, c, g, or t
  misc_feature (267)..(267): n is a, c, g, or t
  misc_feature (269)..(269): n is a, c, g, or t
  misc_feature (283)..(283): n is a, c, g, or t
  misc_feature (295)..(295): n is a, c, g, or t
  misc_feature (362)..(362): n is a, c, g, or t
  misc_feature (382)..(382): n is a, c, g, or t
natctgaagtgggagctgccaggctcatcggcgaggatcgcagtcagcaganagcggctgaggctgggggtaggagcagacctgcgaatctggaggcagcatgtccaagaaagggagtggaggtgcagcgaaggacccaggggcagacannctatgggaaatactacattcgcatttagaaagtctggaagctgcaggaagatgttgagaagacagtgaaaggcacgaggcacacattggcacatggtgtcacaaggctggtgtnangngaggggctgggggncctccctcctcngcactgaaggctgtgaggagggcaaatcaagtcgtctctggggagcctcgggtttccctgtccttcnaactgggtaataataaatanctg

SEQ ID NO: 672336 - DNA, 740 bp, Homo sapiens
tgaggtgatctagaggatctcatgtagtcgctctcggctttcggctcggaggaggccaaggtgcaacttccttcggtcgtcccgaatccgggttcatccgacaccagccgcctccaccatgccgccgaagttcgaccccaacgagatcaaagtcgtatacctgaggtgcaccggaggtgaagtcggtgccacttctgccctggcccccaagatcggccccctgggtctgtctccaaaaaaagttggtgatgacattgccaaggcaacgggtgactggaagggcctgaggattacagtgaaactgaccattcagaacagacaggcccagattgaggtggtgccttctgcctctgccctgatcatcaaagccctcaaggaaccaccaagagacagaaagaaacagaaaaacattaaacacagtgggaatatcacttttgatgagattgtcaacattgctcgacagatgcggcaccgatccttagccagagaactctctggaaccattaaagagatcctggggactgcccagtcagtgggctgtaatgttgatggccgccatcctcatgacatcatcgatgacatcaacagtggtgctgtggaatgcccagccagttaagcacaaaggaaaacatttcaataaaggatcatttgacaactggtggaccacaccacaccacacacaaaaaaaaaagccccgaaaaacccccccatggggccccaaaaaaccacttggccggaaa

SEQ ID NO: 672337 - DNA, 690 bp, Homo sapiens
tgaggtgatctagaggatctcatgtagtcgctctcggctttcggctcggaggaggccaaggtgcaacttccttcggtcgtcccgaatccgggttcatccgacaccagccgcctccaccatgccgccgaagttcgaccccaacgagatcaaagtcgtatacctgaggtgcaccggaggtgaagtcggtgccacttctgccctggcccccaagatcggccccctgggtctgtctccaaaaaaagttggtgatgacattgccaaggcaacgggtgactggaagggcctgaggattacagtgaaactgaccattcagaacagacaggcccagattgaggtggtgccttctgcctctgccctgatcatcaaagccctcaaggaaccaccaagagacagaaagaaacagaaaaacattaaacacagtgggaatatcacttttgatgagattgtcaacattgctcgacagatgcggcaccgatccttagccagagaactctctggaaccattaaagagatcctggggactgcccagtcagtgggctgtaatgttgatggccgccatcctcatgacatcatcgatgacatcaacagtggtgctgtggaatgcccagccagttaagcacaaaggaaaacatttcaataaaggatcatttgacaactggtggattttaaaaaaaaatacgtggagcttgt

SEQ ID NO: 672338 - DNA, 116 bp, Homo sapiens
gctgcggtgcactcacagctaccctccttggctagctgtctccacgagtggctgggggtctcctgcctctcctggtgtcgccgcatggctccacgccaattgcacatgggtccgca

SEQ ID NO: 672339 - DNA, 811 bp, Homo sapiens
tgaggtgatctagaggatctcatgtagtcgctctcggctttcggctcggaggaggccaaggtgcaacttccttcggtcgtcccgaatccgggttcatccgacaccagccgcctccaccatgccgccgaagttcgaccccaacgagatcaaagtcgtatacctgaggtgcaccggaggtgaagtcggtgccacttctgccctggcccccaagatcggccccctgggtctgtctccaaaaaaagttggtgatgacattgccaaggcaacgggtgactggaagggcctgaggattacagtgaaactgaccattcagaacagacaggcccagattgaggtggtgccttctgcctctgccctgatcatcaaagccctcaaggaaccaccaagagacagaaagaaacagaaaaacattaaacacagtgggaatatcacttttgatgagattgtcaacattgctcgacagatgcggcaccgatccttagccagagaactctctggaaccattaaagagatcctggggactgcccagtcagtgggctgtaatgttgatggccgccatcctcatgacatcatcgatgacatcaacagtggtgctgtggaatgcccagccagttaagcacaaaggaaaacatttcaataaaggatcatttgacaactggaaaaaaaaaaaaaaaaaaaaaaaaaaaaaaaaaaaaaaaaaggggggtttttttgggggggggggaaaaaaggtttaaagggaggggtaatgttttggcccctttttggaagggggaaacggggcccaaagggggaaaagaagcgggtcgaa

SEQ ID NO: 672340 - DNA, 1047 bp, Homo sapiens
tgaggtgatctagaggatctcatgtagtcgctctcggctttcggctcggaggaggccaaggtgcaacttccttcggtcgtcccgaatccgggttcatccgacaccagccgcctccaccatgccgccgaagttcgaccccaacgagatcaaagtcgtatacctgaggtgcaccggaggtgaagtcggtgccacttctgccctggcccccaagatcggccccctgggtctgtctccaaaaaaagttggtgatgacattgccaaggcaacgggtgactggaagggcctgaggattacagtgaaactgaccattcagaacagacaggcccagattgaggtggtgccttctgcctctgccctgatcatcaaagccctcaaggaaccaccaagagacagaaagaaacagaaaaacattaaacacagtgggaatatcacttttgatgagattgtcaacattgctcgacagatgcggcaccgatccttagccagagaactctctggaaccattaaagagatcctggggactgcccagtcagtgggctgtaatgttgatggccgccatcctcatgacatcatcgatgacatcaacagtggtgctgtggaatgcccagccagttaagcacaaaggaaaacatttcaataaaggatcatttgacaactggaaaaaaaaaaaaaaaaaaaattgggggggaaaatgggggaaattaacgatggagcgtgacacaccaaatagccacggccactttgcacgcgcagaagaggggcccgcgagggcgaaccatggcaggaaaaagctccggggaaatcaaaaaactggcgtgggataagagacacagggaggttcatggggggcccctcattgaagaagcccctacgggatagtacatcaggggacccttgagggagcgatagagtaagacatgtgtcgcgaatttgcaccgagcacggtcaacgagcaatgtactcccttagacaagaacaggaggcttataaagaacgcacagcgaaagtggtgcccattaagaaatagagcggttatttgtcgcactg

SEQ ID NO: 672341 - DNA, 204 bp, Homo sapiens
tgcgcaagcagtgggcactgatacactataagtattgttattgtctatttccctgtcagactttttcttttttggaaatggagtttggctcttgtggcccaggctggagtgcaagggcatgatctgggttcatggaacctccgcctcccaggttcaagtgattctcctgcctcaccctccctagtagctgggataacggttttt

SEQ ID NO: 672342 - DNA, 344 bp, Homo sapiens
gcagatgttgacatcaaaggacccaaaacggacatggatggcccagaggtggatgtacataggcgcagagaggcaccgaagaagcccaatatgacaaggcgcaagtacagcgatgccgggcatcaaagcagaggggcgcagaagtggatgtgaacttgtccacggctagatgttgttgtcatcaggacccaaggtggatgtggaagtcccagatgtgagccttgaaggtccagaagggaagctgaggggactccaagcttaagatgcctgagatgcacttcataggctcgccaagatctctatgcctgtagtgtggactagagtgggcggtgtatcctcttaca

SEQ ID NO: 672343 - DNA, 371 bp, Homo sapiens
actgttcttttttgtctgagagaggttgcatattgcccaggctggtctcgaactcctgtggctcaagtggatccacctacctccacctctcaaagtgctgggactacaatgcgtgagcctgagagacaatggtagagcctgagagacaaggtagagcctgagagacaaggtagagccgatgagacaaggtagagccgagcagacaatgtagacgccgacgagacaaggtacgagccgagatgacaaggtagacaccgaggcgacaaggtagacagcgagagacaaggtagatggcgagagacaaggtagaggcgagagacaaggtagaggcgagagacaaggtagaggcgagagaaaaggtagaggcgaga

SEQ ID NO: 672344 - DNA, 309 bp, Homo sapiens
cgatgcacaggtgaccaacaaacagtcaaccgtcgatgacacaatcaatggcaagaggaagaccgccaaagaacatcatgaggaaactacgcatgaaagaacgtgagcacagagacgaggagaggcaggtgtcagaggcagaggaaaatgggaaattggatatgaaagaaatacacacctacctggacatgttatcaacgtgcgcaagcgtagcggcggcggacagaggactactacagatgcaaactcaccccttctgcaagaaagcctctttgcacccgggtcagaatggcggccgtggcgcatcga

SEQ ID NO: 672345 - DNA, 346 bp, Homo sapiens
gcttttgttatgtgggttgtatctgttgatgtttaccaccattaaaagttaaaactttttggctgggcacagtggcccatgcctgtaatcctagcactttgggaggatgagacaggtggatcacttgaggtcaggagttcgagaccaacctggccaacatggtgaaaccccgtctctactaaaaatacaaaaattagccaggcatgatggtgtgcccctgtagtcccagctgcttgggaggagagggtgggaggatcacctgagcctctgcgggttgaaggtgcaatgagctgagatgatgccactgcactccagtctgggcaacagagtgagatcttgtatcacc

SEQ ID NO: 672346 - DNA, 606 bp, Homo sapiens
  misc_feature (350)..(350): n is a, c, g, or t
  misc_feature (352)..(352): n is a, c, g, or t
cacgagggggtgacacttgcagtggtgactgctagtgggtcagcatgcagctctgtcattactactgcctacacaggtgtcagctgcactacttaagctccctgacaagtccgagtatcactgtgaatgggctttctctcctgacttctaaacaccttactagagtcttttacctgtgtagatgtcatatcatggcctggagagcatccagaacggccttcccaaagaggttttcctggcacatatattttgtctctgaccttgtgcctgcttattcacagtgatttctctggctttagtaatttcctaatccttttgaaaatatatatattttaccaatcctttgtgantntcatacttccttccatacaaggtattttgtattatatccatcctccctcactcctcctggtctacttctcacccctcccaaagttttcctttacttttgctgatgttgtaacaactcaccaagcccagtgcatgctgcttatatactcaccgatgaggggttgtccacgagagcatagcggtctatctaccctaattctgcctcctaagaagtctggctcccgtcttaacaatgaaccatacaacagcccccca

SEQ ID NO: 672347 - DNA, 704 bp, Homo sapiens
ataatcgttatctgctgcctagtcctgtatgcccttttcctatcactcacaagaaaagctagttaatactagcatctcagacgctcaggaaatagaaattcgtcgtgaatctatcctgggccgtcatcatcctagtcctcatcgccctcccatcccttacgcatcctttacagtaacagacgaggtgcaacgaatccctcatccgttaccatcaaactcaattggcgcaaccaagtggtagctgaggcctacgagttacaccgactacgggcggactaatcgttcaactccgtacatacttcccccagttattcctagtaaccaggcgacctgtgacctccttgacgttgacgactcgagtagtactcccgattgaaggccccattcgtaataataattacatcacaagacgtcttgcaatgcatgagctgtccccacattaggcttaaaaagcagatgcaattcccggacgtctaaaccaaatccacttgtcaccgttagacgagcgggggtatactacggtcaatgctctgaaatctgtggagcaaaccacagtatcatgccgcatcgtcctagaattaatttcccctaaagaatcttttgaatatggggcccgtatttaccctatagcagccccgtctaccccctctagagccagtagaagaaccctccataaaacctggagtgactacatggaaagaagg

SEQ ID NO: 672348 - DNA, 503 bp, Homo sapiens
  misc_feature (22)..(22): n is a, c, g, or t
  misc_feature (155)..(155): n is a, c, g, or t
  misc_feature (275)..(275): n is a, c, g, or t
  misc_feature (352)..(352): n is a, c, g, or t
  misc_feature (424)..(424): n is a, c, g, or t
  misc_feature (436)..(436): n is a, c, g, or t
  misc_feature (455)..(455): n is a, c, g, or t
  misc_feature (486)..(486): n is a, c, g, or t
gaacatgaaatgtactttgatntctatgaacatttgctgaaattgttcacaatgctcgaaatattcttccaacttcaatatctagtaagatcctgcccataacttaaggctcagctcaaatgatctctcttctataaaacttattccaaagcctnagagacaccacacactataatgagaagactaagggctttggacttgggttaaaatcccagctgtcaatataacagctgctttctgatcttcattacttaatcttggttttctcatctatnatattaagaaacatatcggataatacttgaggaaattaagtaaagatttattcaaagcacttatgaagggtagccgncacacagaaggcattcattgaataaaggacaatgtcttcagagtgggtgtgctagtaaatggttaacaaccnggtttcaaaagngcagcttatgcatgccggncgcaattcgggctcacttggccttcgcctanaggggggcggattacca

SEQ ID NO: 672349 - DNA, 279 bp, Homo sapiens
aaactcacacatgtaaacacaaatacattcaacagaacataaactcacaagcacacacaaagcacatgcaaacaccaatatggtgtacaaagatacatgcagaaacagataaatataaacgtgcaaaacaacaaacatacacgtggataggcagagatacatggaaatacaatatatgtacagagaaaataaatgagcacaacgacaattcattcatgcacatccacacatacacaaatacaaacaggcacacaaaaacccaggcaaaaacgtcgacgc

SEQ ID NO: 672350 - DNA, 709 bp, Homo sapiens
agcgggggtgctggcagccttgccgctcgctgtgccagtgccccgcaggctctttggcagtccagcatagtggactactacgaggtgctgggagtaccccggtaggcctcgtccgagggtatcaagaaggcgtaccgcaagctggcgctcaagtggcaccccgacaaaaaccccgaggacagggaggaagcggtgagaagattcaagcaggtggctgaggcctacgaggtgttgtcggacgcgtagaaacgcgatatctatgaccgctatggcgaggcgagggcggagggcggctgcgcaggcggcaggcccttcaaggaccccttcgagtacgtcttcagcttccgtgaccccgccgaggtcttcagggagttctttggcggccgggacccattctcctttgacctcttgggaaacccgctggagaatatttcggggggtcagaggaactccctgggaagcagaagcagagggtctgaccccttttctctgccttcagtgaatttccagcttttgagggtggtttttcttctttgatacaggatttcgttcctttggctccctgggaaagtgggggcctttcttccttctgcatgtcctacggtagtgatgggacaggcagcttcaagtccatgtcgacttccactgaacatagttgatggtcacaaaaatcactaccaagagaatcatcgagaatggccaagaacgg

SEQ ID NO: 672351 - DNA, 200 bp, Homo sapiens
tgcttccggttcgattctagaggtatccccacttttctgaacggtagacttcctagagataattacttttgaactagttggtttgaagtttacagagccactcgggctcacaggtctcctcagttgattgtatccaaatttccagtacgatagtactaagtaataacaccaggaaggtgtcccttcagaaggaaaataag

SEQ ID NO: 672352 - DNA, 108 bp, Homo sapiens
ggtaccctcgcacagaccaccacgtcgtcgtgctcggcagcgtctaatcgctcgacccaatcgtcatagaaacgcgccaacaatccgttgtagtcggggctgtcgaca

SEQ ID NO: 672353 - DNA, 1210 bp, Homo sapiens
ggctggtctggactgccctctgagctcgcagcgggtctctatgcaggcagtagtcctcccagatccctctctcctcgattcttgcggcgaggggtcggctggagagaaggccacctggtgcacaatctggcctcgatctgtctactagaacgtatcgagatgaagcggatggagtagtcagcatctatgtgacgtagcactgcgaagagccttgccctccacacccttacgcatcactcgaacgaacgtcctacttgcgcgacgtcgggaagaagactattggtattgtgactgagcgaagattgcccatgtctacaatatagttattcatgagaatctccacatgctgaatgtgaggcacgactgagcgtggatggtagagaatcagaatcgctgcggatgcgcgtggacaccggatgctcaactgagtactgcgtgtgcgagtctgccaactatgagtcgttccaagatccaacggcctgaggcatgacttggtcgtaataccattgttcgggccaatgacgctctgaggctgatccggcgtgctaacttgggaatccgcaggcatctgcagcacaagcaccgctaacagtcactagatgttccagtcacccaagcatgtcgccccaagcagtcctcgtgcacatctgagacaatcgggagcaacgcagctgctacaagtttaacaggcacacccgagaaggagccccctgtgatggccagcgggatgcacgtcgggagccgaggcgacgtgaggggacagtacaggcccggggagtgggcccatcggacaggcgtgacggggaccaagcgatcatgggcccttggaactaacgtagggagcctcttcgcccggtgaaccccagggcgtgtcccgcgacaggcagggaccccgcgaacccacaggaccgacaacatcctggaccgggctagggcaaagcaggaagggagctgggacgcggggaccctggcccaagcagctccgaaggaagcgggcgcaagggtggcatggagagccaacagaacaggcaaggaccccaagaaggtgacctgcctgggcgagggggaccgagccgggggccctgggatgcgccccactgattgagggaccaaggaacaaccgggcttaagagagggagacatcgagaaagaagtgccaggaacctggcaaacgataggcccatgcgtggagaaataaggggtcgaccca

SEQ ID NO: 672354 - DNA, 136 bp, Homo sapiens
cacgctgttctcggcgtaggtgaaggagaggcgccggaagctgccggcgttgcgcgggatgtccttctccagcgcgtttttagatcgcgcccacaacccccgaggtctccgcgcccagcgaggtgttcagccgggc

SEQ ID NO: 672355 - DNA, 510 bp, Homo sapiens
  misc_feature (139)..(139): n is a, c, g, or t
agggccggtctgggaaatcgcttccaaccccccttttttttgaaagagggggtcctgcagggcaaccaggagttacaaccgccttcttggtgttaacccctcgatgtcatagcttttttcaactgcctgcgcgcccccnacaatcaaccctgtgcgcgcggaaaaaggtgccccgtgggctcaaaagcctaaatgggtggttttcaagaataaaggaccctatccctcatgcccgttttgggggtcctccccaacaaggctggtcgggggcccctggtttgtccctaaacctttttcccagggcaaaaacagttttttttgtttttggtttggtttgttttgtttttaaaacaatcatgttcccctaaaaaaaacttggccctcctgtgccctttgcctgggcaagcacaaaacaaatttaactttcctaaggcaggggggagcccggaacaatggggccttcaactggaactgtggacttttgtacaaaccctaaaattttgaagttta

SEQ ID NO: 672356 - DNA, 1122 bp, Homo sapiens
tcaacactttgcctatttactatatgaagaatatggaagtcgaaaagtgatcaagatactacggtgctggctagtacgttgaaaacttattgccgtcattatttacactacttaagacatattagcaagcttgactccaacaactggcgaggccttactagactgtgcttgggcggaaaatgacacggggagaaagtagccaatacaggagttcaaagaaattccatgccctgtcagcacttagcccaagttaccagaaacatcatgaaagatagtacttaaaaactaagttatttactacagctgtactttcaccttgctctcgatgtgtctgaacaccacagaagctaacttagcaacgttattgaacgaacgtattctaaacaactcttactacggattgaccactttactctctgaacttctgtataaaataggcttactaggtgcagaagctacgtgttgctcacaattgtaaccattctgttaccattgggcaaaattctgtacatattcactcaacgcatttaagctctaccaacagaaccacacgtgcatgtacacacgactgtcttacacactctccaacagccccagtacacacagcaaatctctgcttccactgtgcacctgctacaacgtaacgagtttaggctgctggtagacaccattctgactctgatgtctataagatacctaccaatcaacgacgccaccatgctaaaggtccccgggtcaccaacaggaagcatacaggcgccccctggagaccacgcacgtacacagaacactgaccaactggcaacaccaaacagaaagacaacacacacacaaacggagaggcaccaaagcagaacatgccacccagagagagcacacaactaaacgaggacgcagaagctaggaaaaaacagagcacaccacaggaaaccccaaataagaaacagaccagggaaggaagactaacgagacgcggacggaaaacaggcaaccgagaaaaaagagcgcaccagaccacagcagcacaaatggaaaacccgacaaagaccagccagccccacaaacaaacactccgcaccaaccaaacccacgaaaaaaaacaccgaaacgaatcacaacgca

SEQ ID NO: 672357 - DNA, 165 bp, Homo sapiens
  misc_feature (159)..(159): n is a, c, g, or t
acatatcacagaataaacatcctcttctgtcctgctgctagacctccattccaagagaacaggatcagtatcttgtgctctatttgtttaatcaatatcaatcgccagtctattgtgcccaccagagtacacgccctaataggagtgtcatgtgcccangtgcag

SEQ ID NO: 672358 - DNA, 324 bp, Homo sapiens
  misc_feature (9)..(9): n is a, c, g, or t
ttttttttncccctcccacctgcccctccctccagcccagctccattttttggcataacaggcaactttaacctagcccagaagaggatggctcatcctggttgggacgatggctcctgccttgagagacaaaaatccccccttgggcagagctgagtgtgaaaaaatggaaaaccagtatttgccaggtgctcagtgactggccatcccattaatgaatgatgagattggagtaccctgtccccaagggcaggcccaaatggcttttggggttgtttggttcccagtgaaaggctcctgaaaaaaataaagctggttcccaga

SEQ ID NO: 672359 - DNA, 407 bp, Homo sapiens
actctcatcaacctgtagccaattagctggagtagagattcctcagcattcaagggtcttctcgatcaggcgcgcgatcttcatgtcctgctgtaaccatgtcaactcccgtatattccattcattcagccacacaggtctgctctacataccgtgaaaacgcttcatggatgtgaagtctctacaatgcctgaagccactctttctgcctaggtcaggttctctgacgaaaatcctacttatgccttaaagtagagctcaagtgccaattagtgttctgggttagagtttggctctctgacatatgagtcttgtgcgactgagctctataagtctcagtttccctatctctaagaatgaatatgatcacagtatcaaaagcagggttgtggtgaacattatatgcg

SEQ ID NO: 672360 - DNA, 160 bp, Homo sapiens
gggggggaagggggggggggttttaaaaatttttttttgaaactttttttttaaaagttttgccctcccattttttaagtttcccggggaagggttttgggggcccccccctttttttgtttttttttgggttttgggggggtgggttttttttttccca

SEQ ID NO: 672361 - DNA, 406 bp, Homo sapiens
aaaatcgtgatgaaaatacgccagatgaactgtggattttgcagcaccacgacgttttaacccaaggacaagctggtaaacctgaacatattctacaagcaactcagctcccgattgtacaaagcgaccgtggcgggcaagtgacttggcatggtccagggcaattggtggcttattttatgtttgatttaaatcgtttaggctggaacgtgcgaacattagtgacgtatgcagaaaatttaatgattcatctgcttaaaaaatacaaaatcgaagcttatgctaaagcggatgcaccaggggtttatgttgcagagcgtaaaattggatctttgggttttaaaattcgtaaaggacgtagctatcatggtttggctttaaatattgattgtgatcttttgggttt

SEQ ID NO: 672362 - DNA, 758 bp, Homo sapiens
agcgggttcacctgcgtcgctccgggagctgccgacggacggagcgccgcgggcgaagccgggcggacgaactgcgagcgtcggtggactttggccaggatgcgataagcgtcagatagtaagtcgtgactgctactcacggacacggaggtagcggagttgccccgagccgtgaggcgcccacatataagccacatggcgcgaggtcgctgtaccccgtgagactgtcacgcggaagctgcgccgccaagagcacgccgatgcggcgttcacgcatggacagacgtcgatccgagacacggcgtggacaaacacacgggcacacaccagtacatcaatgaccagtgggcttgcgttggcggagcgaccgagagagatccttacacgaaactgttcaaggcctctccttacgaacccacatcatcgaggaccggcaacggcggaatacaagacaccagcgatgagcacaaagaccgacctcacaacccgacaaaactgagaggggaggagaacgaactggaaccaaaacatacgatgcctgagcatcgggggtgcagcaagggccgacagaatccgtgagcttcatgcactccccccccggcacctgcaacccaggagggaaacggcccgagaccatccgagaaagctcagaggaggaaagacccatagtcaaccttggagcggagaaactggcaggagcgatactacgcgctcaagagcatgacggagggaggagcagcagcagtccatgagacaat

SEQ ID NO: 672363 - DNA, 180 bp, Homo sapiens
gaccggtaggagagagaacgcacactgatagcactgggccttgttctatcctggcaacactcgctgcagctctgggcaggggacacactcaccagcacgccacagtcctcaccacttcccatgtgcctctccaacagctgacgacagcgctgcctgccacgagcccactgcccatcccca

SEQ ID NO: 672364 - DNA, 1091 bp, Homo sapiens
cttcagaggggccctcagcgctctcctgaagccctcttgtgtcaagaattgtggaccatgcgagtgccgtctggtttccatcgcagcagtccaaggactgatactgatctcctctggtgacagctggtctagaggcctgatattctcctacagaggttctcgtctcgaatgccccacaagatagcgtccaggcgcccctcgagactgcaccagtcgagtggattcattgcttgttgcaagcaagagcacatcatcggagtaagattgcatgggctctgattgtatggtggtaaggttcacagatgaccgagctggttactcctcctgacagactatatcagctcatgagtactagttgaggagccgtcgccgtgacaagcatacgaatctcgcctggagactttaccagtggactagggtgagctcgatctcgcattccctagccttggttgagatccgtgtgacacgagcttcgcattcgccgcgacgatctagcgggtatcgatatcttgcatcgttccaatgaatgggagatggatcgcttcctgttttatcggctatccacactctcttttttggtcgtgttcttgaggtaatttcatataaacgaaaagctacaattgttatccaatttggttgaggagggaaagttatgtgaccaacctggttagggaaatgaggaagttcataggtacagcaaaaaacgattaagtacaactcaatgcgttggtctgttcaaatccacggcttaagcatagcaaccagggaagtgactgtgaataaccaagactcgacggaggggcttatacagacaacggccgagaattttatacccttcgtttccccttaaggccctttcaacccacattcgttggcattttgtacgccatcgttggtttaccatggctgcatctcgtctcacacggcaacagagcaacaaaacgttggcagttaaggtttgtacacgacacttgtctagccttggcagtgatgcgtaggaacactcatctggttcaggggagacccgtgtggggaacccttgttacagttgacagggaggcacgctcccgtatcattagcgtgaatgtcga

SEQ ID NO: 672365 - DNA, 177 bp, Homo sapiens
tatcagccggttacccataatgcagaaaacaggagaatttatttattatcagtgattgaaggaaggacggactccaagctcatatcaatacatgtagtagtaagccaccgaagagtttgtaagatacagctcgaaacgcctacgtgcaatagtgaatgcacactcaagaaagtcagt

SEQ ID NO: 672366 - DNA, 1471 bp, Homo sapiens
  misc_feature (261)..(261): n is a, c, g, or t
ggaggggacttgagattccacaattgggaagaagaacagggagaggtatacaaaggtgaagtatgggagtaagaggcagtaggcttgtttggtcaatgcatctgcttgggttgtgcttctagtatcatcctagactgatgatgaactagtggtctccggtcatacgtggctcggcaggcatgatggactgctctggtggtaggcacaccccaacggtcccgtatcacctggcctgggactcgcacatgacaacctggcatngcgagaagtggtttcttccctgaggatcagaacaggagtcttgtggcaaggacgagatgtatagacatccttgtatcacggataccagggtatgggatatggcttggagggagagcgtgacggacgtaggatgcttggttgtcggaagaaatggacgtgctctaggggcatacacagaacatctcagcggcttgagaggtcgtgtggaccgtacatgtcctgggtaaaatcctcagggcaactatatgtggaatgcgccgtgacgggaccagcgacgggagtacatcatacatgcggtctagggatggttatcaggaggaaccatgggcgcgtggtgcacataacgaatgggtgtgcagcagcgcccacggtacgtacctaacataaaggaaagtaaccaaaaggatagtaagggtctccaatgggatggatggcgctagggggttgggtgaattaggcacattggttaaaaattacaccactaaagacgttaacactttttgggcggaacggtgggcttcggtatggagccgtattggaggaacgccacaaattacaggaggtgttttggaacaacccgcagggggggaaagggaggctttagaaagaggggcataaggtcggaagggataaagaaaaggactcccctggacacgaaatttaatgtgtcggccgccattttctagtggggggggcccttttaaggggggcccgcgcaaatcaagcgcgcaccgcattcgaacatggaatccgttcccttaggggtgaccagtttcggaacaattaggagcacacatatacacaggagattaacacatatagggacattttatacacataacagcagagagtgacgcggaagggggggggtgtcacgagcaccgtaacctcttcaatcgtagcaacaacattatggtgtgttcaaccacctgtagcatcttcagcaatgagggagggcggagccagcacaaacagccggaaaaacgaggaacgttggtgatcacaacgcgcgcacaccagggatttcaaaacgcgccgcacagaggccagaaatattacaaaggcagtcgtgtgcacaacctaaaccaccacaagagcgagacggaggaggcgtttaccccgaccgcgtataacaatatagcgaggatcggggagacagacactcaccgagttcataattatccacagacggacaaaaaagcgagacacc

SEQ ID NO: 672367 - DNA, 1036 bp, Homo sapiens
ctcacaggccttataacttgcggcaccaggaggggcatcggggtgataaaggggttttgagcacccgaatggggattttcgttggtggtgtggtaaatagttgcgtcgttgttgtgcgaaccgggagttcccggcattgtttcccccacgcgtgggggatcacaagggccgcaatatatgcggcgtctcaacaccacaaacatcccgtgccccccttgggggtctcaagagttatatttccgccgctgctcctccaaggaggtcccgccgcccccttgcggtgtgttgataacacccgagtaacaacggtggttttaaggctaatattctgcccgcggctttgctcagccccctgagaatgtgtgggcgctccaacgctgagttgttttgtgttggtagtaaggtttactccggccccggcacgccacatgggccttcaacaccgccgtgatctcccaccaactcttgggaagcgcccgcaggagcggctagattcaccctcgcaggtcccacggcagtttttgcagaacccacccttggggcccacccacagggcgtgggaagcccccctttcttcgatgacattgatgttataccaaacatgttagcgtgggtgtgggtggtgcacaaccccggggtatccacgcacgtgcgttggggagcgcttgagggccaggagaatccgctttggatcccggaaggcacgaggtttccagtgggcgccgagatccacaacccattgcccacatcccaccctctgggccgaataaggagggaaacatcttgtctgtccacaaaattagtggaggaataacatagaataaattttattcccaccctgggccaccaatagcgagaccccgtcccacaccaaaaattagaccccccctggtggtggtgtgcttgtacatccccagactacttgggaggctgaggcaggaggatctccttgagtccccgaaattgaggttctcgttcccccatagtcaagcccactgccacatcccctttgggagacaagccagacccttttcca

SEQ ID NO: 672368 - DNA, 450 bp, Homo sapiens
ctaacaacacaacaaattgaccaactctagaaatggaagtaaccaaggtttaggtgcagttaaggttggcaccagttagaaagaaggaaacaacgcctctaggtatagagtgcaagcttccaaagagtgggccacacactgtagtctagagcaggaagacaaaggtagaaagtcattcaatggcccgcaatatttgcgacacatgactgagtatagttccacaattgtacttactcatatgcattccagtattaaaactataccgaaagcttaccacagttctctggaatgtgtgtgtgcattacagcaagtacccaggctctactaattagggggactggatattcaccagtttgatcatattctgcagccactgggatgatattcctctctggcaaatttacgagcagtcgcttgcaatacttactgctgttcggagacctcctgaaa

SEQ ID NO: 672369 - DNA, 1017 bp, Homo sapiens
  misc_feature (666)..(666): n is a, c, g, or t
tgaggtgatctagaggatctcatgtagtcgctctcggctttcggctcggaggaggccaaggtgcaacttccttcggtcgtcccgaatccgggttcatccgacaccagccgcctccaccatgccgccgaagttcgaccccaacgagatcaaagtcgtatacctgaggtgcaccggaggtgaagtcggtgccacttctgccctggcccccaagatcggccccctgggtctgtctccaaaaaaagttggtgatgacattgccaaggcaacgggtgactggaagggcctgaggattacagtgaaactgaccattcagaacagacaggcccagattgaggtggtgccttctgcctctgccctgatcatcaaagccctcaaggaaccaccaagagacagaaagaaacagaaaaacattaaacacagtgggaatatcacttttgatgagattgtcaacattgctcgacagatgcggcaccgatccttagccagagaactctctggaaccattaaagagatcctggggactgcccagtcagtgggctgtaatgttgatggccgccatcctcatgacatcatcgatgacatcaacagtggtgctgtggaatgcccagccagttaagcacaaaggaaaacatttcaataaaggatcatttgacaactggtggaaanaacaacacgacacgacaaaacaaaagcaaaaacagacaaagaaaaaagcggacacaaatcacggaggcaaaaacacacaacaaactacacagacacaacagaaccacacacacaaatggacaacggagaaaaggggcaccaagaggagacaatcaaggaaaacgcgtaagctaaaggagaacacgaaccggacgacagaacacacacacacacgaacacacgcaaccacaccacgcaaaaacaccaaaccaagacccacacacacaaaaaacaaaacaaacgagcacccgagagaacacaccaccacacacaccaccccaacccaaacccccacaagacacggagaaaagc

SEQ ID NO: 672370 - DNA, 1156 bp, Homo sapiens
tgaggtgatctagaggatctcatgtagtcgctctcggctttcggctcggaggaggccaaggtgcaacttccttcggtcgtcccgaatccgggttcatccgacaccagccgcctccaccatgccgccgaagttcgaccccaacgagatcaaagtcgtatacctgaggtgcaccggaggtgaagtcggtgccacttctgccctggcccccaagatcggccccctgggtctgtctccaaaaaaagttggtgatgacattgccaaggcaacgggtgactggaagggcctgaggattacagtgaaactgaccattcagaacagacaggcccagattgaggtggtgccttctgcctctgccctgatcatcaaagccctcaaggaaccaccaagagacagaaagaaacagaaaaacattaaacacagtgggaatatcacttttgatgagattgtcaacattgctcgacagatgcggcaccgatccttagccagagaactctctggaaccattaaagagatcctggggactgcccagtcagtgggctgtaatgttgatggccgccatcctcatgacatcatcgatgacatcaacagtggtgctgtggaatgcccagccagttaagcacaaaggaaaacatttcaataaaggatcatttgacaactggaaaaaaaaaacaaaaaaacaaaaaaaaaaaaaaaaaaaaaacaaaaaaaaaaaaaaaaaaaaaacccgggggggcctttttgcggggggggggagacacagggggtaaaagggccctcgggccaatggggcaccgccaccccacttcgtgaacaagggggggaaagcgcgcgggggcccccaaaaaggaggagcgtttaatgagcaaagaggcgggcgacaccgcgataaaaaaaaagagggaggaaggagcgcgaaataaaaccgccataagagcggggcactggggagcaccagagtctcgcggagaaccctcttgaaggaacaaaactgggctgtggaacaaaacaaccgccctcaagcggggtgtggttggcgacagacgaagaccccaacctatacgaggaagcgctagcagagagcaaaccacaagccgatcgtggaagacgacggccctctgcagtctggtaccgcctgtctccgcgcgaatgtaacggg

SEQ ID NO: 672371 - DNA, 1623 bp, Homo sapiens
tgaggtgatctagaggatctcatgtagtcgctctcggctttcggctcggaggaggccaaggtgcaacttccttcggtcgtcccgaatccgggttcatccgacaccagccgcctccaccatgccgccgaagttcgaccccaacgagatcaaagtcgtatacctgaggtgcaccggaggtgaagtcggtgccacttctgccctggcccccaagatcggccccctgggtctgtctccaaaaaaagttggtgatgacattgccaaggcaacgggtgactggaagggcctgaggattacagtgaaactgaccattcagaacagacaggcccagattgaggtggtgccttctgcctctgccctgatcatcaaagccctcaaggaaccaccaagagacagaaagaaacagaaaaacattaaacacagtgggaatatcacttttgatgagattgtcaacattgctcgacagatgcggcaccgatccttagccagagaactctctggaaccattaaagagatcctggggactgcccagtcagtgggctgtaatgttgatggccgccatcctcatgacatcatcgatgacatcaacagtggtgctgtggaatgcccagccagttaagcacaaaggaaaacatttcaataaaggatcatttgacaactggaaaaaaaaaaaaaaaaacaaaaaacaataaaaaacaaagaaataaaatcagaaaaaaagaaaacaaaaaacacccaccgacgaaagcatgttcttctcacccccgggcagaagggtgagggaggcacacacacgacaggcatatcccacacccccggaagaacacaataggcggcgggcgaggaagaccacatccgaagcacgcacagacgcgaggaggagaggagccaaagcagacgcagaaccgacacaaacaagggagacaaaaaacaaaccgacaacgaaccagagagaacaaacaaaacggaaggaaagcacgttgtcaagcagaccaaacacgaggaggagacccacgagagcacaacaggagagaaaagcgtggatgattcaatcggagccagcgagaaggaaaaccaataacaacacgctccaagaagcagccagaccgaatagcgctggcgcgacccgaaccccgagagaaagcatgaaacacacacagcacaaaaacgcactcactcacagacaccaaaagaggagacaacaccaccagcacaaaggaaaaaataaaggcggagtgagtgaacgcaaccaacctctcggggccaaaccaacccacgcagacgagcgcggacaacaaaccaaggcggggagagaccaacaagagacaagaagagacagcgccctcaactcatacagagagccacacagagagagggacagtagcacggcgacgcaggggaagcggagccgaaactaaatgcgagtgacagaacagagccaccagacacgcaaagacgatggagagcgcgagcaaaacaacaccaacaacgagggccgacgacaacacgacccacacaggaaaaaagacgccgagcggaaaaatacgagagcagagcgcgtcctacgccagaggagtgcgagagaaaccaccattggggcaacctacaagaagaacaacggaccgc

SEQ ID NO: 672372 - DNA, 160 bp, Homo sapiens
  misc_feature (13)..(13): n is a, c, g, or t
  misc_feature (25)..(25): n is a, c, g, or t
  misc_feature (75)..(75): n is a, c, g, or t
  misc_feature (121)..(121): n is a, c, g, or t
taatagagacgangttccccatgtngaccgggcactccgggcctcaagtgatccacccccgtgggcttcccaaangctaggattacaagggtaagccacagcaccgggcctcatgcgtgtnctttttctttgggagagagtctcacttggtcaccagtct

SEQ ID NO: 672373 - DNA, 1210 bp, Homo sapiens
tgaggtgatctagaggatctcatgtagtcgctctcggctttcggctcggaggaggccaaggtgcaacttccttcggtcgtcccgaatccgggttcatccgacaccagccgcctccaccatgccgccgaagttcgaccccaacgagatcaaagtcgtatacctgaggtgcaccggaggtgaagtcggtgccacttctgccctggcccccaagatcggccccctgggtctgtctccaaaaaaagttggtgatgacattgccaaggcaacgggtgactggaagggcctgaggattacagtgaaactgaccattcagaacagacaggcccagattgaggtggtgccttctgcctctgccctgatcatcaaagccctcaaggaaccaccaagagacagaaagaaacagaaaaacattaaacacagtgggaatatcacttttgatgagattgtcaacattgctcgacagatgcggcaccgatccttagccagagaactctctggaaccattaaagagatcctggggactgcccagtcagtgggctgtaatgttgatggccgccatcctcatgacatcatcgatgacatcaacagtggtgctgtggaatgcccagccagttaagcacaaaggaaaacatttcaataaaggatcatttgacaactggtggaaaaaaaaaaaaaaggccctcctcgcaagagccgtccgggagccagccaaggaggggaaaagggcagcacaattttcggctccatgatggcgttcatctggggtctgggaaaccccaaaccctccagggatgggcctgcgcgcttgggggaaccaagccttgttggggggcagggggctcacccaggggctccctatccgtggggcctacccggggcaggccccccgggggcttatcctggacaggcccctccgaggcgccctcaccgtgagcacctggaagctcatccggagacttggccttgggagttttccccggcgccacccacgcgcccttggggccttaccattttttgtggacagccatgtgcccgggggctatactggcatggccctattgcgccctggtggccagtgtggggcttatactgcttcctgggagtggcctcgctcgtgtactttggcggtgagcatgaacggatgcgttattcagaggtgttgtgctccattccccgtctgaccgcagcttgtggacagcggttacgggcg

SEQ ID NO: 672374 - DNA, 98 bp, Homo sapiens
agggaggctaagaggcgggagggattagcttggatgtcccaggagtgtcgagagccagcgctgggcagatatgagcgagacgctaccgttgcgtccaa

SEQ ID NO: 672375 - DNA, 854 bp, Homo sapiens
gatccatctggagagacagtcaccgtgttatgggatctctacaatgatctttccctctaaggtcccagatcttgatgctggggccggctcggaggaggccaaggtgcaacttccttcggtcgtcccgaatccgggttcatccgacaccagccgcctccaccatgccgccgaagttcgaccccaacgagatcaaagtcgtatacctgaggtgcaccggaggtgaagtcggtgccacttctgccctggcccccaagatcggccccctgggtctgtctccaaaaaaagttggtgatgacattgccaaggcaacgggtgactggaagggcctgaggattacagtgaaactgaccattcagaacagacaggcccagattgaggtggtgccttctgcctctgccctgatcatcaaagccctcaaggaaccaccaagagacagaaagaaacagaaaaacattaaacacagtgggaatatcacttttgatgagattgtcaacattgctcgacagatgcggcaccgatccttagccagagaactctctggaaccattaaagagatcctggggactgcccagtcagtgggctgtaatgttgatggccgccatcctcatgacatcatcgatgacatcaacagtggtgctgtggaatgcccagccagttaagcacaaaggaaaacatttcaataaaggatcatttgacaactggaaaaaaaaaaaaaaaaaaaaaaaaaaaaaaaaaaaaaaaaaggggggtttttttgggggggggggaaaaaaggtttaaagggaggggtaatgttttggcccctttttggaagggggaaacggggcccaaagggggaaaagaagcgggtcgaa

SEQ ID NO: 672376 - DNA, 330 bp, Homo sapiens
gtatatgctgtctcatcttactgttataaacattcctcaggtacttgaaaggagtgtgtgttctaggcttgttgagtacagataacctatattgagcaaagggtcactatcttccctgctgcctgtctatcacctctattagaagtatttaaaatctcaattttccttttaattttcatgcggttttctgggttgttcatgattgctatgtttgtggtggattgttctttaaaaaaaaaatcttgatcctattaacactttttggctcaaattctatttggtctgctattgatattactacccaaaatccccgtaccccgcccttttttt

SEQ ID NO: 672377 - DNA, 379 bp, Homo sapiens
  misc_feature (144)..(144): n is a, c, g, or t
  misc_feature (357)..(358): n is a, c, g, or t
ccaggtagaaactgatcctgactgccaagaaggactcctgattccttccccaagtctccttagaactgtggcccctcatcagcgaacagtgaggaactacccagtgtgatcatttcaaaactggaataaggtcgggcgcgggtncacgcctgtaatcccagcactttgggaggccgaggtgggcggatcacgaggtcaggaaatcgagaccatcctggctaacacagtgaaaccctgtctctactaaaaatacaaaaaattagccgggcgaggtgcaggcgcctgtagtcccagctactcgggaagctgaggcagaatggcgtgaaccccggagcggagcctgcagtgaactgaganntccactgcactccaccctggg

SEQ ID NO: 672378 - DNA, 617 bp, Homo sapiens
  misc_feature (70)..(71): n is a, c, g, or t
  misc_feature (132)..(132): n is a, c, g, or t
  misc_feature (511)..(511): n is a, c, g, or t
  misc_feature (533)..(533): n is a, c, g, or t
  misc_feature (575)..(576): n is a, c, g, or t
  misc_feature (589)..(589): n is a, c, g, or t
  misc_feature (594)..(594): n is a, c, g, or t
ataaaaaaaaaaaaaaacacacccttttctaaaaaaaaaaaaaaaaagggggggggggggtgtgtgtttnntctctccgccccccccccccttgaggtaataaaaaaaaacacacccccggctttttttttnttttttttaaaaaaaaaaaaccccccccgggggtggggtgtggagaaggaaaaaaaaaaacaacccccccccccccccccccaaagtgggtggggggggggcgcccctttgggggggagaaaaaaatatttttctcccccacaaaaagggggggcaccacccccccgtggggggcgcccccctcataaaaaaaaaaaaaatttccccccccgcgggcgcccccgggggggggacaaaatttttctccccccttaaaaaaaaaaaaacacacacccccccccccgggcaagaaaaaaaaccaaaaaaaaggggcccccaaaccccccgggaatagcaaggggcccaatagagaaaatttcccaggaccccccccccgagncaccaattggaaatgaagtctnggcccaggtggggacacctttggatttcttccccaacatgannccatgaccctcgntggtncccatcactgaaaatacgtactc

SEQ ID NO: 672379 - DNA, 981 bp, Homo sapiens
cttcactatttctggtggccgtgttccacctccctgctcgctgttattactcctttcgccgacgatatctgcctctagcacatgtgtgccgccctttggtgcagaaagtcccgtaagattttcgcacaatgcggttttctataaacaccgcccaccacatttgtgttccccccccgtgcgaataaccagttgccgcctgcctttttcgtgactctcccttttgtgcgcgaaggtatatataaccaggccatttgcgtcttacccaactccgacgtgctttaactcgggctgcctctggaaatctgtttcaatcatagcccgcaatagcccgctctgtttggtacaagcccaaattgcgttgatcgccatacacccctccgttattgtttcacccgcgcccaaattatatttcttataataatttgctctccccgcggcctttaactctcctccctagtatggttctgcgccctatgttgaacccctctaagtttctggagacatcttcaaaacactctgtccccgatttatacccgtcttctctctctgaacgacttctcaagagacttgttagctgctcccccgcgaaagataaggctgctttggcgagaaccatttctacacacaaccctttgttttacacgcttgcgcgctggctccccccccccccctctttcggcctccccctgggggacccgtcctcgggtaagaaaccagcgtgtgtcccgggggtcaaaagacatcgtgtccgcgcatacgggaggccgaccaaaaatggggcccgccctaaaatccgcggggcaaaaaaatgtccgccgaccacccgattcggggcaccacccccgcccggccgacggcgccacacaatgacccccgccttctcgacacggggaaaccaaccctgaagggggaaacaaccctgacgcccctttttcccgttcccccaaccccaaatattccgggttttccccccaacaaaac

SEQ ID NO: 672380 - DNA, 605 bp, Homo sapiens
agaggctggacgaggctagtcaatccttgtcgtcccgaatcggtcatcgacaccagccgctcaccatgccgcggaagtcgaccccaacgagatcaaagtcgtatacctgaggtgcaccggaggtgaagtcggtgccacttctgccctggcccccaagatcggccccctgggtctgtctccaaaaaaagttggtgatgacattgccaaggcaacgggtgactggaagggcctgaggattacagtgaaactgaccattcagaacagacaggcccagattgaggtggtgccttctgcctctgccctgatcatcaaagccctcaaggaaccaccaagagacagaaagaaacagaaaaacattaaacacagtgggaatatcacttttgatgagattgtcaacattgctcgacagatgcggcaccgatccttagccagagaactctctggaaccattaaagagatcctggggactgcccagtcagtgggctgtaatgttgatggccgccatcctcatgacatcatcgatgacatcaacagtggtgctgtggaatgcccagccagttaagcacaaaggaaaacatttcaataaaggatcatttgacaactgg

SEQ ID NO: 672381 - DNA, 545 bp, Homo sapiens
gcgaccttctgctctgcgtcgaccttctgctctgcgtcgaccttctgctctgcgtcgaccttctgctctgcgtcgaccttctgccctggcccccaagatcggccccctgggtctgtctccaaaaaaagttggtgatgacattgccaaggcaacgggtgactggaagggcctgaggattacagtgaaactgaccattcagaacagacaggcccagattgaggtggtgccttctgcctctgccctgatcatcaaagccctcaaggaaccaccaagagacagaaagaaacagaaaaacattaaacacagtgggaatatcacttttgatgagattgtcaacattgctcgacagatgcggcaccgatccttagccagagaactctctggaaccattaaagagatcctggggactgcccagtcagtgggctgtaatgttgatggccgccatcctcatgacatcatcgatgacatcaacagtggtgctgtggaatgcccagccagttaagcacaaaggaaaacatttcaataaaggatcatttgacaactgg

SEQ ID NO: 672382 - DNA, 121 bp, Homo sapiens
tcgagctcggtaccgattacgctcctaacggtggtgtaggggttgcttgccgacagttgatgtggttgctctcagcgatcctctgggcctccttgtggatggacaggatgtgctcgcgcgt

SEQ ID NO: 672383 - DNA, 423 bp, Homo sapiens
acctcctaccccacgatcatgtctggctaatttttttatttttattggagacagggtttcaccatgttgggcaggctggtcttgaactcctgacctcaggtgatccacccgccttggcctcccaaagtgctgggattacaggcgtgagccaccacatccagcaaaagaacagttttgacctgggccctgggctggagcaatagtgtaccaagagacaggcccccatgactaaaaatacaatttaaggaaaaatgcagctccagggcaagtgccctgtgcctccttccaacaaccattccccaggcctcccctagcaatatgctgtttatcaagtgctcaccctgtgctggccctctgcgtggcatttgtggacagtagctcattcaacctggggttagagtgtgggaccccggggtaccgagc

SEQ ID NO: 672384 - DNA, 741 bp, Homo sapiens
tgaggtgatctagaggatctcatgtagtcgctctcggctttcggctcggaggaggccaaggtgcaacttccttcggtcgtcccgaatccgggttcatccgacaccagccgcctccaccatgccgccgaagttcgaccccaacgagatcaaagtcgtatacctgaggtgcaccggaggtgaagtcggtgccacttctgccctggcccccaagatcggccccctgggtctgtctccaaaaaaagttggtgatgacattgccaaggcaacgggtgactggaagggcctgaggattacagtgaaactgaccattcagaacagacaggcccagattgaggtggtgccttctgcctctgccctgatcatcaaagccctcaaggaaccaccaagagacagaaagaaacagaaaaacattaaacacagtggacagatgcggcaccgatccttagccagagaactctctggaaccattaaagagatcctggggactgcccagtcagtgggctgtaatgttgatggccgccatcctcatgacatcatcgatgacatcaacagtggtgctgtggaatgcccagccagttaagcacaaaggaaaacatttcaataaaggatcatttgacaactggtgaaaaaaaaaaaacacaacaagaatggctaatggcattgctaagggagataaatcaggggggtaacagcggagggaacggggacaatataggtgggaaccttgcgagggaataaggg

SEQ ID NO: 672385 - DNA, 753 bp, Homo sapiens
  misc_feature (2)..(2): n is a, c, g, or t
  misc_feature (8)..(9): n is a, c, g, or t
  misc_feature (18)..(18): n is a, c, g, or t
  misc_feature (30)..(30): n is a, c, g, or t
  misc_feature (34)..(34): n is a, c, g, or t
  misc_feature (52)..(53): n is a, c, g, or t
tncgcggnnggctggcgnaaaagaactagnggancccccgggcggtttgaanncggctcggaggaggccaaggtgcaacttccttcggtcgtcccgaatccgggttcatccgacaccagccgcctccaccatgccgccgaagttcgaccccaacgagatcaaagtcgtatacctgaggtgcaccggaggtgaagtcggtgccacttctgccctggcccccaagatcggccccctgggtctgtctccaaaaaaagttggtgatgacattgccaaggcaacgggtgactggaagggcctgaggattacagtgaaactgaccattcagaacagacaggcccagattgaggtggtgccttctgcctctgccctgatcatcaaagccctcaaggaaccaccaagagacagaaagaaacagaaaaacattaaacacagtggacagatgcggcaccgatccttagccagagaactctctggaaccattaaagagatcctggggactgcccagtcagtgggctgtaatgttgatggccgccatcctcatgacatcatcgatgacatcaacagtggtgctgtggaatgcccagccagttaagcacaaaggaaaacatttcaataaaggatcatttgacaactggtgaaaaaaaaaaaacacaacaagaatggctaatggcattgctaagggagataaatcaggggggtaacagcggagggaacggggacaatataggtgggaaccttgcgagggaataaggg

SEQ ID NO: 672386 - DNA, 596 bp, Homo sapiens
tgaggtgatctagaggatctcatgtagtcgctctcggctttcggctcggaggaggccaaggtgcaacttccttcggtcgtcccgaatccgggttcatccgacaccagccgcctccaccatgccgccgaagttcgaccccaacgagatcaaagtcgtatacctgaggtgcaccggaggtgaagtcggtgccacttctgccctggcccccaagatcggccccctgaggattacagtgaaactgaccattcagaacagacaggcccagattgaggtggtgccttctgcctctgccctgatcatcaaagccctcaaggaaccaccaagagacagaaagaaacagaaaaacattaaacacagtgggaatatcacttttgatgagattgtcaacattgctcgacagatgcggcaccgatccttagccagagaactctctggaaccattaaagagatcctggggactgcccagtcagtgggctgtaatgttgatggccgccatcctcatgacatcatcgatgacatcaacagtggtgctgtggaatgcccagccagttaagcacaaaggaaaacatttcaataaaggatcatttgacaactgg

SEQ ID NO: 672387 - DNA, 151 bp, Homo sapiens
  misc_feature (18)..(18): n is a, c, g, or t
agccaccttttcagtcgngttttcataatttagcttcgtttttctatatccacaaacaatatattatattgggtggcatttacttatacttttaaaaaatgatctcatgcgaggatgtcctattgtatcatattttttcacgaaacattat

SEQ ID NO: 672388 - DNA, 502 bp, Homo sapiens
  misc_feature (423)..(423): n is a, c, g, or t
  misc_feature (487)..(487): n is a, c, g, or t
  misc_feature (499)..(499): n is a, c, g, or t
ctttctgcacccagacagacgctgataattcttgctctgcacactgaccaccttattgctgagtattgtcaaggacaagactttttttttttaattcaaaacatttgactttttaaaggaaaggatgtcacagtgtctttataaccgagataatgaaatcttagcttaattttgtgcaagaattaaggtacttgaattgattaaggcacagatgtgtttggtctaaaaggctgtattttgtctgctttttcacaaatctatggaaattgatttccccatcttgcagtgtgcttagcgcccacgatccccaagttctagaattctggaaagagccttcatgtatggaatgtcttctgtgcagaggaggtgctcagcataggcggctcagacacggggtgcttctctaaccacgctctgtgttancctggggacccctcttcctaatccacgtttgagtaaaggatgtttggattccctggaatgactngagttttttganaca

SEQ ID NO: 672389 - DNA, 133 bp, Homo sapiens
gtgggtacggcgacggttcgctgacggcttgctacgacacgtcactcaacacacacgctacttacgtgggacgtacgacgtttgacacgtccttgacgacgacggacttactgacttgcgaccttgtgacgtt

SEQ ID NO: 672390 - DNA, 683 bp, Homo sapiens
aatttttccactgcatgggtggagggtagttccctgattctgacttgagtttgtagccaatctaaggccagggtcaaaagcttccagcaagaggccggacgcttggaaaaggctttcagaagtttccatcggagagtcattaaaaactctgccaaaagccccctagcagcaaagagccccccatttttgcccttggtgggagccttcaaaaacattacttccagttccccggaaagacatatttttggagaggacagagttgtttttgagcaccctcaagtgggccccctttaaaaaaggaatgacgtcgtggaagccctgacaggcagtgcagcctcgaggctccgcgggggcccttcctccagacgccttttttcccccccccttccaaaagcaaaaaaaagccccgaaagtgaaatggatttggaaggtttgggcagatcccccattgcttccccccgtccttgttctggcagaatggccccaccatccccccctgggtttagggccagcctctccctccctcctgtttcccgccccccggggcagaaagtgggtttttatcgaagaccaactgaacttcaagaccaaagtgaattttccgatgggggccagctagcttttaaggataatggggggtttgaatccttttttgaatgggtaggtccgaaaccaattgaaga

SEQ ID NO: 672391 - DNA, 305 bp, Homo sapiens
gcgagaaagagaacaagccagaaatttagacagtgctctcgaacctgtgaaatataggggtcagagcatgaaggatggttgtgaacaaggaagatggattagtcatgaaatagcatgaaactggcattgacatgagtgtagaacatccctgattaacctgactctttatgcttaggtgcccacttatcacagcccttccttggcagttaataatgtctgaggcattgccaattgtacaactacatgagccagtcatagcatctcctctaatagtaggcatgtatcaggaaagagctgaccggcat

SEQ ID NO: 672392 - DNA, 421 bp, Homo sapiens
ttcgctgtcgagttcgagaaatccgtcttgactgggaaacaccttgggcgccaagataataaatagattcaaagccatccccatccagctaccatctgactttcttcacagtacatttggataaacactactttaaatgctacatgatgcgaaccataatgatagagcctgcagttgccaagttcaatccttaatcccaaaataaacaatccctgaaagggtcactcgacactcacctgtacttgcaaactagtactacacacggtgacaggtaaccagagaacagaatggtactgagtaccaaaacagtaggatataggaccaatggaacagaacagagccctcagaaataatgccacgtatctacaactatctgatcttagatcaacctgagaaaaacaagcaatggggaaaggattcc

SEQ ID NO: 672393 - DNA, 198 bp, Homo sapiens
atttccaggctcgtccagtcgccattcgcacattgtgcaagcatgcatccagtgtcgcagggccaggttccatggttgcatcattgctcagggtggcgcttcccacattcaggtgcctgcagtaggtggcctgccagtcacatgttcagcggttcaggcgtccgtgcccagggctcattgtgttgcacacatggtcgc

SEQ ID NO: 672394 - DNA, 268 bp, Homo sapiens
gaaacctgcggcgagttcgatgagcgacaacaccgccttgagaacgacataaagacgctgatcatcgaggccctgggcctgggagacatcagccccgacgatatggcagcgaccagaccctgtttggcgaaggcctgggcctggattcggtcgatgcgctggaattgggcctggcgatccagaaaaaatacggcatcaaaatcgatgccgacgccaaggacacccgcaatcacttcaccaacgtggccagccttgcggcgttcgtcac

SEQ ID NO: 672395 - DNA, 188 bp, Homo sapiens
tgtggtacattggaaatttagatattgaaatctgttaataaccagccaatatgatgtgcaaaaacgtcctagttggattggttgtttactgaatagtttgatcagtttgtagtttgaactagttgcttgaggctgggtcattgatttgaggtagttagaattacatgaaaagagtataacgcacaaaa

SEQ ID NO: 672396 - DNA, 735 bp, Homo sapiens
  misc_feature (1)..(1): n is a, c, g, or t
  misc_feature (5)..(5): n is a, c, g, or t
ntggnacaccggaattcggccattatggccggggaagaaatatgcttgtatataggaccacgcttttctaaagtgcatattagaatttttgtttttgtaaatggttaaatacatttcctgggtaacttaggaaattaagtttttcataaggcaacagatggttaaactgattgccatgaatacccaaagatcatgtatataatctgttttgttttagcaccatcccaaggtgtttttctcatttaacatattcgcttcataattcagcacgtacagatgcaagcgcattgcacactttttcctttctaaacttaaagacaggtcaaaaagccattcttagaactagaggatttaagagggtaggacttagggtttgtttatatgtatatatgggacattttaccttgtggcccaaagtcagatctttataaaaatcttgagtctgttcactaatgcgaaataagctttgagtccagcgtattgctcccctgattgaatatgagtgctgagctacattgcagaaatgtgatgagttattcactggcacaactttttttatagcatatcaattattttaaagtcggaaagcagtttggacctaatttggaggtgggtgtctattcaaggttggttggaaatctgggtgtgacacttctcgcacataaggttaaattagcacgccttacacatatcattttgcgccgctttgtataacacccttgtttataagaatta

SEQ ID NO: 672397 - DNA, 1146 bp, Homo sapiens
  misc_feature (331)..(331): n is a, c, g, or t
gcgctctgatgaactaggacccgttgccatgggccgtgtgatccgtggacagacggatgggcgccggagatcgtgatgttcgccgcgcagcacagtgaagcaccgtaaaggcgctgctgggcgccgttgcggcggccggtcggcatttcagcctgacgctcggcactggcctacgattctaagcggcttcggctcacagcgtcgatcgatctcattgcacccaggcgtcggctgttgccctcccttctgcctagaggtggatcttcctggagatccagtgactcgggttgtagaagaacaggtcaggacgcgaggactaggtatcagttancaccgatcggcacgcgagccaatttcgacaccggggcactagttctgggttggtaatttgtggtggccaaacgcaaagggctccgagcatccaacaacaagttgtgggcacgacttggttgaccttgcgccctgcttgcggacaagccccgagtgacccctttggaggggggttaaccagagtcctggtggtgccttgaccttggttgcagcggacgcaacaggcccttgggcaaggatggccggtcgtgccgacacgcccttggtgctctcggggcgtccaattctaagggggaaacacctttcattgtggcgcctaccccctgggatgtactttcgattcccgccaagcaatatccctccgtgtagggcaccctagagggcaacaattgcaagccccccggatatggcttggcacgaacgtccttcggtcgccccacttcctcaggggacgtactctcggttagcgaaaacgggggtccacatttccattcccccttttcttgggacgccccttccccggcaaaggccctttggtcgcccgccacggggggctggcctcgcgggccccgctctgccattggggcacaacgggcgctttggggcccccctggaaatacctccttgccaccccacgaggagccaacccccaccatcaccgtgctgacaaccccgtcggtaaccctcggaggccccaggagtgatcccacgatttaccccccacccgaaacaaatcttccctccaacacgcgcgcaccacgacctctagggagacaacaacggtgcacctctgcaccccgccacaaggacaccgcc

SEQ ID NO: 672398 - DNA, 1273 bp, Homo sapiens
  misc_feature (571)..(571): n is a, c, g, or t
ggagaggcttctggagtcaaagcgaccagatctgtggacggatcctgtgtcttggaaacgaggaggctccgacacgggcgttgcccctaccgaagccatgatcatggcgtgaatccaaagacacgggcacatagtacctcgcatccaaagagctcatgcatgtggtggtggctgctggattgcaaggaagcccaatggacagatgaacgaatggatgtactgtgcagcgctggacactgatgagaggcgccatcaagccatggtgcgcgatggaagatcttctacaagaggccagcttgggtgcacatgctggtgctgacaaactgtgttgcggaccttgaacgtgattgccaggtcgatcggtcattgtgcagggatcgcctggaggtcgtctacgatggaaacagccatccccatggccatcctgggccagacgtcgtgtcttctcagagagccacatgaatcaagggccctatgtcagtgtcttagtgggcagaagtgtgcaccagatggctaacgagtggaaaacctggaagtggcaccttcgacctagtgtcacgagatagccaanagattcgcacgtgtgggggctcgggacttgagagtacgttccaagattgcacgagtctatcgttaaggaggacgtaactgcgtggcgtttgttggggatccattggaattgcagagtgaaaaaacgccaagggatggcaagcgctcgaacagccccttgtgaacccttcgttcctaaggtgaaggcttccttcgggaagggccctttgggggccaacggagttctttttgaacaaggcccatgcggggtggcttgcggaacccttgttctcaattcagaccgttgaaattgtttgcaggtggccgatgggacggccccttgtgggctttccttgtgggcccacaaccgggtccaatctcttgaacgtagcgcaaagccttgggaagggcccccaggcgcccttgttgggcaaaagagaagcccgtgggccaagcaaactttgtccacccattgcatgttgttgggattggcttgaagtgtgtgtgcccccagtggggtcccgggacacccctttctccacagggtcaacttttctagcttcccccggaaagggctttgggcccattcacccctgggtcggtcaggtccaaagttggtttcccagaaaagctggggcctcctggcctattgggggccaggggccacgctgtcacggggctacttgccgccacgacctcttttggcaatccttcctttccccta

SEQ ID NO: 672399 - DNA, 848 bp, Homo sapiens
ggctggtaccgcgcctgggcgttatgggatgcggcgacgtatacatgctgagctgacccagtgccactggaagacggtcagcttctccactcaggctcctccagtcccgagccagaagatcccactccccccgaattctgggggccgatggaagggagccgagtcagatcgcgaggtacccagagccgacagaccggagcgacagggaggtagccagaagccaccgcccccatagggagtgatcggaaaagcctcagccataccgggtgagagaaccacggagggacccgcctccgggcggagcccgacgaaccatggactacgccaacgatggtggcgggatccccgcaagacaacaaaacgctctacgaccagacacgaaggccaaagacgtgcgcaagagacaagatgccagccaggacacgacatgcgggcctggcaaacacatatcaacgccggcaaagataaccaagggacgataacctaggccgacacatcgtggacagacagccatgagacgccccacatgagcagcaagagacacgggaataaccagagaaaacacaactgaaacggggccgatacaggaaaataggcgcccttccaaaagcgccacgagagggagaggataggaaaggcatgacgagaaatacccgtggcaagagggaaccagaagaacacaagaggaaacaccgaaggatacagaagacagagaccccgaggaaaaagtcaaacacaacagatagacaccaggcaaagtacctggagaaacgcccaaataagaggacagggcgaaaacacagaaaagagagaaaagacaacacggaagcgggacatccatgaggcga

SEQ ID NO: 672400 - DNA, 795 bp, Homo sapiens
gcagcccttgccatctctgcgctcttcccccgttgactggggtatcagtttatggtgccctgcagtgaagacctcttgttcctgtgggtgggaaggttctggaatctcagttgccctctctggagttgggagagacataggcttcggatcgacaagctttgcagagtggttcatggagtgaggtggtgggacgatttctgaggtgcgcgtgcggtgccatggctgcaaatcagaaccaccccttggacgttgatctcaaagcttggttcccagaactggcattttgaagcctctgcatagatctgggcagcttggtcaggatggccattcgggcgctcagcacagcaacgcatgccatactcagactggggaagcaaccacggggctggacaggccacgagagcctgtcggcacatgtgactcctgagatgtggcgagtcgctgcagagcggcataacggacgacgctacatgtccgtggacgtcccagctctactgcgccctccatagaacctccctgcgcgagcgcacctgctctcggcaggcctgtggcgtcccgtactgtccaccagcgtcctctgcaggtgtcatccttgggcttgagtgatccctcatgcggggcacctccgccggtggccggcgtcgccttgaccgagcgcgctgctgcgtctcccggggggccgtgtgctcccccttatgggcgcgtgtggtacgatgccgatggttgcctactcctgtccccggcacacgtccgtgttcccgctgcaattgctgtccccagcactgtgcccgttgt

SEQ ID NO: 672401 - DNA, 191 bp, Homo sapiens
tgcagttgggcagaggaggcatctgctgaacccaattaacgccaatgcaaaaagtataatggctttgggtgaccaatgcaacaaggaatcctatcactacatttataaaatctaaacgctggagattagaggtgtgacagcgtgacactccctcacccacagcgctactgtgtctgctggcccctacgcaa

SEQ ID NO: 672402 - DNA, 144 bp, Homo sapiens
cgaattatgcgtcgccctcgcggcagcagggatgcagcgtgctggatcgccgcctgcgaccctgcaatcggcagacacgccgcgcgcatctgatcacgccgtaggtgcgcggaggctgcgcttcgaggccatcgtcttcgggca

SEQ ID NO: 672403 - DNA, 579 bp, Homo sapiens
gcgacctgggaggcacggagactgctcacctgcccgtgcctggccgcggagtgcccggcgccaaggtgcctcgcgctcgtgcctcccgccccctgcgcgcgcttcccgtgtgctggctgccgtgcctcctgcctccctgcagatgtggatgttcctgatgcatgacctgggctcctgctgctgctccatgctgttggatgtgtgtgacgctgtgtgatgtgacttaagcaggtgctgtgcctcgtgtgcaggtgctgtggtccacccaatgtgagcactgacgacagcggactggttcccatgcccaaatggatgctctgacgccaccgccagacacacctgcagctttaccctgcagcttgaggcactcgtgacaatgacaacactggactgccatgactgcccgtatgtgacatgtgaagtgatggccctccatgacgtcttgatgcacgcgactgagagcccatatgggacagcattgcacccttgaaacttgggcacattgggaagggggggttgaccgtcggggagtcgaaaggtgacgaagacgcagtgggggcgacatggagaggagtagca

SEQ ID NO: 672404 - DNA, 231 bp, Homo sapiens
ccctgccagtacaacactgcatgggctgttatattcaacaacaagaccacatcatagtgactctatggcgagaaacaaacccatagtttagtctgaaaaaggagaaactcatatcctgattggctaaacactatacaattgaactgctatcagaaggcacagatagatagctcccagttgatccattgtcaggagctagtggaaaataacctaactactctgcagtcttcc

SEQ ID NO: 672405 - DNA, 298 bp, Homo sapiens
  misc_feature (31)..(31): n is a, c, g, or t
  misc_feature (33)..(33): n is a, c, g, or t
  misc_feature (40)..(41): n is a, c, g, or t
  misc_feature (57)..(57): n is a, c, g, or t
  misc_feature (270)..(270): n is a, c, g, or t
ccccaaatttccttccactcgcctgctgccntntgaagtnncactgaccagccaggnctcgtcatcaagggtatgggccttgcgaatacgctaaccggcgtggccattccgggccgtcgtcggtgccatcaacgttctgctcatggcgaccgctgtcagagccgtccctccatcggttttagatgcggcaaccgttgacggcgccgaacacgtggtcgaagattcgccacatcgtatggccaacatcaagggcatggctccgtggtcgcngtgttctcgttcatcggggcctgggacg

SEQ ID NO: 672406 - DNA, 1138 bp, Homo sapiens
agcttgcaggtgttggctcgtctgtggcttctccgatgctatcctggagccataggcaagagtgtggaagacggatcgtgacactactgctcatctggggctgaactggtggtggaggtcctcaactggctgcgacgcattaatcattctagtcgcattcccgtgcgagcagacgggttcttcctgcgtcagtggggactgagatgttgcctccctgtggccgtctctgtctaggatggtgatggaatgacctgctggttaccttgtgtcgttagcatgtctggacgactgtcttccacgtgggcggcgtcgcttgtgagtgacatacagacgtccacgacccggggatgtggacattgatgtcctgggcgcggagattgcggcagtcggcccgagcgcaggggcgttgaggtgggtgcgtctggggggagacgcggagtcgaaggcggatacccgggtcagcgccccggttccgggaattactacttgtgtcgaggtttggcatgaatcatcagtccagtgaggaattgattcagtgacgcagtgtagcatcgatggtcgatgtctagtgctagtggttgtaaatacgtaagggaacatgggattcaaatagaaaagtattgtaggttaaattacgtggtatggtacggattgtactgaggtggacaaaatagattgcatccatctgagagcggtcagtgagtgttagcgggttgaaatacatgtcatcagatgcattgagtgtgagggcaacgtcgtaatagcagatcggagcatagaagtggtattggcgagtaatggttcttgaagcggcaatgtctattaagtaaagggcccctggggaataagatgtcgcggagcgggaaactaagtcattgaatcgcgtgttggacagatattggacgtacgtgagcgaattttgaggaagttgtggcgtttcgtgggaccggaacagggtagctaagaacgagggggttaactcgtaagagtagtaaacgaaaagttagtagaaattttttgtgctatggatcatatgacaaaaatttaacaagtttattagagaaacaaaataaaaatgatacagatggtaatcacatagacaattagtgagacattaagaatttaataatatagttag

SEQ ID NO: 672407 - DNA, 302 bp, Homo sapiens
tatggcggatgccagatggtgtcggacagatggacttagagcctgaggtggaggaagcagctactccatatggcacgtggtcttggcgttggaggtggctacagtcccagcagtggcagagccattgggggtggcctcagctctgtaggaggcggcagttccaccatcaagtacaccaccacctcctcctccagcaggaagagctatcagcactaaagtgcgtctgatagctctcggtcccacagtcctcaggcccctctctggctgcagagccctctcctcatgttgcctttcggagaaga

SEQ ID NO: 672408 - DNA, 385 bp, Homo sapiens
cgcgactcttatccaattacaatacacaccctcatccccatttccagtctgattatacacattgctaagtggcagaaaggtctggaataaatacatcacataggagaggcaaagcagtgaacatgagttgcatgccatgggttctatgaggttgggggaagtgtctgagaagtcaaggagattaagacaatgtaactggaatattttagctaaaggttctttcagtcatcttggacttgggttccatgtagcaggatgcgtgtgaactcgatgtaatggaaatgcccctttcggtcaattaggtgcgactctgtaacagttcatccaattcctcatctgaaaagcgatcccgctaacaaatagtcggaagcagggtaccgagccc

SEQ ID NO: 672409 - DNA, 357 bp, Homo sapiens
ctcattggtacaccgctgtccggccattccttaacatgtcctacgaatgatctggattggaccctaccattgaggtctgatttcgtgcaactctaacatgtctcatagcaggtgtatctaaaatcagacttggtctacctttcatctgtttatggtcctgggtatatttaaccagagctaatattttcttgattcttcttcactctttccattacaggaagtaacacttaaagtggtagctcttcccagctgacctctgtaataaacacattgctgatgtatatctggtttacttttgccctcttcagctctggtggatcagaaattgcagttccccgttgaagttctcccttatat

SEQ ID NO: 672410 - DNA, 295 bp, Homo sapiens
acgttctgtcagctataagtcacaaactatctatctcaaatatgagcttttatcctagcgggaggctcaatgtcctcataatctttcgtgctatagatgtcgcattagcctccaaactgtcccccggggccactcttacccttagtaccatcttccttccacacaatgggccagggtgggtattttgtcagttgtagttagttagtaagtttttgtgagaccagggtctaagtctattgcccaggctgcagagcagtggtgtgatcatcagctcagtgtagactctaacatcctg

SEQ ID NO: 672411 - DNA, 384 bp, Homo sapiens
ggagcacggcaaaagcatacagacataggcgtcaaagtcgctatcgatcacattgcaaggcagccctaaagaacctgtgaagcagtgttttgttcgggaaaacctcaagtggctatcctgttcaccttctcaataaaacaaataagacccctttgggccaacagaaaaaagagacaggcttggggaaggaactcatatacctcagataatgaatcacaaatgaaacttcccatggtctgaacccaacaaaataaaaaatctaaaataatcagagatcactcacatttggactaactgtaagataaatgagatggaggacccgtgggcttagcagtccatttcattttgggtggatcgtaaggttaatatgagccacctggaatc

SEQ ID NO: 672412 - DNA, 376 bp, Homo sapiens
gtatgtacaacatgtaaagaagtgtcagcagaggagatgactatcaaaccttagtccaaagccacctcaacacctttattttctgagcttgttggaaaacctgataccagaattaatttgccacatgtgtactgtaataacagtggacccatgtcatacttacatccatgtttacaccacgaaggaattaggacaaaggcaaaccgtctactgtaattaaccaacgtttaagctttccggacttttaaatgctaactgtatttccccttcctgactaggaaaatgctataaagctcacattagttaggaatgacttatacgtatagttttgaatacctaagagatacttttcggcatatttactatcgccatattc

SEQ ID NO: 672413 - DNA, 387 bp, Homo sapiens
ggtcaagacgcgtcgagtctctcttatctcagtcttgtagtaagtcaactcagcttggtccgctccttcagcaggaattcacacacctcacagtcacacatcagacttagctgggacctcgtgcttcttaatgggctccgccagtatcccgggcagggatgacattcttggaggacacatttggcggggaccacgacgtctgcaatgggcactctctttcacctcatcacagaacccaaccagcgcaccgatctccttgggttgcttgtgcatcatcatctggatcgcaattcagaatactggctgatatcgttctcgcatatgtcggccatgccagggcccaggcggtcacactcctccttgacatgtaccaccaaggcctggaca

SEQ ID NO: 672414 - DNA, 1163 bp, Homo sapiens
ggaccaggagcgagtgtgtgtgagcggtgtagtgatagaggtgaggcgtagtgatgtagatggtgagtgcttgaaatgtaggcggtagctcgtggcttgctgggtcataatctccataggcacccaacctatacgccatgtggtcatgtgttgccattcgtccctggtagactagggggatacgtactagatcgcggacacaacagacatctatgcaacggagcaaatgtgtgctatgatgtttcgctcttgacatacaaacagaagaaccagagtctgctccagagtcctagaaactagtgcacgctgggaggggatccctatcttctagtcctactcagtcttactgtctcgcacaagacaaggaggggacccctagctgggcagcactaaacggagaagcactacggacgctagggacccagcccggtaccaccgagacaggacgagtcaccggagccattagatctgagacaagaagggcgagagtcagtgacgtggcacgaggaaccatgatcctagcgtgtggagacgccagtgtgtgggacgcgcgcacaataccagctgcatctagaacagagtcagatgcggacccattttcctgtgttgggtagggtcgctgactactggtgtgtgcaacctttacgctagcggtgatcctgggaactgctaggcagaatgccgttgcgacaggcccagatctagtcacattgaagcgccgttgctgcctgcccaaggaaatttaaacccccggttttccccccggcccaaggataacttcttcccaccaagaaaccattctaccgaacaatctaccaaaggccactctcggccgctggtgccgcaggggcggcggcccgtgctcctgcagcggacgaacatgggaggacgtgctccgcactccagaggccacccttccaaggaagccgggaaaaaccatggggaagcgatccaccgacccttcgcaagaatatatccccagcgagctcaggccagcacaatggacacacagggaaacccgcacgaaggcacacaaccgttaagataaccaacagaacagaatccaacaaacaacacacagacaacacgtaaggcgacacgcaaaccagcaatgagacctcacactcgcccaaaacaatcagtccaacagaaagaaaacacaa

SEQ ID NO: 672415 - DNA, 1436 bp, Homo sapiens
ggtcgaaccagcgtccggagacgcgtgggttgaaatggagtccttctatgacaggagaagactttatctgcagcaccctgactcgggccacatttagaagagctcaacatggatctgttccggtctactatgaagcccgtccagcacaagtgttggaagattctgattagacagcaagtctgcatattgcatgcaaattgttcttagttggtaggcatcagactcgcaattccaaaagcattcagcccacactagcgttcacaagcagatacatatccacaatggacaaggcaaccaatacccagtggacataaacccaagcatgcacagacatagatagaagtcatggttgctagcatgtcccaggcatggatgtgcatcattcatgggtgcatcaaaagcatcaccaggtgcacactggataatagcgttggatagtatggtaccctccaccacctagggatactcgacacactggtgcgagaagagcagctcacctgaccccaacaccagcagtccacaacgggacaccccaagctggaagcacatacaacaaagaaaacgacatccaggactccaccacacctacacggactctcccggactcccatccacgcgccaaactggataaacccaactagcacacggcgacccatccgaccacagctagaccacgcacaccccccagcacgcacaaccccacccacaccacacaccacccctgtgcgctaccaactcgcgccctccccggacaccgccgcaccaccccccacgccactggacatcccacaacaaccacgccgggcacacacaaacgacaacaactccgccacacgactacacaccactacagcccgccactaaccgcaacgcccccaccccaggcacacactacgccaacccgccaccacggcaaccacgcgcgatgccacacaaacacaaccgggcgaccaccccgctcccacacacccacaaccaacacgcaaacacctccccaccaccacccacaacaacaacgaactcccaggcccagggatagacactagcacacccacacgtgaaccgcacacacacaccaccacccaaaacggcgcactggcgcacataacccggcacgcgccgacgcagcacgacgcaacccgcacgccgagatcagcaaaccacacaacaggacccacgcggtcagcagccgtcgccggcacctccacgacaacaccacagccagcgaccagaccaccagcccatacacgcccctacacagccaaccgccccctgcaccgcacacgcaagcaacaacaagcgacaggctgaaacagcccgccaacgcaccagcccccctgcagcgaccacggaccaacacaggggcatgcaccagtagcaccgagacaactggacagcgccacgcaccacggcagtacacgatccaccgacgcacc

SEQ ID NO: 672416 - DNA, 281 bp, Homo sapiens
agaccttgtgtcccacgctggtggttcatggggtcactccattcacctgcactgatctgtgatgcccctgcctccagggctaggtagagagggcccatgcaggcggcctatcctgatccttggaggaggaggaagaggaggccactgaggcccgtggccttgctctcgggacgtggactcccctggaggttataaagggatcctgtgcttgggcatttcgcccacctcttttggcttagggaccccagcacactaacatatgggaggagggccccaccgag

SEQ ID NO: 672417 - DNA, 237 bp, Homo sapiens
ccggaccggctctttgtgtggctcttacgggtgggctcagttgcgtggctcttcgggtggctcctggggtggctcatcgtgtggcgcttggggtggctcatggtgtggcgcttcgggtggctctttgtggggcgcctcgggtggctcttcgcgacggctcagctccaagcccagtgccaggtcatctgggacaccattgattgtgactgacttcagctgcccatcctcctccacgag

SEQ ID NO: 672418 - DNA, 330 bp, Homo sapiens
tcagctcggcccaagttttacatgagcagatctctcctatgtgctgttgcgcaactatggctttgttggcggaacgcttgatgctaattaatgtgcgaaaaggcaatcgaatttgttttatcctgtatgaactattgacggtggatgtgcttgcagaccatgttctgaatcccatgctggtcagatctattgttgcacaggatttctgggctattacacgtcagttgcgtcatgctacattctgatttacttggctgttggctttgtgaacgacaattaccctcagagcgggctcaatggaaggccggagaagttaccagatgtatgcta

SEQ ID NO: 672419 - DNA, 916 bp, Homo sapiens
  misc_feature (805)..(805): n is a, c, g, or t
ctgaacccaaaacatcaaatctgtgtgggaatcgagcatatggaaaatctctgataccggcagtgccccggatctcagtgaaaacttcagcctctgcctcattggaggcgacagccatgggcacagagaagggagctgttctgatgagaggatccagacatctcaagaagatgactgaagagtatccagcccttccccaaggagcagaagcctctctaccactgacaggcagtgcttcctgcggcgtccccggcatcctccggaaaatgtggacaaggcacaagaagaagtctgaatatgtgggagccaccaacagcgcctttgaggccgactaaaggtgaccctcttcaagtgccctgtgttggccaaggttccccggacaagaggaaaaaccttcaggattgaaactgagccacacgcacctctgctagtagctggtccaaacccattatcctccctcactcattgattaccctgggatagggcacaggaaagaaatgtccctcgaaggcaatataaaactgccccttcttagaattgctaaagccattggtctgaaagtgactttgggaggtcataaagtttgtatctctatctttaagcaaaaaattaaactttcccagctcattttaaagacctccaaggaaggaaaaaagcaattcctctgtcttccttgtgagttgctctaaagtgtgtgattttctagtgtaaatggactttgaggcacttgtaaacacaatggttcttactgtttccattactgcatttacttcaccttgacaaggtacaattttcaaggacaaancactatatataaagttagtagttctaatatccacttgagagtatactcaagattgattttcatggccatttggcatgattgcatgaatctctatcctttatctgcagtttt

SEQ ID NO: 672420 - DNA, 389 bp, Homo sapiens
  misc_feature (10)..(10): n is a, c, g, or t
  misc_feature (385)..(385): n is a, c, g, or t
tgtgatcagncatctctgatgctactattgtaattgatttgtaatggcctctaagtgttcaagtgaaaggaagagtcaaatgtctctcactttaaattgaaagatggagataattaagcttattgaggaaagcatgtcaaaagccaaaacaggccaaaagttaggcctcttgtgtcaagcattagccagttgtgaatggaaaggaaaagttcttaaagaaaatacaaagtgctactttgatgaacacaggaatgatttaaaaaaaaaaaaaagcaacacacccttattgctgatagggatttagtggtctggatagacagtcagaccagctacaacactcccttaagccaaagcctaatccagcataaggccgtaactctctgcnatcc

SEQ ID NO: 672421 - DNA, 213 bp, Homo sapiens
tgagagtttttagagaggggctgcaaagaagaggtcgtccacatattgaagatgactgggagacaggtttaaggaagtgaggtttcgggctagagcttgtccaaagaaatgagggctatccctgaagccctgagggaggacagtccatgtgagttgttgtgactggagggtgtcagggctcagtccaggtgaaagcaaataggttttgggaat

SEQ ID NO: 672422 - DNA, 363 bp, Homo sapiens
atctcgaactctcttggtcttcaaagaaggagtgtcattcgtatcgggttctaatgattcgtcaggattaacagagagtcgattggctttcatcaccttttagacttcgaatgttctgtacacacctggatgtaagatgtcttccaaagccgtgtagacccttgtcacctagggtttatataagaacacagataatctccaatgccccaggtagttgcacaatagccaccgtatctttcttctaagacaccctagttgtctctgaacgcaacatatgtaacacatgttacagatataaataacagagcatagatgtagagttttatttcccgggtgcgcaaggcccctctcaagatgtgtgag

SEQ ID NO: 672423 - DNA, 362 bp, Homo sapiens
tactggctcgatggctaaaggaagagacataagtgttgttccctctgtgttcaaataagcaggctatcataggtatagaattaaagcccataggtttaggcgggcagcagtggctcatgcctgtaatcccagcactttgggaggccgaggcgggcggttcacgaggtcaggagttcgagaccagcctggcgcatatggtgaaaccctgtctccactaaaaatacaaaacaattagctgggcatggtggtgccacacctgtaatcccagctgcttgagaggctgagacaggagaatcacttgaaccctgggcagtggagggtgcagtgagctgagatcataccactgcactccagcctgagcg

SEQ ID NO: 672424 - DNA, 140 bp, Homo sapiens
aatcaaatcaaggggcttggttttaaagtaaatgtttttttaaaaaaaactgtgcttttttgttgacccaaacgaaaagggcccagccctgtaactgcacggcccttttgtcattgggaataaaataaatttttccgaga

SEQ ID NO: 672425 - DNA, 152 bp, Homo sapiens
  misc_feature (57)..(57): n is a, c, g, or t
tgagctgactcttgagtagtcctggtaaacgacgacactacttctgtgccgtcgtgngatgacggggtgaggaccgtggtatacgtgacacttcggactctaccctgggaggggggacgtggaaccttgcccgccccggaagacgcggtgag

SEQ ID NO: 672426 - DNA, 449 bp, Homo sapiens
  misc_feature (124)..(124): n is a, c, g, or t
  misc_feature (292)..(292): n is a, c, g, or t
accagaaagtacttaacccgtttatgccagaggttgcaattttttgaatttttgcatgagtgaaaaatcagaccttggcgatgaccttgagcagtaggctataaataattcccacatgctttangttccaataatggaacgctaggcatacgtgggttaaggggcatggtggctaatacctgtggtcccctatttgggaggctacggtgggaggatctcttgaagccaggagtttgaggccagcctgggcaacactgcaagaccccatctctaaaaaaatttttttttaatntactgcgcatggtggcacacacctgttatcccagcaactcaggaggctgaggcaggagggttgtctaagcccaggagtttgaggctgccgtgagctgtggtcatgccactgcactccagcctgggtgatagagtgggaccctatctctaacgaaaag

SEQ ID NO: 672427 - DNA, 869 bp, Homo sapiens
  misc_feature (202)..(202): n is a, c, g, or t
ggccagagaagacaagggcatgacaagcagcatgaagtgggggcccaatgggaggaaggcccgggggccgaggagcaccagtcggttcatgcagaacgatatccctcgcaacctcgctccaggatcaacgagaaccaagctgacgtcatttgagatgcgttggacagaaaatgcgtatgagggctgggcgcacgttgcgagnttgttcacgtcctgctacacgtgagcggcatgctcccacgtgggagactgatgcacgtggacctaaggaagacacttgtgcgtgtgcataggtggtagcattcggttcgcatacgagattatacgctcctcgaggaagaagatccgttagcgtttgcaacttctcagtctcgttttcaccagtgctcgttaccatgggtctttgagtcggggcttgggcttcatggggaatacaagggaggacatggtatctcaacggaggccatatgcgtcctatcttcccgagcacgctcacaaactcgctcacgttgtcttttctctaacaacacagttgtcagcttgtgaaggccatggaaccctgccccgaaaagaccgggggggtccctgcacactatattgagcccagaaagccgaaagcgggcaccgtaagggacaccccacggagacaccgttatcccagtggtcccctttcggatatgacgatggggatgcacatggattatccacatatacacaggggcataagtctagaaagaggcaatacaagttcggggcaggaaccaatgaacctgtctcaaaggacttaatccacgctctaacactaacccgagagcaatcccaagtccccaaactttgtacaggaacgaaagaaacaggaagggaaagag

SEQ ID NO: 672428 - DNA, 670 bp, Homo sapiens
gcatggcggctgagaccctgtacacgtatcctgaaaactggagggccttcaagctctcatcgctgctcagtacagcggggctcaggtccgcgtgctctccgaaccacccactatccattttggcaaaccaagccgcaccctgaatctctccgcaaattgcctgccggaaggtcccagcattagagggtgatgatggattctgtgtgtttgacgagcaacgccattgcctactatgtgagcaatgcagtgagctgcggggaagtactccagaggcagcagacccacggtggtgcagtgcggtgagctttgctgattccgatatagtgcccccagctcagtaactggtggttgttccccacacttgggcatcatgcaaccaaacaaacaggccactgagaatgcaaaggacggaagtgagcgcggaatcctgcggtgctgctggcaatgcattaccttgaaagaacaaagggaccttgacctaggtgggccgacaccgagatgacatttgcggatggaccactccgcaagcctgctttgacacccccatgttaggtgaacctcgtattaaagcaagggttacgtacgaacggcaccttctaacacaggagctaggcagtaccccaataccaacgccgctggtatcactccaccatgacatacaaccgagccc

SEQ ID NO: 672429 - DNA, 539 bp, Homo sapiens
tcacaggggtatgtggctatccagttgccaaatgacatatgaagagactgtctttccacatgtgtagtcctggcaccttgtcaagaagtcgattgattatagatatatgcatttattctgggctatccatcctattccatgggtggacatgtctgtgtttatgtcagtgccgtgctgttttaattactataggttggtaatatattttcaaacatggtagtgtgatgcctccagctttgttctctttggacctaaagtctattttgtctgaaataaatatagctatctctgttctctttttgtttgcatttgtatggaatatctttgtcagtcccttcatttacagtctatgagtgtcctttatggtgaagtgagtctctttataggcagcgcagagttggatcttgttttttatccatttagccactctatgcctgtggttgggagaatttaatctgtttacattggaagtaattattgataggtaaggacttagtagtgccattttgtgtatagttttctagtgtttctgtagaagc

SEQ ID NO: 672430 - DNA, 1881 bp, Homo sapiens
  misc_feature (294)..(294): n is a, c, g, or t
  misc_feature (300)..(300): n is a, c, g, or t
  misc_feature (303)..(303): n is a, c, g, or t
  misc_feature (477)..(477): n is a, c, g, or t
  misc_feature (503)..(503): n is a, c, g, or t
  misc_feature (562)..(562): n is a, c, g, or t
  misc_feature (569)..(569): n is a, c, g, or t
  misc_feature (593)..(593): n is a, c, g, or t
  misc_feature (604)..(604): n is a, c, g, or t
  misc_feature (653)..(653): n is a, c, g, or t
  misc_feature (663)..(663): n is a, c, g, or t
  misc_feature (673)..(673): n is a, c, g, or t
  misc_feature (679)..(679): n is a, c, g, or t
  misc_feature (684)..(684): n is a, c, g, or t
  misc_feature (723)..(723): n is a, c, g, or t
  misc_feature (768)..(768): n is a, c, g, or t
  misc_feature (770)..(770): n is a, c, g, or t
  misc_feature (807)..(807): n is a, c, g, or t
  misc_feature (842)..(842): n is a, c, g, or t
  misc_feature (998)..(998): n is a, c, g, or t
  misc_feature (1672)..(1672): n is a, c, g, or t
agtggttgtggttgttgtttgttttttgtagtgttgtttgtttgtttgctggctgcgtgtgtctgttgtagttcagttcgtctatagtcgtattgcactgttgtatgtggtcgttgttttgtggttgttgtgttgttgtggtttttggtggtggttggttgcgttgttgtgtatgttgtgtgtgatttttaaggagaagaatgtataggtcggattgaatagagacggaggacatgcgaaggatacgtagaattaggtagcgcaggtcgacgctgtcagtacggagacacgaanaaaaanagnggacccgtaatcaaagagaagtagcttgtgttcgttgagctagtccgttggtctcgccttaaggtcagttccggaacatgtgttgtgtttgtgttgtaggcgctgatgcgcctgctgggttagataggatcgatttattgtgttggttgctggctccctcctctcttgtggttnttgggtctaggcgacacgcctctccnctctcctgctctggtggttgggttcgttggcggactggacaacactcgcactctttggngtctgtngtttcgacactcacaccgctagcncgctgcggtgncgtgggtctttcttcctacttgatatagtgttgggtggcttcctcttcntatttgatgnatcaacgacnacgacnaagcntcattcgtgttcgtttgttgtggtgaaagacgacaccgnacccgaggtgttgctgctctgctctgctctaaggctgacttatgngnagcgagcacgtctcttgtgtgggggttgtgtcggcgncccacgccacatctcctctggctctgggctgtagntagtatcgcctgccgccgcacactgaaagttattgtcgccgtgtgctgctaggtagtatctgtgtctcctagcgatagttaggttgttgccgcggcgtctcctcccgcgcagctgtgtccgcttggtgttggtggtcgagagcagcacaggagagnaagaggcgctctctgtgtcgtttgttgtctgtccgtgctctcacacagcacgcacacccatcgctgccgtcctccttcctttggtttagtgttttttatgtgtgttgtccatgcggttctaccgcccctcctcctgctgtgagttgtaatacgtgcttttggcccgcgttgacacacacactcacgtcttggggtgggccaccgcctgcccgtattgtgcgcgagtgctatattacactctcccgtgggtctatgtgtgcgccagaaacatagtcacccccccgctcctgtctgtccctcgcctctttgcgcagtgtcgagactctctggtcgtctctggccgcgcgttgtctgtttagtttgctgtggtcattacttgtggtctccctcgcccactggccagttttgtgtgtccgagttgtctccgccccctctctggtgtgtcatcacaactcgaacggccgatatatcaacctctacgcctcctacacctgatatagacccgcttctggcacaatcccttgtgtctctcacatatctggcgagatcatctatgaacgccatgtctctctctctctagactatctcaaccgtgtggttcaacacctcagacggagctcactttctttatagatataatcactctgtctgtctgactcgttctctgtgtcctntactcgcgacacttataggcgcacacactctctcgttgtgtctgtagactgcgcgggagagatacatacatattcttgtctgcaccgcgctatcaacaaaactgctgtgtaatacaatgtgttctcccactcacacatcgcagcggcttctttgcatggcattacaaagagacgtgtctttgctgtcacaatcaatagtcagagaaata

SEQ ID NO: 672431 - DNA, 186 bp, Homo sapiens
gagagctggacgatggagcagataacagaaaaaaatgcaaatgtgaaaactcagtgttccagaaaaagagacagagagaagagagaaggaaaaagaagaagagaagaaagggaagaaaggaaaggaagaaagaaaagaaaaaaggaggagaagggggagaaaggcagtcaagggcagaagggttaa

SEQ ID NO: 672432 - DNA, 579 bp, Homo sapiens
caacttctggaattcggaaaagaattctaaattcacgtcttctgacgatcacagcactttccctgttcatggaggcccgttcactccttgtacagtcagttttctaagggcagggcgtggaggtggacttcctcccaggagtgggagctggatgaacagtgaagagtaaagccacgggaagccccagtcacgacactcacagtgtaacacagtgaacagagacaagcaccggaggaaatggagatcaaaatgtcactgccgctgtgtgaatctgtagctcaagccccattcaaggggagcctcatttttgacacaggcttgctggtttaaccaaatccctgttgactcttaagctgcctaagcggtttacaaggatgagcctccattcacaacaatttctatttcaggaaaaaccatggggatgggcgcggtggctcatgcctgtaattgcagcaccctggaagggtgagagtggcagactgtctgagcccagcagttcaagaccagcctgggaacatagtgaaacctcccgttctaaaaagtacaaatggcagggtgtggtcagctgtatccctgatt

SEQ ID NO: 672433 - DNA, 447 bp, Homo sapiens
  misc_feature (32)..(32): n is a, c, g, or t
  misc_feature (300)..(300): n is a, c, g, or t
  misc_feature (366)..(366): n is a, c, g, or t
  misc_feature (409)..(409): n is a, c, g, or t
  misc_feature (429)..(429): n is a, c, g, or t
aggactgattcacgcaaacccgctcaggagantccgttccgtcttcaaaaaacccaaaaagaagaacatggcggcactcccacccgatgagctgaaagagctcatggtggcaatcgcaattgccagcataaaaaggactacccgctgcctaattgaatggcagctccacaccatgacccgacccgcagaggctgctaccacccgctgggctgacatcgacatagaaaagaaggtctggacgattccagctgagcgcatgaagaaacgccgtatccacatcgtgccgctaacagaccaggncctagccctgctttgcagcaattcaagccctacagcgggacaccggggagttacgtgtttcccttncagaccgttaatccttggaacccacttgcaacagccaaaccgncaacatgggaattgaaacgnattgggatttggaaggac

SEQ ID NO: 672434 - DNA, 185 bp, Homo sapiens
gactctacaggatccttacacggtctgttaccacgttgcttcatccaggcatgtatcggttcagaaacgaattcttgccgtgcgctgcgcttgatggaaactaccgtgcgccggtagaggtggcccatgctaccgacgttacctggcatcagtatgacatgatttcatggcataaacaaattttt

SEQ ID NO: 672435 - DNA, 409 bp, Homo sapiens
ggatcccataccataacctccatctaaagtcaagacaaagaaagaatcttaagaactatgagacaaaagtgtcaggtaacccatatgttaatctaacttattagactaaaggacatttttcagcagaaatctcacagatcagaagggattagggtcctatctttagctgccttaaacaaaataattgtcaggcaagagatttgaatccagcaatcctaaggttcataaatgaaggagagataaattattttacagacaaatgctgacagaatttaccaattccaagccagcactaccagaaatgctataggagttctaaactcttgaaacaaaaactcgaagtacacccaaaaaaaaccttcttaaagcctaaatctcacagggaaagcaataactgacaatggcggga

SEQ ID NO: 672436 - DNA, 253 bp, Homo sapiens
aagaagacaggccccaaacaaaaccacccaccaaagccacaaacaagacttggcaagagaaaggagctgaaaaggctttcctaaatctccagtctgcatccacctcttttctttttctttctttttctttttttcctagagacagagtctcacttcgttgcccaggctggactgcagtggtgcaatcacagcccactgcctcgaactctcaggctcaagcaattctctctcctcagcctcctgagtagctggg

SEQ ID NO: 672437 - DNA, 199 bp, Homo sapiens
ctgctcctaggtgatgttaacacagagatgtggccaggcgcgtggctcacgcctgcaatcccaacaccttggaaggcaaggtgggcggatcacccgaggtcgggagttcgagaccagcctggccaacatggtgaaaccccgtctccactaaaaaatacaaaaattagccgggcatggtggcaggtgccccaatcccagc

SEQ ID NO: 672438 - DNA, 157 bp, Homo sapiens
catgtcgggcatctgtgaaagcaatgcacacgacttgtgacatatatgcaggcaactatgattctggatttaggtcctagcttgactttcctttagtacaactgttgtgtgattacgcaagcgacaaaactaacgcaatcctggctagacgggatac

SEQ ID NO: 672439 - DNA, 132 bp, Homo sapiens
tggagagcacgactaggcacggaggtcagacaggcagccgggcaggatgttagtggcccagggagagccgcaaacctggggacgcaaggggctggtcggcaagtgccccgggaacacccaccccgtacgagg

SEQ ID NO: 672440 - DNA, 109 bp, Homo sapiens
ctgagatcaagtgggcgacagagcaagactctgttctcaaaagaaaaaaaaaaagggcccttactataggcggggggagattgttaaagtgggttatggccatttgggg

SEQ ID NO: 672441 - DNA, 170 bp, Homo sapiens
gcacgaggctcttggtacctcagcgcgagcgccaggcgtgcggccgccgaggctatgttcgagtccgatttccgcactgagttctacgaggtggtccagagccagagggttcttctcttcgtggcctctgacgaggatgctctgagagcgtgcaagatccttcaggcctt

SEQ ID NO: 672442 - DNA, 197 bp, Homo sapiens
aaaatctcgcgcggccgagtaccctatattcttggaagaactttattgaaatgtcgttgacatactgtgcaatatcacccatttcacatgtacacgttaagtgatttatgtatatattcagagttgtacaaccgtcactacagtcagtttctgttatacgtattagtttatttgagatagagtttcgggtaccgagc

SEQ ID NO: 672443 - DNA, 1072 bp, Homo sapiens
gccacaaatagtggaagacggacgcagaaaggtggaggaaccacccccagcaaaagacgagtgtaggggacgacacgacggagtggtgagaggacgacccgcgcgtgggtcgggggggggcaccacgagacgaggagcgaggcaagaagagcaccggcagagtgacgcactaacgacgcgcaccacaggaggacagagggatgactaactctcggggggggggcacacaaagaaagagagtgggggcccgcgccttctcacggggagagagagcatgatcggtgtcgagagagggggaggccacacccctgctggtgggcgagaagaaacagatatctagtcgcagggcggggggattgagtataaaccaaaccgcatgggcgggagtatctatataaagaagagaggcacgcacagatcggacaaaatcttgcctccgagaaaaaagaaaaaatgtgtgcgcccacaagagggggcgcgcacacagagagaacacagaggagcgcacaacacaccgcgtgggcgcccacacacaacacacgggagggagctctccgaaccgtcgcacacacccaggggggcgcacgtccccactcactcttttgagggtggggccaccagaaagaatttttcatcacttatctcaaccacggaggattctatgtgagacgaagttgcgtctccccatgagacacacatgtgggtgtcgcaccctgtctctccccaacaccagggagcatgttctgtggggcttggggggcgacacaccatgcgtgccgcagagcactccgcgcaggcgagtacgcctgagcggtgtacgaacagatctccccccgacagcggagaaacctcccctgcgtctgtgttccaccacggctgttggagaggtcccagcgacggcggtgggaacattcttcctcgcggagacacacgggcaacttgggcacgaagaccccctcgggagaagaagggggggggggggacccccgaggccccgcggggggaaagaacccccccccccccggaaaggggtttttttcgggaaaaaaaaaacacccttttggggcccgga

SEQ ID NO: 672444 - DNA, 763 bp, Homo sapiens
actgttataacagcaacttcccaaaaggcatgtaactgcgctatgtaggggcacttctatgacttgagtaatcgaagaagaagcttcttgggttgcggaagaagatataatccaagagtaccgggtaaaaggcaaggctttgtccaggtgaatcagtggctatcctggttagaaaactgctgcagagaagacagaatcagaggaacgaagctgactaaagaccccagccagagccttaaatggtgcagagacatactgtggctatgatgtaactgcatttgagctaaccactgcgaaaatgcatcccgctgtaatgtttccacacctatttcaaagcagaagcgccgtcagatcaggatgccttccgtgcataaggttttgcgtagtcgtaaggtcttaatcatagtctaccatcgaatataaaggagtatctctaatgtcagatagtatattagcagcatgcaataagttactcagtaagttctcaagcagaaggcagtctattgcaaggaccttctatgctgccagttatcactaggctgtctgaagctacgacccactgaatagcaacactgaatagctgtagaaatgcacttgtgctccgtactacttgcacgttggtgcaataatttgattatccatggggttgtcaccgcaaaaattcttacctgacactgatgggctgtggcgacatagtatttaggctgaattctagctccactaaggggctcagttccgaagtctcatccctgactggcagtca

SEQ ID NO: 672445 - DNA, 368 bp, Homo sapiens
ggtcgactctagaaggactccccacatctcgactacgtaaagctggaggaggaaggggagtttgactaatagttctatatgtttgtgtcaaatttttcattaactgtgtatagtgctcaataccatattcatgaggggaatgtggaggactgaaagctgacagtttggacttttctttttgtacttgtgtcatgtctctcgctaactgatccattgctgtttcccaggatgtatgggatttagagtacttttgccatgctatagaatattcactttgtcatctgttataataatgcccttcagttctgtgtccagtctgaccaggttctatggtggtggtggtctagtgtcgtcttggagactgacgt

SEQ ID NO: 672446 - DNA, 192 bp, Homo sapiens
catcagtactatgagagcagcaaatatagagggaggagcaatgagacgtggcagctctcgtctaggttcggacagtacaggtagaatacctttaatccgaaaatccgaaaccctccaaaatccaaaactttttgacgcacgcaaccatgaccactcaaacggaaactgctcatggacgttttccaaatttct

SEQ ID NO: 672447 - DNA, 234 bp, Homo sapiens
tccagtacccgagcatgcatgcctgcctgccggtcgacgtgtatacaccactgccgtgcgtgcctccctggaacaagttccggcgagacatgagcagccgtcgcagagctccaggtttcgttcagctggagcctggtcgacgtgtattcaccactgcggtgcatgcctccctgtacaagttccgtcgacacgtgagcaccgtgctgacctccaaatatcgttgagctggagcct

SEQ ID NO: 672448 - DNA, 558 bp, Homo sapiens
  misc_feature (124)..(124): n is a, c, g, or t
  misc_feature (142)..(142): n is a, c, g, or t
gggtgggcaaatgctggctcactgccagctacaaatggttttacatttgtaaatggttggaaacaaatcaaaagaaaaacaatcttttgtcattcatgaaaatacgaaattcaaatttcagtgntcgtaaagaacacgttantggaacacagccatgcctattgacttctggattgtctgtagctgctttcagactacgatggcagagctgaagcattgtgacagttgtgtggcccaaagagcctagaatattcaccatctggccttctatggaaaacgcttgttaacccctgctctaggtgattctgacacatgcaggtgagaacctgctctgtccaatacaggcacaggccacatgtgactatcaaacacctgaaatgtggctggtacaaaatgagacaggttgtgagtgtaaaatacacattggaattgtggccttggtaagaaacacagactgtaaaatatctaataaccttttacattaaatatctattgaaataattgtattttggatgtatgaaattcaataaaatctattattgaaattaaaaaaaaaaa

SEQ ID NO: 672449 - DNA, 253 bp, Homo sapiens
cactgagcttgatcctctctaagcactaccccattatggcctaaacctcctcagtggaccacgggaaatcatgtaggcacaagggtttccactgatacaaacagacaacaaggccctccccataggttgagatatttttgatacagaaggcccaggccccccagatatggcttgctgccagcaagcagcaaggattctctcgtgggtaacgctgtagccaggcaggaccagcctcttctgggagacccctctc

SEQ ID NO: 672450 - DNA, 393 bp, Homo sapiens
tcacccagtctcatctctccgcagacttcagagtatcgacagagccgaaacagacacagcacttctcttcaactctatgcagcttctctccacttgggcaaccaatcttctatgcaatgcaggtcgagtggaactatgtacacaactcatacaactgaatcgaatattagaggtcactcaggaactagaagaacaccatggtgtggatgagcccagcagttcccttccccacaacgtctgcctccaggtgacccttcaacagcacacaggcagcacgaacttcacactcagcactctgctctacctatatccccctttcaaacaggcgacttatttttctctgtactcaagcaagtagtatcacaggcgatctggcagagggaggctcaggac

SEQ ID NO: 672451 - DNA, 296 bp, Homo sapiens
gacgaaccacgcagcagaaggtgagctgcatgctcgaagcttcatctgtatttacagctgctcccccaccccccgaccattgctccaattaccgcctgaactcacctcctgtcagatcggcagcagcattagactctcacagaagcacgaaccctattgtgaactgtgcaagaaaggtatgtaggctgcccgctccttatgagaatctaacgcctgatgatctgtcactgtctcccatcaaccccagatgggaccatctagttgcaagaaaacaagctcagggctcccactggtcg

SEQ ID NO: 672452 - DNA, 1036 bp, Homo sapiens
gggggagggccaggaggtcggtctggtggtggtcccccaggtccagctccaggtctgactcctggtccccctcctcgtggatcgctcacaagggtagcgcccgcctgcacactccagggattgcctccacctcgtcctggcatgactgcgacccaacggttgggtgacatcccactatggacctgccacgccacctggggcgtgtgaccacgcacatgacgtcccattgacccaaaacacctggaggctaagaacgtgcacccgaaacacaagcgttgacttccagagatgccgaaggacggattgattaccaagttgaagaatagctagttgagtaagaagggcgagaagaaagccatacaggtgacccaaggcgacgaggagttcactaaatcctcaagggaggagatggacatcggatttgtggccctacttggcacctggagaagtaacgtcgggagagacagtagagaccgcggggcattcacccttggagtgcgatccctcgccgaacaggcacaccgctccacgcagaggaagtgcaattaccctgcagtggtgggccattccttgtgcccaaagaaggacaaggcaagcacccaaaaacatacgtgcggcacgcggtcacagggataccccatggatgcgtcagaggataaacaaaaacttacacgcggatggaactagggtcccatacactagaacgacgccgttcgcaccacctcggcccagccggcacgcaacttgcggacaccgacggaactgaccgctggcattgccaccgcacggcaactagcaccggacgtccagccaagccaaacacaaacagagggccctaacccatggagtcccacagccaacaacaggcgatgaggcccccccagatagggcacagcaacacaacgaaagcgggccatcacatgagcttcacaaccacgcggataccgcacgttgacacagaagacacaggcacacgggcgcacatacccccaaccacgggtccacacagacgagtgacttatacgacccatacaaa

SEQ ID NO: 672453 - DNA, 107 bp, Homo sapiens
cgcgtcaaagcagctcaggagggagaagctgctgtgctttcctgaagcagcaatgtgttttcttgctgagcaaccaaaaccaagatcctgatggacagccccgaaga

SEQ ID NO: 672454 - DNA, 925 bp, Homo sapiens
  misc_feature (299)..(299): n is a, c, g, or t
aatgacgaaccgctaaacctcgccttgtcttaatctcatgatctagcgtagaggtgaatgtggaatgtatttaggcgaggttgctaacacccaagaaacacttagtcagttgaaatcatctgtttacagtacctatgatgggccactctggatatttgcatcaccactgactgaagagacgccaagatacttgtggcatgctaaactcgtgctggcatggtacctcccatgttatcgatgacctgttggaaaaggacttgtagtagaggactcgtaagtaacaattcataatcctagtntgtctaagctacatataaatcgcctaggtctcgtcggacataacctcgacatattataagggaaattgggtcatgcgtggccctaataggtcgtgtgtaacgattgcacgccagaggaagcaatactgggcgcaacgcgaactggacaggccgtacataatcttgggggaatcatggctggacatgcactaccggcagacgttgaggctgagaatcggatttggtgcctataggatacttctctgtgccttataggcctaattctctcggatgagataccgctgaatgaatggggattctgggggctgtggttcagagttgtattgagcctaagaggtgcttgggaatatggatctggagttctgaattgtgaagactggagcaagcgggggtagcccatataaggagtcgttctagccacggctggggtgcgatgttccccctgtgagtaatgtttgagtcctgcgtgcccaactctccagtgttgttatgaaaaaacgggtacggcacttaagataggttggtgttccagaagaaacctctggatactcttgggaactcgttaacccgctttttgggagcgtagaccgggccttccaacgaaggacgctttttgaaaccctctg

SEQ ID NO: 672455 - DNA, 259 bp, Homo sapiens
  misc_feature (107)..(107): n is a, c, g, or t
  misc_feature (109)..(109): n is a, c, g, or t
  misc_feature (161)..(161): n is a, c, g, or t
  misc_feature (176)..(176): n is a, c, g, or t
agggggttaaagggaagttcctggggtagaggagggcatgaatccctggctagggctcccatcaggggcctgtgtccacggacctaggtagatagccatttttgtcntnccgcccaaatgttggatttcccaagaccaccctggtctgccacagcccctcnacctgtgctatcccnactccccagaccctagcaggcagacacacaagcggctggacttctagaggaacacattggcagaagcagacacaacgcctgga

SEQ ID NO: 672456 - DNA, 533 bp, Homo sapiens
  misc_feature (12)..(12): n is a, c, g, or t
  misc_feature (45)..(45): n is a, c, g, or t
  misc_feature (53)..(53): n is a, c, g, or t
  misc_feature (192)..(192): n is a, c, g, or t
  misc_feature (206)..(206): n is a, c, g, or t
  misc_feature (496)..(496): n is a, c, g, or t
agtggtaagaanaggaacaaataaagccccaaaaatcccacctantttaaaanaaacaggccagccaggaaatccagggagtttaaaccctcgaaaacaacagtattaccccaaccgtacagaccccctattccctgttccaggcaagttgtcccccagtaaccgtcccttaccagcattgtttttttaaantccaggattccagncccaagatcatgcattccttttccacctgagttgtccgtgtctctttagtcatctttaatctggaacgattcctctgtttttgtctttcatgacattgacattttttatgagaacagggccagttagttaagctgcataaactctcttattttgagtttgtctgatgcttcttcctgatgatattcaggttatgcatttttagtaggaagactatataagtgatactgtgtcctccaggaggcatgtgatgttcctttgtcccattattggtgatgttaattttgatcantttggtgaatgcaagtgtaaaacatttgcaaggtaaa

SEQ ID NO: 672457 - DNA, 337 bp, Homo sapiens
agactgacaacagaggttaagacacgtgaacttcgaactatgtgtctgcaagtagcactgtgcagctttgtattataatccacacctactactcaataccttagaaaatcttcgcttccctactaatgtcgaaccagttacaaatcatataattacacagatggcttaactgatgtcgactgtttcttgagggcttcatgacagaaagatgagtgttctcggactctgtgctcttattgatatggaacagataccccaagttataaatcaggtaactggacagatatcgccggcttatatccttttatataacggattgaaaagagcatatgcctgc

SEQ ID NO: 672458 - DNA, 267 bp, Homo sapiens
tctagcaggacctggcagctatccggtcaattgtttaaattccttacagattctggatattcgaccttgattggatgcatcatttgtgaatattttgtaggttgtctgtttactctgttgatggtttcttttgctgtccagaagctctttaattaggtcccacttgtcaatttttgtttttgttgcaattgcttttgaagacttagtcataatttttttcccaagaccaatgtctagaatggtgtttcctaggttttcttctaggat

SEQ ID NO: 672459 - DNA, 732 bp, Homo sapiens
gatcgaaccactgctttccagcttgggtgacagaggtgagatcctgtctcacaacttctacaaacccgacacaggaagaaaggagaccccattctatcccaacaacatattctgataacacggtcagccggaaggtggactattcttatcctaccaggcttgtcggaataagtctcccatatgagataaaccgtggactactccggaaggaggagaaccacttccggatacaataggtctgggctgagctatgatctcaaggagagcttcctagggtggatcgtgtgagcacaaccagatatttacaagaggaaatagacgtgagacacacgagcatatttcacctccgcgtaggcataatcatcgctatccccacggagtcaaagtatttagctgactcgccaactccacggaagcaatatgaaatgatctgctgcagtgctctgagacctaggattcatctgttcttttcaccgtaggtggcctgaatggcatgtattagcaaactcatcactagacatcgtactacaacgaccacgtactacagttgtagactcactttacactatgtcctatcaataggagctgtatttgccatcataggaggcttcattcaactgatttcccctatctcaggctacacctagaaccaacctacgccaaatcattcactatcatatacatcgggttaatctacttattccacaaaacttctcggctaaccggaatccc

SEQ ID NO: 672460 - DNA, 461 bp, Homo sapiens
cggccaggcttggcagggccctggtcgaccaccccaccactgccctggccggactttcccagggcgttggtctcctggtccctattaagtcggggctgtcctgggcttggagcccaggttcagggctgtcagccccttgccagctgtctgagctctctgcctttctagtttattttcccccagctcttgccctgggttagctctctcccagccctccactctgtctctgtctccgactccatctctggcagggctgccactgtctctctgtctctctgtctctccctgtctctctgtctctgtctctcttgtttgtttcaaggcgcggacactgattgtgccttatgaagttctaactggttttgtgtcaggaagatctttctcgccgctacccagcctggcgtgacggattaaacatcaactagttaaataaaaattaatatcaactgcaaaaaaaaaaa

SEQ ID NO: 672461 - DNA, 269 bp, Homo sapiens
  misc_feature (94)..(94): n is a, c, g, or t
  misc_feature (246)..(246): n is a, c, g, or t
tgaccttgtatgtgacatggcttctgaacccttaggagagatatgatttaaagctaccaagatgctgtatatgcaaggcgtgcgaccatcatgnaacctacccgggcatcccactcgttgtgatttaagagcaagccgtggaaaggctgaacatctaagctgaagataacagttagtttgctctacgttcactcctgcaggaggcaggacagtgaaagtcagaataaaggcaaaacagtggtaacnttggtggtgtcttgaggtcacgt

SEQ ID NO: 672462 - DNA, 484 bp, Homo sapiens
gttttttttgcgttaaattttgaatatttcattttttcctttgacccaagtcatacagggagggggccatggaggaagttgcggcttttgcaaaataaatgcccacttgttatccgcccatcatacgttcccaataacattttttacttatttacactggccatacatttcccaaatcgtttttttcaaaaagtgaacattatcgcctgaatctttagcccatccttaaaagggaagcctacctgaccagttactttttttctatgttatacaaaaaggctcatattgggtttcattttctcacataagcaattacattccggtggaatgaaaaaagtctgccacaccattcctaaatttttaaaaaactcaaattgctctagcatttataagtttgactgccccctactggcgacgtataaaacgtatactggtcaagcaaatttagagactttggcaggtgtgtccaaaaaaacctagtagg

SEQ ID NO: 672463 - DNA, 962 bp, Homo sapiens
  misc_feature (43)..(43): n is a, c, g, or t
  misc_feature (62)..(62): n is a, c, g, or t
  misc_feature (73)..(73): n is a, c, g, or t
  misc_feature (78)..(78): n is a, c, g, or t
  misc_feature (139)..(139): n is a, c, g, or t
  misc_feature (147)..(147): n is a, c, g, or t
  misc_feature (220)..(220): n is a, c, g, or t
  misc_feature (244)..(244): n is a, c, g, or t
  misc_feature (324)..(324): n is a, c, g, or t
  misc_feature (329)..(329): n is a, c, g, or t
  misc_feature (346)..(346): n is a, c, g, or t
  misc_feature (382)..(382): n is a, c, g, or t
  misc_feature (385)..(385): n is a, c, g, or t
  misc_feature (389)..(389): n is a, c, g, or t
  misc_feature (394)..(394): n is a, c, g, or t
  misc_feature (396)..(396): n is a, c, g, or t
  misc_feature (398)..(398): n is a, c, g, or t
  misc_feature (402)..(402): n is a, c, g, or t
  misc_feature (412)..(413): n is a, c, g, or t
  misc_feature (420)..(420): n is a, c, g, or t
  misc_feature (430)..(430): n is a, c, g, or t
  misc_feature (434)..(434): n is a, c, g, or t
  misc_feature (440)..(440): n is a, c, g, or t
  misc_feature (458)..(458): n is a, c, g, or t
gcggggtgggggggggcggtgggagagcggggggctcaggcgngtgtgcgagcgggtgggtncgcggggggcnaggcncagtgctgcccctcctgggcaataatttagcgataaatactgcgcagggcaggggtagggnaccagggncactgccctgcaaggggtcaggcccctgcccgccctacacggagtggagcgctcgggcctcaccccgcatccnagccccagcccctcctcacttagntctttaataacctccatcccaccccagcgggtcccggggtcttctcccacgcacgcaacctcccctggctagacctgggnggggngggcgggggctggtcanctctgcttgggcccacctctcagcgccaggggggcnacngggntgggngngngggnggcccttgtnntgttgcnaggggggggntttntgtgcncactcccgtatggttganggcttcgggggctagcaggttgggggggtgggagggggggcagggctggggcacaaggttgctgggggggccagggcccggctggggtcaccaggggcaggggggtctcacggtttatcgggggcacactctggctcgggctcgggggacgcccatggtatcggggctgctgctccgggggcggggtgggggtgtgtggggctggcccggcgggtgtggtgcacgccgcggggcgcgggccgggggcggggcaggcattagtctctcagacacgccctgcctctgtgtggcactgattatgtactctactctcccgacctgctccaaggccagacagccaacaggaaggcaaaaatacaccaaaaagaattattcagtggcttctgggggaaaaatcgttaatgtgttggttcctttcaccaaaccacagcctaaaaaagtaactcacaagatcccagagcggaaacggtgcagcaggctgcggctccgactttccagatgtgg

SEQ ID NO: 672464 - DNA, 300 bp, Homo sapiens
tttttaaaataaaaagggaagggaataaataaagcgggttttttttttgccttttttacaaatctatcgccgggcgggaaacccggtttgggatatattgcccctggccctctccctttggatatgccccagggggctttatatttccaaaaacgggaaaaaatcccttttgggaaagggtcctcctatccagatggtacccaaagggtggtaaaaaaaacccgcctttttttgggatttttttttttagattttttttggggagattagccggccataaaggttcttttttgcctttta

SEQ ID NO: 672465 - DNA, 856 bp, Homo sapiens
  misc_feature (291)..(291): n is a, c, g, or t
  misc_feature (298)..(298): n is a, c, g, or t
  misc_feature (315)..(315): n is a, c, g, or t
  misc_feature (338)..(338): n is a, c, g, or t
  misc_feature (401)..(401): n is a, c, g, or t
gcacaggtgtcgtgaaacagctacccctaaatgcctcaatgggactaggagaagactcatatcaacattgtcgtactacttggagcacgttagatacgcggtcacacgttccagcactgcatacctgggcccatctgagtctattcatactgcggtgtgcactcgacataacagaagcctagttgatagaacattttgatgcaaggagggcatgctcgagcatggcgcagagaggagtgcctccgtttcaaagctattgaccgtgagggtcgttggcgatagacatgctgnaacagantctgaggcgatgaacancgctggctcatgcgacgcattgnagtgatctccgttgggggcaaacttgtgagaaccagctccagatgactcatcgcgtgactatncattgaatgtcccctaggagcacagaagtactattgatcgagaaatagcaatgagttacatgggcacattctcagtggctgactatgatgtctgatccatgaatgtgtctgcttgcctgaggtgatctgggtgagaatttgagacgctgagttaatctctcgagacgaaagtgggcgcagatgcgcgagaaggcattgccgcttgctgggcttgacacatctggagctgtggaaaatccaagctaaatttgttgcgggtagtttacacaagaataatcgggattgccatctgtacggccacccctacaggaccgaggacacagaccgattattgagaggaaatacctatgggttgacggcaaatgttcacagcatggtgtagcactttaaagaaaaaaggtatgggcgtagcaaaggccgccggaacaggcaggtaaggcaattatagttgccca

SEQ ID NO: 672466 - DNA, 317 bp, Homo sapiens
gctgagtaccgacgcagggaccgcgtctcgtgcgcctggtgctagtgtgactgagaggcattagtcatatcccacagtatgtagcatcgccccattggctcctcagccaagcacatacaccagatgtctgaacctgcggttcctctcgtactgagcaggattaccatggcaacaacacatcatcagtagggtaaaactaacctgtctcacgacggtctaaacccagctcacgttccctattagtgagtgaacaatccaacgcttggtgaattctgcttcacattgatagggagagccgacttctaaggatccaaaag

SEQ ID NO: 672467 - DNA, 585 bp, Homo sapiens
ccttcgtgctaccaagcctcgcccaatgtaagagggcccctgcctttgagatcgccacccccagggagcgggtggagggggaggggagcgggattttctcgcctcttccaaacttttcctccctgaccctgagggaaaattattgggattcccccccttgggttgataccccctcaaaaaggccccttttgattaagccggttgaaactagagagggccgggttatccacgaaacttttcagcctcccgatgcccttgaataaaaatggcccccccccggggccccaatattttccccgcaagaataaaaaagaaacccattttttaaagaaccggctttcaaggccctttttgcggtttttcgggggccccaaaaagatttggaataggaataagctttggtttttaccccccgccccccccccaagatttagaaaaaggtttcccccatattttggtttccagaaaatttttggggtagaaacctttttaaaggggtttttgaaaccccttaaaacggcttttttttttcccgcagggacccccccccctgggtttggctccaataaatttttggaaaaccca

SEQ ID NO: 672468 - DNA, 176 bp, Homo sapiens
agaggatccgaaactgacatgaggcaggtctcactatgttgctcaggttggtttcaaactcctgggctcaaaccatcctcccacctctgcctcccaaagtgctgcgattacaggtgtgagccactgcgtctggccttctaacaatgctccgtcacctgtcatctgtctatcatttc

SEQ ID NO: 672469 - DNA, 534 bp, Homo sapiens
  misc_feature (141)..(141): n is a, c, g, or t
gggggggtgggttgcgttgtttggccgtgtgggagggtctcactgcggtggggggtggtgttgctgtttttatgtgtgagttcgcccgttggtggtatgcattggctagcttgtcgcagtcgcggagcccccggcttcccnagctccgcaatgcggggatttctgccgccgcgcccccgcgctccgcacgcacgcagctccgcccccacgcaggggaggccccgccactccaaccgcgccgcgggggcctccaggctcccggcgcagacccagcccggctgcgccctgcgtcacgcacggagactcctccgctaccgcccccagccgggggtctctcgggccggaaggatgtcacgcgcctcccacaccggggcaagaggccccgtaccccccaacgcgatggaggaagcaatattgagcgcgcccctagcccccacccagcacgatcccgctcttgatccctcgctcagccctccccagggtagcgcgtgggctctgctccccacgagagcagacccagggcgcgcggccgct

SEQ ID NO: 672470 - DNA, 383 bp, Homo sapiens
tggcctcgaccttcaacgcgccgtcagaggcgggcagaaaatacccgtccgcccatatccggccaatgcgcgcgatcggtttgctcgacacggtgaccgcaagattggcagaataactatacgtcgttgtcgcgggccgggttttgccacccccgttgacagtccgcctttcgatcaaatcgctcgcccatataaccgtgccagcaaccctcatcgtaccaaatatcgctggaattgcagtgccatacctcgacgttagcagttccagtatctgcaggcgcgggccgtcgcgcaggggcccatttccaactatagcgcgatcgagctgctggccaagcattgccccaacagcaccgccgacgtgcccgccaatcgccgtgccc

SEQ ID NO: 672471 - DNA, 332 bp, Homo sapiens
actgtacatggcttgctaataactgtttggctaacccaaagcaagacaagaggcctgttctctacctggagaatgaaaacaaagctttgatggcttcttgggaagaagatggtgaaggggaatgggatggggggagtagcagagacttacccagacagcacacccagcacgaggttcagcataaaaaaggagccaatgatgatgagggggatgaagtacaaccagttccaagtgttccctgaggcatcgttgctctatgggggtgaggaaggaaagcaggtgagcactgagtggtactcaggtatgatctgacaggttgggggagaaggaac

SEQ ID NO: 672472 - DNA, 855 bp, Homo sapiens
  misc_feature (2)..(2): n is a, c, g, or t
anaagaaagacaagcaacagcacgtccgatagagaattccaccgaagaatgggattctcccatgagagccgggggaatagggaaccctgcggggagccccagcaataatgggggctggcagcacctatctctggtccgggcttcccgattgccgggcgttcagcgaattaccggaaatttggtgaccccccccgagaacgttacaatgggtaaaaaccgggggaatatagccaagtcagggtcatgcgccttacaccaacaaggggtgggccccgaccccgcagcgggtgcccatgcccccgctgtacctcggggcaaaaaatttgcccccaacaaaagggctacacccctgagggttgagaaaccctcgctcaagctcggggggtcaaaaaaaggccaccacaccctgggagcaagcatcatttgggaaacaaccatggctcccgccccttccaggaaagaataaatgccgcgcggattgcaccccccggagaagaaactctgggtcagccggccctgtcctatgtgtagtactcgcccgataatattctgtcgacctcagtgtgcccacaccctcgagagcggtcacttattgggggctcccacctagacccccgagtgtttggcaccccctcggtgttcacaatctttcagagccccgcctctggtctcagctacaaataacgccaagattttgccgggccgctattcggggcacccagtcgggtggcacgccactacatttgctaggaggtagtaggaggggggagaatcacctattgggggggagaaggcccacggcgtggtcacaacccacctatcccccccggggcaaaggaacctcttccacaaaac

SEQ ID NO: 672473 - DNA, 861 bp, Homo sapiens
agcggctgatgttggccaggtgtggatctcagacttctggcatcaaagtgatctttccatgcctgagtgtctcatagaatgctgggattacgggtatgagccactgcagccgtggtccctttccctaactttttccttatgataattgacaatccttgtgcattggatgcctttctccgagatcagtgatcagacgttgcatgtgacatttctgcctaaggtgcttctgtgccatcatgggagaatgatggccttgcaatactagactagttttaacttcacgaggaaaacaatgtttggtactccgtgaatagtcaagggactcctgtatggctcaacagtgtgtgtatatatgacgctggttcttcgttgcatccttgcgatagctttttacatgactcgttgttccagcactacagttctctatataggatatccgttggtatatgggatgtgctagtgatagtcaggctgtccagtgttagttcgaatcgaccagtggcaactgggacagcaaagcgtatcgtgcaggtcatgttccatagtgggagcgaagaggatacgggaacggggcctaaggagtagccaatcgtagtgcattcagcgaaacgtacagaggggactcatcatgtcattatagagtggcgtgacatgtcaagtggaacaaggagactgggatttcccgtggcgattagtaaagggtccaaggaacatgggagagtcgaaatggcatattggcggaaaaggcaccacttaccctccgttggggccgtcttatttaaacgcaaatgttacggccaaaattttggggcatggtcagagacgcctatggtaagtaggagcggttcctacgacattcca

SEQ ID NO: 672474 - DNA, 105 bp, Homo sapiens
tgctgcttcctgctgctctgttatgtgttcgcctatcctggaccgcatcaacatcggtcttcgcccagctgcagatgcagcacgacatcggacatctcgcgatga

SEQ ID NO: 672475 - DNA, 159 bp, Homo sapiens
  misc_feature (4)..(4): n is a, c, g, or t
  misc_feature (39)..(39): n is a, c, g, or t
tccntaaaatcactgtacatctggattctagtttgatcnttctttactatctacatgaatcattgtttttgggtctctgtacacttaatcaatttctaacaaactgtccttttctaaattctggttattaaaagtcttggaattatttcattcctttca

SEQ ID NO: 672476 - DNA, 888 bp, Homo sapiens
  misc_feature (90)..(90): n is a, c, g, or t
  misc_feature (92)..(92): n is a, c, g, or t
  misc_feature (114)..(114): n is a, c, g, or t
  misc_feature (729)..(729): n is a, c, g, or t
aacgggtgatgcgggcgcacgacagatggatcctgccatgtttcccgggcagatggctggtggtgagggcctggcgggcactcccatggngnatggagtttggtggaggcgggncctcctgaccctcccatggggcagtctgggctgagggaggtggacccacccatggggccaggcaacctcagacatgaacatgaatgtcaacatgaacatgaacatgaacctgaacgtgcagatgaccccgcagcagcagatgctgatgtcgcagaagatgcggggccctggggacttgatggggccccagggcctcagtcctgaggagatggcccgggttcgggcccagaacagcagtggcgtgatgggcggcccgcagaagatgctgatgccttcacagtttcccaaccagggccagcagggattctctggaggccagggaccctaccaagccatgtcccaggacatgggcaatacccaagacatgttcagccctgatcagagctcaatgcccatgagcaacgtgggcaccacccggctcagccacatgcctctgccccctgcgtccaatcctcctgggaccgtgcattcagccccaaaccgggggctaggcaggcggccttcggacctcaccatcagtattaatcagatgggctcaccgggcatggggcacttgaagtcgcccacccttagccaggtgcactcacccctggtcacctcgccctctgccaaccncaagtcaccccagactccctcacagatggtgcccttgccttctgccaacccgccaggacctctcaagtcgcccctaggtcctcggctcctccctcagtgtccgttcactcactggctcgcccagcaggctcaagtctccttccatggcggtgcacttct

SEQ ID NO: 672477 - DNA, 407 bp, Homo sapiens
ataagccatgatttctgcacgatggaattagtctatcaccttattcagtcacttgagcatgaggcttcgaccacgggtctccagatgctgacagtgtattcacacagtgtatcgatcccgtttagcgtcttgagtctcaaatcctcaatccagcgtgactggcaccatagagtttcagcacgtgctcttaacgctcagtgatgtataatccctgcccaccgagctgtcggattagcccttctcatataccgcggtgcgcagcttcataccagattctgtgttgatcgtccctaatgaaagcatagacctttttatatacttttctaacaatctcatagtgttgtgagcaaaggaagatgcacatgttgtgtgtcagttggtagctcactaatggtactccattacac

SEQ ID NO: 672478 - DNA, 165 bp, Homo sapiens
gggggcaggatggacaggattggagcccagagcgaactgggctgtaacagcttacggtaccgaagataacagccagggaggacaagcagggctgggctagggacagactgcaagaggcagtgtccactgggtctatgctgcattgtgtctcttgttgccatgagt

SEQ ID NO: 672479 - DNA, 155 bp, Homo sapiens
actaacaccagcgaaagctaagccatcgggctaatatccccatagccagtgaggtgacttccctggtcaccaaggcagtgcatgcatgttaggggtttcctttaccctttctataagttgtaccaaaacatcccatctcgtctcttctcttgtaa

SEQ ID NO: 672480 - DNA, 1117 bp, Homo sapiens
  misc_feature (234)..(234): n is a, c, g, or t
agcgggacctgtggggggacgccggtgctggcggcagacgacggactgcgctgggcaccgggccgccggcgccaccatggtggtgactacaggcgctgggaccgcggcttgcaagctgggtcgtagcggctgttgctggcgattttcgacaggggcgaaggcccggccgggtcctgatcggctgtgggtggcgggccgaggtgccggtgggcggggctggtgtgccggcggggnatccgtgcccaggtctggggccgacagggacccaggggtcagctgagacgcccatcgcgagcggctcgcgcggctcgagagtcttccctcataagagccgttctttcctgcggtcttcctttatttccccggggctcccaatttatttcccggggggtttggggccccccggaggggcgcttaggggaccggggtaggccctgggtcttgcccatgccgggccagtatgccgctgagttgacgagagaccctggcgaggcctgccgtcgcgggccctttgtcggaacgagggacagaactgaccttggacgctgtcggcgcttacggaggccttgtggggcatcaattcgttagggatacaatacctagggtcagagccaagcgaagccccggggactgggcgccgggatcatcggagctcgttgatcgacgagaagaagttcctatcgccacaagtttttgatcacacctaaggacaacaaggccaataaggcgccgggggagacccctagtaatccccaggtgtgtggcagggaccgtacataacaggacgttagttcctgaggggggacgtttacccagtggacccttggagaccagcgccaaggctaattcacctggaatctgacgcgagcggacacacgtggtgccctagacttgtggtgcgtcacaaccagggggagccgttgtgtcaacgtggtgtgcctttggctcctggattgctttctgttagacattgttccaaccccccacgttggccaccttaacctatatttttgtcctccacccaagggaaaaccccgttggtgaaaggggtggacacgccaaaaagcggaaggcccaacccgccgcggtgttataggccgtttcccctagggggcaa

SEQ ID NO: 672481 - DNA, 172 bp, Homo sapiens
tataaacattacacaattttttattattaaatgagaaaatctcatttgttacatcgtcacttgctagtcagaggaaatgttgcagtgttgtaagaaggtcatttttggcccaacccaggtcctcgttcctacaacttttttttacaaggaagtagtctttcaacacaggccc

SEQ ID NO: 672482 - DNA, 211 bp, Homo sapiens
accagctgctcttttaatcattaatgaagctagcctgtagtctgggaggcatgtcaaaaattctgtttcgggtttggtttaaaattgagtgtaatggagagagactgattctttcatctcagagaattgggctgtctttgagagctggggacaagaactgggtcctgtaataggacactgtggagttttttttgctgctcctcaaaggaga

SEQ ID NO: 672483 - DNA, 150 bp, Homo sapiens
caaatgtaagaaaagggcaagaggaaaacaacctaaaaagcagcctaagaaggatgaagagggccagatggaagaagataagccaagaaagagccgtataaaaagaggggagagagagttgatcaaaaggaaaattagctaaacagagtt

SEQ ID NO: 672484 - DNA, 356 bp, Homo sapiens
cacagtggctcacacctataatcccagcattttgagaggcaaagacaggagaatcatttgaggccaggagtttgagaccagcctgggcaacatagaccctgtctctacaaatttttttatattagctggatgtggttgcacatgcctgcagtcccagctacccgggaggccgacgtgggaggatctcctgatgcaggagtttgagggtgcaatgggccctaattgtgccactgcactccaggttgggtaacagacagagctgggtaaccctgtctctaaaggaatggtatcttcacattctttctctttcttccttacttggagtcttagatatcttgtttttggttacagttctt

SEQ ID NO: 672485 - DNA, 110 bp, Homo sapiens
tatcaggtgccgtgagcagggggagctgcagaccagtcttcgggtggcaggctgagcgctcaagtcttcagtagggaatggctgaataggcacagagggcaccttgtaca

SEQ ID NO: 672486 - DNA, 176 bp, Homo sapiens
ctgcacagtgtccccatcgctgacaaagggatggttatacaccagcgatcttcccaaatggcttcctactgccttgttcttcagactcctcaagatagactccaccaccatgcaccgtctgcttcaatgccatgaaccgatgaggagacctgaaagccacagtaatacagtgacat

SEQ ID NO: 672487 - DNA, 318 bp, Homo sapiens
acttgtccctgtgaggacttcattccggtgatcaaccttacgacagtgctatgtatgtggacaagccttctctcagagctcatctctcactgtgcatgtgagcagccatacaggggagaagccctatggttgtaatgactgtgggcaagctttctctcagttctcaacccattgactctgcattaagagaatacacacaggtaagacagccttatcagtgcagtgaatgtgggaaagctatcagccagaagtcacaccacattagacaccaagaaaaattcaatactccaactaaaaaaaccccatgaaaggccttga

SEQ ID NO: 672488 - DNA, 327 bp, Homo sapiens
caggtatttggggggactgagacaggagaatcccttcaacccgggaggtggaggttgcagtaagtcaagatggcaccactgtgctccagcctgggggacagagcgagactccatctcaaaaaaaaaagggaatcggacgaaaaaccacaggatgttgaagacaactgtctgaagtatttggtgagggacagcgatgtgggccctctgtgttaagaataacgtgtccggcttgggcagagagaagaaaatagccacggcccgctttcagggcaagatcgaccttttctggtttggtttggtttttctttctttttccgggccatgagg

SEQ ID NO: 672489 - DNA, 945 bp, Homo sapiens
tcatgtggccaggttggtctctaactcttgacctcaagtgatccacctgccttggcctctcaagagtgctaggattacagacacgagccacggcctgacctgaactgtggggaaaagaaagagagatcagtttgttactgtgtctgtgtaggaagaagtagacataagagactccatttgttctgtactaagaaaaattcttttgccttgagacgctgttaatctgtaaccctacccccaaccctgtgctccctaagacatgggctgtgtcaacgtcagggttaagatggattaagggctgttcagggtgtgctttgttaaacaaatgcttgaaggcagcatgctgtgttaagagtctatcaccactccctaatctcaagtacccagaggcacactacactgcggaagactgcagggtcctctgcctaggaaagccaggtattgtccaaggtgttctccccatgtgatagtctagaaatacagcctcgtgggaagggaaagacctgactgtgcccccagccagacacccgtaaagggtctgtgctgaggaggattagtaaaagaggaaggaaggcctctttgcagttgagataagaggaaggcatctgtctcctcctcgtcctgggcaatggaatgtctcggtgtaaagcccgatgtatatgccatttactggagatagggggaaaacaacctttaagactgggagggtgggaaacttgctgggagcaatactggttcttaagggtgggaagtctctgttattggcattaaaggccagcttttcttacgtggtgttaaggcgagaacttggtgagggtcccgcgagattttcactggtctcttggtggcaagcccttgaaaggcgaataaaaattggagcaagggggagtgtgtgaggagcggggattttaaaaagggggataaggaaactaagatagataagga

SEQ ID NO: 672490 - DNA, 618 bp, Homo sapiens
  misc_feature (448)..(448): n is a, c, g, or t
  misc_feature (485)..(487): n is a, c, g, or t
  misc_feature (572)..(572): n is a, c, g, or t
cggtacggatcggcggaaatggcagaggtggaggagacactgaagcgacgcagagccagaagggagtgcagggaatcatcgtcgtgaacacagaaggcattcccatcaagagcaccatggacaaccccaccaccacccagtatgccagcctcatgcacagacttcatcctgaaggcacggagcaccgtgcgtgacatcgacccccagaacgatctcaccttccttcgaattcgctccaagaaaaatgaaattatggttgcacctagatataagactatttcctgattgtgattcagaatccaaccgaataagccactctcttggctccctgtgtcatccttaatttaatgccccccaagaatgttaatgtcaatcatgtcagtgggactagcacatgggcagtcgcttggaacccactcacaccaatccagtgacgtgtgtggggggnggctcttctccccaccaaggaacccctgtgtgcaccnnnttccccagagctcggagcgcctctctcattccagtttggagcagagctgcaggagccgcaccagttcttctgaccttcagttcanttgtcgccttggagaagtgttttcttaataaaataacaaatgtcaa

SEQ ID NO: 672491 - DNA, 198 bp, Homo sapiens
agcttgtactactgtcttaccatcttctttttgttttttagggtttattttttttctttttttgagatgaagtctcgctctggtcccccaggctgcggtacaatggtgcaatctcgagtcattgcaacctctgcctctcgttgttcaagagattctccgggcctcaaaaaaaaacacacgaacacacaaaacaaaaaa

SEQ ID NO: 672492 - DNA, 207 bp, Homo sapiens
  misc_feature (2)..(2): n is a, c, g, or t
gncacatgtgagagtactgcgaggatacgaaatacaagtgtaacgtacagagctcctcccgtagtaagcaatgttctgaattggaaaactctcaggggggttctgtggctaagaacttcaggaatagaggggaatcacaaaacatagtacgaattgattcaggaatgggaaggatagctgtctttataataccaggtttttccattg

SEQ ID NO: 672493 - DNA, 283 bp, Homo sapiens
gaaaaaaagctttgagggattggggatggggaagttctccaaagggttgtatgaattttcatggaacaccaagtccaatagtttatttacccttttgaggccagtgttttggcctgcagtcccaggctcctcaaaccccatgggttgaaccaagttaaacttttggccccctgtagtgaaaaaaatatttagaaattgacttagcatttaaacccctttaaaccaatttgccagagtaattttatgtctattggatgtaataaaaatttggctttgggcttta

SEQ ID NO: 672494 - DNA, 521 bp, Homo sapiens
tagtactagagtgatgcagtctgtacctgccacagtacttatttgctcgagtgaaagctgggagagggaaaagatccttaagttcggtcacatagcttttgacaagtaaagtaacgtgtatagataccaaggatgaggatgtggataccatttcggagctattatttagtctcgccgacgagctctcccgtaaacctgtgcgctatattcttgtataagatgagaactaaaggactcatttgccttcctcgcaggaaagctaggacacgaagacaaagagaacaaaatccttacattgaacttgcttcttcccatcagcgctggcatggaggagccctcttgcaccaggtagaagttggcagcctgagctctggagccagacttctggggctaaatcctggctctgcccttcctggtagaggaacataggcaggctcccccactcctgccagcttcctcatctggaatgtgggaatggcagtggtgcctagcgttgtggttgttctgaggatgaaaggaat

SEQ ID NO: 672495 - DNA, 1153 bp, Homo sapiens
  misc_feature (141)..(141): n is a, c, g, or t
gccctcggcctccttatttgcgagacgttatagggaaggggagggcgggtggtgattagcaagcccgcgttgggtgcaacttgtgggtgtccactccgggtcccgccgccgtgttcgacgtggatagagtgtgcacggtgngtgtctttccccttgtatgatgtgtcgtggtgtgttcgctagtagagttcgtccttgggtgatgtgggccccgcccgctgtggtgcggccgtggaagccacgcgatggtcgttccgcgcgcgtgtcaaaccttgtactccgtcaaaatattctgtcttacacaacgttcttcgcaacagacacggcgcttccaacagggggaatatttatgtataatcacccgctgttctgtaaacacctaattttcgcttgggccccgcccacactgtcactgtcctctagaggttcctctccactgtcgcccccgcgttccccaacttcccctctaattcgcccactttcccctgtttaatacacatttgactcaccggcattcggcatggggtttccacacgcggaggtggccccccttggcccccgttgttgcccacttccgcaaagtgtccgcacgtgtgtggcccccccccccacgtgggtgatccttgagagcccctgctctcggcagcggtatgccactcccgaggctctttcccgcgccgcggagcctatatgtgtcgttcacacactctcgctcacacacaaaacttttcccccacactctatattttccctatgaatcccacgcgcgaaacactcgcgagactccctctgaacgcttgaccacacttcgaggtaagtatactctcccgcaattgtaaagccccccacatctttcgtataaataaattacactcacccaagacgcttcttgcacacttcactgaggactgtccccaccacattaagggctttaaaaccacagaatgccacatttcccggagacgtttataaccccaaccacactttcaccccctacaccaccccggggtatactaacggtccaatgctctgaaaatctgtggacccaaccccaagtttcaatgcccctcgtcctagaattaattccccttaaaatctttgaaatagggcccgtatttaccctatagccccccctttaccccctttagagcca

SEQ ID NO: 672496 - DNA, 762 bp, Homo sapiens
taaccagcacatcaggtccgcgcgcgcagtatgacaaggagcctttggcaagattatgacctaacaagagagtactggcgtgatcctcgaacctcatagttttctcccactggccagtcctcttgtgacatttattcatcagtacagggcgtacgattgctcctagtacattccaaaggctgcttgtcatagaagccagtgcatctataaagcaacggctcctgttaaaccggaatctcctgttctagaggctcctacaaacagtcatttgggtaccataaacagtatgtgcattaacaggcaatgcgtctcagaccacaaagtagaaagaagaagtaaagctcgctgacgtaaatcaagggctgggcttagacagagctgatctgtagaatatctttaaaggagagatgatcaacttatctgcactattctccagcctctgactcctccctgtctaccctctcccctccctctctccctccacttcaccccactatcttgatcaacttcctttctcttctgtgaacatcattggccagatccattttcagtggtatggatttcatagtctatattctattcaacttgaaagaaactggacattaggccactatgtgttgttactgccactagtgttcaagtgcctcgtgttttcccagagatttcctgggtctgccagaggcccagacaggctcactcaagctctttaactaaaaagcaaggaagccactccaggaccacgttcatcctgtgacacaccct

SEQ ID NO: 672497 - DNA, 592 bp, Homo sapiens
ggcaattaaaggctgcagtgggccatgattataccactgcactacagcctgggcaacagagcaatgacctccagctaaaaaaaaaaaaaaaaaaaaaaaaatgtcaccactcccatcttaagcaagtaaaaagcggagtaaacggaaaaataaacagttcttcttagatccataaaagatgggaggtcaaagagtaacccccaaattgggaaccacaggtcaatgcaaataatcacaacttatttattgggagcacaattcttcatggcaatcagtgctgaattgggaaaacctaaagctgtaattcacaacttggctggaggcttggtggagcacaatgtctgtgagataaaaactttatttggggaggctccccacaagtatgtgtagattaacctccgggggctcatactaggtttctcacagtgaattttggcaagcaatcctctcatgctctccaccaaggggagagaaaaaggacccatttttgaaatgccctaaaggcattctgttctaaaaacacaaggtcgtcccctccaggaagaaaattactataagtggaagcctaaccatgctgggggtttataaccag

SEQ ID NO: 672498 - DNA, 949 bp, Homo sapiens
  misc_feature (2)..(2): n is a, c, g, or t
  misc_feature (250)..(251): n is a, c, g, or t
  misc_feature (391)..(391): n is a, c, g, or t
  misc_feature (468)..(473): n is a, c, g, or t
  misc_feature (504)..(504): n is a, c, g, or t
  misc_feature (510)..(510): n is a, c, g, or t
  misc_feature (539)..(539): n is a, c, g, or t
  misc_feature (580)..(580): n is a, c, g, or t
  misc_feature (663)..(663): n is a, c, g, or t
  misc_feature (665)..(665): n is a, c, g, or t
  misc_feature (673)..(674): n is a, c, g, or t
  misc_feature (683)..(683): n is a, c, g, or t
  misc_feature (689)..(689): n is a, c, g, or t
  misc_feature (695)..(695): n is a, c, g, or t
  misc_feature (705)..(705): n is a, c, g, or t
  misc_feature (798)..(798): n is a, c, g, or t
  misc_feature (805)..(805): n is a, c, g, or t
  misc_feature (843)..(843): n is a, c, g, or t
  misc_feature (876)..(876): n is a, c, g, or t
  misc_feature (932)..(932): n is a, c, g, or t
angctcttctacacattttacaaatgattcttaatcctcacaacagatctttgattaggtttttaaggcaaaactagttctttccaaaataacctaatgatcacaaaacatatagaacatacaactctgcatcttgactatggtgcgtaggtctacatgtgataaaatgacattgaactatacacacatcatacaactatcaaatccctccttttgagattgtactagaattatgtaatatgcaaccatnnggggaaactgggtaaagagtaaattggatctctctgtactatctttgagtagtgtttaggtattttataaaaataatgtcctacagtttgggtttgtcaaatggttttctcatagttagataggggttatggcttttggngagaaagaccacagaggtctgtagtatattttcaactgtaatctatttcaaaataaaaagttttaaaaaaattcccnnnnnngggctgcttagtaaattgcttcgtcctttcncccccncccccccccccccccccacactccccccnccccaccctcctattaattccggtaactcgggttgtttggngtgtggttagtgaaactaagcttaactatgcgcttccagcacctcgtatctggtacttctgttcaacagaaagccttgggggngngggggggnnggcgtggtnaaaggnacaggnttgggaaggncgctcggttccttccaatccaaacgagaggcttctgattgtttattctcacaccagagccgtgaccgagacccagaggtccgcttccggccanggccgancagctgcaccgtgcgtaccgggaacggtcaaggcgcantgggaaccgctgcaaaaggcctccgggcgtacnggacaggtcgcaaggtcgggggtcccacctagcggaaattcacggaggccaacccnccccctgccccgcgagg

SEQ ID NO: 672499 - DNA, 790 bp, Homo sapiens
  misc_feature (745)..(745): n is a, c, g, or t
cctacaacgcgccgcgggcccccccccgggtgtcccctctttgtgtgcgcgcgagggacactcgcgcccccgctcataatctctctctgctgtgtgtgagcgcgcacacacccccttgtatcacgccgcgatgtttgtcaccctgtgttgcgcgcgcgggttgtcccccccgcgggcagcatcattattattgtccgcccccctccgccggggaggaattatttattcttcgccgcccgctcctccttgttgccgccgcggcgcccccggccgaggatgtttgtctccttcgccgaccaaaaaaacttccacactggtgccgccacgctggtcaatttgtggtcttcgccccggcacagcggggtccggcatggtaaacattgtgcgggtgcctttcacaccccccacgttgggggcacccacccagccacttccgtgttggcaggcagccacgcggtttggcgtctctctgcgagtctctctctattggcccgcccaccgcgcggtttagttaggcccccccccacaccacgcctcgcattgggtccgcccccccctcacgtgcgcttgtgttgtgtccaataaaccatgtgaggccgccccacgcagtatgttgtgtgcgaagacgccaccaacggtggtgttggcaaaagttgcgttacacccccaccggtggtaccgcacgggggccaccaccctcactctgggtgtccgccgcccccagccaggcagtgtgataaaaaantgtggtggggcacgcactgtttccgccacccatccatggtacgag

SEQ ID NO: 672500 - DNA, 210 bp, Homo sapiens
tgtatgtgatctactcgctacagactatctcaaggaactgtccttcagatgacacacaagtcaatatttctgtaccattctgcagcagactcctgaaaagctgtcgtctaccaatgtagtactggaatatacatcaaaagggatgcaaatcaagaagaaaaaagggatgttctagttttatttctagagatagcagcaactattttagaa

SEQ ID NO: 672501 - DNA, 121 bp, Homo sapiens
ccatcaggacaccatggcagctttgcatgaccctgcctcccagtgtcttcctgcgtttttccttaagttgccttcttctttggttgtttccctacttgttttgttagactgcgggaggcag

SEQ ID NO: 672502 - DNA, 708 bp, Homo sapiens
attccaacactcaaaattcaggggtcaagtccaacaaaatgaggtatgtatgtcacatgtacatagtactaatgatggcattccgtatctcaaagaggccaaagtgaatcacaccagttatctgaagggtcctaaaaatagctcagtatgtcctaatgcccatgcacctactttgacataggagtgcaataaatcctgtggtcgatgctttggttttccagagcacgctagatattacgatgtttgaaatggatcatttctacttgctgtgctttttaaccaataatctgatgactatagaacaaatgatccaaaatatggatatgattggatgtatgtaacacatacatggagtatggcggaaattttctgaaaaatacatttagattagttagtttgaaggagaggtgggctgatggctgagttgtatgtcactaacttggccctgactggttgtgcaaccattgcttcatttctttgcaaaatgtagttaacgatatactttattctaatgacaggcctttctaaaatttgtgtccactgcattctgtgggtattcactacttcaagtcccgtcagaacttcgtagaccgacctgaagtttcttttgaatacttgttcctttagcactttgagatgaaaaaccacttttaaggtactaagtcatcattgcccttggaagttcctctgatggggttggaagacgtc

SEQ ID NO: 672503 - DNA, 333 bp, Homo sapiens
  misc_feature (197)..(197): n is a, c, g, or t
cagcaacttttgcatttttgtaggggcggcaggcccggttttttttttgggaattcggcagcccctttgtttgcaagggtttaatcccggggattgcttcctttgtccggggagggtgcgcctcagggctttaccccaatgcttttgccccggtggcccagtttgtaaattggtttgatttttttttccaacgttcngaggacaacccctgtccccccccccgggacccggacccggccagcaggacccctttagaagggttgcccgggtcccctcagttgccccccccccccttttccagcttttggcccaataaacatttttttttttgta

SEQ ID NO: 672504 - DNA, 183 bp, Homo sapiens
ggctaattttgtatttttcagtagagacggggtttcgccacattggccgtgttggtcttgaactcctggcctcaagcaatccgcctacctcagcctcccaaagtgctaggattacaggcataagccactgagcccagccctagttcagtatcttttatgtaaattataaacatctgcaccatt

SEQ ID NO: 672505 - DNA, 385 bp, Homo sapiens
  misc_feature (188)..(188): n is a, c, g, or t
tattcgttccttttgcccggtgccaagcttacggaacggttggatcacccgtcgccagagtttgtgacccgggggtcaacgcaaaagctgggccgcaccgtgggggggtgggggttttatctgtgctgtaacacgaagagggggggggatgtcggggttccctaggtcggaacaccatccggggaccngggggggtcctttggggggggccttggtccccccttttccaaaccctttcaggcccggggttcccattggggtttggggggggggccaacaagccaggttgggggttccttttttatccccctacttgaacccttttggccccggctttttcccttgtttgaaacctgattcctaataaagaattaataattcccca

SEQ ID NO: 672506 - DNA, 790 bp, Homo sapiens
tggacttataggtatgtattatctatttccgtttgatgacggtgttcgcctctgttgtctaagctggagtgcagtggtgtagatctcagctcactgcaagcttggccttgcaggttcaagcgattctcctgcctactaccttccaaggtgctgggattgcatgctgtagagccacgacccagccccagttgtgcatttctaacagccttctgggtatcgtgatagctataggtaattaggatgctatagggaaaaatatacttaaggtcaggccattgtttattcttccaagggccatttgaatatttgtgaaacacgtgcatttctttagctgctagttaaatcccttatattcagtgggtcgtatagcttttcctcatttttctttatccttgtctctctgttgagaagagcttcgctcttgtaagcccaaggctgggtgtgcaatggcaccgatctcggttcactgaaacctcctcctcccgggttcaggcgattctcctgcctgagcctctggaatagctgggatacaggcgcgtgccaccacgcctggctacattttatgtatctatcacgtagaaacgggtgtttcaccatgttggccaggctggttctgaattcctgacctcagtgtgatttcggccgccctcggctctgcagagtgcttgggattacaggcattgagccactgacccgggccagtaattttatttattgagtgcctataagcatgttggggccaggcaatttacgagatatttggccatcttcagcaaaactgcagggatta

SEQ ID NO: 672507 - DNA, 130 bp, Homo sapiens
tcatggttaaactctcaacaagctaggtattgaaggaacatacctcaaaataataagacccatctatgacaaacccacagccaacatgtgggttggctgaatgggaaaatgctggatcagcggatcgagt

SEQ ID NO: 672508 - DNA, 263 bp, Homo sapiens
aacagggttagaggggcaggcctaatcaactgaaactcctcggagatgccatctctgcctccctgggtgccagcagccctgctgccatgttcactggggtggcactggagagccatggcagacgtgagatattgcatgttgtatgcacatgatcatgtgtgtatgttcgtgcgtgcgtgtgtgcgagagcgcgctgtgatcctgcctcattcagtttctggggtgaaatcagcttcttctttcccaagtgcactcccctggat

SEQ ID NO: 672509 - DNA, 564 bp, Homo sapiens
aaactgactacgttactcatcagactgaagcgagctgcagccaggtgaactgtaacctggctcaaaggtgcacacaaggcgcatcctggtgcatgcactaaccatgacttgaacgttgccactgcacaacttaagataagacgactgcggtgggcatcggggggacctcgccttagatacatcatgtgccgctccatgcactgctctgtctcttggactctgtgagaaggatccacctagtgactctgcaggtcctctagacgggaccagcctgaagaaacatctcaccatttcaaatccgatcttctcggcttagcggtgaagactgctgctcggttgcctcggaagccctatagaccatcacggatgctgagctttagactaaggaaaagctatatgaggatacagcaagagggcagccaactacattccgtggaggacagccctgaaaccaacactgatggcacctagatcttcaacttctggccatctgggaactgtgaaacaactaaattccattgtttaagccaacaaacacacaaacaaagacacacacacaaaaca

SEQ ID NO: 672510 - DNA, 587 bp, Homo sapiens
ctgggcacttaagaaggcgaggctccatggctataatggaccccgtcccttctctattgcagacaaattggatcgtgatgtactcgactcctgtcctcctaagcaaaaggtgaggctagctgccacttcctgaggtcctaattgtcccagcttcccaattgccgcaccacatgacatcctctaaagccagacattcagccctttcctcatatcagtctctgatatcatgtccagggaagttcaagagtgggtttccacaagtttccatgttttcttacacatacatttccagaaataaaatgtgattcctttgaagaggaaaatgagataatacattgaattagatacactaaatatagaatgacacagtaatctgtgcaaatcacagttcttgttcaacctactttcatactgaagatgcagcaaaactgtgaatgggcaaaacgagatggcctcgagaagagagatcaaatggaaaggagaggaaagaactcagtgctgcctattagtagttaattctgtcactcaccactacatcaccttgagacaaatctatgccactcagaatctccttctttcctggactt

SEQ ID NO: 672511 - DNA, 195 bp, Homo sapiens
ccgcatactaactcaactcgagacgaccagaccctccagggatgcgaaatcaatctgtatgtcattaagcagcatattccctgaagaagattgctgatgacagtggatttgtcacccagctcagtgtcttttcctgagcaataagaatttcttccatggggaatgaaacctactgttgtttccctgtttgaatcc

SEQ ID NO: 672512 - DNA, 450 bp, Homo sapiens
tgcgggaccctatcctagaagctttttacaaacattgttttatttgacccttataacagatttggttcaggaataacgaacagattcaccaatgtgtctatagtatataagtgttgaaaacaggctcagaagctctttagaatatcatgagatgaagggatgtggggaattattcaattcaactatctgtattttgcacttcaagaatctgagtaccagagttaaaaatctggacttttggtggatgttcttaccatctgtgttaatgcaagagggttggattagtattatctcacagggtatgggaatggttggtgtgttccctgtatctactgtgtagtgtaaagttttttgatactagctcaatatattatattaagtggcattttatcatagatgaattacaggtaccataggttttagggggaatttataacattaggtagcagc

SEQ ID NO: 672513 - DNA, 485 bp, Homo sapiens
ctggtcattttaaggtgacactatgattctatttccattttaaaaatgacaaacacgaatgcacacatctcctaaaggaaaatgtcatttatgtaataagttgctttaatacaaaatgataagaccctgaaatttatttatttgctttttgaacccttgtgactagattatcaaaattaccatttgggtgtattttttttctttctactcgaagcaggaatatgatagagaaatagctccaagataagaaaaaggaaaacactgttgatgtatgatatgcaagataataataataatagaagatttaaaatgaccgatttaagaaaatcctattctctcctaactttttcctaacttttacttctattaattattcatacagtagtccctttttgtggggttacagtattagggatgaaacaggaataacacaaagctcttcctaatagatgtgctctgtaagggaatacaagctgcttatggcc

SEQ ID NO: 672514 - DNA, 820 bp, Homo sapiens
gagacaatgtggggcgcctgtaacgttgacggtgcacgattccttgggcaccattggcactcactctgagacggtacctgagattgggggcgagcatggcaaaaagcaatgttcgagctacgtgtagggacttctgaggctggacgacagctgcactgggcgcacatgctgggtggtacgtgcggcgcatggactagccgggaatttccatcgggttctagcttgagaacgcgcaagttctgcagaacccaatagacacgcctgtcgcgtcatccaagactcgatgatccaaattgtgcgcacgactagtgatagtgaagaactcagtacggattcatctgtcgcttgccggcggttactgggtacctcgaagctggatttgaagggtaccaggcatatgtagttgattgccacaggcgggaaagaaacgccaagtatcgcgctgtttgacaccgagggaacaggacggccagcaagaggttttcaaatggaacttcatcgttgggcctcattccgcaggtattgaccataccgagcctactggtggtgtcaggtgtgtgtgagagtttgactctcagaaggggagcgcagggcccacttttgctgatattcgccgcgcgagggcatttcagtaccgtggaggaggaagatccgttcgtctcgattactctcccacgggataggcgacgaagcatgtgtctaaacggggacgtgacacattcaagtattgggcggatcgaacgcacgattacgtggaaccctttagataaagtgcttgacatgagatcagcatggtggtcttgtgggcgactttgttaag

SEQ ID NO: 672515 - DNA, 402 bp, Homo sapiens
tgatgagctggtaccgacatctgcaccactgggcttggtcaggtggctcacacctgtaatcccagcactttgggaggcagaggtaggcggatcacctgaggtcaggagtttgagactagcctggccaacatgatgaaaccctgtctgtactaaaaatacaaaaattagccaggtgtggtggcatgtgcctgtggtcccagctacttgggaggctgaggtgggagaaatcgcttgaacccaagaggcggaggttgcagtgagatcacaccactgtgctctagcctgggtgacagagcgagactccatcttaaaaaaaaaaaagaaggccgggggcggtggctcacgccggtaatcccagcaactcgggagactgaggcaggagaatcgcttgaacccgggagg

SEQ ID NO: 672516 - DNA, 739 bp, Homo sapiens
agtaccgcctgcggagtaactgcaaagatgctgtccgtgacgcgttgactgcggccgatggtccgcgcccattccatcggcgggccggactgggtctcacagaaatgctttgggttcatcttatacattgcatgcaaggaacttccatgcctctaacactcatcttcaacacagcactgggcactgcatgagcatgtcctctcattctctgcacagcagcgtcattctttggcagcatgataacctcatagttgcatcttgcaagcaaacgtgggcgtagtcttacagtcattagcggtgcatcggtcattgccccgcgtacatggggcctgaggcaatagtatccaagccagcacagcacacataggtcagcagtataatcatacaagaggctatacacaggcgtccatgtcactatgcacacctactggcacacccttgccaccaccaaatggtactggatcgatataggtccgatggttctccgcgcacaatcgcattcacacacctcacagtctcaacagggcacagcgccagcattcatcagtgcacaagcaaggcaccaggaagacgccattcgggtgggaccagatagtccacgatttggcgtcgaccgcgcacgcactgcatcgaggatcaagtggtcaggtctgcaaatgccccttggagtacaatggcttacctaaggcatagggaaacacgggggtacccaacttcgggcttcccaacagaccgcccg

SEQ ID NO: 672517 - DNA, 594 bp, Homo sapiens
  misc_feature (7)..(7): n is a, c, g, or t
  misc_feature (74)..(74): n is a, c, g, or t
  misc_feature (93)..(94): n is a, c, g, or t
  misc_feature (96)..(96): n is a, c, g, or t
  misc_feature (160)..(160): n is a, c, g, or t
  misc_feature (164)..(164): n is a, c, g, or t
  misc_feature (183)..(183): n is a, c, g, or t
  misc_feature (190)..(190): n is a, c, g, or t
  misc_feature (248)..(248): n is a, c, g, or t
  misc_feature (273)..(273): n is a, c, g, or t
  misc_feature (368)..(368): n is a, c, g, or t
  misc_feature (375)..(375): n is a, c, g, or t
  misc_feature (377)..(377): n is a, c, g, or t
  misc_feature (381)..(381): n is a, c, g, or t
  misc_feature (394)..(394): n is a, c, g, or t
  misc_feature (446)..(446): n is a, c, g, or t
  misc_feature (466)..(466): n is a, c, g, or t
  misc_feature (529)..(529): n is a, c, g, or t
gaaaatnaatgaacattagggaaatttccttaattaagactctccaaaccaggtgtggtagctcatgcctgttntcccagcactttggggggnngnggtgggtggatcacctgaggttaggggttcgtgactagcctggccaacatggtgaaaccccgtntctnctaaaaaacaataattttntttcttntattagctgggcatggtggcatgggcctgtaatcccagctactgggggggctggggcnggggaatctcttgaacccagggggngggggttgcagttagcgcgagatcatgctattgcactccagcctgggcaacaagagtgaaactccatctcagaaaaaaaaaaaaaaaagactctntgggggnanggcncatatgacctggngaagctggttgtggtgtaaggtcatcactttctgcaaagcatttagccagtnagcggtgtcaggtggcagtnacagcccaggttcttgcctctggcctgggtgcttagggggttcagaatgagtgagtggaagtnaaaacaagagggatctaacctactacataataatctaaaaatacaaacttttaactattttaaga

SEQ ID NO: 672518 - DNA, 221 bp, Homo sapiens
gccctccctgtttccagggccccacccaaggttccaagggctgagactttcttttggtaacattccttcagccttcccttcccttgggaccccaaagaagttggccccccccaagaaaggaaaacgggcagccccggtttggggacgtgaacgttttaataatttttggtggattccctttccacttaataaccccggattttggtattaattaaatttgt

SEQ ID NO: 672519 - DNA, 721 bp, Homo sapiens
  misc_feature (398)..(398): n is a, c, g, or t
acaaaccctgtctggggttgggtgtgggtataatactaagttgagatgatatcatttacgggggaaggcgcttggtgaagtaggccttatttctctgtgtcctttcgtacagggaggaatttgaagtaaatagaaaccgaccttggattactccggtctgaactcagaatcacgtaggactttaatcgttgaacaaacgaacctttaatagcggctgcaccatggggatgtcctgatccaacatcgaggtcgtaaaccctatggttgatatggactctaaaataggattgcgctgttatccctagggtaacttgtcccgtgggctcaagttatgggatcaatggagtatagtaagttcgctttgactggtgtcagaagtcttacgcatgtactggctncggacggttgagcgtgttctggctccgaggtcgccccaaccgaaattttcaatggcaggttcgggtagtttaggacctgggcgggtttggacaggtactggtttggctattaatcaaattaaagctccatagggtcttctcgtctggctgtgtaatgcccgcctcttcaggggcaggtcaatttcacgggttaaacagtaagagacagctgaacccttcgtggagccatccatacgggtccctatttagggaacacgtgattatgctacctttgcacggttagggtaccgcggcgtaaacatgtgtcactgggcaggcgctgc

SEQ ID NO: 672520 - DNA, 248 bp, Homo sapiens
cccccctttttttttttaaaccccccccttgtttttttaaagggacattttttttttttaagggggggaatcctttaggggccgggggggggggaattcccccccttttaaaaattttcttttgggggccccccctttttttttttttttttaacaaaaatgaaatttgggggggttgaaaacccgggccccccccccccccctttccccttttttttttttaaattaaaaattttttttttttttta

SEQ ID NO: 672521 - DNA, 133 bp, Homo sapiens
attgggttcactgtctggtgggggctgcttattagtctcctgtgactagtgtgttggcaaagagatcacaagtgtcatccaactgtggtcatgaagtgtcatctgtgcatggtttccatgtgtcatcatatac

SEQ ID NO: 672522 - DNA, 422 bp, Homo sapiens
ttcgattggcgggcacatagtgagacttgtctctacaaacaatacaagcatagcggtgtggtgacatgcaccttggttcagctactagggaggctgaggcaggaggatcgctggaacccaggagttccagaccagcctgggccaccatagtgagaccttgtctcttacgaacaatacaagcgatagccgtgtgtggtgacatgcacctatggtttacagctaccagggaggctgaggcagggggattgcttgaggcccaggaggttaaggctgcagtgagccattcttgtaccactgcactccagcctggaacaacagagtgacaccctgtgtcagaagaaaagaaaacagaacaaaatcagaacagaggaccaattattgtagtgataagttgcccggcaatcgggggtaccgagactcga

SEQ ID NO: 672523 - DNA, 428 bp, Homo sapiens
  misc_feature (56)..(56): n is a, c, g, or t
caaattcccggggaatttttattaatattataccttttaatttttaaaggaaaaanggtagtagtatctgtaaaggcttactggaaatacacaagtgtaggtattatgcccacactatgaaacattactcagctttaaaaagaatggcctagatctacatgtatatatggaaaggatttctgaggctcagttaaatgaaaaaagagctgcaatgtatgtatgttataacgccattagtataacagcaaacccaaatgctgttttacaagtgtacattaataaataaaggcatagaaaaacttctgggaggatgacagccagttaccaggtttcctttgggtcgggaagtaaaactgggggcagggagacatcctgcctatcctctgtatttgagtttttaccaagaaaagtgttcacgattaatttta

SEQ ID NO: 672524 - DNA, 970 bp, Homo sapiens
tccaaaaaataaaacgaaagggagaaagaactagatccctaaactgtggacatggtagcattaaagatgccggacaaaataaaagggcctctgtttctagatgcaaagtcctccctcccgggtgccagcctggccctgcctgccgatgagtttgctgggaggagccgtggatggtcctggtggttttccttttgccactcctggcgccgccaaaaattaagacaataataataataataataataataataataatgagacccccacacaaactgccacaaccaggaaggcaggagtaggccatggctattaatactcccaaagcatttgttcccattaaaatggaagacgcagctactgtgaaataataaacattcatttttattgtgatttctaaagcctgtagctttggatcttgaaagtaaatgggcttggcttctgcattttccctgcagtttttggcagggcttcctgcacggaagatggagggctctgaaatagaattctgagtttggagaaccaattagagggaggacacgtaacaggcaccggggcacaagatggcagcaccctcggctcgtcttcacgacagaaggaaagaaggtgacttacccgaggtgccggaggatggaggcgtcttctccaaagccaggaagtgaaaatgacgtccctgggcccagccggtcacccgggtgggggaggagggcaggtcccgccggccagcaggctgcccggtgccagccccagctatgggcccacgggccccctagtctctggccgccgccgtccctcggtccagtgggcccggctgggcctcggccaccccggcacagggggcagggctgccaggagccatgtggtgctgggggaaggccccgctgccagccccggagtacgaggaaaatgctacttttgtctcctgctctcatctggcactggctgcccggggagggggggcagaggcggccgc

SEQ ID NO: 672525 - DNA, 186 bp, Homo sapiens
ccaaacttaacaattcagtatttctgtttcatattcctatggatgaccataccagaatgtgtctgattttcatactgtcctctgtgatctgtaatcctaagtgtgtgcatccatttaatcaacacataataataggtaattccaattcatggagtccaacatatgtactatggcataaaaaaaaaa

SEQ ID NO: 672526 - DNA, 159 bp, Homo sapiens
atcatatagatgtctttatgaaaatgttttgatatatgtacagagattttgtttcccaagtcttacccagacgagtatggcaattagatcagacatttctagcagcagatttcccctcccatgtaaccgagctatcaaatttctgtcttagctaatgca

SEQ ID NO: 672527 - DNA, 201 bp, Homo sapiens
cgttgccatgtctgctgctgtgactgagctcctcgtaccttggtccggtaccaggactcgaggctcagaccggctcctctgagcgatctcctcgtgttgggccttgacctcagcgatgatgctgtccaggtccagagttgctggtatgtgttgtaccatggtagtagcaccacgagatgtgtctgaaatgtgggtctgcat

SEQ ID NO: 672528 - DNA, 353 bp, Homo sapiens
ctttatcagagctgtatctcattaccgtgacttcagcatagggggggccacttccaggacaaaatttaaatgattgagtattgatattttagtgaaaaacagaaaaggaagtaaaagtcaaatctaaatattttttctttattttttttttatgaaataaagtctcgctctgtcacccaggtctgaagtgcgggggtgcaatctccagcacatgcatgctccgcctcccaagtccacgccattctcctgcctcacactcccaagaagctggaaccacaggcgcccaccaccacgcccggcatagcagttctgtaataaacatttgctggcagagatgaaaactaattagtaaa

SEQ ID NO: 672529 - DNA, 378 bp, Homo sapiens
  misc_feature (313)..(313): n is a, c, g, or t
catacctacgtaaaaccaagatctctagggctcgatgctttcaagactccagagataactgctaatacaccatacggacggagatctgaagaagacattaatgcaaaaatgcaagcacgcttagaaaaaggtggtttatttgcaaacgtggaggccaacttcatgaactatgggacgaattgctatcgtatgtatgaccaagagtctattcatgatttctggtagtgatggcactactctacactcacagcaatctgctatacatgatttagagtagaagcgcataactgcttatctgacactgaaacagagnatacatagaagggtcagtgtcaaaaaatcatcagcagcagatgaaggacgggggtcagacacgag

SEQ ID NO: 672530 - DNA, 433 bp, Homo sapiens
gatgtttcatacacggatcccccctcgaaacccagtaggctgaataagcaggatgagctttcccgttagggtgtagtagataaacacattctggatcctttcaaagcttctctatccaaatctcaccatctcatactcctcctattaagatcaggctttccatgtctaattgcactatacagttctacgctgctggacacattcatgatttcccttctttcacatcctgtgcccctcctaaatatacccattctgagcccttatactactttaccgtctatttggtcggttagtcgatccctattgcctctctttggcacaaaagtatcctatactgcctttgtggatcagcttgctatccccgtcatggctgtccatatctggcgctcacagtttccttttcaccttagtctctcccacatctattagtaac

SEQ ID NO: 672531 - DNA, 349 bp, Homo sapiens
taagggacaggacaccaaccactacatgcagatatgtgtgtgactggacagagggtactattgacatacagttaagctatatagaaacagaatgaataaatgaactttcttcttatttctttattattgcaagaggtaagtaaaagattcaatttgattcttctagaggggggaaaaaggagttgaaagtaggtcttcattttgcagtcatcatctgtacgaattcttcatagttagacttgtccgtctccatcaatatctgcttctctgatcatttcatctacttcttcatctattagtttttctcctaagtttgtcatgacgtgacgtagttctgctacacggctat

SEQ ID NO: 672532 - DNA, 190 bp, Homo sapiens
gggggtaaaaaaacggagccaaaaaaaccccttttttatttttttttaggggttggggccaaggccttaaggaatttcccccttttggggtattctccccctgtttttttcccgggtttttttttccccaaaacccaacccttgggcctttaaaaccaaaattttccctttccccctcccccccccccta

SEQ ID NO: 672533 - DNA, 155 bp, Homo sapiens
cgatgcgaataagccttcccccatcgtgtactgcagagttgagctggcaggtgaggggctgcgagggtgttggctggaacccctccccgggtcgagtgacatctgtgtcttccatctagaactgtatacatgaagataagatactcttcgggcat

SEQ ID NO: 672534 - DNA, 1111 bp, Homo sapiens
ttcgagcttcctagttgctggatccacgccaggtttctgagatcactaggtagtgcgattgctcatgacttgcagagaaatgtgctttcggttcactatagtgactagtctagagataaagcccattcatcctcaatgcgacttgatcaatcttctgtgtgcgcaccatggtctagtggagagagaagaagcaagtcgtggattggacttgcattcctctctcaaacataatctaggccatccctcctttatgtacacttgtatcagctatctgcttcaaatcgctgcgtcaagagatggttcatgagtaagactcaggattgatggggttgctgcagaggacgatcgttaaaatgggctagagccgatacggtgggcgtgagaccgtttagggtgtggtgtacgtcttgaaccctagatggtgtgtgtagcggcctaatttaatccgcaggagtatccttctggagtttctgcccctctttgctcattccttgtaagacaaaagctaaccgaaactgaaccgccaatttgttatcaatcacatcgtttcatacatcgactaagtaatgttcgttggaagtattactcccccaggttcatatcccttacaataggaaaagtagtgccatggttaatttaaatgggaactctaaagtgatttaggttgggcaaagaattatctcccactacttatataagctaatcgggaatgtataggccgcgtactcatatccttttgtagggacttccaaaagcccttaaggtactaagattgccttcgaagacattccgggtagacacacttaaggactcttttgaaccgcgttgtgccctggtcaattcggacaccgggaatgcggacccttacatgacgattgatgggtatccaagaataaccatttacgccagaattgagcaaagaggacgtttcaaattccccaacttgatagaccacccaagagaaggctacctctggattaggaagcattcgccccaaggccctctgcagggttccaggtacgaaaaaccccccaataagcgcttcaaaagccccatgctggttttacaatgaagggattgaccccccttctataactattgaatggaacag

SEQ ID NO: 672535 - DNA, 214 bp, Homo sapiens
cggatattaacagctctaactgataatgtacaacatgcacgagggcgagacattttcacactgggatgacagctcgctgtgataacgcacatattaggctttctgtgcctggcactatacaacgtctgaacaattgtttaactgtcagtccatctgttgattctcaggcctgccacggtgggtgcgcacatatctggccttggcgcagcgtgcc

SEQ ID NO: 672536 - DNA, 624 bp, Homo sapiens
tcgagctcggtccctcttgatgcaagtgtcgagaacctgccgttgcacgaaatggctctgctccatgacactgtaatctgctgttcagaatacaggcgatgaggtattcgcaggtctttacttgaattcagataccaggtctacctcacagacaaccgtggaactccagagatggacttgactgtgtctccaagactcttactgagggacatggtggaaatggatcggggtgtttgccgtggacagacctccttgttatgaagtgagaagtgcgaggaagatggcttggtcaagccttacgcacacaagctaaatttgagattaggaagatacattggatggagaaagctaacaacgcccagaccaatatggtagggttatttcactttctagatgatgaaaacagagtgtcatatggaaggcttaggggagaggggtattagattgttcagctgattatctgttctcttatgttgtagtagtggctttgttccttgtccagaagtaattcgaacttgtccaattattgctctgtaacatcatctgcctctacaaaccctgctttaagtcttttaaggaagcatcagcaatcaaacgatttttatgcaattgtgggtgagtgta

SEQ ID NO: 672537 - DNA, 416 bp, Homo sapiens
ggtgaggaggtgaataagatacagtcattgtcctaaaggagctcacaacctggtgggagaaataggtgtaaaaacagataatgaccgtaatgtactaagagctgggctagaaggctgtctaggaattgttttatgtacatgtagagtatagggcaaggacgaatcaaggaaggcttccaaaaggaagtgatatcacaagctgggtattgaaggataaataggagtctgcctggtgaagaaatgtaggaacgttattctgcttatcaaagcagaggcaaggcaaggaggtagaaagcagattggagtgtgctggaactccgggcagagggatggtcctagagcccccagctcactaccttctccctccatattcctcacagccgtgccatctccaccccgaggtgtgatctccaatg

SEQ ID NO: 672538 - DNA, 618 bp, Homo sapiens
  misc_feature (376)..(376): n is a, c, g, or t
tcacgcctgtaatctcattactttgggaggccgaggcaggcggatcacctgaggtcgggagttcaagaccagcctgaccaacacggagaaactctgtctctactaaaaatacaaaattagccaaatggggtggcacatgcctgtaatcccagctatttgggaggatgagacaggagaatcacttgaacctgggaggcggaggttgcagtgagccaagattgcgccattgcactccagcctgggcaacaagagcaaaactccatctcaaaaaaaataaccaaagcaggaagattgcttaaatcctggagttcaagaccagactggccaacatagcaagaccccatctctacaaacaagtttttttttaattagctgngtagggtggcacacacctgtggccccagctacttgcgagactaagaaggcaggaggatcacttgaccctaaggtgtagaggctgcagtgagttatgatcacaccactgcactctagcctgggcatcacgagcaaaacttcatcccatgaattatctccccgccaaccccatgttcggccgcttcgtcccagtcgactctagacttgggcaagcttattgatcccgcccgaattccggttccc

SEQ ID NO: 672539 - DNA, 166 bp, Homo sapiens
aggacttctaaaaacttacggcaggacatgtaagggttaactgagagggtagaacttgttagtgtaattagggataattggtagctgtcaaagtttatctctcaaacattgtcttagccagtgtattcttgagactcagactgaagacagaagcacaagattctgc

SEQ ID NO: 672540 - DNA, 660 bp, Homo sapiens
  misc_feature (483)..(483): n is a, c, g, or t
  misc_feature (492)..(493): n is a, c, g, or t
  misc_feature (504)..(504): n is a, c, g, or t
  misc_feature (509)..(509): n is a, c, g, or t
  misc_feature (514)..(514): n is a, c, g, or t
  misc_feature (517)..(517): n is a, c, g, or t
  misc_feature (521)..(521): n is a, c, g, or t
ccgtagctggcctacggttcctggcatgcgagccttcgtgtccgcctcgtccatgtcgttggactttaggcaccggccggtcacagctccggacacttgagtgtctgtgagcgtacctaggtgcttatagggtctagcttggattcttccacgagctccagcttgaggttcctctacggcaagaggagcttgtcccgggcgttcgtcatttccgacttctctgcttcggaggggcgcaatatcagtgtcattcagtcattcagcagtgtctacttcgtgatgggcccttcagcaagggttgccaggtaggccattcggcacctgtcgaagctatgtgagccccctgatgccaccgagcaggggcagtttcatgaccgatgtctggctgaggctgtggcggacactcttggggttgtttgcaggaaagcaggcaggagggatatgggcctggacgacacggcctcgcagcaaagtgggtgagangagcagtgnngggggtgcggnggggnggggnggntggntcccccacacctcccacctgcattgctctccctcgtgctccccaaatcaccacaaccaaccaataccgcaatccatgagggactcctcctgtggaaaaggagagctgttccagaacacagaactgatctcaggtttttg

SEQ ID NO: 672541 - DNA, 901 bp, Homo sapiens
agacacgcgccaccacagccagctaatttttgtgtttttagtagatttggggtttcactatgttggtgaggctgatctcaaactcctcacctcatgatctgccccctcagcctcccaaagtggtgggattacaagtgtgagccaatgcgcctggcctttattttttatgttttattattattattattattttatttttttttttttggagacagggcctaattctgtcaccaaggctgaagtacaggtggtgggatctcagctcactgcaccctcagcgtccgtgggcttcagcagtcctcccttctcagcctcccaagtagctgagattataggcatgtaccaccacagcgtggctaattttggtattttaagataaagaccgtggtttcatcacgtttgcccaacgccgtggctctgtgaaacctccggaatcctcaagtggtaactcgtgcccaacctcgaacacttccaaaaggtgtgtgggaattacgaggttgttgaagccaagcgacaccgaggctctgtgaattaaccactgttgtgtgaacgcggttctccacagaaagagggtacagcggtttctcgatttatctccctcttattagccagtgggggtaacaaagcagcatctatacaagaccatttgtttgcgggtgcatcttacacagcttgctacataacctcaacgataacatgttgaaattcctccgtgggtcatatctcatatttcagggggattccactttcacgtcgggaagacaccaggggcctctggggccaccgtgggtacaaccccaaggggccttaagaaagcgtgaccaaggggggcgtgaaagaaacccagtgggggttcaagcgcggaaaaggccgtgggagaaatttcccccaaggggtcgca

SEQ ID NO: 672542 - DNA, 272 bp, Homo sapiens
ccttcggactggaaatgaaagagctgcaagagagagagaaaacatggataccgatatgaaaggcaataccaagatttctcgaagatcttgaagaagatgatgcaattcgaacaaatgtcaacatttacagatgattcagtccatccctgttggaaagtgacaccgataatgaaggagcacctcgaattagtctggctgatatgctttaagaccttcatatttcccaagatgccactggtgaataaggtgcatcaatgcttacgtcctgagat

SEQ ID NO: 672543 - DNA, 979 bp, Homo sapiens
gccactgcgtcggcgacgacctagcagagccctggggctgggcgtgccctcgcctgccatgctgcgcgctgccctcagcctgggccgctggggccgtgcagtgcaccgggcacgccgcgccagtgctggtgttgtgcagtgcacctgagcctccgtgggagtgtcccgaggcagcttcgcctgctcgccctggctccagccctcacctgcctgcagccttagctgagcagcctgccctgccaagtgggctgcccccctgctccccacttctgccagcgcccgctccatccggctcggccctggggtagttatgtagggacgcagctctccactgtgcgcgactgcgaggctggacgctactgggctcctggaaagggagacaccagcatttgccacaatgctgtcatccactgacctttacatttgcttcctggggagcttgttggtccggcggttgaccatcccaatagaagagcagcagaaagacgtcacactgagaggtatctggagaccttcatgttcggaggagtgatgctcaagttagtagaacatgatcaatatatcccaatgactggtcagactttgctcttttggtgggaacagaagcattgctggcttctgaaaacccactggacccttggacaaatatggggtccaggcagatgcaaagctttctacttcacccctcagcataaaaatggctgcgccttcgtctgccgaatttggaaattggtgacggttgcgagtacagcttctcaactgtggttttaaagctgtcagtgatatcccggcaaatctgaatattagaaaatcgaagaactttccttgttaagacccgctagtgaacatccagaaacagaagacaaaaacacacttagtaggaccctattgaaatatctaaccgaaagtcccaagtcacggtcaaagcaaccggttacagaaacatgaccatattacgcaaggaaagaatcacaaatga

SEQ ID NO: 672544 - DNA, 271 bp, Homo sapiens
cccccaaaaagggggtttttccccatttaaagagccccaagggtttaaaaaagtgggaataagccaccgtaggtttttgtttttcaggggcccccaggccctttaattgggcttaataataatccggccaaatgccccggtttccctaaaggatttttatttgccggcaggtaaaaaaaaaaccctaaaaacctttttattttttttactgagggcattgtctgttttttttggaaaagccggcccaaaaaccaatttttttattccccca

SEQ ID NO: 672545 - DNA, 125 bp, Homo sapiens
ttgactctatacgatcccgaagtatcggctctctgagttcaagtattatcctgcctcttcctccctcgtctactagtacatacaggcagtttccaccacacctggtcgtaatttttgtattttta

SEQ ID NO: 672546 - DNA, 412 bp, Homo sapiens
ccccttcccttttttttcccctcctttgggggccggccccccttttttttttgggtgggcccaccccccccccggggggggggtttcccttccttgggcttgcctttggggggggcccgcccctttttttttccagggggggggggaacccttttttttaaaccaaaattgcctccgggaagccatttttttttgggcccgcccccccccttttttttttttggttttgccttgccttaaattaatgggtttttttgggtggggttaaaagccccggccaaaagggttttttttttttccctttctttttttgggggggggtttttttttttttttccctcccttttttttttttgggccaatttttcccccccccccccggggcggttttttttttgggttttttttccca

SEQ ID NO: 672547 - DNA, 453 bp, Homo sapiens
caagggcagtggatgcgcctgtgtaccagttccacggatagtaaggtggcccgggtcaacaccaacctcagaaatgccatggtatctcatctagatggcactactcatagtgtgtgaggacatcggacgcagcctcttgacctatggccaccgcatccccctgagtgaatgggaaagccggattgcgaaggtggatgccagtgtggtatgtgagatctgctccaagtacatctatgtccagtgcccagcagtggctggatatggccccatttagcagctccctgactacaaccggatcagtaccggcatgttctggatgcgcttctagtcggaaagcctatgtaagcaagagggcaaggccggggtttgtggtcccccctccaccacaatctcagcccttcggctcctctaacttgtgccacaggtgacctccaattatatcctctgctgaga

SEQ ID NO: 672548 - DNA, 198 bp, Homo sapiens
cttctttttctttgcgccggggttggctcccctcccgctgtgcccccttctttcctcctggcgtcctgcctgtgtttgtgtggctccccggtccctgggcccccctgttgggttgggcgcactgtcacccctgggtgtctgtcacgtcttgttggggacttcaggttgttctgtataaaatacaaaataaaagattta

SEQ ID NO: 672549 - DNA, 337 bp, Homo sapiens
cgggctcaagttttctgcccgccttggcatcccaaagtgctgggattacaggtgtgagccgctgcgactggccattgcttttcatgtttattcctatgggtctcattatcaaatcatttttcagataatagtttatacaggcagccctttacaatttttcagtgaatgactttttatggtctttccttgatgagcttgtttcctagtttgtgttaacctagttattttagggagttttagtgaggaaaatttgtagtttcctagatacttgggagctattgtgtcccctccccacccccaccatattattaaattctgaaaactggacagacaatgg

SEQ ID NO: 672550 - DNA, 431 bp, Homo sapiens
ggacgcgtgggcaggtgacagttcctgaaggggcttctggactccagcaccacccctcgtcatgttgtcacttcctgtggtggtcgggagcgcagggtgtgacaacatgacgaggggtgggtgctggcagtccaggtgacagttcctgaaggggcttctgggaaatacctagtgagaggtctagtcacccagacccagtgccgctctccccctctaccgctgggcaccagagtcttccatcagggccggagtaaatcccttaagtgcctcaactgcccttctccctgtgtagccatctagtcccctctattcctctagggagcactgtgcccactctttctgggtttccaagggaatgggcttgcaggatggagtgtctgtaagatcaacaggaaataaaatgtgtatgagcccaggcgaagaagaaaaaa

SEQ ID NO: 672551 - DNA, 101 bp, Homo sapiens
gaggacttcgcatctttactaactgatgggcatctttactagtgccggcatcgttactaatgcccggcatctttactaatgaacggcatctttaataatgg

SEQ ID NO: 672552 - DNA, 120 bp, Homo sapiens
aacctaactgataataggtaataaggttaaatttttttatggcgttttttttttacaaaaatcaaaccctgctggggtttccatatgaaaggaaataaagtccatttattattgcctcca

SEQ ID NO: 672553 - DNA, 191 bp, Homo sapiens
ccggtacccatatacgcattcaataatgcaaaatcacctgcaaagggaatgtcttcagccttaggtgttagggcagacacctgagaggatatgaatgttagtacaatttattaccttttctgccaaggacagcacagtactggcctgaattatagccacttgctcttcgtttcttaaattccgtggtatgg

SEQ ID NO: 672554 - DNA, 208 bp, Homo sapiens
gttttaaatgcccccttttttgggggaaccctaaatccaacttccaagggggggcaacgataagacccaattttcctaataattttttggaaacccccttaaggaaactgccggtcattccaagccccccttggttttttccaacaggccccgtaggttggccaagttccaagccctttggggtttttggggaaaaagaaactgttta

SEQ ID NO: 672555 - DNA, 154 bp, Homo sapiens
atctctacgaaaaatacaaaaattagccaggtgtggtggtgcatgcctctaaccccagctactcgggaggctgaggcaggagaattgcttgaacccaggaggtggctgttgtgcgctatgccgatcgggtgtccgcactaagttcggctcactg

SEQ ID NO: 672556 - DNA, 997 bp, Homo sapiens
  misc_feature (996)..(996): n is a, c, g, or t
gggcggttcccgaccagagagaacgaacgtgtctgcgggcgcgcgggagcagaggcggggcgggcggcggcggcaccgggagccgccgagtgagctagggagaaaacgggcaaagacgcaagcgcccgagcaagtgagtgtaagtcacgggggaggtgccacaggaatgccacgaacagagagggcgggggcaagatcagtggctacaggcatatatgaaaagagagagctgagaaagacttttacaacaacccacggtggcatccggcagaggcggaacgcgaggaaacagacaacagaaggtgggcacaacatgtaggtccagttggaaaaacaccagtgggctgaagaaaaagggagggaataaaaaggggaaacaagagaggtagcagcaccgaagaatttcacgccgggacaaagcgacaaaaatctggaactgaggcagaaaagacgatggagccgtacgcgtgtaaagtactcgagcaacgcaggtcggagagcgcggagcaacaacgagttggggggaccagtaggaacacaaaggacagcacgggagaaacgaccaatggagcggactacacaacgtgtgagcgggaacgaactgacacacactgtttgaaacgccaagatattgggcctcagaggtgacgaacgacagcgcgcgaggcataggacgtattagagaatcaaaacaacagacaaggataactgtgggtccacgcgcccaatagaaggtatataattcaccgagttaatccaaatcaaggacgcaccgtggtagatggacgacggaagtataaggtggagatgagtgaatgaagaccaaggagacaccaatggattgacaggcaggcggcattacggaacacacacacaacgtgggtagacaatagtggagggggccacctgagaagtgaaacaaggatctggaaggcaccgctgaaacactagggccgaaggtataaccgtaggattcatctgttcgtttcgcttttna

SEQ ID NO: 672557 - DNA, 853 bp, Homo sapiens
ggctggttcttcgcgctcgcccgacttcccagcggccccgtgctggccgggcatgcccatgtgctggtgcgcagctgtgccctgtgccctggaagctgcccccgtgcgggagctggccctgcggtgggctagttgtggcatgtggcctgtgagcctgcaggcggcggagctgtggatccttcatgatgagagatttggggacacttctctctcctgtgtgtagttgatagtttggttggtgaagagatggctgacagtgtcaaaacctttctccaggcacttgccagaggcaattcaaagatccaatctggggtatatgtaccatctcaaacgctagatgctcgaatccaggcaaacagagagaggagccacgcgtcgacagaagggcagagtagtgtcttgggcacccgaccaagagccccagagtactacaacggaagcaaagagagtgagccaacataattggtgaggtaacgaaatatatacgaaggtggtaggatgctatggaaattggtttggaagatgatgcgggattaatgagagtgcgtagaagtggctaaaggtgggaagataagaagatgcagaaggaggttacatagtaaggaaaaagtacgagaaataagtgggaaggaaggccgcgaaagagaaagctaacagaaaggccagcaaaggagagcccggaccggcaagacgtgaggaacagcgacgacacacgcaacggacaaacgaaaagccacagagacgcgaacagagggaaggaacaaccaaaggaggagggcgagcaacaagcacaaaggaggggagaagatggacaacaccggactaccagaggaacagcacggcagaacgcgag

SEQ ID NO: 672558 - DNA, 915 bp, Homo sapiens
tggagcaaaaatgtaccataaacttgtgtttactcttttcattcggatcatagtcaaagggctgtagcattactgaaacagtcacagttgaccctgggtcaataattccactgtgggcctcacacagtaccggtgaggcacggtagtcttcactttgaaacacacttttctatccgatggatttcgcaatttaagattgtagtgactacatctgtgaaggggcctttgaatttgaggtctatgggcgggtcgaggaccaggatctgctcgtgcttcgccgtggccccggaggcagacgccattggagagacagcgcagagcagggggcggcttgctcgctgggggcgggggacgatggcgagaggggagggggagcgagttcgcatctctccttttcctggttagactctgttcaaccacattcttatgttggcagatctgcttccagattgatttttagagcaccatcactttcacattcctgattctgatttgtttgtttgttgggttttctgaaacttaaaatgtgcccgaaaatactatattttgagttgtgttctgaaagcctccgtgctgtggatcttggggggaaatacaggatccttcaacactgaggtgtttaagatttggaatagcatgcattttttctaatatggggatatttactttatcagaattattctaaacatggagttctgatcattaagtgctcatatacttgatctactatgaggtggggggaacgatcctttcacacaagtgttgttttgtgtcggggttcccaaatgagttagttgtaaaaaagggggggaaaactcgggggagggtcccttgttagggcctgagggtaaaaagggaaaggaaacgtgtggacctggtggaacaaaaaattgttgtgtagtttatgagaaagta

SEQ ID NO: 672559 - DNA, 641 bp, Homo sapiens
  misc_feature (42)..(42): n is a, c, g, or t
  misc_feature (69)..(69): n is a, c, g, or t
  misc_feature (78)..(78): n is a, c, g, or t
  misc_feature (129)..(129): n is a, c, g, or t
  misc_feature (139)..(139): n is a, c, g, or t
  misc_feature (151)..(151): n is a, c, g, or t
  misc_feature (156)..(156): n is a, c, g, or t
  misc_feature (204)..(204): n is a, c, g, or t
  misc_feature (209)..(209): n is a, c, g, or t
  misc_feature (319)..(319): n is a, c, g, or t
  misc_feature (335)..(335): n is a, c, g, or t
  misc_feature (340)..(340): n is a, c, g, or t
  misc_feature (344)..(344): n is a, c, g, or t
  misc_feature (358)..(358): n is a, c, g, or t
  misc_feature (406)..(406): n is a, c, g, or t
  misc_feature (430)..(431): n is a, c, g, or t
  misc_feature (436)..(436): n is a, c, g, or t
  misc_feature (450)..(450): n is a, c, g, or t
  misc_feature (482)..(482): n is a, c, g, or t
  misc_feature (510)..(510): n is a, c, g, or t
  misc_feature (518)..(519): n is a, c, g, or t
  misc_feature (543)..(543): n is a, c, g, or t
  misc_feature (568)..(568): n is a, c, g, or t
  misc_feature (638)..(638): n is a, c, g, or t
caaatctggactaaatgtacagactcccaagcaacaatgaanagctttcttcgccccccatgctaaganatgtaaaancttaagggccaaacaataccaattgtataggcttcaaaaaccatctaagtnagggcattcnctagttttagcnaaganacacctggaacactgacaagtcaccacttacatagaataatgtgaagnaagtnttttgaaaaataaattttaggggaacaatcctgaaggataacaccagaagaatagcaggttaccagtaaggggtcagccaatttgtcccagccacttttgaatccatgtnctataatctaaaattnattcncttnccctaagctgagancttcctatcatgtcagtatctatgttatgaagaaaaggagacttaggngagatgtttttatttatcgcaacnnccgcnttaattgcctaggncctcaacagcttcatgaaagcctgggaaatgntcatgcataaggctattgccttagctgncttaaaanngccccatacaatggtacatatcancccttagtgcagccttttaaaaaanaaacaggttgaaaaatgggttaaagtaggcaaatacagcatatctgcctttagagctatcaactcagganttc

SEQ ID NO: 672560 - DNA, 1519 bp, Homo sapiens
  misc_feature (476)..(476): n is a, c, g, or t
gcctgcgatggggcccccgcccagcgcccatggaccaggcactccctagaggttacctctcgtcgtcgcctgtggtggcttctgaggcatgcctctgagtctcagttccgcatgtggcccgtcttctggggccccaggatagtcttcctgggccacggacggctgcccacgttgtggatggttgcttgaaccccacagagcccttggggtgacacgcacgaatcccggaggtcgccagacctcctagttctaacctccatgaatacccacgtcattgcagccaagcctacagtagactcacgtactctagtggctctagcaacgaacttgcttcgtgcacacgaggtcgcgcatgaacaccctcacgccagaaccaaaccatagacaagagttcgcgctgtgtcgcaccgtggcaataaagcggtgcacagactcgcgcctggcgattagcagagcaccgcattgaggtgccaaancagactacccttgcgcaacgctccgtcgaggtagtcctgccaaactacggtacccactgcgtcacaccctgagaccacggtggtccccctaggacctcctcggagccccagaggatccccctggtccccggggcttacacattccaagaaagttgactatgctaaggactcgtcaagtagggttgagttgccgacgatggggcgcacaaaaacgagtagactctttcgcacacactaggagaactcccgtacagggagaccgcttgccctcgcacacaggggacattgacccaggaagcccaaagtcccattcactgggacaagagggatccatcgcccaaaagacccccatgagacactttggaaaacgtggaaccccccgagattgaggatctgtaaaaggttggccttagccgtagattgcacaccaccatacgcggaaagacaatcatccacccagtccaaaggaagacagcccgttcgtaggtatacccaccggccacagagcacgtcgcgcaacgactgggtaggccccgccaccacacgagtgcaccacacacacaggggaggactccccagcgttatagctactgggtactatacatacacagccttacacggaggggcacaactcaagcacctcggaagggccccgcattggggcacaggaaccgcagccacacgcaaacccccaacaaccgacaccagcaacacagaggaacacaaaaaacaaaccagagaacagaaacccacaaacaccacgacacaaaccacaaccacaacaacagaacaaagaacaaccacaccacagacgacaagcacgaacagacaaacggcgcagagaacaacaccccaggacacaggagacacacaacccacacaccagacaccacccacaaaaaaaccgcagacccagcagaaccacacaccacaaccaccccgtgtctagccccagcgacatccccacctcaccaaagacgacgtcaacaaaaacataccagacacgaagacgaacactcataacacaacacatcggccacaca

SEQ ID NO: 672561 - DNA, 182 bp, Homo sapiens
tcttgtttcctgcacttcattctgggtaattccttctgacctgttttctggttcactgattttcacttcactgtatatattttgttattaaacctgtacacactgaattattattattattattgagagagggtcttgttctgtcacccaggctgcagtgcacttgcacaatgatggcttgc

SEQ ID NO: 672562 - DNA, 113 bp, Homo sapiens
tacgaggcctgtacatgtatcgtgccccctggagggccttcaaagctctcatctctgctcagtacagcggggctcatgtccgcgtgctctccgcaccaccccacttccatttt

SEQ ID NO: 672563 - DNA, 371 bp, Homo sapiens
tgcacgatgtcaagactgtctgtctttgacaatttgtatataggatgcctcagtgtggatctctttgaatttatctttcttgagtttaagcttcttagatgtctagattcatgtctttcatcaaattggggacatttttggccattatttctttaaacattccttttgtccctttttcttcactttctggcagtctcacagtatgtaattttgtctgcttgatgatgtctcaatgacccttagactgttaatctttaatttctctatcttagtgatattgtcattttcctgattttttgttctgcatgttttcctttagctcttttagcatatttaaggcagtgtttttgaagtctttgtctactaaatct

SEQ ID NO: 672564 - DNA, 414 bp, Homo sapiens
ccgccactccacaccaacactgtgaacaccatctgtaggcaaaggtggctttcttaacttcagggacaccaatctggggtggctctggtctggcaaccttaaagggccttatagacctcaggcaagtgacgttaaagggaaagagagaaacagatggaaagagacaaagccaggtctacacaaacccttgagaaactaatattaagttagctggagcaattcacatggaagagaaaactctgaaaatgcccagaatttacaaggtggtcctcattagtgaaaaaaagacaattaaatataaacaaccggccaggtgatcctcccaccttggtttcccaaagtgttgagatgacaggtgtgagccaccatgcccaggctttgtttggttgttcggcgtgtgcagggtaccgagct

SEQ ID NO: 672565 - DNA, 369 bp, Homo sapiens
tctagcaggatccccgacctagacgtacacagcactgagtttttattagtgactttccttaaggttaaatttctagtgatatgatgtagtcctagtttagaggacccgaatagcccactatgcctcctcagatctcatagtgatccacccgctctggttctttgtagggatcaccgcctcgttccaggtacagattattgtaaggatactgctttgttcccacaggctggtagaccgggtacatcgtcccccacccagcacatgaatttcatgacagccgggtcaccgaagagctgcatccatcattacatgccaatgaaacacgtgtgtgggggatgtatccacacggttcctgtgttacgtctaggt

SEQ ID NO: 672566 - DNA, 758 bp, Homo sapiens
ctgagccggcgggagcagccgcccacagagccatggccctcagagtgcctcagagtgtggagaagatcgctctgaaattggagtgtggtgtgccctcagccagggcagcctcagtgacggtggacccagtgaagttggtgctggtcatgtgaccctgtgtgtgagtgcatgtgcatgccctgcctgccatacccctgtgtgatgccagtggtgtgcctgactaatggttgatgtgaatgctgtgagtgaatgtgttggatcgatgtggttgcttggtggacatgttgcttgctgtgtgtgccatgttggttgtgttgcccatgtaccttgtggcccttgcctggtgtcccctgccccatctggtggcaccccaatgtgcttggacacagtgatgaactggggttgaggagtgacacaggaatgtgtcgaactgtggtgcccaaatgaagtgtaccccttgggagcccatctgggagaccccagtgccccatgcccaggcatggaccttgcaagggtgactgatgccatgcctgatgatgcccacattctggaggaccccaagtgccccctgccctagcaggggacctgcttggtgtgactgatgccatgcctgagagcccccatcggaggaccccatgtgccccatgccccgggctggtaccttacataggggactgagcccaaggcgaggagcccatcgtgagtaccctaggtccccgggccaggggtacttctggggacgagccagccgagagcca

SEQ ID NO: 672567 - DNA, 452 bp, Homo sapiens
tgggagatgcaggaacttgattgaagacagatactcgatgaagtagtccacctcattatatgcttatctatgtacactctggccttcagggtgcatccagtttcttcctcagtccagatctggtgctgtcagaagctgagatttagtttatggatgcataagacagatcccacaccttagactgggtcaaattaaatttttcatgctgccagctggtactcttgaggaacggtgtgtctgcaataaatacccttaatcatcaggtcagaatccggcatggtgccggtcctgagatggaactgtcttccttttgacgtttgagtgtcaacagagttacccgttgtttccgatgtttgcctcacaaatttcaccagaatccgggttcctgcctcatcggagattagtactgttccagtgcctcattctgtccggaagcacgatcctgggagtat

SEQ ID NO: 672568 - DNA, 280 bp, Homo sapiens
aggctgatgatcggtcttgtgaggccttgtagccatgatggcaatggcataggccacgtaggtcatcggctcgctgtgttggccaaggcagaacagcttaaccacagtgttatgcaacgtccagagcctcagttaaaccggaccaagatctcatttgtgctgcagtctgagttgtttacgttcacctcaggcatctcggtgctcgttgttcttcactctctccagaggctcatctccttatgctgcgagctgcctcctcctccatcttgagcctgtgtct

SEQ ID NO: 672569 - DNA, 137 bp, Homo sapiens
ttataagcaaaaagcttcgaacacagagaacaattgcaaccagcagctcctgaaagtatccatcataacatatcattaatggcatctaccatatcttgcccagaaatatttttgaaattcctggaaaaccagcctgc

SEQ ID NO: 672570 - DNA, 238 bp, Homo sapiens
cggtgatactggaatgcttctctccaccgttatgaagctgtctactttcttatcatctgggatttggttcctattgggttcttttctgactatgttgtgtaacgttcacaaccttcctcagtggagtcatctctgtcttttcacctggtttcattttcatccagcacttatcgctatccaaaaccatcttctttcttatgtacatatttgttatgtttctgtaaacttgcatagagaa

SEQ ID NO: 672571 - DNA, 312 bp, Homo sapiens
gaggatacggggccagtatcaagtatatgagggatcaagtcacaacaaagaacaaatgacccggtgtatgcaagaaatgctcagtatcaccaaccgttagggaaatgcaaatcaaaaccgcaatgagagagatcacctcatacctgttaggatagctgttattaaaaaacacaagataaagaatgttggcaacaatgtggagaaaagggaaccctagtgaactgttggtgagaatggaaattagtacagcctttatggaaaacagtatggcggttcctcaaaaaattaaaaatagaaccaccatttgatgca

SEQ ID NO: 672572 - DNA, 333 bp, Homo sapiens
tggcggacccgccagctgcacctactacttcagcgtggactctgacgtggccctcaacgatcccatcagtctgcggctgctgatccaccttaccaagaacgtcattgccccgctgatcatccggcatgtgaggctgtggtcgaacttctggggggctctcagtgcatatcgcctactatgtcccgttccgagcactacgtgcacattgtgcacgggcggcgtgttggtgtctgcaatgtgccctatatttcaaacatctacttcatcaagggcagtgcccttcggtgtgagccgcagtcctcagatctcttccaccactgccagctgaacccc

SEQ ID NO: 672573 - DNA, 214 bp, Homo sapiens
  misc_feature (28)..(28): n is a, c, g, or t
  misc_feature (58)..(58): n is a, c, g, or t
  misc_feature (69)..(69): n is a, c, g, or t
  misc_feature (86)..(86): n is a, c, g, or t
  misc_feature (112)..(112): n is a, c, g, or t
  misc_feature (136)..(137): n is a, c, g, or t
  misc_feature (166)..(166): n is a, c, g, or t
  misc_feature (173)..(173): n is a, c, g, or t
  misc_feature (181)..(181): n is a, c, g, or t
  misc_feature (203)..(203): n is a, c, g, or t
ttgagccaggcctgggtctgtgtctctnttctctttctccttagtcttctcatagcantaactaatctnttgggttcattattggnattaacctggtgctggatatcctcanattgtatctagtgcagctgatttnnacaataactactgtgttcctgggaatagngtgttcngattaganatgaccaatattatactgaggnagatacgactt

SEQ ID NO: 672574 - DNA, 1387 bp, Homo sapiens
  misc_feature (935)..(935): n is a, c, g, or t
  misc_feature (1047)..(1047): n is a, c, g, or t
gctcaatagggggttacctagcctgtatatgcggacgaggtccgaaccacgcagcaccccacggtgtgcatggctgtgcgctctactggtccggggatggcgcttgcgcgagcccagacggctggcggcgccgaaggacggctggtgagggatgtgtgtggaatgatgtgaccacgggtaccaggtagtgccatccattgcgtctctagccagaaggcattgattccggcttgttcgcgggtgcttgccgtgatactaggctcgaatcgtgcgcgcggcggattgtacggtagagcataaatttctactacaggaatctagcggggctggctcgacaggtgtgtctacctcagggactattacgaaagcgtctaataggcgtacagattcacgcgcgtgcgggaggtttgtattgcctagagcggggtaccctccttgacttgatgccccactagggcgcagacgagacgatagataccggagggtatgcctggggtgtcgttgcgcgtgatttgcagggttgcgtacgttccatgcatcatgggggcacggaaaagcgcgatcaaaacgacacggagtaaccttaatgaagagtaggaccgacaggcgaattgcggaagaaaaacgtgtggtgagtgcttagcaaggcgtacgacctaggagagtaggaccccagtctttacttgtcccaaaacctatcattacggagcggaaatggattggcggctctttcccagttgggtaaggacgcgcacgacgaaaaatcacacggatccctttgagctagagagcgcagaaggactactcacggcacacgacctgcaagggggggccccagactggtctcacattgtcgggcgacctctttgtagggaagaccgcatcttaacgacaagagaaagaagaggaactagctggggcaggaaagcaatagnctgcacatgggtcgagaaggtggtgaacctctaaggcaataacacacgcacacaggcgctgaggcaccacgcgggacaggtcacgacaccgatgggagcaaacagcggaacnagaacccatgagccgggaaacggaggaccaaattacagttagtcggacgcgttacccggggtgcgacggaagacgatttggggccacgcgaagggggacaggcattgctatgcacaagaaaggaaggccagcgagaggagcccatgagcgacactgcaggacggggaaaagtggccaccattacagtgagatacaagaactgcatacgcgaacaaaataggaaaggatacacggagacgcgacgggcaaatcggacagcagaatattaagacagccaaagggtggtatacgtaaatacggcgcaataggcaggaaccggcacaatatttggaacacaaag

SEQ ID NO: 672575 - DNA, 278 bp, Homo sapiens
ctatctgaggatccactaaattgctgtacagttgatagcatgggtctggatcagggagactggagctgctgctcatggtttcgtgtcccacagcagcagcttgcaggaacctggttcatgccttgcttgcgatgtctggtgctgagaagtacaccttgtgaagtgaggctcggagctgctgccgaacagacgaaagaggccctgttgtggctgcatgcacagaagacagtgatctgtgcatgtctgtcgttatatatgagtatcacacgagacttctt

SEQ ID NO: 672576 - DNA, 809 bp, Homo sapiens
ctcgcggcgcagtcaccggcgcgtctatggctgcgattctctaatgtctgctttggtgcccggtgtgacgccggcaagtgtcccttcgccttcgccctttccacctcgcggcagtcgggaatctctccctaggtcaggttgagtgcagtgttgcaatcacggcttactgcagccttgacctcctggctcaagtgatcctcccacctcatgttaaatgaagctgttgtcatttctggaaggaaatgcccagcagatccaagcaggaagtgcggcagggggttagacacaagtgggtggcctccaggcaaacaaacggcacaacctgaggtgtgactccttggttggcgagaatcctggcagtcactcctatgtcctcaaaaaacaggggcagtgcagttgtgggaatcacccagtgagacacattatgaaaccacgttcaattccagaggacgactgttgcatttaatcaataacgtgactatgtgatcatgtagatggctccttgtcagttggctcttccagagcttattgtgacgcgagggtctgcaagcgggtctccaggaccagatgtgatgcgctcatgcatcaatggcgccgaatcggtcggcacggatcccaggtacgggcaccaggggtgggggaaaaccaggatgggttacccagaaaattgtggcgcggacgcaaacgggatccctgatgtgcccaaagggtagccgggggccgacatccgtatccgcggagaaacctgttgactgggcaccacgtaaacgacttgtaccactccccagcgggcgcacaaagcgaataga

SEQ ID NO: 672577 - DNA, 495 bp, Homo sapiens
cgtgacggcatatgcctgtaatcccagctactcgggaggccgaggcaggagaatcgcctgaacccgggagacggaggttgcggtgatccaagatcccgccatggcactccagcgtgggcaataagagggaaactctgtctcaaaaaaaaaaaaaaaaaaaaaaaaaaaaaaaaaaaggggggggcgggcggggggccccgggaaaaacttttaaaaacccacggcgggggggcgcgcgggggcccaaaagggaaagggacaaaggggaaaaaaggcggtccccagggaaaacccggggcaagaaaaagggcggggggactccccccaaataaaaaacccgcccgggggggacacccgagaggcgcgtcgagagaaaacacccaaagagaggggagaccagagggggcacaaaaaggggggggcctatctcacacgggggggcccacagggaggggcccgagatcacaaattacccccgaacggggggggacagct

SEQ ID NO: 672578 - DNA, 331 bp, Homo sapiens
  misc_feature (19)..(19): n is a, c, g, or t
  misc_feature (71)..(71): n is a, c, g, or t
  misc_feature (76)..(76): n is a, c, g, or t
  misc_feature (146)..(146): n is a, c, g, or t
  misc_feature (299)..(299): n is a, c, g, or t
  misc_feature (304)..(304): n is a, c, g, or t
  misc_feature (331)..(331): n is a, c, g, or t
tgaagatctttatttttanccccaaaataagcgtgaaagtcaaaaatgggtgtgttcccctgtccgggcgnagtgnctcatgccctgtaatcccaacactttgggatgccaaggcaggcagatcacctgaggtcaggagttcaagnccaccctggccaacatggcaaaaccccatctctactaaaaatatttaaaaatcagctgggcgtaatagcacgtgtctgtagtcccagctgtttgggaggctgaggcaggagaatcgcttgaacccaggaggcagaggctgcagtgagccgagntcatnccactgcactccagcctgggcaacagn

SEQ ID NO: 672579 - DNA, 225 bp, Homo sapiens
ctactctcctttgttatcggtgtaaaatttctatatttattataataacactagtagtcctattatttatcttaaagcctagactaaatctagtaagctttccatatgcactatagaataaaagtcctcaaactacctattcaagggcaattaataaatccggacactatagctataaatactaccatattttaaactactacaatcagtaacactatatattta

SEQ ID NO: 672580 - DNA, 640 bp, Homo sapiens
gcgagcggccgcccttttatttattatattatccatttaattcgttgactgttatatggtttatgtttgtaatattataagtgcaatgtgatagcatgcccgcggctttctggcaggtgtgtgactaatactctgaaaatactggcttcagttagacgccaagatggctcacgtcaagctaactttcgtaagttatgccatctttatatttgtcttcactctctattcttgtcgggtgagcagagcgcggggcagccaaaacggtggtgaccacacggccgcgtaattacgtcccacaaaagagagggtcgagcgcgcggggcaccgacgagagagattgttcaatagggtcccaaaatcgatcaaaacccactgggggctttcccggtctccactatctcccaagtaagtaagagtgggcttttctaaaagaggatgtgtgggttatctcactcctaatcaatgctgtgtgtaaagctacaacacgtcaaactcacaggcggcgggccgagcgaggtaagagacagcgcctaaaacaaaggcggccagcggctcccgttgggaaacccaaggacatctaaaaacaacaaccatggcgacacactagggtaaacacccccactctatatcataagacaaa

SEQ ID NO: 672581 - DNA, 419 bp, Homo sapiens
acataaccgatatggcggtcttttcatggaataatatcttatttgtattaaataaaattaccagaattagcactggacttccatttcagttcagctgcactcaattcaccctagagaaccctcacattgattgagcatcagtattgtatgccaggtactatgtgacatgatacacaaacacaatgtgagatgtgtttgtgagatgtacaatacgaaaatgtgagacacaaaaatgtgagatggacacaaacactagtaagaagtaatgttgccattgaaccacaggctctttgagggcaggggattttttcttatttgccattgttttcccataacccattcctgcctggcacatagtaagtgctcagtagataagggacaactgattaaattatcagctcaagcagtccgtggtctcc

SEQ ID NO: 672582 - DNA, 432 bp, Homo sapiens
  misc_feature (214)..(214): n is a, c, g, or t
  misc_feature (263)..(263): n is a, c, g, or t
agacaccaacctcagagacaaaaattgtctacaacccgtggatggtaccatgtcccttgatatgaaagagcaccctgatgctgaggtacaaaagaaccaagtactaaccctggaagactggaaagagaagtgggtgacccgtcacatctcattccatcaggagcaagggcatcagctgttgaagaagcatttggatacatttcttaaaggccangagtggactgcgagtgtttttccccctctgtggaaaagcccgttgagantgaaaatggttcgcagatcggggccacactgtagttggtgtggaaatcagtgaaattgggattcgggaattttttgcagaacagaatctttcctacacagaagaaccgctcgccgaaattgctggagccaaagtatttaagagttcttcagggagcatttccttatact

SEQ ID NO: 672583 - DNA, 835 bp, Homo sapiens
tcaaaccagtctgattataattaggaagttaaataaggttgaggggggggggagggggactcatcaaaaggctgactgtgggcccgctggattgggcaactcatagcagtggtgaggttgtggcaaggggagcaacccccttctcaagaacaaggcacaaactattatttgtggcaaggagaagaatgaggggtgtgggcaccctccacgtgcgtcaatgtggcacattgcctcgagggaaggccaggtgggtttcacaagtgcaacaggagcgcattcattccgaggcacacttctcgcaggccctagtgagagcgccggtgggcctatctgtgtgtgagaggcgcttgacagaggtctctccagagctgtgttctctctccaagagcgtcgtgtgtgtgaagtctcacacctgtgggaaagaacagttgctctccccaccgccctgtggtgtgcagtctctttatctccacacaactctcctctgtggggccagagcgcgaagtatataaaaaatgtgctcgccagtatacttctccccacagtctcacttgtgtggtctgtgaccccccatgtgtgtctcccccctacgtgtgccccgctcttgtgagacccacccatgggtgtttgaaactctctatatgtgtgggcggtgacacgtctccaagtgggggcacccccctttggatctcctccctttctgtgccccaccctgtgggggcggcaaagctttctccctcctttaagccaggactatggtgctccaaggctttagaagccaggccccctcttgtggtgttcccaccgccgtggaaaagggggctttcatggcctt

SEQ ID NO: 672584 - DNA, 409 bp, Homo sapiens
acccgggaaattgggccattagggccggaattaagggttaattaaaaggaccttttccggggggaggggcggttttttaaagggagttggaagcctttttaaaactataatccaagggaagcggagtcctaagggaccagttactcattagggcattccatattaatgggctttttctttaaagccttaatcttttttttggttaaattccggaaccgaaaataacttaagggaaattaaaaggctggaattggaccttaatccaggatacttttggaggttcctttaaattttggaaggatgaacggtttcttttaaataaataaaaaccaattaatactttcctttggattggggccaagaggttggaccatgagggcttggaggggaatggggaataggggatttt

SEQ ID NO: 672585 - DNA, 1196 bp, Homo sapiens
ttctttgggctcacatttcagcgactgatagccttcacctgtcccttaattccctggggggacataagccctttccacagacctggacttgagtatctcttgtacctattttcatttggcacgaaatctcccggtttttgtgggacaaatatctttaatctaatgggatagacccggggtcttgaccgatatgcttcatgtatcaacgttcctcgcgacaggattttcacaaagtgctgcccaaataccaactgcccttctttcctgcaagctttcttctcttacgcagccattcctggtgaacggtgatatgatttatgggcaagattttaacacggtagtacttctggtctatctgttatcttatagattctgggggcactaataatgtcctcgagtcacttacaacgccctaaaggtggattgtgattggctatgaggaatggggtatggggatggcatggaagagatgggttctgactctgagatttcatgaaattgcaaaactataggacagctgctcttccataaacagattattattatgtagtttctacgatagacagcttgatagcagccattatcttctttctgggtgtcttatcaagttccggctgtgtgcagcactgggtgataaggaaagagacaatgtcacccatgggattgccaaggacttatttctatgcactgctgttcagcaacagccaatctctcagaactgagaagaagtcctattgttcacgctgggcagttgctattctgactatcccaagagagcagaaaagggatgtagttgccattgtgcaaaagattgatatttcattactctcagctaaagttctgaaaagcagaatcatcatgaaatatctttgaagagagaaaagacaagggaagaaaagaagaatgaaatgagttcagagctttttagaactgtgagggagtgcgaaaaaagaaaggtgtaatactttcaaacagtggaagttaaaatgccaggcgtgtaagcctcagtgaaattgagcagcatcacgtcaccacgacttgtggtccagctgtttattgcaaagactccatcctgcgttactcatcagaaaatagttaactttgtatctggcattattttaattaaaaaaaaagttaacttactagatttctgtttgtctgtgtttcatacaaggttctgtacgccatgtcgttga

SEQ ID NO: 672586 - DNA, 1773 bp, Homo sapiens
  misc_feature (1373)..(1373): n is a, c, g, or t
taaaaggcgcggacccggttaattggggcaggaaaacaaaacaacccagcccccccaggaggggaacggggtggacttataaactcctctcctctccttcgtttggttctctccgagccccagccccaccgctgggccctttcttgggaatttcttccttctttacaggcggccgggggggccaccccgcgttaggaagaagcgcaaagaaaaagtctcagatgtggtgcttctctgtggagaatctcccagggcggaacaactgtagaagagagacgcggagactgttctcaacacaccctgtgtcttgtgcggagaccctgcgtgaaatatgtgggccgcgtggggaggatctcagacaccgacagacgcgtgttggtgtgagatgtgagctctcgtgggcccaaaagccccacgagtcttcgaaaaacacctctggggtgtctctgagaaggagagggcgatttctctctctcctagaagaaaaatatctctctctctataattctctcacgaggggcccccgagagatatgtgtttatatccccgagatctttcaatacatctggtggccctctatcatatcacgacgagagaaacccccccagtagaggggggcgggaaaacccaaagcagcgcgcgcgcggaacaacaacgaagggggggcgagatgagcctcctcttcgcgaaaaaaagaagaagccgcgcggcgggggggggatcactctatcttctccactattcaacgaggaggtgcggtcacagaagagaaaagataccccccggcggggagggagcacctctatgggggggaagatatttcctgcgcgggggccacagggagtgtacaaatatttgtgggcagcccctctcccgaagaagaaacctctccacagcagttatgagggtgccacccggggaaacgccccacataaaactagcgggcgagagtaaaacaaaagtgtcaacacacagaactcactgggagagtgcccagaagagaaccgaaaaaacaatctccctcgcgaaaaaaggggggtacccccccgcgggagggggggccacacccactaaaaactcttctcgggggaggacaaaaaaaccccccaagagtcctccgtgaggggcccaaattgggggggcagttggtagaggaccaaccagcatataccccacaggtttttggggggccataaaagcgcaaccagggggaggagtgggcagtcctccttataaaacaaccacggcgggccgaccaattcttctcacaactcatggcgggagcgacattatccaccagagggtcgcccacaaatatgcacagcgattgctcaccccctatcaacgagcagagattttccttctcgccgacnaaaaaccctcttttgtggttgacgaccacacagatagctgctcgtgacagtgcgttgggtggcgcccgcccaaagaatagttattttataagtcgccacccacacgaggagttaacaccagagcgagaaaggagctgcgcgcaggaggggggacgacatatagacccgcgcgcacgacagcagggggtgtgactccatcaacacccacctctcatcgcaacacaactgtggggcggcccccgctcgaacaagaaaaagcggcagcaaaataatcaccgggcgctcggcaaagcaagcagccagaagaaataccgaacaatgggcagcaaccatgagggatagtaacaacgaacaacacaacctgtagaggggaggagcacacacacggagatcggcccgg

SEQ ID NO: 672587 - DNA, 994 bp, Homo sapiens
  misc_feature (971)..(971): n is a, c, g, or t
  misc_feature (979)..(979): n is a, c, g, or t
gctatgaactcgtgtgatcggccgaggctgtgctgagttctgagaccagtgttgctccgtccgtgctccgcctcgccatgacttcctacagctatcgccagtcgtcggccacgtcgtccttcggaggcctgggcggcggctccgtgcgttttgggccgggggtcgcttttcgcgcgcccagcattcacgggggctccggcggccgcggcgtatccgtgtcctccgcccgctttgtgtcctcgtcctcctcggggggctacgggcggcgggctacggcggcgtcctgaccgcgtccggacgggcttgctggcgggcaacgagaagctaaccatgcagaacctcaacgaccgcctggcctcctacctggacaaggtgcgcgccctggaggcggccaacggcgagctagaggtgaagatccgcgactggtaccagaagcagggggcctgggccctcccgcgactacagccactactacacgaccatccaggacctgcgggacaagattcttggtgccaccattgagaactccaggattgtcctgcagatcgacaacgcccgtctggctgcagatgacttccgaaaccaagtttgagacggaacaggctctgcgcatgagcgtggaggccgacatcaacggcctgcgcagggtgctggatgagctgaccctggccaggaccgacctggagatgcagatcgaaggcctgaaggaagagctggcctacctgaagaagaaccatgaggaggaaatcagtacgctgaggggccaagtgggaggccaggtcagtgtggaggtggattcgctccgggcaccgatctcgcaagatctgagtgacatgcgaagccatatgaggtcatggcgagcagaaccggaagatgctgaaccgtggttacagccggactgaagaattgaaccgggagtcgctggcacacggagcagctccagatgaacaggtcgaggttctgactgcgcnaccttcangtcttgagattgact

SEQ ID NO: 672588 - DNA, 210 bp, Homo sapiens
cagctggccctgcaggtttccctcgagtatgagaaaagtggaagcttctaccacacgtgtgcggtcatgcatcgcccccgactggttgtgactgccggccactgactctcgagctctggacctaccagtggtgttgggcgagtacgacgtgctgtgaaggagggcccgagcagtgatcccatcaactctgggactctttgtgcatcactc

SEQ ID NO: 672589 - DNA, 701 bp, Homo sapiens
gctatgaactcgtgtgatcggccgaggctgtgctgagttctgagaccagtgttgctccgtccgtgctccgcctcgccatgacttcctacagctatcgccagtcgtcggccacgtcgtccttcggaggcctgggcggcggctccgtgcgttttgggccgggggtcgcttttcgcgcgcccagcattcactgtgtgtgtgctcctgtgctgtgcctgctggctgtatcctgttgtcctcctgaccctgcttttgttgtccctctgtccctcctctgtgtggtgcctactgtgcagtgctgtgctactgtgctgtgctgtccgtgacctgctgtcctgactgggcttgcttggctgggcaacgagacatgcttaacaccatttgcatcgaaagcccgtacgagactggaactctagacacattgtggaccttacactaaaacccttgggaaccgaaatgtggtttgtctgccgacccactttgtggatgtggcctgtgcacccaaaactggtgacctgaataggccttaaagagaaggaggttttgaacagagaaattccacagtcaagaacacgttgggtaaccccatgaacaatgcaatgtggtgcccattggtggcacacatcccgcagacagagcgtagccatggccaacgttaaccttaaccacgttgaaccacagattcaccaagaggtgaaacccag

SEQ ID NO: 672590 - DNA, 864 bp, Homo sapiens
gaggcaggagaatggtgtgaacccgggaggcggagcttgcagtgatccgagatcgcgccactgcactccagcctgggctacagagcgagactccgtctcaaaaaaaaaaaaagtcagggattgggggaaggagatccaccctaaattctgcggggcacaatctaattcagcttctccagcaaattattaaagcagggtagaaaaacgtgaaaaagagagacagggccttagccttcccactttatacattgtttctcccgtgctggacgcttccttgccttttgaacgtcggactttcaagtctctctcagtttggggactgtggactgggctctcctttgaatccctcagtttgcaggacaaggccttaattggtgggaaacctttgctagatcaatatttacggaaaggacaccgacacaaggatttgtcgcatgggttattcccatagaaacgccgacctaacaaaattagggcattcggacagcgaaacaaacgattatttggccagggccaaattgaacgaaggaaatctcggggacacgctgcgatttgacgacgacacacgtgttgttaccctgtgagagacatttaggtcgggacccgaggagcaaaagcgagggttttaaccgcccccagtgtgaccaaacccttacgaagaattttttttccaaaggtgcacaagacgcccaggggattatttcggcgaggggggagccacatatatgttgaagtggcccgtctcgatttggtgaacacgccccatcgtagtacaaaacacttaaatgttgccacagggtggtaattggcgccttgtcaattaagaggggcattttgcaacaagggccccccccaaccccttgg

SEQ ID NO: 672591 - DNA, 121 bp, Homo sapiens
tcgcgtgtatggctcggacaggaaggcccagaagtgacgcagccctctatgggccaaatcttctacagtcgctccagtgtcttcacggagctttgtagtccagaccatatggctaggacct

SEQ ID NO: 672592 - DNA, 446 bp, Homo sapiens
tgatacaaccgcgttgacgagctctcccaatgtcgacctgcaggcggacgcgaattcactagtgattggtgcgctgagatcgccaccactacactatcagcctaggcgatagagtagagacgactcctccaaaaataaccacataaattacttgagtgctcagtgtgagtggctcactgtctatatatcccagccacattggtagagctgagagcaggaggattgctagagcccaaggagttcgagaccagcctggtataacctatttgagatcatcttctaccaaacaataacaaaaacttagccaggcatggtggcacactcctgtggtcccagctacttgggaggctgaggcaggagaatcacttgagccttgggacgtggcggttgcggagagcccagatcacgccactgcactccagcctggcttgggtgacagagtgaca

SEQ ID NO: 672593 - DNA, 413 bp, Homo sapiens
  misc_feature (237)..(237): n is a, c, g, or t
  misc_feature (247)..(247): n is a, c, g, or t
cgggtgtagtggctcatcctgtatccagcccactttgggaggcttcagcaggaggattgcgtgaggccagtggttcgagactggcttgggcaatgtagctagacccagtttctacgagaaatacaaaaattagctggatgtcttggtacatgcctgtagtcctagctacttgggaggctgaggtgggaagatcacctgagcccagggaagttgaggctacagcgaagcatttagccnctgcactccngcctaggtgacagtgagactgtatctcaaataaataaaccagtaaaaatgtttacctgtagggagagagataaaatggtaggactgaaacttttcttagcgtaggtttgactttagaaccagtaaatgttttacataattacaaatcaaatgaaaaagagctagcc

SEQ ID NO: 672594 - DNA, 592 bp, Homo sapiens
ctgatggtgaaacatggaagaatatagccagatgaagacgaagttgatggcctggagaaaaagatgtttgcctactgtgatccgaaaaaattacctgggggtccctacttatggttttacatgcttcgggctgctacatcaaactctctcagtgtgtgacttcctggagagaagatggcatctgtgggggtatcagcaccccaaagtaccaatatgccattgatgaatattatcggatgaacgaaggaggaagaagaagaagaagaggaaaacaggatgtctgaagaagcagaaaaacaatattcaaccagaataatgttgccagacttgattccatttgtttcagacaggattccacccagagacaaggggatatccaggctccattctgtgaactgtcaactctttggacatgggcggcgaacagtcgcagtatttttggacacgcacgcaaactccaggactcggtcgcaccataaaatgaaatgacttcaaggtactaacctctcaagtatttttatcagtcacaaaattcacatctcttttcaggggactaataaacttctcagtctagatacgctcggacgcacac

SEQ ID NO: 672595 - DNA, 360 bp, Homo sapiens
  misc_feature (11)..(11): n is a, c, g, or t
  misc_feature (281)..(281): n is a, c, g, or t
  misc_feature (308)..(308): n is a, c, g, or t
  misc_feature (336)..(336): n is a, c, g, or t
ggcgcctgcanttgctgaggcttgagtaggtaaacaaagcagccaggaagctcgaactgggtggagcccacgacagctcaaggaggcttgctgcctctgtaaactccacctctgcgggcagggcatagcaaacaaaaggcagcagaaacctctgcagacttaaatgtccctgtctgacagcttcgagagagcagtggttctcccagcacagagtctgagatctgagaacggacagactgcctcctcaagtggggtccttgacccccgagtagccttaactngggaggcaccccccagttaggggaggnacttgacaccttaacaccttgacatttnacccctcttgaggacaaagtttcc

SEQ ID NO: 672596 - DNA, 168 bp, Homo sapiens
ggcttttgccccccccttttttctttttgcccaaccccttttttagggaggggcttttttttgggcccctttttaccccttttcccttttaaacccggggaagggggttatttctgttttttttggcccagggccccccataaatcctatgggaatttttttttttta

SEQ ID NO: 672597 - DNA, 1377 bp, Homo sapiens
gacagtcccgccttgtgtgtggtacccttgtctgtatacaacggtgggtgtgttccgcacggtcctcccccccgcccgccgtgtgctgacaccaggaagataacgtcccgagtggtgtggtgcgtgttgaccttcgctgcgcccccccaccacaagatggggcggctggcggctgttagttagaccacccgcaccaccagaacaaaaggcgtgcggcaccataaattattgggggggcacccacatgcggcgaaacacaaacgagtgtgtggtggctgggaagagtgtatccccccgcgccccatgtggtcaccccccccccccccccgcgggggagtaacaaaataaggattaataaagtgtgaagagcccccctcaggtaaccctccctcttccccgcgggatagagagtatagcacccccgctcctctcgctagtgcggggtttcgcgcgtgtaatcacacgcgcctcgcaagaaataaacactcttcgggagagaaaaaaaaaaaaagttgggccgcacaaataccaccacacaaggggtcttctctctcacaagagaatccccccccagaggaacactctcggtgggtgtgtgtggcgcgccctcccctctactaagagagcctgcgtgtgttagtatgtcgtctctctacacacgcggtgtgttgcgctcgcccaccctctcgtctccgcccccctcgtgtgtgtgcccctctcccggacgatatattattcctcgcgagacaccaccacgcgggtcgcacacaccacacgctgctcacacacgcgggcgcccacacacgcgccaccactcccgcggagacacacacggagagagaactgcggtgagacacacacacaatatatagagatgtgtgtgagatgtctccctccctctcgcgcacacatgtgtgggctgtgtggaatcaccacccccgagagagaagtgtggcgcacaccgggtgcgcgctgtgagagtgtgtgagagcgcccacacagagagagagagagagccacaccccccgcgtggtcagagagagagaggaaaaagagagagcgcccacacacaagcgggagagggagagagagcgccacaccttctgctgctggggagaggggggcacacaccgtgtgggaactctgccccccgcgggacaaaaactctccgccacccgcgcggtgagaaaagggccaccccccgcggggcaccaccacacgagagcctggctctggtgggacacaccccgcggatgtatgtgttagagaacaccaccaaagaggcgggggagaaaaccccccccccagggggcaccccccccccccccccccccccccccggggtgggggaacccccaaaaaaagggggtgtgtaga

SEQ ID NO: 672598 - DNA, 177 bp, Homo sapiens
tgtacaaagatcagactctgtatcaaaagtacctttgccctaaggaagagtgagtataggagtcatcttatctattacgtaccaaagcctccctttttatttcttgagccaggattggagcttggccaattccgattggcaatccttcataactggcaacatttgttgttgtcatct

SEQ ID NO: 672599 - DNA, 205 bp, Homo sapiens
ggagcagtgtccgataatcattcctctccatgtattaaatatattgcatatatcatctccagtggtcagctggaaggccaagggccgcataggttgctctccagacacagcagtgtcatttgtacaaaatgggccagctacacttccagcattaaacaggaaggagtaggttctcccaaggtgatccacatacatgaatggtggc

SEQ ID NO: 672600 - DNA, 286 bp, Homo sapiens
  misc_feature (201)..(201): n is a, c, g, or t
cgagtagctgggactacaggcggccgccaccatgcctagctaattttctgtctttttagtagagacgagctttcaccgtgttggccaggatggtcttgatctcctgacctcgtgatccgcccatctcggcctcccaaagtgctgggattacaggcgtgagccaccgcggccggcttctctccttcatttctatgtgccagntatacttggttctttctgctcttctaacatttttctttgttgttgttgttgttgttgagacggagtcttgctctgttgccaggct

SEQ ID NO: 672601 - DNA, 259 bp, Homo sapiens
ggataagagagaggcatctaaaaaagccatcattttctccatctatcaagaaaattccggggggctggtgactttctcattggcagatctgaggacatttggctaagagatgattctctcaaatgggtaggctccggctccaaatgatgtccgccagtatgtggtaagaaagcccttaaataaggaaggtaagaaacctaggaccaaagcacccaagattcagcgtctggtcactccaggtgtccggcagcaggggtac

SEQ ID NO: 672602 - DNA, 1501 bp, Homo sapiens
  misc_feature (208)..(208): n is a, c, g, or t
  misc_feature (1335)..(1335): n is a, c, g, or t
gatggacggtgtcgtcagtagtctctggcaggcttgcctcattcaaagtgcggcgaaagacttgaaagacgctcctccgtacatttagtgggatgagatagccggtgcccagctggtacacagctagcaaagatgcattagatcgacctatgactgacgaacttgggttctagctacagccgagaccttgactctctcgacgagctgncggcaccatgtagccttctcggggctcgagctcgcttgggggattgagcttctcgagtgactcgatagactctactggagggacgcgtcagttagaaacagtgcgtcgatgccgctagggcgcgacctcttcgacgacgcggacgcgtcttcaccaaacgcaaagtggttggggcacctgtccgggagatcaccgtgcaaggacaccattgcgacgggggagtctcgtaaacacttgagatggacaaagggaaccatagtaaatggccgagacacgggaaacactttggaactacctctagtggaaacatacataagtactccgtggccgacgagcataattcagtcccgcgtgacgcaggggtgaggccaccgttctaagctcacaaccaaaaggtacaagacgaaatctcaggaaaaccaaagatcgcgattgtcctcggtcgctcttacattaatagaaatttggtcaccttcctagtctcccggttagaggagaagacagaagatagttgaaaaactatggtcaacgaaggtgggctacttcaaattaaggtggggcctgggggggaatggccgaggaattaaaaaaaggccgcagtgaagtgtcaggggtgacaccttggggtggggccccaacaggtggtggtgacccctcatattgagttgtggtgatggtccccacctgtaggtaaccccccaaaagcgcaagttctttcaacggggaagccctaaattaagagttggggcccgctaacgaaaatttggatagcctcgggaaggaggtccctggcgcggtgtaatcacgtttcgaagagtttggcagggaaaatggaataactttctgcggcactacaatggggcgccaaggggtgctattttcccaccctcgctgcgagggaaataatgattggtggcaacactctctgcggagggagaaaacaaccccagggaaaacacgggggtatccgccataaattaccccccgttaccccgagtctctttaagccagccgccaaagaaaagggtatttgtgggccaaatttacttggcggaaacagcagcggggtttcccaacagccttatatgcggggggacaaaagcacggttattaacacaacagggaancacaatggagtgggagcggaaacggcccagcgggccattcctatggggtaaaccaggttttacgctatgagataggattacccccattcgtttgggtaggacaccccaagttccatatagcaaacacggaccccattcgtcgaagctcacccgccgtttagtagaa

SEQ ID NO: 672603 - DNA, 352 bp, Homo sapiens
  misc_feature (170)..(170): n is a, c, g, or t
  misc_feature (307)..(307): n is a, c, g, or t
gtcgactctaagacctgcaggttatatcaaagctgaagtctagaacgaagaccatataaaagatgattttaatggaccagcaccttggaatatatttgaaaacatgatttaaactttagaaaataaaattttaatacttaagagataacatgatgcaaacgttgcttgtnggcctgactttccaggactaagcacctctgtgaatcaatggggctcgggtgaacatggcgtaacctgctacgtgggtgtggcctcagacaccaaaatccccactgcatgttgggtctacagacggcaggattctctncattgctaggatgactctggaaattaagcctttgcaaggtaccca

SEQ ID NO: 672604 - DNA, 657 bp, Homo sapiens
gagagagacaggcagacccctccagaggcccgccagggtgggcatggtccccgcagtattctttaaggcagacagctggagtggacgagaggccactccctctaccagcgcccgcgatgtggacccggggaggggaggctgaggcgttgggccccggactggaccaggagaggcccatctcctcagggtcagtttcaggtgtccggctgggcctctgaatgtcgaaggatatgtatattagccacgtctcctgggtccttggagtctgtggccctttgtatctacgtgttgttgtccattgtgttgtagtgcgtggggggaacacgagggcactgagaacattgtcggatgagaactagtaacatgatgaatggcatgagtttttgttgagaaaggtccaaggcaagtgttgggacagagtcgagtgatagttgaggacggaagattgcccaatacgggcttgacgcttggtgtagagattgagggcataactgtattctaaacaccatgtgaactattgatgctagtttagacattgggaaatttgacagactttgaaaaaataggggactgtcttacgtgccaattgctaacattctcaatcacggtttcatccaattagtattccggacagctagtgtacaggagtatatgaaa

SEQ ID NO: 672605 - DNA, 392 bp, Homo sapiens
  misc_feature (196)..(196): n is a, c, g, or t
  misc_feature (207)..(207): n is a, c, g, or t
  misc_feature (213)..(213): n is a, c, g, or t
  misc_feature (308)..(308): n is a, c, g, or t
taccttcctggtccccactgaaaaagatgagtatgcctgccggtgtgacatgtgactttgtaagagcccaagatagttaagtgggatcgagacatgtaagcagcatcatggaggtttgaagatgccgcatttggattggatgaattccaaattctgcttgcttgcttttttaatatttgatattgcttatacactntacactttatngcacanaaatgtagcggttataattaatgtttaacattggacattgtatcttctttatatattctatctttgatgtgctgtctccattgtttgatgtatcntgagcaggttgctccacagggtagctctaggagggctggcaacttagaagtgggggagcaggaactagtgagggaccaggaact

SEQ ID NO: 672606 - DNA, 128 bp, Homo sapiens
acgtgctgacagcatagttttaagtttcttgtcctttttttgatacaagtgtctcactctcgtcacccagtgccagtatcttgcgcttatctgcacacttctatcctcccaggactcaaagcgattct

SEQ ID NO: 672607 - DNA, 107 bp, Homo sapiens
atccccaacagtagagtcacaccacctgagtcacaccaactgcgtctaccacggaccagccattgagtctcattggagagtacatcaaatatcaaactagtgttgcc

SEQ ID NO: 672608 - DNA, 130 bp, Homo sapiens
tatccgtgtcggggttgcccaggagcgtctgcccgcggcgggggcctgatcatccccacagtccaggactagtcgtctactcgttgccttcctcagtggctactctctcgtgctgatgtgagccttacgt

SEQ ID NO: 672609 - DNA, 1448 bp, Homo sapiens
gtaccgtggtgtgatgatgaaggagaactctctcccgtgtagtaataaattaatatgtagccggcgtgtgatgggatgcttctcgactcacctcacgtctgcgggggggagagcaacatattttgttcttacacccaccctcgtgggtgcctcccaccttcctgtgtgaagaagtatctgtcggtacaagctccgccttgtgataaaaaatgggtgggttgaatagatgccgccatatttcttcctgccagttatatgaccccgactgactttttgtgcccccaccctccctatttttgagagggtatcgcgggtgtcttctagcaaaaagaagctcaacagagcgggccccctcgtcggacactcgtgaatgtgggtccccaacgaaaccattaggcactttgagaaatttcaccggggccgccaacagcggaaatctgtttatatgcggcactaactggggacactgcttgataaagtagtcgtgctggttgctgcgacacagagaccaatggggggccctggataggccccgatggggtacccaataacctctggtgaagggtttatccgggatatctctcaaacacaattctgggggggaaagcctgtgcttacacaaagagacgccgagagtttaaaccaggaggtgtcccccccccgaaggaccacttccacggaaaccccaaatagtgccttagaaaagttacacacgggagccttgggagtgcacatgcacaaagggtgacttgaggggagaacccgccctgaaaggtgaagagaaacactcacgtccacgtgggcacagaccacccgtgggaagaatacaaggaggatatgaaaagctttgaaagagaggtataaaagagaggagaggggtgcgccacaaagagagagtgacacttttgggaatggagagtggaaaaggcgtaatgtccacaaatataaggagcccgcggcacacaaagtatgagaatttataatattccgcggaatatcccacaatgaaaggttgcttgaatggggcacactggaaagaaagggaatttgttctttcacataaagtccacaagaggtgaaagagggcctcaatgcctgaagaattcggttattggagccactcaatttccggaaagccacgccaatgaataataaacgtttcacgctggaagaatcaaattttggagacccttggccgccccacggaacgctggcggcacaggggaaggacgaaggtggaacgtgggcgctggtgggcgccccaaaccgtggcagcacggagccgaccacagtcaaagtgcttttgctcctgaatgtggaatgaacccacagagggcacattcccaagctttggccttaaacttggatgccataagacaaccctggttcctttgtgaacccttctgttcaaagcttttgcaagcttaaggattcccaacgaactaaga

SEQ ID NO: 672610 - DNA, 196 bp, Homo sapiens
atccaggacacaggacttccctgcacatcatcatgagtaccccagacagctcgtggatcctgctcacatggcccatccaaccccaccagcagcgtaggactagggacagcacgctaccccagctggggcagtgtggcactcagcaccatgcagccttgctccccagtggacaaatcagctctaccgtacacctaat

SEQ ID NO: 672611 - DNA, 224 bp, Homo sapiens
ataactccttcgagatactctgctaagggtaataaagaaggaataggatgttgtgaatcagagtgaaaatctaaaacctcaaacactatcggaatttactgtggtttaccttcaaagcaactgtatgacattagattatgaagatgagaaatatttaaccgattcgcacactactttttattgctaatagcagccaacaacatagtcagcgagctagataccct

SEQ ID NO: 672612 - DNA, 198 bp, Homo sapiens
cagaagaaaaagtgctgctgcactatcagactctgtaacactaatcgatacgtgatctctgttacaaaagacaacagcaagtacaggttccaacatgcaatacgtggtcaacttaaggtatatttagttgcagtccagctctttagactgggtggtatgggggatacaaacttaaagcaaaaaactatcaactacaaa

SEQ ID NO: 672613 - DNA, 1502 bp, Homo sapiens
  misc_feature (79)..(79): n is a, c, g, or t
  misc_feature (312)..(312): n is a, c, g, or t
tggctattaatcctgccacaatattttaaattacgtacaaagatctgactttgtcacccagggacccatttacacccangtgctggctgaccagaggcccccctgaaccccaaggccaacaagaagaagaagatagactcaggattattgtttggaagaccttacaaacaccccgggccatggtactgtgcgccatctccaggccgggtgcttgttccctctctatacgcctctctgtgggccgcaccactgtggcattgtgctcatgtggacctctgtggaagacgggggttcacccaaaacggggtgccncattcttacagagggctatacgcccttccccccacatgagcacatctcctgtgtcgtatctgtgagaccctgtggctgtgagcccggagatccctgtgaccagatatatatctctctcatgtagaagaaatctcctctccaacgtagaagacagagaggctataacagcgctttcaacgcgaacacaagtgagcccagaaagcgggagaacactcgtgtgcgcgcaaaaaactccagagagagaaaaaagccgtggtgcacatagcgttccgcccgcgtggacactctgcgaagctcgaggaagtaagtggccccacgcgagccggaaaaatcactctcccctcttctcctcgtgggagaaaagaagccttacgaagtctttgccccgaattggcggccgaggggctacactccacccccagttgggggccaaaagtcgaagacgggggtctccccaggagtggtctcacgggaaaaagaggcgcccattgagtctccaccaacgcgcattctcaactatctaccccagtggggaggattaattggcagaacacttcattgtggagcgggggacacatatcccacaaggagaaaaaaaacacactctttttccaaaaatatcccacaacttcaagtggaaccacgtgcggttggcacgggctgcggcaacaactccccgcagaaaaaagcaaaccccgtggataagacggccacaacaacacacggggtgtagcacaagacacgagcgggcgcgggggaaaccccacaccacaatggtaaatcccgcgggagcacttgacagtacacggcggagtttcacaaaaagggaggaaatcaaccagcacgcttgtgggcgcacacagagcacaccacagagaaagattaacgaaaaatcatcggagcccccaaaagaaggcgaaagaaaaccgggaggagaggaacaagagggcccacaccacgaggacccaaccgaggacaccttccacgcaaattggcggttgaccacgcccggagggcgaagaaacagacttggcggcaccacaaatagaaccacacaacaggcttaatcagaagacccgaagcagaagcaagcacgcgacggcggaagaaaaaaacaaaaaagacgcgcacagagacgacacacatctaccacaccaatacagcacacgacaactagccacataatacag

SEQ ID NO: 672614 - DNA, 945 bp, Homo sapiens
  misc_feature (50)..(50): n is a, c, g, or t
  misc_feature (88)..(88): n is a, c, g, or t
  misc_feature (163)..(163): n is a, c, g, or t
  misc_feature (173)..(173): n is a, c, g, or t
  misc_feature (179)..(180): n is a, c, g, or t
  misc_feature (182)..(182): n is a, c, g, or t
  misc_feature (194)..(194): n is a, c, g, or t
  misc_feature (202)..(202): n is a, c, g, or t
  misc_feature (207)..(207): n is a, c, g, or t
  misc_feature (215)..(215): n is a, c, g, or t
  misc_feature (239)..(239): n is a, c, g, or t
  misc_feature (241)..(241): n is a, c, g, or t
  misc_feature (246)..(246): n is a, c, g, or t
  misc_feature (286)..(286): n is a, c, g, or t
  misc_feature (290)..(290): n is a, c, g, or t
  misc_feature (306)..(306): n is a, c, g, or t
  misc_feature (309)..(309): n is a, c, g, or t
  misc_feature (321)..(321): n is a, c, g, or t
  misc_feature (326)..(326): n is a, c, g, or t
  misc_feature (335)..(336): n is a, c, g, or t
  misc_feature (339)..(339): n is a, c, g, or t
  misc_feature (351)..(351): n is a, c, g, or t
  misc_feature (391)..(391): n is a, c, g, or t
  misc_feature (402)..(403): n is a, c, g, or t
  misc_feature (414)..(414): n is a, c, g, or t
  misc_feature (422)..(422): n is a, c, g, or t
  misc_feature (424)..(424): n is a, c, g, or t
  misc_feature (434)..(434): n is a, c, g, or t
  misc_feature (440)..(440): n is a, c, g, or t
  misc_feature (442)..(442): n is a, c, g, or t
  misc_feature (450)..(450): n is a, c, g, or t
  misc_feature (456)..(456): n is a, c, g, or t
  misc_feature (523)..(524): n is a, c, g, or t
  misc_feature (528)..(528): n is a, c, g, or t
  misc_feature (536)..(536): n is a, c, g, or t
  misc_feature (609)..(613): n is a, c, g, or t
  misc_feature (616)..(616): n is a, c, g, or t
  misc_feature (623)..(623): n is a, c, g, or t
  misc_feature (741)..(741): n is a, c, g, or t
  misc_feature (801)..(801): n is a, c, g, or t
  misc_feature (883)..(883): n is a, c, g, or t
  misc_feature (938)..(938): n is a, c, g, or t
ttcatgaataattgtcattaatacagcagtttccgatatgattataaaanttaccaaaaaatcagaagaatgttagccttcaataganattaaaaccgtgagctgagggctcattagagtctgacacttggcaccattctcatggaagtgaggacacatgttngccaggtctncttaanncnattcatgtcacncagcccgngttanaatttcancaagagagcataccatcgtcctgncncattncgactcttgttgttgacaaacatttaagccgggctatctnttgntcacagtcttgttggntgngtggtgtgtaanttgtntggtttttnnttnatgccgttagcnagctgagatttttcttgagtaaaatagtttgttatattcntgtcgatctcnnaggctggctcngtttgtcngngcccaggagnttgccngncgaggtcnagggcntggggatgtatcgacatgaatccatcccaacttgtggtaaacaaacgacacagcagttaccatcacnnaganctctattngtaggattagaagacttgaggtccaattcagttctcatttggattctatagtatctctcagaatttggttaannnnnacnaaacaancaaaacaaaaaaagggaaatccttactcctttcattaacaactgtccacaaggagaagaaataaaagacttctaatatagataggccttactgattaaaaatctgtgagcttgaatanattttaatatgttgaatctagagtgataaaccaatggttaatatactacaaaactttacnaacaaaatctcatctgttgcagaacttcaaaagtagtggaattgatttcttctcccttttaattttttcttccacaaaagtnctaaaactgagtagtcattggcatgcctgcactttcacaaatgtatcctcaaaanatgatgg

SEQ ID NO: 672615 - DNA, 712 bp, Homo sapiens
ggtagctgccacccggcgagccggccccggtgccaggaagtgatcgtgttcgggagatcctgctggtcccggggcactccgttcccacacggaagctcctgggtggaagactgcaacagctgcctgctgcctggatgtgcctgccgtgactgcagcaaggtgtggtgcggatggaagccttgtcttgctggccgtgccagccctgatggccctgacgctgcccagtgcccacctgggtgcaaagtgtgcctggacgaaggccccatgtgccatgctgtcttgccggaacccaacccttgtgaagtgcctggcgtggctgacgttgcgtgctgcaagaagacgccaccgagcaaccaccccttgcctgcacaactggcttccttgtggcgacaacacctttggggaacaacacgttaacacgcatttggtttggcccccctggccacccttcaaccccattatttgcccaagtttttccagaaccccctgagatggaaacccccaacacatggttttgaccgcccacacatagatcatcccgccttttatatcaacggaccccccctttgcaccccaccgggcgggacacccccctttggtcccttcgcaccccaaggcgcaacgtcaccctttgaacttcaccaatggggtcctggcctgcggcaccccatactggtccgcaacttccgcttcgtagccacacggaccaaac

SEQ ID NO: 672616 - DNA, 110 bp, Homo sapiens
gatgccacgtcacaggacctgctcactctctgtctcggacggagcggagatggtgtctcggcctctgcaccctcctgacaggtttaacttcccccttggattaaagaaag

SEQ ID NO: 672617 - DNA, 957 bp, Homo sapiens
tgggccggggaagggggtctcatgggttgctcaccctggtctcaaactccgtgggcttaagcagccctcccactttgatttccaacagtgccaaatattacgaggcttaagccaccacccctgtggccaagtttaaattgtgtgtctcagtggctgtgaaaacgagttatagcctcggaaaatacttctacttgtgtttttgtgggaatatacgggaattccctttatttcgtgagtgtgagtctcacgaaattgaaaagcgtagataaagtgcttttctgtgtgaacacagggggcacatataacaggtctcatctcccctgtgtggatatctcccatgtggggagagatgtgtgtttctcacaggagaaaccccccaaactgtgtgaaatatctcaaagaaatctccagagtgggtgtgcctcaaggtctccccatttatatctcagaaaacatgtgggttaaatatgtgcgtatattgtgtgccatatattatatagcctataaaatattacaaatctcccctccgcgtgtgtggtgtcactttgtataacatctacatctctgtgcacaacaaaagtgaaatttatacctattatataatagcactataatattataagaaatatcacctatagacaaaaaatcttccacttctccatatgtggtgaacgatgtgcggaattcatccaaacacaatctaatgtgtggcctacttgtgggacggtgttttcacacacaggataaaaatcttctccacaaggtgtatgtgggggccaatcttcttgttggtggaggaacacccttttgttgtgtggtgaacacaattttttcttctccattttttatcccagtagaagactatatctttttgtgcaggactgtggtgaagaccaagtgtgttgaggtttatagaacaccgccccactgtgagaatgtctgcaaaaacccccccag

SEQ ID NO: 672618 - DNA, 382 bp, Homo sapiens
  misc_feature (216)..(216): n is a, c, g, or t
  misc_feature (235)..(235): n is a, c, g, or t
  misc_feature (257)..(257): n is a, c, g, or t
  misc_feature (265)..(265): n is a, c, g, or t
  misc_feature (269)..(269): n is a, c, g, or t
  misc_feature (312)..(312): n is a, c, g, or t
  misc_feature (318)..(318): n is a, c, g, or t
  misc_feature (326)..(326): n is a, c, g, or t
  misc_feature (335)..(335): n is a, c, g, or t
  misc_feature (360)..(360): n is a, c, g, or t
  misc_feature (362)..(362): n is a, c, g, or t
  misc_feature (364)..(364): n is a, c, g, or t
  misc_feature (367)..(367): n is a, c, g, or t
ccaccccagcccccctgccctccaggggcaggattcaggccttttaggagcccccggggcaaaactgctgggccagtggccctctgtgtgggaaaatggcaaaaaaatggaaaggcatggggggcccaaagggagcgttgggaggggcttaggataccccaaagtccaggctaattaaaggatgtggcaggggcagtggcctggatgcccagtgcntgatgggagtaggctccanacaggaggagtggggcagacancagctggncttnaaggtttgatgccaaaacagacattttcctcccccccccctgntgctgnatgaaaanctggggatntgtttttccataagattttgataanananacnaacccttagctgtga

SEQ ID NO: 672619 - DNA, 649 bp, Homo sapiens
  misc_feature (61)..(61): n is a, c, g, or t
  misc_feature (63)..(63): n is a, c, g, or t
  misc_feature (149)..(149): n is a, c, g, or t
  misc_feature (152)..(153): n is a, c, g, or t
  misc_feature (192)..(192): n is a, c, g, or t
  misc_feature (232)..(232): n is a, c, g, or t
  misc_feature (235)..(235): n is a, c, g, or t
  misc_feature (268)..(268): n is a, c, g, or t
  misc_feature (304)..(304): n is a, c, g, or t
  misc_feature (316)..(316): n is a, c, g, or t
  misc_feature (318)..(318): n is a, c, g, or t
  misc_feature (342)..(342): n is a, c, g, or t
  misc_feature (351)..(351): n is a, c, g, or t
  misc_feature (354)..(355): n is a, c, g, or t
  misc_feature (390)..(390): n is a, c, g, or t
  misc_feature (419)..(420): n is a, c, g, or t
  misc_feature (452)..(452): n is a, c, g, or t
  misc_feature (455)..(455): n is a, c, g, or t
  misc_feature (467)..(467): n is a, c, g, or t
  misc_feature (481)..(481): n is a, c, g, or t
  misc_feature (484)..(485): n is a, c, g, or t
  misc_feature (552)..(552): n is a, c, g, or t
  misc_feature (565)..(565): n is a, c, g, or t
  misc_feature (613)..(613): n is a, c, g, or t
  misc_feature (623)..(623): n is a, c, g, or t
agcggagcatagctcggagctggagccggcgccagcggctggagcagcaagggagtcaggncnagggccagagagccggagagaggagcccccgaccgagagcccagtgacatgtcggaccctgagatgggatgggtgcctgagccccnaanncatgacgctgggggcctctcgggtggagctgcgggtgtnctgccatggcctcctggaccgggacacactcaccaaatcncanccctgcgtgctgctcaagctctactctgatgancagtgggtggaggtagagcgcacagaggtgcttcgntcctgttccagncnctgtcttctcccgggtgctggccnttgagtatnttnnggaggagaagcagccctgtgagttccacgtgttcngatgccgaggacggagccaccagcccccnnaaatgataccttcctcggctctacggagtgcnccnttgggccagatngtgtcacaaaccanggnncactaagccattattgctgaagaatgggaagactgcgggcaagtccaccatcacgatcgtggccgangaggtatcaggcncaaacgactatgtgcaactcaccttcagagcctacaagctggacaacnaggatctgtncagcaagtctgaccctttcatggaaa

SEQ ID NO: 672620 - DNA, 200 bp, Homo sapiens
ttcagcctccccccccccccccccccccccacccatttggggggtcccccccccgggcagggtttttaaaagttttttagggcccttttttttttttaacccccggccctttttaaaagtttttttttttttttttttttttttttttccctttttttttttaaggggtaccccaaaaaagccctttttttttttgttta

SEQ ID NO: 672621 - DNA, 528 bp, Homo sapiens
ctgtagagataagctcccactgtgttgcccaggctggtcccaaactcctcggctcaagcgatcctccgcctactaaagtgctgggattacaggtgtaagccactgtacgtggtcttttttttttcattttttgtagagacagggtattgcttttttgcccaggctgctctcgaactcctaatctcaagtgatctacccacatcagcctcccaaagtgctgggattacaggcgtgagccaccgtgcccagtgcttttttattttcataaaaatatctctgtacagtaccaatccttcttacactgtctgcttcagtttcagtgcctgtatcatagaagtgtccatgttgtaaaagaaatcaaaagcagtcttgaataattggaacccacctgctggattgtctaatgtcagtttgttgtctgggcactgcttcttctgtcttcttcctcactgtctaacactggttcagaaacactcatctccatcaagtaggcttcagttgatttcctcaggtgtggtgcctgtccgc

SEQ ID NO: 672622 - DNA, 267 bp, Homo sapiens
ttcattagcgcaatttataagttgaactagcattctatcttgtacaaccatggctatcaccaggctcggatagagtttgtcgtcctctacctataaatcttcccactattttgctacttatacgggtgttgctcttttagctgttcttaggtcgctcgtctggtttcgggggtcttaactatggctctcctatgcaaagttattatctcattcattcattttgcagaatgtataggggttagtccttgctatattatgcttggttgt

SEQ ID NO: 672623 - DNA, 388 bp, Homo sapiens
tttggggctaaaaatatcaaggatgggcacttcaaatggctttgcatttgcttgttgcagtgcgagagcgtaggattagaccctggcgtccactgtgagatgttcttcagctaccagagcatcaagtctctgcagcaggtctttcttgggtaaagaaatgacttccacaaactctccatcccctggctatggctatctggccttgcgtattcggcatcatctccgtgaataggttgactgtcacgatgtgcatagtacagttaggacaagcctggggtccatacagacctgtggagaacatacggcaatgtccccttggtagccagattcttcttcaagctcccggagagcaagctagctgctggggtaaacaccatcatctatgagc

SEQ ID NO: 672624 - DNA, 263 bp, Homo sapiens
cccctggcagagctctgtgcaggtagatttctaatttaaaatcatcaaaggcggagaagaggaaggaaagaaaaacaaaggacagtatatcagttatgttcctttcaagtgatcagggtgccagctgaaaccagggtaagcaaaacaaggaaattttagtggcaaacaagtccagggataattctagcttcagttatgacagtattcagggttcaaaaactgttgctagtactcagtttttctccagcattcagctctgccag

SEQ ID NO: 672625 - DNA, 193 bp, Homo sapiens
  misc_feature (153)..(153): n is a, c, g, or t
acgagcagggctctgcccggggactcctgtccgctactcctcatcttcactaggaacatgatgatccgagtcggtaacaggcataccaggcacgtcgaacggccttcagagccgagagaacgcccgaaggtacacacaactggcgaccctccncggatgaggttgtcccgcagcaccggctctgcccattgct

SEQ ID NO: 672626 - DNA, 416 bp, Homo sapiens
gcagtacggactgtggacaagaacttgggacccaaggaatggccagactgaaagagctgtaacacaaacaggggtgatcctccccctcccctgctcactacattgtggtgcgacgatgaaggagagaagagctgcggcccttcggggagcccagacctaggggctccctaagccaggtctgtgacatcctctttggggctctgcggttcctggtgtctccaagtttcggggtgccaccgtgttcccagtgcccacaatggaagcgacctgcagtatgcctggtccagccacagccttgcacggagccagtgcctgtgcctggagctgcctgccccaccacagtcggcatgcccggctgtgcacagtggccggatgaccctgaactcactcacgaactcctcgccacatccgtactg

SEQ ID NO: 672627 - DNA, 376 bp, Homo sapiens
ggtgttaacagactgtcgagcagtgttgcgttctgttatgacggtgacgagatgcccatcatgactctggtccccgccaaacgtggcctccaatgaatgtcatccctgccctggaactggtggagcccattaatgaagcactgaggtcccatgcaacagtcttgattgtttacttgtgcaggttgtgtgacattccttggtgacaggacggtgaccacagctgcattgacaaccaaacaacgacttgagaacagaaatacctcgaccgcttcttgccaaaactgttgctcgaagcttgcctgaagtccctagtctggaacgagtgccacggaggttggttggaccaccgtaccggaaggctccactccttgtccac

SEQ ID NO: 672628 - DNA, 288 bp, Homo sapiens
  misc_feature (63)..(64): n is a, c, g, or t
ggggggaaaaaaacaaatttcccccccgccccccccttttggggggggggggttttttttttnnaaccccccccttccccccggggttcccccccctccccgggggggaattttttacccccaaatgggttttttttttttttttttttttttttttttaaaaaaaaattttgggggaacccccccccccttgcggggggtttttttcccctttttcccttttggggggttttttttggagggggcccccttggggccctttttttttaaaaaaaaaaccccttttta

SEQ ID NO: 672629 - DNA, 370 bp, Homo sapiens
agtatacttcgatcgcggagaatttgtcagtccgacttgcgagggagggatcctttcagaagaaccacaggcgggtgacttcggcgcggagtgcccaggttcacagtgcagcttgtggatcgtgtccatcttgcaggtgagctcttcctccacatcatgactgggttttcgaaaaggacgggggatggaaatcctccaggatcttaggaaatttcactccggtttctcctgtttcaagtggtctctttggctcggcagtggtgttcttctcctgcgatcgaagttgtgcaacacttcgattcgcggaataatggagtgtaagagggtagggagggaggcaaaggtcgggtacggtaggaaacaagtgaag

SEQ ID NO: 672630 - DNA, 1559 bp, Homo sapiens
  misc_feature (119)..(121): n is a, c, g, or t
tgaagttcgttctgctgctttccctcattgggttctgctgggctcaatatgacccacatacttcagatgggaggactgctattgtccacctgttcgagtggcgctgggttgatattgcnnngaatgtgagcgatacttagctcctaagggatttggaggggtgcaggtctctccacccaatgaaaacgttgtagttcataacccatcaagaccttggtgggaaagataccaaccaatcagctataaaatctgcacaaggtctggaaatgaagatgaattcagagacatggtgacaaggtgcaacaatgttggtgtccgtatttatgtggatgctgtcattaaccacatgtgtggcgcaggcaatcctgcaggaacaagcagtacctgtggaagttacctcaatccaaataacagggaattcccagcagttccatactctgcttgggactttaacgataataaatgtaatggagaaattgataactacaatgatgcttatcaggtcagaaattgtcgtctgactggccttctggatcttgcacttgagaaagattatgttcgtaccaaggtggctgactatatgaaccatctcattgacattggagtagcagggttcagacttgatgctgctaagcacatgtggcctggagacataaaggcagttttggacaaactgcataatctcaatacaaaatggttctcccaaggaagcagacctttcattttccaagaggtcattgatctgggtggtgaggcaattaaaggtagtgagtactttggaaatggccgtgtgacagaattcaagtatggtgcaaaacttggcacagttatccgcaagtggaatggcgagaagatgtcctatttaaagaactggggagaaggttggggtttggtgccttctgacagagcccttgtgtttgtggacaaccatgataatcagcgaggacatggtgctggaggatcatccatcctgacattctgggatgctagaatgtataaaatggctgtcggatttatgttggctcatccttatggattcacaagagtaatgtcaagttaccgttggaatagaaatttccagaatggaaaagatcagaatgactggattggaccacccaataacaatggagtaacaaaagaagtgaccattaatgcagacactacttgtggcaatgactgggtctgtgaacacagatggcgtcaaatcaggaacatggttgccttcagaaatgtggtcaatggtcagcctttttcaaactggtgggataataacagcaaccaagtagcttttagcagaggaaacagaggattcattgtctttaacaatgatgactgggctttgtcagccactttacagactggtcttcctgctggcacatactgtgatgtcatctctggagataaggtcgatggcaattgcactggacttagagtgaatgttggcagtgatggcaaagctcacttttccattagtaactctgctgaggacccatttattgcaatccatgctgactcaaaattgtaagaatctatattaaagagatttggattaagcatca

SEQ ID NO: 672631 - DNA, 481 bp, Homo sapiens
ttaatatatgaagctgtctataggcatgatagaataaaaagtttaaaaattatttgggtcaggcttaaataactttaacaggtaaaaaaagtgtttgacaatattcaacaaataattcttcacctaatttcttattgaagcaatcaccttaatattcattggccttgataaatgtgaacactggtcatatttatgtaaataatggtcatgtggctttcttggcatatctaaattcatgttagatctggcttaacctgtgcttatgtatgtatatgttacagttatgtacattaaatgtgtgtgtaagagttggaattatttgaaagatagcaaaattttaactagaaaaaataagttaatatctaatgattgttgactcattgattaaaataagtagttattatgaaagagaaaaaaggtgatttcaaattgattcagaagaactggcccagcaactaagattgtatgctttcctttttaa

SEQ ID NO: 672632 - DNA, 1139 bp, Homo sapiens
  misc_feature (119)..(121): n is a, c, g, or t
tgaagttcgttctgctgctttccctcattgggttctgctgggctcaatatgacccacatacttcagatgggaggactgctattgtccacctgttcgagtggcgctgggttgatattgcnnngaatgtgagcgatacttagctcctaagggatttggaggggtgcaggtctctccacccaatgaaaacgttgtagttcataacccatcaagaccttggtgggaaagataccaaccaatcagctataaaatctgcacaaggtctggaaatgaagatgaattcagagacatggtgacaaggtgcaacaatgttggtgtcattgatctgggtggtgaggcaattaaaggtagtgagtactttggaaatggccgtgtgacagaattcaagtatggtgcaaaacttggcacagttatccgcaagtggaatggcgagaagatgtcctatttaaagaactggggagaaggttggggtttggtgccttctgacagagcccttgtgtttgtggacaaccatgataatcagcgaggacatggtgctggaggatcatccatcctgacattctgggatgctagaatgtataaaatggctgtcggatttatgttggctcatccttatggattcacaagagtaatgtcaagttaccgttggaatagaaatttccagaatggaaaagatcagaatgactggattggaccacccaataacaatggagtaacaaaagaagtgaccattaatgcagacactacttgtggcaatgactgggtctgtgaacacagatggcgtcaaatcaggaacatggttgccttcagaaatgtggtcaatggtcagcctttttcaaactggtgggataataacagcaaccaagtagcttttagcagaggaaacagaggattcattgtctttaacaatgatgactgggctttgtcagccactttacagactggtcttcctgctggcacatactgtgatgtcatctctggagataaggtcgatggcaattgcactggacttagagtgaatgttggcagtgatggcaaagctcacttttccattagtaactctgctgaggacccatttattgcaatccatgctgactcaaaattgtaagaatctatattaaagagatttggattaagcatca

SEQ ID NO: 672633 - DNA, 209 bp, Homo sapiens
  misc_feature (131)..(131): n is a, c, g, or t
  misc_feature (137)..(137): n is a, c, g, or t
tcgatcgagctcggtccctatggtcctttgaaactttgctgctaaaatcaccagatgttcaaccaatctgcctcagctgcttacatttggagtgaaatatgtcgagataaaaatgatgctgttttgcagcnaagttntcaaaggaccatagtactctgaaggaagcacgtagtcttctgtataacatatttttaataaggatcccctag

SEQ ID NO: 672634 - DNA, 258 bp, Homo sapiens
aggatggataactggttaattctacaaaacatttaaagaggaattattactagctcttcacaatctcttccagaaaagagaagggaacacttcccaagtcattctatgaggccaatattacccagataccaaaatcagacaaagatgtcaccagaaaactacagtccaatatcctttgtgaatatagatgcgaaaatcctccaggaaatactagaaaaccaaattcagtgatatactaaaaggattatacaacatgaa

SEQ ID NO: 672635 - DNA, 1844 bp, Homo sapiens
  misc_feature (119)..(121): n is a, c, g, or t
tgaagttcgttctgctgctttccctcattgggttctgctgggctcaatatgacccacatacttcagatgggaggactgctattgtccacctgttcgagtggcgctgggttgatattgcnnngaatgtgagcgatacttagctcctaagggatttggaggggtgcaggtctctccacccaatgaaaacgttgtagttcataacccatcaagaccttggtgggaaagataccaaccaatcagctataaaatctgcacaaggtctggaaatgaagatgaattcagagacatggtgacaaggtgcaacaatgttggtgtccgtatttatgtggatgctgtcattaaccacatgtgtggcgcaggcaatcctgcaggaacaagcagtacctgtggaagttacctcaatccaaataacagggaattcccagcagttccatactctgcttgggactttaacgataataaatgtaatggagaaattgataactacaatgatgcttatcaggtcagaaattgtcgtctgactggccttctggatcttgcacttgagaaagattatgttcgtaccaaggtggctgactatatgaaccatctcattgacattggagtagcagggttcagacttgatgctgctaagcacatgtggcctggagacataaaggcagttttggacaaactgcataatctcaatacaaaatggttctcccaaggaagcagacctttcattttccaagaggtcattgatctgggtggtgaggcaattaaaggtagtgagtactttggaaatggccgtgtgacagaattcaagtatggtgcaaaacttggcacagttatccgcaagtggaatggcgagaagatgtcctatttaaagaactggggagaaggttggggtttggtgccttctgacagagcccttgtgtttgtggacaaccatgataatcagcgaggacatggtgctggaggatcatccatcctgacattctgggatgctagaatgtataaaatggctgtcggatttatgttggctcatccttatggattcacaagagtaatgtcaagttaccgttggaatagaaatttccagaatggaaaagatcagaatgactggattggaccacccaataacaatggagtaacaaaagaagtgaccattaatgcagacactacttgtggcaatgactgggtctgtgaacacagatggcgtcaaatcaggaacatggttgccttcagaaatgtggtcaatggtcagcctttttcaaactggtgggataataacagcaaccaagtagcttttagcagaggaaacagaggattcattgtctttaacaatgatgactgggctttgtcagccactttacagactggtcttcctgctggcacatactgtgatgtcatctctggagataaggtcgatggcaattgcactggacttagagtgaatgttggcagtgatggcaaagctcacttttccattagtaactctgctgaggacccatttattgcaatccatgctgactcaaaattgtaagaatctatattaaagagatttggattaagcatcaaaaaaaaaaaattctttttcatatgctctgtactatatttttatttctattttgtttctttatttttatgtttccatgtgtgctttgtcttctgagccctggagtgtatgtaggatgtttgaacaaccctgtgctgtggcataacctctctacattttcccatgagctgtgctgatcaaactaaatccatgaggcttccctggaactcacttttatctgctattctatgttgttatctcatatgccctttaattcttgcagtttatttccttgtagtaaaaacca

SEQ ID NO: 672636 - DNA, 142 bp, Homo sapiens
  misc_feature (64)..(64): n is a, c, g, or t
  misc_feature (70)..(70): n is a, c, g, or t
catattcactgcaaaatgtaagcagctgaggcagatcggttgacactctggtgattttgcagcnaagttntcaaaggaccatagtactctgaaggaagcacgtagtcttctgtataacatatttttaataaggatcccctag

SEQ ID NO: 672637 - DNA, 507 bp, Homo sapiens
  misc_feature (332)..(332): n is a, c, g, or t
  misc_feature (389)..(389): n is a, c, g, or t
  misc_feature (405)..(405): n is a, c, g, or t
cgaggatcaggacttggcacggtacagctagacgtgggcttcgcatctttccactttgcaggcgttgccactgcatgagaagaacttgctcagccaggctcctgggccccaggaaaaggacaagtgtcacccagaacagagccacctccagctgcactcagctccagaagctggcccggccggtccagtacaccttttaaataatgtcctctacgtgccggtgtggcaagtagcccggatgcaattgaatgaacaacagacggtgctttccaggacggcgctgtgctttccaggatggtgctgtgctttcattcatttgggtagctcctctngtgcagcctccccaaggctggcccggaacattggcagagcaccccaactctccagcnctgcaaggaccccganaattcaagccacacaaagaaaggaggagggggccgttggcatttactgaactcttataacaaaacttggcttccaaggtcaaaaaacagcccttaggcttgg

SEQ ID NO: 672638 - DNA, 140 bp, Homo sapiens
gcccggtgttgtggatgcatcagtagatcactgtcactctgcattagtatgaattgaatatgcattctggaaatcaattcatttatagtgtttttgataaagtatgtttttaaattatagttttaatggtttgatttggt

SEQ ID NO: 672639 - DNA, 172 bp, Homo sapiens
ccggtatgggggccttgctcaatagaagccggcgtaaagagtgttttagatcaccctctacccaataaagctaaaactcacctgagcttgccaaagagtcgcagatgacacacaatagactacgaaagtggcctgatgttattgaatcacacagttagcaaagaccccgagg

SEQ ID NO: 672640 - DNA, 537 bp, Homo sapiens
tggaaatggagtctcgcctctgttgcccaggtctaaagtgcaggggccaatctcggttcactgcgacctccgcctccgtgggtttcgggcgattctccgtgcctcagcctcctgagtttgctgggattgcgggcacctgtccaccacacccggttaattttgtgagggggtttcaccattgtgggctcaggcgtggctcttgaactcctgaccctcgtggtctgcccaccttggcctcccataggtgcgtggggattacagacttgagccattgcgcctgggccgatgactttttattaattggaaattctgtcctacttttaacctaagtttctctacttccctggattactgaagaaaaagagatggggaatgatttggactttttgggcctgcttagtcccaagagaaatccgacttcattggctggcttttgggaaggcaaggagccagtttttctactctacctgattttgatcgaatgaccttgagcaagtgacttgtttccacgactcggattacttcaaaaacccccaa

SEQ ID NO: 672641 - DNA, 311 bp, Homo sapiens
gccgggggggggtttagggttacaaaccccgaagggttgggagggttaagttccaggccccttaaattgaagttcaacttggcttgggggtgacaggattggttagggccctgaagcccggggggaaaatcctttgggaccggtttaaggggtttccggggggggattttattgggccttgggggggggccaagtttcaaaccaagttcaaggtgaaatttgtggggaagggggggttccctgggaacccgtttttgtttccctccggttccggggggttgcccctcaataaaaaatttttttttggtgga

SEQ ID NO: 672642 - DNA, 276 bp, Homo sapiens
ggtagatgagcgaatcgatgagtcagccactgtgaacatgcccccaatgactggcgcacacacctgtacaggaagtgggctgaaggacctgtagcttctccgtcagcttcaccagtcatgggacgagagctcatagtaggacgaagactccggagaaggccttgctcgcccacacagccgcattggcaaccattctcatgtctaggtcacacgcgaactgcatttgtcctcacgtaccatctccagtccggccttcatagtacaacagtgggcacc

SEQ ID NO: 672643 - DNA, 139 bp, Homo sapiens
aattttgcccactggccgttgagcgcccccgagccctgactcctggactccggaggattgagccccccccggaactgggctggcgcttggatttggggtgggagtaacagggcagaaatgattaaactgtttgagccca

SEQ ID NO: 672644 - DNA, 311 bp, Homo sapiens
gggcactcctgccttactttgtttatgtggtcagtggggtgaaatctgtaagccatgacctggagcaactccacgtgctgctgcaggtggcacgaagcctattccgtaatccccacctgtgcttgggccctatttccgcttgtctggtgggaattgccatctactgtgtctgggagcacttggctgcctcattaacccccttaattgaccactgaactctgggggatggggctgccctcctgctcagccacatcttctggactcatggggaccttgtaagtggcctctatcagcatatcctgctatccctg

SEQ ID NO: 672645 - DNA, 441 bp, Homo sapiens
ggtccgtcgacggagcacagtagtccgtgtgtcacttaggctgactctgtccagggtgacgtatgctgtcactgtcttgaatcttcatcgtttacagcgagccagtgtttcactttgcacattgggtatctggtcttgcctgtcctaccctgaacctgggttccctgggccatgtaacacccaggcagctctgatgcccctgggtacttggaggagctcccaggaagtccaagcctgcgccaggaatctctggctttcacagtcttcaaaggctggagcggtgcccctgccacccacagactccacatagctctgacaacctgctttcctgaacgcctcgttcctgggtcctttcacccaccagacctcactgtgtggcctcaactctgaggcacctgccctctgaacccccagttctacaataaacggggtggattccaa

SEQ ID NO: 672646 - DNA, 325 bp, Homo sapiens
ttttggggtttttttgaaaaaaaaaaattttttgggggaaacaagaattttttttcaatggggcccccgggggaggaaagaaattttggggtttttcaaaagggaaaattaaatttttccccctgggggggggccccttttttaaaaaagtagggcccaaagccctttaatgggggggcccttgttgtttttttgtttttttgttggggggccaaagggggtgcccccgggggtttttttttttgtttttaaggggaggtttttggttgggtttttcctgtttctttgtttttaattttgggaattaaaataaacccttgttgga

SEQ ID NO: 672647 - DNA, 546 bp, Homo sapiens
  misc_feature (42)..(42): n is a, c, g, or t
tggaaaatgctcaaccctctccccttgttggggcagttgacnagcagtttaactgtgtgtcccggctggcaaactctcgcaaggcgaagaccagtactatttgcgggtctccacggtggctttccacacttttgaattggacgttccttccggggtcccttagggggttgtgaagctcttttactttgatcccatccctgtggcgggccctgtagaagtttccaggaagaacccttaatttatggaggccgtggcggagaaagcgcttcaggaattcccccaaaagccccgggaggagtgagatgtggatgttgcttttgcccctacggggggattttagtccagctccccccaagatgaggtgcagccccccagagagaggtttgcacgtcaccaagttaccagggcccagccttcagggccccaactccgcccagcctttccccgctttgggtcctgccctttaacccttggctttgctggtcatgggaagaacagaattggtcctgcctgccactaattccataaaactgttttgtggggtga

SEQ ID NO: 672648 - DNA, 923 bp, Homo sapiens
ggaggccaaggcgggcagatcacctgaggtcaggagttcgagaccagcctgaccaacatggagaaacccccatctctactgaaaatacagaattagccaggcatggtggcacatgcctgtaacccagctactcgggaggctgaggcaggagaatcacttgaaccctggagtgcagtggcatgatttcagttcactgcagcctcgacctcccaggctcaggtgatcctcccacctcagcctccagagtagctgggactacaggcagtgtgccaccacatccagctaattttttacagttttttcatagagacagggaactcactatgttgtccaagctggtctcaaactcctgggttcaagccatcctcccacctcagcctcccaaaatgctgggattacaggcatgagccactgtaacccagccaaaattgtttccttttttaagtgaattcaaccaatttctgtgagtggctcttttgcatgaacactgtgccaggtgttggcgaaatccaaagctgaccaaacattggtccccaccttttggagcttacagtctgttctgggggaaccgagattcagaccaaggccaggaaacacttggatgcagctagatatctggactgtgcttggtgtctatacgtacatatgtggatcttgggtcctttatccctaaatttgttccaaacagcattataactactcctaatctactgagctaacttatattgacactgccgacaaactatttctatgtaagcttcccatggacggcggacgcaatttcggcttccaacaccatcgtttcgctcgagtttgaccagacctcacgcggtgggagaaaagcggcacggaccttataaacgggagaaacgagagggtcaagaaacaccttgcacatagcctctccccaccccacccccccc

SEQ ID NO: 672649 - DNA, 240 bp, Homo sapiens
cgcagcttgcctgccgtggcctccctgggctcctcactgtcccacagccagagcctctgctcgcaccttcttccgccgcctgaagaaagcgaaaggtgcccaatcttctgaatggttccggccggcaaccctttcttggtgttctatcggtaaacctttcgaacctggcttctttaaatccttcccttggcttctgggaatcaatcgaaacttgaaataaccaaacaaaagggaattccg

SEQ ID NO: 672650 - DNA, 660 bp, Homo sapiens
atttttttgactctgattcacagttctgcatgcagctggtttgacatagacttatgtatttgccctgccgaagtgaattgtgtggagaatgtaaaccgccttcacgtggcggaagacttactaaggccccatctcgctggcctcgcgctgggcggctgagaaatccacctgagaacaggtcccgcaaaccggcgacggaaggacattagacttttatttttgcatataattgacatgaatgtaaaggagacagctcacgcttgttttggagcctagtgactgtgcatctatggctgtgatactcttttctaaatgaaactccatgtaccaacccggacgcagctgaaaaggcgcccaatgctctggttattagagtttaataggtaagctgtgatgcacttgggggtagagttccacaatgatcttttggtttgtaaacacttgagaaacatgtgcctcagactagatgatttgtctatgattttatgcacttaatacctgacagtatgagcgatctatgcgccattattggggcggacacgctggcggtaggattgagacgtacagttgaaactgcatgactgtaattgtctggagagataaccttttagggattgccaaggttttatggaaggcccttatacatggcatgttttcgcc

SEQ ID NO: 672651 - DNA, 115 bp, Homo sapiens
cagtgggcacatgtggggcacgttccgcttagaaagacctgatggctcccactttgatgttcggactccttccttcttcctggaaagcaataaagatgagagcaccaccaattca

SEQ ID NO: 672652 - DNA, 116 bp, Homo sapiens
gtggagtccgtgtagtcttgtgtgtgtgctgtgggggctcgctgtgcctcactggcctccctgtgtgccgtcgctgtgttggaaagttgtccccacagccatgctgtgagtcccaa

SEQ ID NO: 672653 - DNA, 191 bp, Homo sapiens
cccccgttatatcgagcgaggagaatggggaagaggaaacacgagtgtgtcgagaacgcaaagctgtgatgactgaacacgttcattcaggtgagatgtctatactaagttgagtggaacatcaggaaaagctccatatggactcatgtgcacatgtctggaggcaccagatccctcctcggtcggtctta

SEQ ID NO: 672654 - DNA, 351 bp, Homo sapiens
attgctttcttgtattaatcattattatctctgttcggcatttcaagggtctgcaccccgaagacattggtgggtccccaggataggtggccgattggctcatgatccctggggctcacaccaatgccactcaaacccctgaaaatattgggtggggggctcctcaaaagtcgatcgtcaggagtcagagctgggcaggggcggccgatgatgtggagagataggaacacttttacactgttggtgggactgtaaactagttcaaccattatggaagtcagtgtggcgattcctcagggatctagaacaagagataccatttgacccagccatcccattactggatatata

SEQ ID NO: 672655 - DNA, 282 bp, Homo sapiens
ccaggtagacctaacccaggtagaccccaggtagacctaacccaggtagtaagttttttaagtccacttaaaaatacaatgagcacaaatccacatttatttattagatttttacgttagtttaaataccttgagagggtacatgcatcactgcggattctggtgtccaatgggccttagcagtgaagattgctgtcggaatttggcacgaaccatgccactgtttccatgggcccgagttaattttccccagatgactctggttttgtgaggtctacctgg

SEQ ID NO: 672656 - DNA, 173 bp, Homo sapiens
atacctttcttgcctccgactcgtttcttgcccagacgcgtgactcagtgagggaggcagtgcaatatctctgtgcccttctcctgccatatgatcgtattatcgccacgtccaccaaaagctgggtgggcaggcagtagtgatctacaggcttgttaatttgtatttattta

SEQ ID NO: 672657 - DNA, 983 bp, Homo sapiens
ggttctgagaatctattacttggcaggatgaagacccgtagggtgataactgtaggctaatactacctatggatcgcatcttgcagaatcttctactctcctctttatggagcatctggtgtatcgtcttgggggttggagcacgagaatctgtgaacctaaccggatgctcgttagagctcggttcgaccttcccatagggatagctggaaaaggtacggatctatacgcgattgtatcgtggatgtgcgtaccgatcgtatgggctcttgctactgcggatgtctgtcgatgaccatccatatactgcttcgaatgacccatcctgtgacaggtggtcatatctgcgttgattttacgaatacaatactgtacagagttacaaggacatgagattggctagaagctggtcacgggaagaggcacgtacaactgaaggagactctcccgatagggcggatgtgtgatgctccgtgacatcggtcaccgtcatcaccattccattctattgcaaagcccttgcgaacctaggacagtttagctaatcgtactgcgacattcgctccaggaattgatacgggggtgaatatgacctaagaacaaggattccctatgttggagacccagatcagttcactcattacctggtcctggggagacgcccagtcagtttcctccattggagaccacgctttggatccagttggccacttccaggaccttaaacccatcttgccagtgcgaggcggcccaatggacagatttccctttagaccccagcaggggtcggcaactgatggcccggtgtcattcatgtgattgattgcaagtttcatttctgggagctccatttgttttgtttctaaactaacgaatgttaactccttgggtgggtgatctcgagtgtatttctgaatgtgggtgttgccagttgcctcccagaacacttttaagagatactttatagcctagggtggatgaca

SEQ ID NO: 672658 - DNA, 508 bp, Homo sapiens
  misc_feature (216)..(216): n is a, c, g, or t
cacaccactgagtcgtctttgacaagtgcgattttcagaaggccctgtgctatgttaaactgtagaaattcactactgaacacaatgaaactgttcttcaaacattgggttccaggctatgaccattccaccgtattcttatctggtgacacacatattattgatatgcaacaagtgcaacctatagatctatctcataaaaactgacccttttangaatcttcatgttcttaataccttcatcaactctcacgaaaagaaatctgtgacgttagtcccatggcagcggtaggtcctgtgggtctagaaagtcagcagagaacatgctcggcgcggtggtgctgagaggagtgagtcctgaagaggagttgggcattgtaatgtccaaccactccatgttgtccaagtttgagtctgacaggtcgagagacagacagggagtacctgcagcaaactgggtctcggaagtctccatgggtgagtgtgaatggtccagcatacctgagtg

SEQ ID NO: 672659 - DNA, 83 bp, Homo sapiens
tattaaagaggctgcaaagtccagccaccctgaagatactccccagtgctcccaaactgctaaagaaacagttgccccaggaa

SEQ ID NO: 672660 - DNA, 640 bp, Homo sapiens
aacagacacacgagctgctctctgccagtgtacgagtcctcaagaagactgtcctcagcaaatcagaaagcggttggaccctcatcagacactagatgtgcctgcaccttgatcttgagacttgccagccttcagcaacagtaagaaagaaatgtgtgttgtttaagccaccctagtctatggtcacttgctatagcaccccactaagagaccccaagatatttaaaaccctcatcatcacctgctatctgcagtctggtaccctgcactcttctggttgggtttaccaagtcactcgtcaagtgtccctctgatagttttaggtgtcaacttgacaggattgagggatgcctagatggctggggaagcactgtttctgagaaggaccatgtttttggaggagactgttttatgagtgaatttcaggggacacattcagatcatggcagtggcattataaagagagacacaaaagcttgctctctctctgccatgtaagactaccacacaaagactgccatctgcaaaccagaagcaggtgggctttcctcagacaccagatctgcctgcaccttgatcttggacttgccagccttcagaactctaagaaagaaatggtggatggcttggtctaagttga

SEQ ID NO: 672661 - DNA, 385 bp, Homo sapiens
tgaattgaatggaaaagcagtcatagagactgtgtgatgcatataatacatcggtgactgtgcactgagaatgaacgcactgctatttgtgtggcttgcgtaatacagttcttgttatatatcctatcggacatcttcaaagtccagatcagtactaacttcatggaagctcagattgttctagttcagggtaatatatgccttttctaagctgtagccagttttaagtatttgtgccatgaggctcagcgcttacatatgcctggtctgatactgtatgctgattataacatgctaacacatcatgcacatttttatttgctcatgtaagttatatcctccgtcaggcacagtcttcaggtttttgctatcttacacagtgccc

SEQ ID NO: 672662 - DNA, 789 bp, Homo sapiens
tggcatagggaacgaattaatggtattttaaaatgcagcaatctttaaatgaaatgtttccatcacatagtactgtgttcctggtatgaatccaaaactttggagcaataaaagtgctctgcataagtttataaaatatgcttccgggatttaaaatttaccagaaaaattcccaaacaagtcataggtatgattctaaaatatttatgtacataatattatgactacgaggaggaaatccctcactgtagtacaacacagtggtacaatttatgaagcacagggtttagttaaattcccctttaggtttccctcacatgggtgcataagtggctgactacttgacacaactatgccccattctacttgtggcaatacaaagtagaagaggattgtgaggacaattttaaagtagaaaaagtgacaaataagtggtggcaaaaatacgaggtgcaaagtgctttaaacgagggcactttataaaatagttggctttatccatacttttttataacggtgcaatattacttaaaacagagagcacttgtaccttaatattcctgcaatacccattaaaacaaatggccaggaaagagcagtgcaaatttaaaaacttacacttaagcttagcatgcatctcagaaggcgattcccggaatacagagtatggggaccttgagtcctaatatcttagtcttttttcaccttctttaaacacggttaaaaactacgcggtacccaccatgtgtacccttaaaaaaaacaaagttaaaacttctttccaaaaaa

SEQ ID NO: 672663 - DNA, 382 bp, Homo sapiens
gacacgatgaatgatattcacacacacacactacccccacaacccacccacacacacaccattgggaacatggagcgtctggaggaaatggtggagttcgggcatagtgaatcaggaccggtgtaccgaaaaaaaagttaaccctaaactgaatctcacggaatacatgtgtaggtacagtcaggtcacacagggcaaagtacggtgtattagaaacacactattaagagtccgccaacgacaacagtgtgtaaactagaaactgatagaagaacgtgtggaaatgtatgattagcgtagactaactagataacacggacaggagaggccaaaagggaccagatctatcaaaagtttactaatctgcattttaggaaagata

SEQ ID NO: 672664 - DNA, 433 bp, Homo sapiens
  misc_feature (180)..(180): n is a, c, g, or t
caggtgggtttgggatcgggctttgggggcctccccaagcccggcgcccaaattaagctgggggtccaactttgggtttgggggggggtccagctccttcaaccgcccccgctcccccagggccggggttgttaaaaaaatccaaaccccttatgggaaaatggggttttggtccttttncgtcctgccccagggaaaaaattggggggcccctccccgccttccccttttggggtgccccaaaggctgggaagggggccccttttcaggggggccctggggacaggggaccccccttggggtcagccctagccccccgcccccctggggggtttttttcctgggggccccccctggccctgccccccggtacaaaacaatttaattggtttttttttttgggcccaaaaaaaacccccgctgggtttgccca

SEQ ID NO: 672665 - DNA, 133 bp, Homo sapiens
tttttttgttttttctgatacagagtttagctcgtcgcccaagctgcagtacaatggatgcaatcacagacttactgcagcttccacctcctgggttcaagtgattctcctgtctcagcctcccgagtagctg

SEQ ID NO: 672666 - DNA, 302 bp, Homo sapiens
agcagctattccaacctagctgttacagaagcacatgccacaggcctggctaattttttaaatttttttgtagatatagggttctccccgtgttgaccaggatggtctgaaactcctgggctcaagcagtcctcccctttggcctcccagaatgctgggataataggcatgagccactgtgcccaggccatcttgtctatctagtttatcacgttggtggacatattggagtttttccacgttttatggatgttgtgaagtaatcctagctgtagattggggtaccgagtctcgaccttcgt

SEQ ID NO: 672667 - DNA, 156 bp, Homo sapiens
  misc_feature (23)..(23): n is a, c, g, or t
  misc_feature (39)..(39): n is a, c, g, or t
  misc_feature (140)..(140): n is a, c, g, or t
gcaccctagggctcgatcccagnacccggggatcatganctgagcgaaggcagacacttaaccgaaagagcacccaggaacccctaattacatggatttttcaccttatcggtagtatattcttggttttaggaggtgtncacccaagcttccaat

SEQ ID NO: 672668 - DNA, 263 bp, Homo sapiens
  misc_feature (6)..(6): n is a, c, g, or t
  misc_feature (14)..(14): n is a, c, g, or t
  misc_feature (36)..(36): n is a, c, g, or t
  misc_feature (41)..(41): n is a, c, g, or t
  misc_feature (139)..(139): n is a, c, g, or t
  misc_feature (195)..(195): n is a, c, g, or t
  misc_feature (230)..(230): n is a, c, g, or t
  misc_feature (254)..(254): n is a, c, g, or t
gatgtngtgtgggnaaattttcataacgtatttacnttccnagtgatttggtcatttatcacgagcaactgttaagggaataacttgggtataagatagctgaggcatgaagcattaacctaatttatgcttcgctgtntgtttccagagaggaagctttacaattactctcagttctttagggcagagcttttnaagaggttgcagagaaggattatgactaatgagtncgcttgtcagctaaatgggcaacntagcttgcg

SEQ ID NO: 672669 - DNA, 316 bp, Homo sapiens
tttatgcacaactagggtcagttttgcaggtggtaagccatttaccaagatagttgtaggtaaagaagggcagatttattagagaaattgtgaaaatatgttgcagtgggcagctcagcagagaaggggctacctgcaaagaggcaagggctggaggaaagttttatagggtcctgctgaagggtgctacgtgtggaatgaggtcattgtgcccgcaggttgtttgtgattagctgtctctaacaattgttcatacaataattgttcattattgttctcaacttggggctctccccaacctggggacccttcctta

SEQ ID NO: 672670 - DNA, 622 bp, Homo sapiens
  misc_feature (593)..(593): n is a, c, g, or t
tcttagggaggattcgcctcaacaccctgcatgcgctcgaatgctctgcacccatctgctcaagttcaaactcctgagcaagctggctctcacagctgccgaacggctgacgagtcgtacattcctaccacttcttagcagtggttctgagtccatgctggttctgccactgtggtcctttaacctcgcaatgacccaacaacggcatgtattactgaccccactttcacacgactccggaaaaggaggctcacgggaggttaagtgacttgtcccgggtcacagagctggatcccagcccggagtccgactccaaagtcggtgctcttaaccgctttgcttcaggagaatgggagcccgagtcccgctcgtctgcgcggtgcagccaggacgggcgtcacgcatttctctcccatgggcgcgcagggagtgagggtccgccccgtctgctccagcagtggtcaccgcctcaggtctcgcctcgtggccccaggggagccccagcccgcggactttggactcctctctcccaccctcgccactcgccctctgcccgtcgcagggctggcccgcccgcctgggccctcacacantcgctctgccgccgccgcctcgcacgctc

SEQ ID NO: 672671 - DNA, 597 bp, Homo sapiens
agagattagatgtcgaagaggtctgttggagagaaaacacctttgaactgactgtaagacagcgggcatgctgtggaagcgccagcgttggctcttccttgcagggactgtgatgagagactggaacaacgactccaggtaatatttggccaggctgatgagtagtgctagagccaaagatgcggtgtcagggtagtccccgagtgtccacaggcaacagtctggcagcagaagcgtccttctgtgctaccatcactgactcaggcaccattctgtaacgtaggcgatggcccgtggccatgaacaggcaagcagatcctgagggtcagcagatgcaggtcaggagcagcaggagcgttgcaaaggagcacaactttatactccctgcaggtaggagaatcggagagcacataattcagtggtccagcaaagctatatccaagtagaattgtgtgtagggacatccatgtgtgtttaggcctctagaaattctgtatggaagctattattgatgtttgccagtagcttcgtccttaatgtgtgtacgtttgaaattcttagagcataactgaagagtgaaaatagacaaacaaaaaa

SEQ ID NO: 672672 - DNA, 136 bp, Homo sapiens
actatataagctatgctagtggctgagtggtaagaagttctgtcactaggaagtgtattaattggtcctagctgtttccgtgtggtttaaatgttcgaattcataagaacagggaggttagaaacagggtcttggt

SEQ ID NO: 672673 - DNA, 1042 bp, Homo sapiens
taatattgaccatttcctatctgccaggcactttttctaagcacactgaagaaacttagatcctaacaacactactgagatggactataacttgcccaaattctttctttctctttttctgtgagaacgtgtagttctcacctcgtgctcgccgtgggccgtggagtatcacacggtgaggtgcagaactcttccagccttcactgtgcccaaactttcacactcctctccacgcgtctctcaccgccgtacttctttattgcgcttcaagtatcctccctgtgagccacgctgtgcggcacttacctcgcgtaatacacccgctcactacgaacgccaccaccagcgctagcaaacttttatatcatatctattcctgtattagcgtgcgtatctctcttttctagcactggacagatatcaccacggtgtcgtatctcgacacctccagttgtgttgtgcgctccacacgcgtgcgacgtcgctcctgtcaatatcacatcgaagttgagcgcccccagttgcgtagtaacatcccaacacactcatcggacaactctcgtagagccctcccacctccacacacgacagcgacgcagtctacgcggcgcatatattttctcacacaagcactcgactagctgtacaacgcccctaacgtattggttcccactcgcacgggaggtctaaaaacctcatcctcgtcgccccacccaaaacattaacaaacaaagtaactacgtcactatcccaaccacctataccgcttgtcaaccatcctctctactttactctaccctcctccacatacatcacaccatatctacagcctacccatccacccccctaactctctactaacattcttgttactcatccctttatcacactcaactgtatctacctccacaataatcacacaatcacacatacaaccctatcacctctatcactacctaacaaacctactcaacatctccacttacttcattctcctttctattagcacactcataactacaatccttacaccactctcacc

SEQ ID NO: 672674 - DNA, 316 bp, Homo sapiens
tgtagataaatgtggtgggtgagtgagcccattgtgttgtggtcaatatgtagagggagtatagggtgtgactagtatgttgagtcctgtacgtaggagagtgatatttgatcaggagaacgtggttactacgcaagagagttctcccagtaggttaatagtggggggtaaggcgaggttagcgaggcttgctagcacagtcatcaaaaagctcattcagtgggcagtcccagtttgcacagtccttgcacgaggcattcatgcatgcgactgtgagtgcgtacgtcagttggcagtcctgccaggcagtcctgga

SEQ ID NO: 672675 - DNA, 231 bp, Homo sapiens
agtgctctacaagaactcgcaggtacattaccaggctgtgattctccacgtgaaatattctattcaagggagctcaaggtcacaagaaagaaatgaaaggaacaatcagcagccctgttcacaaggtggtttgaagacttcattgctgtatttaggataaactcccctcccgcctacccccatcccaaactgcatttataattttgtgactgaggatcatttgtttgttaa

SEQ ID NO: 672676 - DNA, 551 bp, Homo sapiens
ctgatagctgtctcttgaggatacccgaattcatcagccagcagtgcctttggaacaccgcttgagccgcgcctccagattcttgtctggcatggcgtggcgtacgcagggcgttaacggtctgctcgacataatcgcgagtggtcccgtaacgcccgcaagcgctttgcaacacgtgattcagcacgatgtcgggcaagttaccggcatagctgggcaggtgccgttccagaacaaatcccaacgcctgcacctggctgccatcttcaagacggcaggtgagccagtgtggccggtaggacgggtaaggcatctcgcgctgccacagggcataaagcgaggcctccagctgatcttccggcaagcggtaggcaaacccgctgcacgagccaccgcgatccaggccaaacaccaaccccggtgtttccggcgtgccccggtgctcatgggaccacaggtacaagccgcggtgataaccatggacccgcgcccgcatgcgttgtgtcgacgaacattcaggccgccagatcagcgaaccataagcgaatagc

SEQ ID NO: 672677 - DNA, 524 bp, Homo sapiens
  misc_feature (175)..(175): n is a, c, g, or t
  misc_feature (397)..(397): n is a, c, g, or t
  misc_feature (515)..(515): n is a, c, g, or t
  misc_feature (518)..(518): n is a, c, g, or t
tgacaccaccctgggcaacatagtgaaacctgtctccagtaaaaaatttaaaaattacccaggcatggtggcacacgtctgtagtcccagctacttgggaggcagaggcgagaggatcacttgagccttgaagttcaaggctgcaatgagctgtgattttgaaactgcactccancctgggcaacagagggagatgctgtcttaaaaataaataaaagtaaatgtatttacagaatcctaattaagaaaatgacaattgcggctgggcgtggtgctcatgcctttgagagccgaggcaggcggatcactggaggtcaggagttcgagaccagcctggccaacatggtgaaaccccatctctattaaaaatacaaaaattagctgggcgtggtgcagngcctgtaatcccagctactcaggaggctgaggcaggagaatcattcgaacctgggaggtggaggttgcagtgaggctgagattgtgccaccatactccagcctgggcaacagagtgancancatctc

SEQ ID NO: 672678 - DNA, 213 bp, Homo sapiens
ggtgaaaagcccggaatccccttttggaaaactttccccccttaattttgccaaccccggcccctgaggaaggggtaggggtttttccccctggttgttcaactgaaacccccccaaggcccctcctttttggtttttgggggccccctttcctcttttgccccttccccctcggaatgttggccaaagggaataaaattggggtttttttta

SEQ ID NO: 672679 - DNA, 160 bp, Homo sapiens
aagcgcacgatggctgcgtctgtcatggtcttcacaacgccagccccggagtaagccccagcggagggggcggggactccgaaaggggtgaggggctctggtctgcgatggggccacagatggagacgacgtgcgggtctgcaccatgccacttgcagtg

SEQ ID NO: 672680 - DNA, 547 bp, Homo sapiens
  misc_feature (362)..(362): n is a, c, g, or t
ggtctcattccatcctcaaaatggaggtaccttttattattcccatttatacaaggtgaggaaactcaggctaatagaagtcaaaaacctagtaaggtggtagcagtgataatgaacagtcaacaattccggagggcttactatgggctgggcactgttctaagcactttacatgtatggattcatttaattctcacaacaacccgatgaagcaggtttctataatccccatttaacagaagaggaaatggaggcacagaagggattctacaggcggggctgggtggctcaggcctgtaaatcgcaccaatgggggaggcggaggcgggtggatcacttaagccaaggagtccaagatcagncggggcaatgggggcaaaaccccatctctaaaaaattaatattaatacagaaaattagccaagggggggggtgcatgtctgtagtcccagttaccggggaggctgaggtggaagaatcaccggagtctgggaggtcgaggttgccgtgagccgagattgcccattggcctccagcctgggtgaca

SEQ ID NO: 672681 - DNA, 111 bp, Homo sapiens
  misc_feature (83)..(83): n is a, c, g, or t
gaacagcagcgcgggcggcggcaagatggcagtacaaatatccaagaagaggaagtttctcgcttaatggcatctttaaaganaactgattgagtttctgactcgggagct

SEQ ID NO: 672682 - DNA, 171 bp, Homo sapiens
aaacccactcagctggcgtgatgttgacgaacgttttcccggggacggcgtgccagacggagggcgagtccttgtagccccagatggccgcgtcctgacaggttccgtcagccatgaggttgtcgatgtatgcgttccacccggccatggcgctgctactggtgctgctct

SEQ ID NO: 672683 - DNA, 255 bp, Homo sapiens
ttccaccgtcaccatctttcttcctactattcccatccgcccacccacctaagatatcccggatgtattatttcatttgagctcttctcaaagtatggaaaattatattcaaaagctggacagattgtataaaggcgtcagaagaagaaactgaagccatctgcattttaaaacttaacagttctgaaaggaaaacacagatgaagatcctgtaggaaatatacttgctatgattcaataaactataaaatcctc

SEQ ID NO: 672684 - DNA, 115 bp, Homo sapiens
aagcactcgtcgtttcctttacatgctcctctccatgaggctcattccgtcagtgcagggcttgcctgatgtggacgatgtggatcctcagccctgacagtgattgttccccgct

SEQ ID NO: 672685 - DNA, 110 bp, Homo sapiens
ctggagtttctgttgtatgaatatcccaatatgaatatacctgtcctagatttgataggcatatggtaatactggggttcgggctattgtgaataactctactatgaaca

SEQ ID NO: 672686 - DNA, 217 bp, Homo sapiens
caggcggtacaaccaggaggaaaaagaggtgaggcaattttagtcaatacaggctcttctccacttaattaaagtaccaacaattggacaattacaaccaagttaattcgacccgggaggggaggtagctgaaatctgtctcaaagaataatttccaaccaaatagtatttaagcttgggccaggaggggattaagaccaagagaaccggctaggcg

SEQ ID NO: 672687 - DNA, 613 bp, Homo sapiens
gggcaacagagtgagattccgtctcaaaaaaaaaaaagaaaaggaaaaaaaaattagcatttatacctcttccttgttctcaaccgccattgaaaatttctgaacactccaaatttcagttgaaataattccaaaacaaaattttataagctattaaaataatttttaccttcttatagtaatagtataccttttaaaagccctcagcggtatattaatcttctaaacaggctacaatttcagttgcagctacatttaaccaactatgtttctctagttgagaacaacttaggcctattttcactgctgttgttagcctcagtgcctaacagtgggttgccaaaataaatattcgtagaatttacccttgaatttgctacaaaaaccatttcgcttttgggctcttaaccaaattttggcccaaaaaaattttttccaaaaaagcgcccccgtggataattttcaaagttggttttaacaattttccttttttggacaaaacacttttttaactttaaacttctttaactttttctacattttctctccagattattgtgacctggccttgcgggtgtttgactttagcctacatttaagttacttccaatta

SEQ ID NO: 672688 - DNA, 231 bp, Homo sapiens
  misc_feature (180)..(181): n is a, c, g, or t
  misc_feature (183)..(183): n is a, c, g, or t
gctgcatcgcgggaggcgcatggcgggggatggcgctggcgccgggcctggaagcagatgtccttgttctactaccattacctgctggtcacggcgctctacatcctggagccctgggaaccgaccgttttcaattccagccgtggtttccattttggtattgcactcttacacaaaatnncnactttaattcccaacacaaataatgccatatattcactctactttaaa

SEQ ID NO: 672689 - DNA, 669 bp, Homo sapiens
tgcagggaggctgcgcgttgggaggaggtagcagggtaggagtcaggtgcctgggtctgggtctcatccagagacccacgggcctaggcagagcatcctggctggagatcttggaggaagggcctgttctcacgacctaagtgttcctttctcttcagctgaggatggagtggacatgtttggtaaagagatgagggtaagggttgaggtgttgaacattgggcatggaggaattccaagtatgcccagttattaataaggggctctcaaattctgttgccttttttgattgccctggaatttgacatatatagaacatggttccattcagtgagccattctctaggccttggaaatcttctaacaataaaaatccttctggccgggtgcggtggctcacgcctgtaatcctagcacttagggaggccaaggtgggcggatcacctgaggtcaggagttcaagaccagcctggccaacttggtgaaaccctgtctctactaaaaatacaaaaaattagccgggtgtggtggcgggcacctgtaatcccagctacttgggagactgaggcagaagaattgcttgaacagaggcggaggttgcagtgagctgagattgtgccactgcactccagcctgggtgacagagcgagactctttctcaaaaaaaac

SEQ ID NO: 672690 - DNA, 243 bp, Homo sapiens
  misc_feature (165)..(165): n is a, c, g, or t
  misc_feature (198)..(198): n is a, c, g, or t
  misc_feature (234)..(235): n is a, c, g, or t
aacctcgggacacatggttatctcagtgataccttgaagaagctgaagataacagctgtggacaagactgaggatagtttagaaggatgcttggatggtctgcttcaagcccgtggttcaaaataatacggaaacaagtgaaaaagtccaagcaagtggaatacnttcagctgttggcaaggtctgtggactccacangtcttcctgcaaagcgccaaaagtagctaacatcanntagcagaa

SEQ ID NO: 672691 - DNA, 1095 bp, Homo sapiens
  misc_feature (1084)..(1084): n is a, c, g, or t
  misc_feature (1095)..(1095): n is a, c, g, or t
cacctcacaacgatctaccccacctaatttaactactatgcccctcggcggcgagctttagggggcacccgctactcatacttttcgccaggccctatgcccgttctgacactacactggtgaacaccgagctggcggtaggcggcaaagcgcgctcactatagatccgcctatcctcgaacgccgcatgtcttagcacgaactccgcgcaagttgcaagccccgtacccacgctaggtggtctcggcattctccaaagtacacagcatctccgcctgccgacgcgcctccatagaattgatatactgaccttcgaagcgtcgcaacgacctttcctcttctcgaagcactgcgtccacacagcttctcgcatccgcggatcgactgacagaccaacattaatccacctgccctgataatcgaccaccccacagcctacactcacggacgctactctcataccctctcgtgcacaccgaccaccctctcacccccgcttcgttctccagcgcactctcactcactagctccgcccaccgtctgtcacaacatgaaacaatcctgcgtcttatcaccgctcccactaccctcaacgtaactttcaacgccacacccccacgtttcttcggtatcgatccacggaaatcactaacaatacgcccctgccgcccacgagcactcgacagttgatgaccctcacactcctcctctcgctcccctcgctcctccattttgctccgttttcacctgcaatattatatgtggccccccctaccctccacttccatcctttccctcgccgctcttcccctctccctctccccttcctcctcgatgtttcacctatacaacaataccctaacccaatatctcacatgccgctttctaatatgcagacgtagctagacgcccattgatcatgatatacgtgtacacatcttccacgtacacgcacgcgcatcgaccctcgctcccactcccatctcaccatctcacccatgcgctccggtcttgtatcacctacgaccgacacgagcgccagtccgcccacgcgtcaccctgttcctccgtcccacctccgccnacgcatcccgn

SEQ ID NO: 672692 - DNA, 1018 bp, Homo sapiens
tgctttctgcacaaatggtagcccactgcaagctgtgccaactcacgagagcacagtgacattacattgcactcaaaattcaagaagtatgtctggtgcagcaacaggacattcgcactatcaattcacttgcaacatgctctcagcctaactgctcaacactgtctaagccaacagcactctgcagctcttcctggtcgaccattggcaccgccaccgcagctgcatcacgctctgctccgcgccagccagaaagagcataccgtcagtctggacatatttatagatctcacgagcgccaggacaccacccaattgggaccaacaggagacagtctcagcaagttaactatactgtgggcacagcctttaagcattccatctcgttatagttcaccaattctaaatacgcaacaagggcaggcggaaacaaatatctccaaaggacctaaaagctcaactggtgccagaggaacgcaagtgccaccccgttgtgaccacaggcctgcatgggggacaacactcgagcacaccacacttgtcggggaacacttggggcgctctcggcgacaaacaaccccctggagatgacgcacttccacgcggccttgctgcccttaccaagagactcacttaccacacattcaaggagctgcacgaccaccaaggcgcgtggcgcaccccccgcgccggggacactctgcccacttgcggaacacacaaagtatgaaaatcccacaatttctagcacaactaggcggcgcatcaacagacgtcgaggacgaaggcacccttgaaaccgttcgcgagttcacaaaaccagcaccactggcacagttattcctattctagccttcgcctttcttcaatttggacaagttggacacgtctccagaaacatactagcacgtattcatccacacaatcggggacaaacttgctcatacacacatacaactagctgctcaaccacttctcacagaacaagacggactacacccctagttcacccgttatca

SEQ ID NO: 672693 - DNA, 690 bp, Homo sapiens
  misc_feature (1)..(1): n is a, c, g, or t
  misc_feature (208)..(208): n is a, c, g, or t
  misc_feature (235)..(235): n is a, c, g, or t
ngagagtcgtcatctcaaccatatccatgccacggtgctacggctggggagcctgctgagttgagatggatattcagtgcgcttttccctccattccctgaagtccttcatatctgccatcttcatcatattctgcactgaagtcacggtgtgcacatgttcctttagtcttagaggctatcgtaccatcttcgattctgtgtgatcncagacagtttagttcatattctagtancttacggttgagctgcatgtgcaatcatgtactgtttcaacataatctgctctgtatttcaacctgtcactgcaagtggcattatacacggtagagtctacctcaaagcgtacagtcagtgcttgaaagtaaggaatcacaattccagcaggtgcagagagcttaatgtaggcactcgcaatggtctgctcaggctcgatgatggtgggcaacgcaaagtctgcgatcgtgttggctactgcatttagatccgtatcatcaatgccatctgaaacgctgtttgtaagcgtgaactgggactcagttagctaagattcaggcacggttatctcaaactagggaatcaaggagtcttctggttgagaatattcttgttagcacatcatcttcacgtaatgttacctcggctagtgttggtaggctgagggcaaatcattaagttcccagcctcttat

SEQ ID NO: 672694 - DNA, 674 bp, Homo sapiens
ggacgcgtgggcggacgcgtgaggtgcgagagttcaagcgtgatccctggacttgaataatatgtgtgacaaactgatttggaggaagcattcagcatctgcccttgtcctccatggtcacaaccagaactgtgactgtagcccggacatcaccttgaagatacatgtttttgaggcttcttcagagcttcagctgacctatccacgatggaacaatgtagcttgtatacgtcaagcaaacccaggatgcctgagatggaactacatcgtgcacgatcgtcgtctacaatgtgccacacatacccctgatggtgcgaatgccttgtccgtccaatgcacctgaacagtggagtattaggttgttgtagcattggcgcacacgcatgggtgccttcattcaactctggtactgccggcgaggtcatgcacagaaggagccagccagagtcggtctattccaggtcttccgcgccaatgcatctggtgctgctggcagaggtttccctcccgaggggaaccaacctcctatgcagaccagatgtcctgctgaagcgaggcctcttggagcacatcctttactgcattgtggacagcgagtgtaagtcaagggatgtgctccagagttactttgcactcctgggggagctgatgaagttcaacgttgatgcattcaa

SEQ ID NO: 672695 - DNA, 227 bp, Homo sapiens
ctaccaccgccacgcaccccccccgcccacccccttcagtgcccctttaggagcatgattacgattccgcagcgtatctactaacagcgttataccatgagtcttggaatactgaagaatgggaaaaaagtaaggctgcagcagacatcgcaagagtatatatcgggaaaatagctcatcagaaacaaatatcccgcaacgccttctacacatcaaacccgcctgcc

SEQ ID NO: 672696 - DNA, 897 bp, Homo sapiens
gtggtggctcacgcctgtaatcccagcactttgggaggctgaggcaggcataacacctgaggtcgggagttcaagactagcctgaccaacatggagaaaccctgtctctactaaaaatacaaaaaattagctgggcgtggtggtgcactcctgtaatcccagctactcgggaggctgaggcgggagaatcacttgaacccgggaggtgaaggttgcggtgagccgagatcacaccatcgcactccagcctgggcaacaagagcaaaactccatctcaacaccccccaccaaaaaaaaaaaaaaaaaaaaacttgggaggtgtttcccctttcataataaatcctaaaggtaacaaaaggcggatgcagttttccaagagaaggtacctttatgggaaaccaagtttcgggaggggtacattaggtattaagacctctttcacagtaggaggtatacctaatattataggtatctggttcccaagaagaaacaacaagaacaaaaaaaagaaaaaaaactgtgccgggccggccaagtgagcccccgacaaaaaagagctccgtgaaaaacacacatgtcttgtgggggagccgcgcgggccacccccacaaaaagagtcaagatacggaaccaacggcgtgcgcagaaagagcgacggactccaccaggaagaaaactacgggggaccgagaaagacacgcggcgggggggaggtattcccacccaccgatgaatgaaaaaagggacgccggcgtgggaaagaagagaacgagtcttgtcgagaacaaacacccccccgagaagggagcaggcgccagggaggcacaacgagggggtatcatctaacacggggagatcccacgacgagaagcccgaagatttaaatagttgccccaa

SEQ ID NO: 672697 - DNA, 435 bp, Homo sapiens
  misc_feature (45)..(45): n is a, c, g, or t
  misc_feature (54)..(54): n is a, c, g, or t
  misc_feature (264)..(264): n is a, c, g, or t
  misc_feature (282)..(282): n is a, c, g, or t
  misc_feature (315)..(315): n is a, c, g, or t
  misc_feature (327)..(327): n is a, c, g, or t
ctaaattcgcggccgcgtcgacctgtggacccaacgcctgcatcnaaccttcanccacgatctgatgggacttcatccctcacctatccaaacacagcaaagacacggggcactaaaaacagctttcagcaaaatactaggggtgatctcctgcccaggactcttctctgcacacacactgctgatgccaggggaaaagctcatcactgcccttcctggggatggggtggctgcagggcctgcaacatacaaagattacgcggngcctctgctctttaaatnccctgaaatatatggatggaatgagtgagaaanatggctgctcangtccatctggtagttatgttgcttacaagagtaatcattatgtgataccacttcccgttcttattgtaacaggcttattaggacactattagtcaaggggagacagag

SEQ ID NO: 672698 - DNA, 730 bp, Homo sapiens
ctctcgttctctgcgtgacgacccccctcccctcctcgatattcatcttcctcccgcacgcagaattagatcagggcgagcggggcaggaggatggagaacagcagcggccgggaggtgcttccgaacggaggaggagccggggggatgggcaacggcgcggcgaacgggagggcggtgcaggcgctgcagcggagcttcgccgaggtgcaggcgatcctggagaagaaccggattctgatccaggagatcacccagaaccaggagtcgctcgaggccggtggcctcagccgcaacgtcgccctcatccgcgagctcaacagcaacatagcccgcgtcgtcgacctctacaacgccctctcctgctccttctccagctccctcaccaacggctccgcccccgctgcctccgacgcctccaagggggcctacaagaggccgcgccctgcccagtagaagagacagaccgtcagcgccatcttctcctctgttcagatttagatttctgctgtggccatccatggccagggctcagcggcaggcagatttgagacttccttttttctttttcttcgttttcttctttgttttagcgttgagctgagagatatggacatggtcagcttgttgtcagagatgaaacaaagatgcaggcagcagtgtgtggctgtatcagtatgtatctgtgtggcgtgtgtgttgacaaacagcaaaaaataacaacaacaggg

SEQ ID NO: 672699 - DNA, 473 bp, Homo sapiens
cagagtgagaccctatctctacgaaaaaaacagagagaagctagcagaaataaggagtgaattgatgctggaagtcaagtgtgttagtctgttttgtgttgctataaaggaatacctgagactgaataattgataaaagaggtttatttggcccacagttgtgcagactgtacaagcatggtaccagcatctcctcggcttctggtgaggcctcaggaagcttttactcacggtggaaggcaaagggggagcaggcattttacatggcaagagagatgccaggctcttttacacaaccagctctcatgtgaactgacagagggagaactcaagcatcatcccaaggggatggcaccaagccattcatgagggattcatctcctgtgacccaaacacctccccttaggccccacctccaacactggggaatcacatttcaacatgagatttgaaggggacaaatatccaaactg

SEQ ID NO: 672700 - DNA, 226 bp, Homo sapiens
tgactcttagagatcccccgcggttatgttacgctggtcccagtattccctaatgcactggggtcttttttgaatgtgtcaccagagcaatgaagaacattttgagagattacactaaataactgttgagagtcagagacagtttttgtaggatcactactctaaagcagaatgctgttttagatttccacttctgacatttgatttcgtaagacataaccgcggt

SEQ ID NO: 672701 - DNA, 987 bp, Homo sapiens
  misc_feature (47)..(47): n is a, c, g, or t
cccatccctcatccaccaaaaacagaaacacgtccttttgtaactanacagcaaggctcgcgggcaggacttctgtctgaggaaaatgaatccacagctctacctcaggttctagcccagccttctactagtcgaaagcggccccgtgaaggggaagcctagggtgccgacaccacaaaacgcccagctgtgcgcgctgatgcgctgcgaactccgtggctagaacacccaaacacacgtaccttactttcattatgacatcttttttttctttgagactgctgttttatagcaagtaccaaatcattgcactaaccgctcccccacacaccactgtgcccccctcaccacctcctcacccctgtactaacatacccgcccgcggtcccctcctccatatctcccacacatcccccacaccccccacccccttacccttactttcttctctctccctctagtcgctccattcctctccccctctcctccccacacactccccgacctacccaacaccccaaaaccagtcatagcaccaacacaacacatcaactcacatacactctcctctcctcccctcttcgccccactcaatctgcaacgtaccccataccgcacccaaactctcatcccctccacacctactaccagatctacttttaccactcacctctcccccaccctcacatcccgcacacccctccccatatatcctcacctctctcatcccacctctactattctcctccatcatacccaactcaccttaaatcccgtggtcgtttcccatttcacatataccactctatcccctatctacaaccatcccacatttcaaatccctaatataattccgtgtttcctcccctccctttctatattatcttttcccgctcttgtctctccccccaccgtcacatgatattgtaattcacccctccacatgctccacatcccacacaccataactcctagcccgatcacatg

SEQ ID NO: 672702 - DNA, 374 bp, Homo sapiens
gtactgtcgtgcatatatctgctggcaccaggaaagctgaaggctgctgagaccctggaggaatgtgccctgcggtccggagacagggcactgaccctatcatgccagacgaaggtggcagagctgcttggggagagtgatggtagaaggacctcccaggagggccctggagacagtgtgaaattcgagggaggtgaagatgcttctgtggctgtggagtggtccggggatggcagtgggaccctgccagaggagtggctctcttggcaagatccgggatgtgctccgaaaaagcagtgaactcttggtgaggaagctccaggggactgagcctcggccccccagcagcaacatgaagcgagcagcctccttta

SEQ ID NO: 672703 - DNA, 208 bp, Homo sapiens
cacgagggcgctcggcaaggtatgttggcggcctgctctccgacagaacttttcttcttgggttgaggaaaacgccttttggagtcaggccctggaggggcgagccttgctcacagggtggggatacagccgattacccgccctgtgctttccgatggcttctgcggggcgagcggggcctggccggggggtgcgggcgggagggcaa

SEQ ID NO: 672704 - DNA, 282 bp, Homo sapiens
tgcccattgagaattatgtccctgtgcatgctgctagcgggtcccaccgtgccaggtcagccggggctctacaggcctgtgttggcctttggacttagaaggggaaacagctcatggaccatgcagctcgggcacagaagatgtgttctggtctgtgtccacgacgtcccttctgggcattcaaccccctgcgccctaagttgctggtgactcagcgccggcctgacccttgagcccgcaggtggtagtccagtggcatctgcagcctggcgatttgccaat

SEQ ID NO: 672705 - DNA, 194 bp, Homo sapiens
gatgtccacaccccagattacaaaatcagaactacattttaacaagatccgcagatattcatacgcacagtcaagcttaaggagcatctgctgtaagcccaacgtggacctcttcagcttcagtacggtgcccttttctactccgttagcctgaattctagcccctggggggggggggtgggggaatgtgcaag

SEQ ID NO: 672706 - DNA, 87 bp, Homo sapiens
  misc_feature (39)..(39): n is a, c, g, or t
aggttcttccccctgggtggtggtggggaagatggaaanggtggggcaatatacagagaggatacccgaacagaagaccccaccttt

SEQ ID NO: 672707 - DNA, 175 bp, Homo sapiens
aacaccgaaccaatattaagcactgctattacaatttactgggtctctatttacctcctacaggcctcagagtacttcgggtctcccttcaccatttccgacggcatctacggcttcacaatttttgtggccacagctttcccacggacttccaggcattattggctaacttttc

SEQ ID NO: 672708 - DNA, 160 bp, Homo sapiens
ttcctggccctcgagttcatggaacggtataactggaaccgacgcttacggagcaagggtatgcgagagcggttcttcctggccctcgggttcgtggaacggtataactggaaccgacgcttacggagcaagggtatgcgagagcggttcttcctggccc

SEQ ID NO: 672709 - DNA, 164 bp, Homo sapiens
atacactggagagctatttcatttggttctactctgatctttattatttctttccttctactaatttgaggttggtttgttcttgcttttctagttccttgaggtgcatcattagattaagtatttgaaatctttctacctttttgatgcagattttttttttt

SEQ ID NO: 672710 - DNA, 505 bp, Homo sapiens
ttggatgcgaagctgtcaagacgacccgaggagactgttccatcccactgggggctgattcccaatgtgcggagtcgcgctccaaatcaccgagcccggcctgatctcagctagaccgtaaggatctctcagagagcataggctagtgtggaatgagacttccaaaactgacagatgtcatccgagccgggcctggggctcctttctccagccagcaatgatgtgcagaagaattatgcaggatttaacggatccaggattttatcaaaagcaagattgtggctcaaatctattcatgacaagcaacaggtataataaattgttttatgtactgattatgttatatttatactcatcctgaatctcctgtgcccacatcccaggcttcaccctgagtggttccatgtctaggggtggagactaagccctgtcgagagacttgccttcttcacccagttaatctgtagggctggacctatgtcctaaggacactttgcatccagag

SEQ ID NO: 672711 - DNA, 298 bp, Homo sapiens
atctaaacaaactggctcctgtttaatgctcagttaggggcctttgctcccctggttaagtggcccaatgggccaaaaattcttgggcaaaattttgggcaaagccccccaaatttgaaaaaagggggggggggggggtctcacacccggggaaaaaaatttggggggggggtttttgggggggggaaaaaaaacccccccttttttaaaaaacccccccccccccccccccaaaacaaaaaattaatttttttcccccaccacaaggggggggggaaaaaaaatttctcaaaaagtg

SEQ ID NO: 672712 - DNA, 613 bp, Homo sapiens
gaggggcacacactccggtccaggtaggaacctgcagatgctgccgcctgagtcaccagtgagggcaagctcgtgctttgcacagaccccccaacccccgtgaagccagaacagaaatgtcactcgtgggaaccctcctcccccactgcagggagagctggagtagcaccgtagcattgagaaagaacgacacacagaagggctcctcacatccgggggcccagtcctgaccttggtttaaaacggggggacgtatacatcacatctcaggttcctgcgtcagagactcatggtgtgaagacccttagcatcaaaatctaagccctgtcctcctccactttgggctgtggctcatggaccaacaagaggacctgcccggagcctctgtagtccacagctccgcgggcggctcctccccgcgacacccagtcccatgtcccagtggcctagccccacttcagcagccacacagcccagtacagtcacctccagggcccagacgcatgccagtgtggctgccacggactgcatgggcacacttgccaggggtcctaccctgcagtttctggaaaccctcccatagtacctggcgactgactatgcacctgcagac

SEQ ID NO: 672713 - DNA, 235 bp, Homo sapiens
tcctgggttcactctggagcaggcttcctcccttactgcaggattgaatgaggtctaactagaagggggtctcctgtaacccttccctgggcttctcttagtaagaacagtttttgcatcatggaaacgaaaggcaagcaacatgtgatgcagtcaccattgcatctccaagcatctcagtataccaggtttgtaccccagtgttgcactccacaatgttactcattccttccaa

SEQ ID NO: 672714 - DNA, 954 bp, Homo sapiens
  misc_feature (332)..(332): n is a, c, g, or t
agcgggcttttgtgctcccagctctagcgaaaagccgccggtatttctccatctggctctcctctacctccaggcaggctcacccgagatccccgccccgaaccccccctgcacactcggcccagcgctgttgcccccggagcggacgttctgcagctattctgagcacacctgacgtcggctgagggagcgggacagaggtcagccggcagaaggaggcaggccccgcgcggggatctcggaagccctgcaggtagcatcatgaagttccagtacaaggaggaccatccctttgagtatcggaacaaaggacaggcgaaaagatccggaangaaatatccggacagggtcccgcggatgtagagaaggctccaaaaggccaggatgctgatctggacaaagaggaagtacctagttgccctctgaccttactgtggccagtctatcttaatccggaagagaatccacctgagacctgaggacgccctcattcttcttgtcaaacaaccaaccataccctcccaacagtgcataacatggggccaactgtatgaggaccaatcatgaggaagaatattccatgtcatgtggcctacaggatgacgagggtctattgcgacactgagggtctgcaccccagcagagggagcaccatgactgcgcgacggaggggtgttgatgccgacaggcgaaacacggtggcacccaccgcaggggaccacggcggcgacctaaagacatagaccaactcacgcaaactacacatggccacgccactccgggatacccgccctggacaaagatcagacagtgaatgattcaaaaccgcccaaacgaacaacgggcaacggaagagcaagaacagcggacaaaacaaacacacaagacacaggcacgccagtactacacctaaaacacaccaccacaacacccgcactctcttcctcctctcca

SEQ ID NO: 672715 - DNA, 469 bp, Homo sapiens
  misc_feature (188)..(188): n is a, c, g, or t
  misc_feature (203)..(203): n is a, c, g, or t
  misc_feature (337)..(337): n is a, c, g, or t
  misc_feature (411)..(411): n is a, c, g, or t
agtatctatcggatccacacaaatccttagaaaggttttctgtgtagtcttcactaacgcaagtccttgggaatgtttcacttttactgtaggatcttgaacacatttcacaataatgaaactataaagtttttatgcagtgcattcgttattaactataaataacatttcgtattaaaaaagaaatnctgggtaagtacagntttcttccttatgtagtaagaagccgaagaagactgaagaatgttgattttggaccactaccccatcacataccatcatcacagtctccagaacatcatctttgcaaaacaaactatcgtgtacccattaagcngagataatgtaactaccccatattcctttctccacaccaagtcactaagtaactagatattccactgttgtttnttataaagttggacttctcctaaaaacttgcatataaatggaatcatgcgatgtaaaa

SEQ ID NO: 672716 - DNA, 123 bp, Homo sapiens
gagttcaaggcttgcagtgagcccaggatagtgcacacggggctgaagcaaagagcaagagcctgtttcagaaaaaacaactctgggactggagtgctttagacagatggggagaccaagaat

SEQ ID NO: 672717 - DNA, 99 bp, Homo sapiens
tcccccatcgggaaattttcataaaaagcagcatttagaaagaacaaaaatctgaaaaagcctttcggaggataaagaatccggaagtgttcgcaaaaa

SEQ ID NO: 672718 - DNA, 126 bp, Homo sapiens
  misc_feature (49)..(49): n is a, c, g, or t
  misc_feature (115)..(115): n is a, c, g, or t
  misc_feature (122)..(122): n is a, c, g, or t
ttttttttggggggggcagttttaagttattagtttttaaaaacaggcntttttaatgggaacaacttggccaaaaatttgtcccagaattttgaggccccttaaaaaggtgttnttggggnaaga

SEQ ID NO: 672719 - DNA, 400 bp, Homo sapiens
  misc_feature (141)..(141): n is a, c, g, or t
  misc_feature (320)..(320): n is a, c, g, or t
  misc_feature (335)..(335): n is a, c, g, or t
  misc_feature (382)..(382): n is a, c, g, or t
gaggactgggtcctttcacatccgggggggggaagtggttatataccaggtgcagctgcggccccttgagcacgtggatgggacgcacgtgtgacagctgccgggggcccagaagggaaacatccatctgaacaccttccntctccgacggtctcaagatgggcgcggatatcatctgtgatgtgtacacctgcgatctacaaaaagaggtgcggacagctcgctggagctacaacggagtacttcgtgtgcggacagtgtgtgtagcagagaggggtggtgtggacagacctagatctgctccaccctctctctgaatnaacatacaaccctcncctgcggggagggggaagacaagccgttctccccgccgtggggagtnccagtgcggatacttttt

SEQ ID NO: 672720 - DNA, 144 bp, Homo sapiens
taaatgttgtatctgtaatgtttgtatgcttatttaaagttttattcttgatttctttgtaaaacatccattgcactgaggccatatcattccttattacagccctacatcttgccttgtttatcccttagacaaagggaaaca

SEQ ID NO: 672721 - DNA, 342 bp, Homo sapiens
cacggtggctcacacctgtaatcccaacactttgggaggctgaggcaggtggatcacctgaggtcgggagtttgagaccagcctggtcaacatggtgaaaccccatctctactaaaaaatacaaaaaattaggcaggtatgatggtgcatgcctgtagtatcagctacttgggaggctggggcaggagaattgcttgaacccaggaggcagaggttgcagtgagccaagatcgtgccactgaactccagcccgggtgacagagtgagactccatctcgaaggaaaggccgaagtaggtgggtgtcccttcccaggagtttgattttttattattttgttttt

SEQ ID NO: 672722 - DNA, 866 bp, Homo sapiens
taatgtgtcttagattgagcaactatcctaggtgtgtagtcaatgtgataagactaaaattttgcttatagggatagttcacatccagtagagcttctagcttggaagacattcttagccttgttatttggaatgtatgtgtgtgtgtgtgcatgtgtgggaagacaagaagaaatacgagctctagagtagtggcctcagattgatttatattaggtgtgccagtctttcccctacctccctagatatttcaaaacttcggtgtggacaagtgacattcattttcataacctttatattgtcctgtgccaccagaaacgcaaaagcagcttagtgttgattctaatgaagtagcacaaatgttaaatacataacaaaacagatgtcctgtcacctagaacaaattagtgatgttgagtaattagggttggcatgtgtatatagaaaggctattgggcaaacagtggttcagtcgtgtactgggcacaggtgaattctgccctgcgattgccatctttagcacttgtcagagaatgggttgccatttatgacactgatcttcagacacactgtgtagtgcctgggcttaaactgtcagactggcaacaggtgaagctgccatcatagacacgtccttgacgatatgggtcaggtggacttgtcaacctttggggctcgtatttttgaaatgtcctcggaatcactcttgaaccgcgtcggggggccccataataaagagggcgacccgcattggggggacactaaccagaatttttaggcccacataaaagacgcaagggcgccgcaaaaaggggggcacacaaccacgggtttaattcccacacacagcacggggaagaaacatc

SEQ ID NO: 672723 - DNA, 124 bp, Homo sapiens
atacgttggggggtagactagtatacacagtgcataccgccaaaagataaaatttgaaatctggtaaggctggtgtaagggttcttagtaaataggggtaaggcagagatgtgtttaagtgctg

SEQ ID NO: 672724 - DNA, 362 bp, Homo sapiens
agtatatactagaatacatggtcaggggctgggctcagtggcttccaactgtaatcccagcactttgggacaccaaggtggctggatcacctgaggtcaggagttttgagaccagcctggtcaacatggtgaaaccccaactctactaaagatacaaaagtagccgggtgtggtggcacatgcctgtagtcccagctactcgggagtttgagacaggagaatcacttgaacccaggaggcggaggctgcaataagctgagagcttgccactgcactccagcctgggcaaaacagagcaagactccgtctcaaaaaaagaagaaatacatattcgatctttgctccacagttcctgacacaga

SEQ ID NO: 672725 - DNA, 321 bp, Homo sapiens
  misc_feature (176)..(176): n is a, c, g, or t
  misc_feature (190)..(192): n is a, c, g, or t
  misc_feature (304)..(304): n is a, c, g, or t
gtgtgtcgagtaagagaacactaaaatttaagtggagtatcatagctttcaccttgggaagacgaaaaacaacaaacatacaaaacaaaatgacccagaatattccagagtttccaaaaatccaactgctaattttggcagggtgagaagaaggggatatttaacgtgatacctcnttcatataacctcnnnactttctccttgacatttcactggtataaacaagagctcccaggtctacttgagaaaaagcgatcagtccgtgctaaatatacaggcctcatgacgtcttccaagtgccctntactctgtacacacggt

SEQ ID NO: 672726 - DNA, 121 bp, Homo sapiens
ggacagcaggggactcggcgtactcctctgtgctgtccacctcctctgtgcggtccacctcctcggtgctgtccaatgctgtccacctcctctgtgctgtccacctcctctgtgctgtcca

SEQ ID NO: 672727 - DNA, 468 bp, Homo sapiens
  misc_feature (214)..(214): n is a, c, g, or t
  misc_feature (219)..(219): n is a, c, g, or t
  misc_feature (221)..(221): n is a, c, g, or t
  misc_feature (230)..(230): n is a, c, g, or t
  misc_feature (249)..(249): n is a, c, g, or t
  misc_feature (337)..(337): n is a, c, g, or t
  misc_feature (346)..(346): n is a, c, g, or t
  misc_feature (408)..(408): n is a, c, g, or t
  misc_feature (425)..(425): n is a, c, g, or t
ggttcgcatcgcacgcggatttcaggtcggaaagtgttgggcaaggagccagacgctgtctctcggggctcggggaacagaccctgggctaccgcccaggtgagaacgtgaaggggatgaagagctcccgcggcgaggattattggatccggttgctgactgcgcgcagtaaacacttcttaaagatggagcgcttaacgggagggtgtgcgtntgtgntnccgggttgntaccttgcacacacccagntatgcccgcatgatcatgtctctgaggtgaggagacaggttgacttttccggtgtgcctgtctgatccgacggcttgggctcattgtncactgtgtnttggaagtgtctgattgtagggtggcatgtttggggttgttccttttaggccgcagaacttntgtctaacttctaacgncagacctgctttaaaaacaacacttttttttgggggggggtgc

SEQ ID NO: 672728 - DNA, 251 bp, Homo sapiens
  misc_feature (2)..(2): n is a, c, g, or t
anttgcggcacagattcaaagccacatatttcatactcgttaaagcggttagaataaaaaagacagacaataacaagtattggcaaggatgtggagaaaacgaaaccctcatatgttgctaatggaaatgaaaatgttgcaacctctttgggaaacaatttagcagtttctcaaaagttaaatatagtgctaccatatgagtcagccattctactcctagaggggtaccccaaagaattgggaaagtgttt

SEQ ID NO: 672729 - DNA, 1176 bp, Homo sapiens
ccgcggcgtcgggtttgggctggaggtcgccatggggcgaggcagcggcaccttcgagcgtctcctagggttttcaaggagacttcaagtgagacaccttccttgccaagggaaccagcaagcagactgagctatctcagccacacagacaaggcgaccagccagctcctgttggagacagattgggagtccattttgcacgatctgcgacctgcatcccgcccaaggggacacacaaagcaaaatatgctgtgaattccatcaacgcaacgaacagtcaacgacaagaacccacacgctcgccttgtatggccctgcgcaggtcactggcaactcctgctgcgctacaacgcaacctgtgcgccacgcacacgcttcactgcatgcagcgctggccaacaaagcaccaccattgggcaggcacgcctgcaacggacccctgccatcgaaggagcacaacgctggcgcgctacaaccgctccgctaacacacgatccgtgctagccttgatccagcgcctggcgccgccatgcctctccggaaacgagcaacaaagctaccaacggctggctccagcgacacgctaccacactccactcgccaacggctggagtgcggtctacgctctcacccagcaacttcaacagcagcagccgcactgcacatgtgtgtgctgcgcgagcaggagcccccagacaactgggctggcaccgctgcagcgaaactgccaccgcatgccagggcagccaccaccgcgcggcctgactgcacccgctaagcaccaactgcccggcacgctctgggcacgcactacttccctgctgggcacaggccgctcctctcccaaacgcaaccatcacaaacaactccccaagctcaggccactcaaagcaacaggacctgctgccgcgttgctcgctgaccccccctgcacaaccacaccagcctgcgacaccgcgaaaccgcgaccccacacccaccccacctaccaccaacctcgatcctttgtcctctcttttttaccctttccttctgcctcctagtcttcccccaacccccacacaacccatcacaccacacccccacacatttactcgcttttcccgacactctccccactaccacacccactcccaccacacccacaaccccacacgccaaacccactttcaccaa

SEQ ID NO: 672730 - DNA, 522 bp, Homo sapiens
  misc_feature (214)..(214): n is a, c, g, or t
  misc_feature (219)..(219): n is a, c, g, or t
  misc_feature (221)..(221): n is a, c, g, or t
  misc_feature (230)..(230): n is a, c, g, or t
  misc_feature (249)..(249): n is a, c, g, or t
  misc_feature (391)..(391): n is a, c, g, or t
  misc_feature (400)..(400): n is a, c, g, or t
  misc_feature (462)..(462): n is a, c, g, or t
  misc_feature (479)..(479): n is a, c, g, or t
ggttcgcatcgcacgcggatttcaggtcggaaagtgttgggcaaggagccagacgctgtctctcggggctcggggaacagaccctgggctaccgcccaggtgagaacgtgaaggggatgaagagctcccgcggcgaggattattggatccggttgctgactgcgcgcagtaaacacttcttaaagatggagcgcttaacgggagggtgtgcgtntgtgntnccgggttgntaccttgcacacacccagntatgcccgcatgaaaaacctttactccccgccgccggccaccgctgcccgggccacacaccttaaactcatgtctctgaggtgaggagacaggttgacttttccggtgtgcctgtctgatccgacggcttgggctcattgtncactgtgtnttggaagtgtctgattgtagggtggcatgtttggggttgttccttttaggccgcagaacttntgtctaacttctaacgncagacctgctttaaaaacaacacttttttttgggggggggtgc

SEQ ID NO: 672731 - DNA, 858 bp, Homo sapiens
  misc_feature (73)..(73): n is a, c, g, or t
  misc_feature (79)..(79): n is a, c, g, or t
  misc_feature (84)..(84): n is a, c, g, or t
  misc_feature (98)..(98): n is a, c, g, or t
  misc_feature (112)..(112): n is a, c, g, or t
  misc_feature (115)..(115): n is a, c, g, or t
  misc_feature (126)..(127): n is a, c, g, or t
  misc_feature (164)..(164): n is a, c, g, or t
  misc_feature (166)..(166): n is a, c, g, or t
  misc_feature (197)..(197): n is a, c, g, or t
  misc_feature (222)..(222): n is a, c, g, or t
  misc_feature (235)..(235): n is a, c, g, or t
  misc_feature (250)..(250): n is a, c, g, or t
  misc_feature (265)..(265): n is a, c, g, or t
  misc_feature (294)..(294): n is a, c, g, or t
  misc_feature (309)..(309): n is a, c, g, or t
  misc_feature (311)..(311): n is a, c, g, or t
  misc_feature (315)..(315): n is a, c, g, or t
  misc_feature (323)..(323): n is a, c, g, or t
  misc_feature (338)..(338): n is a, c, g, or t
  misc_feature (367)..(367): n is a, c, g, or t
  misc_feature (369)..(369): n is a, c, g, or t
  misc_feature (381)..(381): n is a, c, g, or t
ggcaggtcgccccggcaacagccggctccctcgcgtccccactccccctctgtctctccaaggaaaactaggnccctgngcggncaagcccaggatcncgcaagctgcgcgnccnaagagtttcanngcccatttggactttcacaatcagagatggcagcggnanaggcatcaacatcgaagagctaccaggcgcntggtattctcatccggtatatgcangatagtggcaacntgatcatcaagcaanggcttggatgctagnagccatcacgatgcctacaggaaggccgnggaatcctgttcaantnttcnatggtagntaccttctgcgcttnttccccaaagctcttacgataatgaggcngngtatcctcagtncttctatgaccatcatgtggccgtggcaggacgtaccgcctgcgaggatcgtgtcacattttcacgaagatcctgggtcagcagtccacggttacagcagtaggatcctaggcatgccacgaaaagaagaccaggctgtgtgtccaaagaggaagagatggcagactgggtcagatgcagaggtagaatgtgacctgagcaatgactggaaatcagctgaagagctccgcgaggtacttgcagagacgagaggcataggagacgaacgagggggaaacaagaagatggaagacgagcgcccggacaggtatggaacgctgacacgacctgtgactgagacaccagcggcgggaaaagcccactgaaagcctggtgacggggccgcgaatgaggtggccaggaagggcgcgcaacccaccgagccgggcacgactggaaagctgggccacacaggtggcggccctgaagagcagacgg

SEQ ID NO: 672732 - DNA, 155 bp, Homo sapiens
cgtaccatggcgcgcaatgcacgtcggatcattcgcgagccggagtgcgtttgccggctatatcccgtactcgacgcatgtgaccgaccacgtcatcaagacgcgagaaggcgactacctgcaaatctggaagatcgccggcattgcgttcgagg

SEQ ID NO: 672733 - DNA, 182 bp, Homo sapiens
atgcactgcccacccaacattctcgcaggctttgtgtcacaggcagcagggtggtgtgcagccagcgctgtgtgcaagctcccagcactctcgtggtcctcacatgtggccccattgcatttttcatttccaatcactgtatgcatggcacagcgtcgcgccatggaggcatcctctcagca

SEQ ID NO: 672734 - DNA, 505 bp, Homo sapiens
gaacggccggcctgcgactacctatcacatagcatagctgacagctgcattctcacccgtgcagaatagagtctaaacgtagtgcttaacagctcaagctaaagtagagataaacagatatgtgaaaaataaacttagccaaatactcatgtagaggataaaaaaaagcgatagtcccagataagtcaatagtgacactaaagatactaaacaattttaaatataacctatttaagttaaacatcacattattcagccacccaagcaaatcatacggcaactgtccactcatattgctatcatataaacggtaactattgaatctaccatagcccacatttaaaggccggacaggaaaaaacttcaacagccaggaacttatccccgaaagttcccaattatagtacatccttacaccttaggaccagtaaccgtatacaaaaatttggacttttcgggggataatttctaggacggtaccggaggctcgaaatatccgaaatca

SEQ ID NO: 672735 - DNA, 414 bp, Homo sapiens
tgattacactgtatgaagctgttcttgctgaagctctgtttgttctacttggtgagtgtgatagaaaagtctggttataactgtgctggtactgattttgctgtataaagtttctggttcatttacaggaggaactgcggcattcatattgaacaccgtttgcatggatttggattggagctgcatttacatttgattccacttggtaaggccaaaatcagttgccacggcccgccaaagctttcttccgggcggcacagcttctccgggcggcacaggttctccgggcggtcacagattctcgggcggcacaggttctcgagcagtctccaaacatattttacattcgaaggtcgcggccgcccgccaaatcgtgccacagattctccgggcgccacagcttctcgggcgcgt

SEQ ID NO: 672736 - DNA, 296 bp, Homo sapiens
tacatagtaaactgaaaccttaactgcatgagtacacagactaacctactcttgcgccgaacactgagttttcactaattaatggtggcccactgttcaaaccatgttcaaataaggcaaaagcgagctgtaaccaaaccatggtttttgtcaccccactaagttttccataggtcccccgccctttttcgtcaattcatcttccatcatgtggctgtttctttgagcccacttggattcgggaggctgcctgattcgtgaatcattctttgcccaattaaacccccttaaattta

SEQ ID NO: 672737 - DNA, 105 bp, Homo sapiens
atagttaccccgatactccttacactattcctcatcacccaactgaagagctgattgaaacacgaagcgtagcacgctcacgctcctcacagagccatgagagct

SEQ ID NO: 672738 - DNA, 476 bp, Homo sapiens
  misc_feature (1)..(1): n is a, c, g, or t
ntgacgatcccttattagtagaaatattgaaaaagcagataaaatatacacattgggtacagtgtacacggcttggatgatggttgcaccagaatcttagaaatcaccactaaaggacgtattcatgtaaccaaatactacccattccccaaaacctattgaagtaaaaaatgacataaaaaaggaaaaaaagaaaacagaaaccacccaaaagaaagaaagaaagaacgaatgaacaaaagaaagaaagaacgaatgaacaaaggaaagaaagaaagagaaagaaagaaagaattatttgtggtattctggaaataaaagtagtgagggatttttacgaataaggtaccagaaggatagacctaaggtctctaggaccttttctacctggacagatgcttacacatttcattatataatatttaaatatcatgttcgttaatatcactatgggtctcgttgaaaaaaatgttaaa

SEQ ID NO: 672739 - DNA, 157 bp, Homo sapiens
cacaacagtcaggcattttgtctttctcttgttcacggtgaggaggacagtagtactgaacggatcgcttcgtcaaacactgtcttgaggcctcgctgtgtgagcgccgagtactccaggtattttacagcatcaatctccttagccatggctatac

SEQ ID NO: 672740 - DNA, 985 bp, Homo sapiens
gaggagcggatgacgtcgtctgggacaaggcggtggctactggcaaaatggatgagagagcggagtttgtcgctgtcaccagcaccaatgcagccaagatctttaacctgtacccaatgaaagggcggattgccgtgggctcggatgccgacgtggtcatctgggaccccgacaagttgaagaccataacagccaaaagtcacaagtcggcggtggagtacaacatcttcgagggtatggagtgccacggctccccactagtggtcatcagccaggcaagatcgtctttgaagacggaaacatcaacgtcaacaagggcatgggccgcttcattccgcggaaggcgttccctggagcacctgtaccagctgcgtcaaaatcaggaataaggtttggggattgcaaggggtttccacgggcatgtatgacggtcctgtgtacagaggtaccaggggtacacccaagatataggcaacctcaccgttccttcaggcaaatcttcgcacttctaaacaacagtgcccacccatgagaaagctccagcagtccaagcttcagtcttatcaggtggccatgatagatgacaactaatcgcaggcgcacggtcacgatcgtggcgccccctggtggcgtccaacatcaccaggctcggttgaacgtggatgctgcggaggagctagcctgaaggattctgggacatcatgtccatcccttttcctgtcagtgttttgtggaaccccacaggtttagatggtgctgatggaggaaggggaagtcgaagatgcactttaccctttctgtgtagaagaaagcgcaatacgtgtgtgtgtgctgtgaaatccttgacccaagggggttcatgtgaatccctggagagtgttttattccccttctgtacccaggttaatgtcttgttgcctcaatataacccgggcacagtcagagggcggctgacccgatcatggagagcgtaaaacggggagga

SEQ ID NO: 672741 - DNA, 109 bp, Homo sapiens
tctccttctcgggctctggagaatgcacccgggactactttatcatctgccctataatcgacgatggcagtgctgcgccaagagggcccgaggaaacgtcttcatgtac

SEQ ID NO: 672742 - DNA, 1358 bp, Homo sapiens
ttctgttttttttgttgtgtctcttttcttgtcttccctccgtctcgtattttctttgtctcttctttgtgtccccttccttctctctttgtcattgcacccgctctggctctgtcggtgttgtgtgtcctcctctgtcgtttctggttctctggactctgcttctcttcgtctcttcgctggtgtccctttgcaattgtgtctgcttcgtgtcttgttccctactttatgttctatcccctttaggtgtgtcccctgttggtttattctggctgcttgttaccgtcctggtttccttttttttggtcatctgcttgtgtcctccgccacgttgctttcgtgtgtcggttttcgttgtgtttctttctcctgtctctcttgtcccttcggtgccagcttctttcccccctcttgtgcttgcgtatgatctttatactgtcgtttaattcctgtggacgccgccttggtcctgtggtttcttgtgcttttctttgtgctgtcttctcgctccgttggtcttgtggcttcctgtagttgttttacgagttgcgctttctctggcttttgtgcgtgccgcggcttgccgctttcgtcccgggctgcatgtaaatgtatcattggcagtgcgtctctggtcagggattggcctcaaggctcatcattctgtcatgaagatatccgggattgtctccgatggctctggctcgcttgttgtggccatatcaatgcctgattatatgtcctgcatgcatggtctcaatggaccgagtatccctcgatgtggtgattcttcgggttgttctctattatgtatagtggaacttcgagaggattttcaacagtggtccgaagagaagtgattcggtttgagaatagagagatccaaggacttctagaaccacgtgtatcatagtaccttgtatacactcctttactcactagcagcagtctggcaaagtactgggaagccttccttcctgaggtcaaagtccatctcctaatggactcataggaccctcagagcccacctgtgtgacgctgcctttttatacatctgtcttcctccaccttgatggatcccagtagtgatgcatcctgcttaggctggacttaacacccttgcctccctgtccccacgacctacctgtcacccagttactctaaccgtctatggtcattgtacgcgttccatatatatctgttcttacctgagagagaatagtttcctgcgttaagcaaaagacctacatataggtggtggaattatgggatggggtggagtattgatataaatatataaatacaaatgtatatttttcaggatgtggtttagatacgcgccaaggtcgttttctgtt

SEQ ID NO: 672743 - DNA, 310 bp, Homo sapiens
gtgtcttcgtcaaattacagaagccaaatgcctgccattccgagacttgttgacagagcatttgaaattaaattcctgattcaagcctaagcccttacaaagatgccggggggaaagcacacagactttctagggccacctgggaagaagcacgcccatgatcttgccccttgcccttaaaattggagtaatgatgaagatgctaggtgcacatgctgaaagaagttcaacccccgggcacacaaaattgcagaacatcgcagaaagtatgagcccaaacgctaagagcgcgagatcacgaaggatagac

SEQ ID NO: 672744 - DNA, 119 bp, Homo sapiens
tatggttaatcagtgacacgcgcaggtatcgcagtgtcctggattccgagaccccgctgctgagttgcctggctaagcgcgcggctgtaggcgggcgcgtgcactgcggggctctcgat

SEQ ID NO: 672745 - DNA, 310 bp, Homo sapiens
tgctagtcaggagagagtatgaaccatgatcacactactgcactccagcctgggcaacagagtgagaccccgttcaaaaaaataaaaataaacaagtaaatgcacagtatgttagatggtatgagtgtacggagaaaatttaagcagagacagggacagtgagtgcaagacgtgttggggggcaggttgcaatttttaatagagtgtccagaaaatgacttcctgagaagatgtcattcaagcaaagacttgaggaagccaagggagttggccatttgactgtctgacggaggcctgagtgtggtggctc

SEQ ID NO: 672746 - DNA, 127 bp, Homo sapiens
ttgatctcagcaggcatcccgttttgcagcatcaatatcaacagcactcacacaggtccaggcaaacattttcttccctgtgcatccagcgggtcaccgcagctcgcacattctgtcacatccatgg

SEQ ID NO: 672747 - DNA, 291 bp, Homo sapiens
  misc_feature (26)..(26): n is a, c, g, or t
  misc_feature (41)..(41): n is a, c, g, or t
  misc_feature (60)..(60): n is a, c, g, or t
  misc_feature (203)..(203): n is a, c, g, or t
aacgtggttagcggcgatagtgtggnggaggaatgggtttngttttgtatgttcgggacncccctcattttatttttacaaaagttagatatggggagtagtgtgattgaggtggagtagattaggcgtaggtagaagtagaggttaaggagggtgatggtggctatgatggtggggatgatgagattgaggtggagtagatnaggcgtaggtagaagtagaggttaaggagggtgatgtctatacaacaaaataggaggactactctgaaagtgggtccgagctgaagtg

SEQ ID NO: 672748 - DNA, 413 bp, Homo sapiens
ccatgcgtgctctattgacagtactagtatgatgctgatcataaagatgaaaaaacaaacacagacaagttaagtgtacagatgaactgttggcacaatcagcggggcagcgccaagagtcaaacctcagcagctagggtggaaacactcagtggactgatataacccctgggcaagttacttgacctttctgtgcctcagttcccttacccgtaaagtagggcatgatattaataactacctcgtaaagttcctgtgagacctaacagagatatgtaccatgtttgaaatagtgcctcgcatgtggtaggtcctctgtgtatcacagaagtaaagctggccttcatcttctacagataatttgaaaaatgcaccagatagtcagcagcagggtaccggggttcgaattcgta

SEQ ID NO: 672749 - DNA, 346 bp, Homo sapiens
gacaatgagtatactatgttgttatatatttttcattatatttcattttagaaatattttatggggctgggcatggtggctcacgcctatagtcccggcactttgggaggccaagatgggcggatcacttcaggtcaggagtttgagaccagcctggccaacatggtgaaaccccgtctctactaaaaatacaaaaattagctgggcatggtggcacatgcctgtaatcccacctactcaggaagctgaggcaggagaatcacttgaacctgggaggcggaggttgcagtgagctgagattgtgccaccacactccagcctgggtgacagagtgagacttcatctc

SEQ ID NO: 672750 - DNA, 300 bp, Homo sapiens
  misc_feature (212)..(212): n is a, c, g, or t
ttattctgttgacaagtactacagggcttgagatgcccagagcactcagagtcgaatgcgaccaagcatagcattcataataattgtaagaggtgagacctgaggagtagtgtgattgaggtggagtagattaggcgtaggtagaagtagaggttaaggagggtgatggtggctatgatggtggggatgatgagattgaggtggagtagatnaggcgtaggtagaagtagaggttaaggagggtgatgtctatacaacaaaataggaggactactctgaaagtgggtccgagctgaagtg

SEQ ID NO: 672751 - DNA, 261 bp, Homo sapiens
  misc_feature (26)..(26): n is a, c, g, or t
  misc_feature (41)..(41): n is a, c, g, or t
  misc_feature (60)..(60): n is a, c, g, or t
aacgtggttagcggcgatagtgtggnggaggaatgggtttngttttgtatgttcgggacncccctcattttatttttacaaaagttagatatggggagtagtgtgattgaggtggagtagattaggcgtaggtagaagtagaggttaaggagggtgatggtggctatgatggtggagaggacattaagtgaaacagttgacagacatcaccagtgacttctgcataacctgcatgatctgttctacactgaagtggtacca

SEQ ID NO: 672752 - DNA, 743 bp, Homo sapiens
tttgtccatgtgcgtgctggcttgaaagatggatttgttcaagatgaaagtccaatgtttcctgtggggaaaaatgtagtgtacacttgcaatgaaggattctctcttattggaaacccagtggccacatgtggagaagatctacggtggctagttagggaaatgcatcgccagaaaattgcctgtgttctacctgttctagtggatggcatacatagtcaccccctacatcctttctacacagttggtgagaaggtgactgtttcctgttcaggtggcatgtccttagaaggtccttcagcatttctctgtggctccagccttaagtggagtcctgagatgaagaatgcccgctgtgtacaaaaagaaaatccgttaacacaggcagtgcctaaatgtcagcgctcggagaaactgctgaattcaagatgtgtttgtaaaatggcctacgaatgtggaccttccttggatgtatgtgctcaagatgagagaagcaataggattctgcctctgacagcttgccagattcatgttctgccactgtcaaggtagaaatttcacccttactggtagggacagctgggctatacctggctaagctgaaacacttgggcgtgctggccactgggggaaaatttatgctttaagcacaatgtgttagcgtgaacttcgaggccaagccctttgatccaagcctaaatttttttccccttggctttgtctaaaccaccatatgagccctg

SEQ ID NO: 672753 - DNA, 252 bp, Homo sapiens
  misc_feature (26)..(26): n is a, c, g, or t
  misc_feature (41)..(41): n is a, c, g, or t
  misc_feature (60)..(60): n is a, c, g, or t
aacgtggttagcggcgatagtgtggnggaggaatgggtttngttttgtatgttcgggacncccctcattttatttttacaaaagttagatatggggagtagtgtgattgaggtggagtagattaggcgtaggtagaagtagaggttaaggagggtgatggtggctatgatggtggtggttggtagtattactgttggtggtgatggtgagtggttgtgtagtattactgttggtggtgatggtggtggtagg

SEQ ID NO: 672754 - DNA, 321 bp, Homo sapiens
  misc_feature (1)..(1): n is a, c, g, or t
  misc_feature (76)..(76): n is a, c, g, or t
  misc_feature (84)..(84): n is a, c, g, or t
  misc_feature (106)..(106): n is a, c, g, or t
  misc_feature (138)..(140): n is a, c, g, or t
  misc_feature (146)..(146): n is a, c, g, or t
  misc_feature (159)..(159): n is a, c, g, or t
  misc_feature (175)..(175): n is a, c, g, or t
  misc_feature (187)..(187): n is a, c, g, or t
  misc_feature (294)..(294): n is a, c, g, or t
natttattaaagatacattaataattcttgtaattgatgcaggttttcttttttctacagactactattattttantcttggcnctctggaaaatgaaaaatccangagtttttctcttttgcttttagcccagaaannnaaggtnggtaagtggtaantagcgtacgtcctgtnaaagccagtggnctcatgaggaccgacatttgacttaagctgaaataatggaatatggctaatgtaaagttcagttagtcccagctggctttctttgacgattcttttcttcgtgagcnacaagaacgggcatgcccggccctctc

SEQ ID NO: 672755 - DNA, 969 bp, Homo sapiens
  misc_feature (887)..(887): n is a, c, g, or t
ccacgccctcagcttctgcgtaaagacccatgaccgctctgtaactacatggtggaccccatctggcagagtgccatggcgtatctggtatggatgtcatcgtcacagtggggctgtaggagtctacacctcagttcatgaatctaactcgccgtgtgcgcctcctggacagtagcacgaaactggggctttcttgtataaaaaagactttaatattctggtaatgagctgtggtcctgtaaaagcttgtctgggacgtctggcctctcgtgaagtaaaccagcgcagcaaggacgaacaagtagaggtggctttgctgcctcctgggagcccgagaactgtgcggctaaccgcttatagggtcctgccgccaggcccagtccagggcctgaggagctgtgcacagagagggcctcaggtctgatctgacaccgttgctctccccagtcatgttgtatctcttgttctaaaagacaaatttatggtaccataagctgccaaagatcccctcctgcctcagaccccttagccagggcgttgggggctgagcagcagaccgagatccagagtggggtaatagcctcaggtcggccgtggtcccatttctcaaagcccgctctgccccattgttctcctttcccttatactttttgttaccttgtctcataggtgcctagagatctccctgtgtcaacctttgaggtcccagctccttccccctattttgcgtgactcgtcacgcatggttaccatagtagatctgcttcattggcatggttaacttactgattgttgcgctctgttggtccagacccagtgtttcagctgtgggcccactgaggaccgggcagagaacttccaggcgaggccctgggcttcacgccggnggacggcgacaccttgctccccgcagtgtttccgtctgcgtgtctcccctcccctctctccggcctaccagagcccgaacag

SEQ ID NO: 672756 - DNA, 1474 bp, Homo sapiens
gggtagaagcagagtctttagacccgacagtcaagccagtggcatgtgggtggggcacgagcccagcaggcagcacaggtcagttcacctctgcaaaacgcaggccagtgcacaaggcggttcttgcaacaactggtcaggtccaagcaagttaccaccgtgctgcacagcagtccaccagcaggtggcagaaccagcaggcatgccagcagtgccatccagactagtcagcagagctggcatccaggcacagatctactgcacacaagcccctggagccaaggcagggctcccaagttcgtcccgtcaaagggcatgtgttgcacaagtctacatatgtgaacccgggtgccaggattagtgtccagagcaagcaatcccaagcacgtcgcgttcatttggaaacgcgcaaactagccagctttccttacatacaggcaaacaagcaaagttgcacaaagaaacacaagacaacccaaggcatagaggagtacccaagaggcaacttccaagccaagtggcaagcaaaaaggggtctgaaagtgaggcagcagaaaaggccgtaggtggtcatccacgtaaaggttccgaagcgcacaagaggccagaccacattgcaaaagcactttggcgtgcgtgaggtccagggaaacacagccaaggactcccatgggacagcgggactaaggcaccgatgggggcacgggacaccaaggagggccggccatcatggcaaccatcagagcaccacgacgaggccaactcaagaggccgcgcgccaacgcagggggacaacgacaaatgaacgccatgggacacgcgacacacgacaggtccgacacacgcgattggcgcaaaacagcaacgccgacgaccaacgtgggctgacccaaagccgacatatccacggcacccaatggcgagcccacgcagtcggtaccacagggcaaacggacacacaccacgccaaccacagggcaaacggcaccagcgacaacaccacaacatcagaccaaacgctagccggacacttggtgccaacacaacggcaccagggcgggcggcaggcgacaaaacggagaccagccacagccctgaccaacacagagaggccacaatcacaacggaaccaccccgaccggcggggaaccctggcaccactcaacatcagcacaccgcaacacaagacgacgcgccaaacgatagaaaccaggatcgaaccgaggaggcaaccaacgacaccatacaacaagtagaacaccgacaagcacagcactgacacagagcacgcccacacagagaacacggcccaaggtagcgagcacacaacaccccccaagacagccacggacaatctcacaagcaggccgtgggacacagaacgcgtaacaccaacacagaaagactcacagacacagcgccggccccagcccgctgaacgcatgaagcccacgcgccacagagcctaggggga

SEQ ID NO: 672757 - DNA, 979 bp, Homo sapiens
tgttggtgttgtaggttctcttttgtcgccccatgctccttgtccctttttgttcattcgttcgtgttttccttttcgttgtgtctgttttggctccgtttttgttccgttgtttttctgggttgccccgtcttgtctggcactgccagatttgttattattgtcgtggttgtgtctcggatgtttacctcttctgtcttaaggtagctttaggtccctttcagctatgtttcatatgacgagagtatgagcaaggtcgcaattattaagtacacgttaggagttaagtttctacttagtacagatcagtgtagacatctacttgttttctacccgcgcgatatgattgaaaatattggtctaccagtcgatgttatttatgcacctttttgtgacagaatattttagcctggttgttgtatcgacagaacaatcgtgatggaactcatttagctcattcacgtatggctcataataagttcatcacatggatgtattctttcaatatgaccactctagtagtgaatttcaaacgtctttgatagggtctagagtaatcttgttcattagtcttggctactttcctctagttctgacatagtacaggcaagaaatatggctatctctcaagtaaggattacttcctgagacgcggtctggagtttagacaaatctaatgcacattagggacatttccttaattaagactctccaaaccaggtgtggtagctcatgcctgtaatcccagcactttcgggaggcagaggtgggtggatcacctgaggttaggagttcgtgactagccgtggccaacatggtgaaaccccgtctctactcggatacaataataataatacttttattcgctcggcattggtggcatcgagcctgtaatcccagctactggggaggctgaggcaggagaatctcttgaacccaggaggtgtacgttcgcaggagccgagatcatgctattaca

SEQ ID NO: 672758 - DNA, 212 bp, Homo sapiens
tatcattgaggattaaatttcaacacaagggctgggcgcagtggtcacgcctgtaatcccagcactttgggaggccgaggcaggcggatcatgaggtcagaagatcaagaccatcctggctaacacggtgaaaccccgtctgtactaaaaacaaaaacttgaacagctatctagtaaatggataaagggtgcctgtggaattcaggggcaag

SEQ ID NO: 672759 - DNA, 108 bp, Homo sapiens
ctattgagcagtgcacacggacggggtttcagcatgttggctaggccggtctctcctgacctcagggtgatcagcccacctcggcctcacaatagtgctgggattaca

SEQ ID NO: 672760 - DNA, 666 bp, Homo sapiens
agaactccaaatcccgtaacctacaagcactacccatatctccccaacgacctccaatcccccccactatacacctaaataacccccccccaatattacattaacaataatcaagacgcgcagcctcactaatcaaactccgtaccgctcatccgtccctaaacctccgactcaatcttaaattaacattactcctctacgggctccaaaatcgagaccaccggatataagaaactctaatacacctgcagaacgaaaatccgtaaacaaaaacctatagaacgaaaacacccccaaaacacgccgaccggacatacccaatcgaacgagaaaacaaaacaccacatcaacaacagacccacaaacacagacgcacacccacatccaacaaataaaacaacacccccgacaaagcccaacacaccccaagcaacactcgacaacaaaaacagaacaacctatctcaacgtttcccctctaacgtttccccgtaatcccatttcccccccccttcacccctaccctcatttccctcaacatcccctgtcttaaaccatttccgacgagtcatttatacattcaacctaccctcctatatctctctcctccttcttactggaaaccgcgaacgttgccgaactttacgtcgctgggaacagcgaacct

SEQ ID NO: 672761 - DNA, 562 bp, Homo sapiens
ggcctgggtctgcgggagccccatctagcggggttccaatggcggcggctggcatcatgtcgatggccctgctccgtggagctcatcttgtcccctttcgcccctcacgccccccatgctctgacagccagatccagctgcctcgcccagggcctcctgctgggacaccaccacccactggccatgacacttccatgtgagcaccccctgccatgcaactgtgccaccatgctccttcctcctcttcttgctgactggggattgttgtctgtggccttcctgctgctcccactccctggacgaactctgtgcatgccatgctgcctcaatgtcctgcactgtctccctgggacaaaatgttggttggcctgcctactgtcttgtggcctcctcaccatggtgttcctccggacctgagctccgtgctcaacccccagcacaaccccaccctccctgggcagtgtcttgagtgcaagcactgtgatgctcatacctatacttgcctcctaccctcttctcttacctgcatactcaccaatcctccctgacaaaaaaccccatg

SEQ ID NO: 672762 - DNA, 412 bp, Homo sapiens
taccgagtatctatcccagacatagatggtatggctgtggctgttaggaactaggcagcacagaggtgagcagtgggcaagtgagtgaagcttcatcttatttacagccaccccacattgctcacattactgcctgagctgtgcctcctgtcagatcaatggcagcaataaattctcataggagcgtcaactctattatgaactgtgcatgcgaggggatctaggttgcgtggtccttatgagagtctaatgcctgatgattcgtcactgtctcccagcaccctcagacagggccaactagttgcaggaaaacaagctcagggctcccactgattctacatcatagtgagttgtataattatttcattatatattacaatgtagtaacaatagagataaagtacacaataaa

SEQ ID NO: 672763 - DNA, 262 bp, Homo sapiens
ctagttatttactacatttggggattaataagtgatttatatgcatatttttctgtaaatctacagttttttgtacaagatattctacaagttatgaagctaagggaagaaaatgccaaagatacctctagttatgttgaacacagccagcacagtttcgacaggtcaaggaagagctgtttcagtaaagaggaagtgaaaacacgtatctaggaaaatgtttctcaacaataaaatttacaactgtttctctcttgctaaa

SEQ ID NO: 672764 - DNA, 116 bp, Homo sapiens
atccgctttgactagccgacagtcagcccctcagttagcaccactgctacactcagcctcatgaaccacttcagaccagccaggtgtcttcccgggccctgtcgggctagtcgggg

SEQ ID NO: 672765 - DNA, 541 bp, Homo sapiens
gacatcccgtccgagttccagaagacggtcacccggctgtacaagctgtggatgttctacgcgctcgtgatggtggtcaacattctcggcgggctggtcatactgatccactcgggcgagttccgcacgttcgggttgagcatcttctatgccgtgctgtttactcctgcatccttcctgtgctggtatcgcccagcgtacaaggccttcaagacggactcgagcttcaacttcatgatgttcttcttcatcttctccttccaagcgctcgtgaccaccatacagacgatcgggttccccggttcgggcacgtgcggcgtcatcatggccatcagccagttcagctcgggctggggcgtcgtcgttggcctgttcctgatgtgcatagcacttgcctacggtacctgcgctgcgggcaacatattcatgctgaccaagatacaccaaatctaccgctcgggcgataagatcacgatgggcaaggcacgcgaagaattccagagccagtttatgagcaactcgatcgtgcgggacgcggccg

SEQ ID NO: 672766 - DNA, 257 bp, Homo sapiens
gtatttatcgccacacctcacttagatcagtgaagtgagccaaatactatcagatgggaggacgcctatcatgaagcggactcactcagatggcgagagctgaggcggcactggagctgaagaagaagggcagcacgtggtgctgggtgcatcgagaacagggtgagagcaagggcattcacctccgagctcaggagagggcttgtcgcgaggagaagggccctgcttgcgaggaataggtgtgggggataccatca

SEQ ID NO: 672767 - DNA, 407 bp, Homo sapiens
  misc_feature (53)..(53): n is a, c, g, or t
acagttctgttaagtctgtaaccacggctttacaaggcatggcttctacttcnccaattcctggggccaagtgggcccctgttgcgggttgttttgagcacaggttaagcactgtttacaaatggctcaagtgatggcagagagccgtggcacatagaaatggcattttagtaacgtttctagtgccattttttccatgagttccttgatgaatttgctttacaaacatatgagcttaaatctttgaaatggctaatctcccatcgaagaatttccaccaccctccttgaatatatttttcagcctcctgggcaaaccagggtctttcatttggtgtataacttgggttttcttggagaggaggttctgggaggagagccatagctaaggcttcctctgatttaaaa

SEQ ID NO: 672768 - DNA, 372 bp, Homo sapiens
cccctaaaaattttgggttttggctgggactggaaagatcccaagtttgggggaaatatgggcctttcccaaataaaaaaagagggttttcaacttttgggaaaggggggggtccgtttgggccaggcaaaatcccttaaactgggcccttttttaggttgggtcccaaaaaaaattcccggttttcccggtaaaggtgccttttttttaaaggcttttataccttgccagccccccggtaaaatccgccaaaaggttttgtttattggggcccccaaagggtccctgggaagtgggggtttttgaaccaaaaataaactggcccttttgccacttttttttataaaaaaggatcccccgggtggggtttga

SEQ ID NO: 672769 - DNA, 812 bp, Homo sapiens
ctgtgaaccttctgggagtggctgcagagtaagtgccgactctgtgactccgacggaggcacgaggcctgtggagtaggtccctctgttccgacagtatcttccccatataccaagagcacaggtggaaaatggccggcaccacatggacatgagtggcaagcgctgtgccgggaagttggatgggcagacgcctgcgagcaaatgttttctgaatggcctggggctggcacttcatctttcctttcaggcaacgcacctcaacatttgccatgctggctgtgctgcgacagagttctgtggtaccacgaagagtgctctccatgctctaatttccgtggctacaacactaccccttgagctgtggtcccacaggatatgtagagaacatccacatgcaggctacatcttacgagaaaatgagattacaacaatcttgcccgcgtcagcatatagactggacacaaaatgccttaatacttggcacagcatcgcaaaggggcgcttgtcagtgctggtgatgagcgccctgcactcttacggccgtcggatctatttccataccagttccgctaccacgccaaacgcattcgagacacaggacaaacaggggcgtaccagggcgacaatagcaacgggtcaccggagacagggcgcgacacaccgtggaggttcccagtactacggcctacacacgtttcacagcaacaatatgggatattcacctggggtgttcatataggacacggacaccgccctaatgcgtcaaggaacaaggcagaaacagcaggatgacaaattgaggaacgtcca

SEQ ID NO: 672770 - DNA, 291 bp, Homo sapiens
gcgtaaactgtgcacaggcttgtgttgagagctgtccctgtcatggggtggcatatgttgaagacatcctccctgttatgtagacaacacagtcccttcgcgctgggggcatatatatgtcagaactttagtcacatttcctaataggctttctatgggtgtgtttgagcggtgtagaccactgaggagtcaagcttgtcttcattgtgtgtattttgtattctattcctgcactcctatgcccctacacttgccccgtcacgtgatgtccacgccatgctatgcatccca

SEQ ID NO: 672771 - DNA, 407 bp, Homo sapiens
acgcaggtggcatcatgcctgtaatcccaccactttgggaggccgaggtgggcagatcacgaggtcaggagtttgagaccagcctgaccaacatggtgaaaccctgtttccactaaaaatacaaaaattagccaggtgtggtggcatgcgcttgtaatcccagctactcaggaggctgagccaggagaatcgcttgaacctggggggcggaggttgcagtgagccgagatggtgaaactgcactccagcctgggaaacaaagtgagactccatctcaaaaaaataaaaaaatttaaaaaataaaataatgattctgaaattagacagtggtagtggatgcacaaccttgtgaatatactaaaactcactgaattgtacactttcaatttcatggtagtgaattatat

SEQ ID NO: 672772 - DNA, 167 bp, Homo sapiens
cgctactactacgggaaatctgagtctggaaccatctgcccaggatttggggtcagagatggtgggcctttctgatcctggtcttgccatggttatgatggtggcatccctgcctgtcttctatcatgtgcctcagcctgtttttttttccttggccaggctgcaag

SEQ ID NO: 672773 - DNA, 207 bp, Homo sapiens
aactcttataagggtcagagcagtccacagttaactgtggtctgccagagagcagtattacgctggagaaaggcgagagaaagcacggggcacggtggcctgtgaaaagcctcaccgagttcccctggtgagcgctccacagacggacggtcttgtcggttgagcccgtgggcaagtagtttgaactagggtgggatttgacacggg

SEQ ID NO: 672774 - DNA, 475 bp, Homo sapiens
tggttagtagagtcccaaatctgcttttagaagtcatatggtgatcatcagtttagattcactgtaggaagggcagcacctgttaaagtctgtccgggagcacaacgggcaagcgtatcaacttgcacgtctgttcaccacagttgcttctgtagttttcatacccctgatgattactcaatctctccttagcaacatgtcttctaatggaccagctctcaccagtggccttgtcgtctacaggacatcaacttgtgctcccctcaagggcatgggatcttacatacatagactagatccagccaaagactcatagcggctactccctacctgctgctccaaatagacatgaacacatcagcatgataactttcctcctaaactaacttccagacactccccgaactctctgctccgcacgcgcgcgctgactcctaccaacctctgccatcgcacgatcccagacacagctcct

SEQ ID NO: 672775 - DNA, 157 bp, Homo sapiens
  misc_feature (72)..(72): n is a, c, g, or t
  misc_feature (89)..(89): n is a, c, g, or t
  misc_feature (101)..(101): n is a, c, g, or t
gggcgggcatttgggcaggccggcaggcgggtgcgcggagggctggtaccccgcagcaggtgggcggggtgncggttggcggcggcggncttgggccgggnggcttgccggctttgcgctttcggggccgtgccgcccggcgggccgtgccggggcc

SEQ ID NO: 672776 - DNA, 424 bp, Homo sapiens
  misc_feature (424)..(424): n is a, c, g, or t
actagtctctggaataatttagggctgagaagagacaaaaatcaggagactgtaagactcatataatgaaacaatgtgttgagtatagaatcatatttcctaaatgacagactggatgatcaggctgctcttgggaagttgcacagagaacctgagggactcaaaagtcagtgcgttacctaaaactgaagcccggagctaagtatagaaaacccaggaagtgcaggcaaaacagtgaggaagtcatgggaacaacgcagaaacaggacacctggcgataccagcatggaggttctgtaaagcaagcattgtggcttccacacccatggtggtcacagagcaggtgcctaacaggtgcttgttgaatgaactacttctgcctccacctttgtcacccagagcttctactctgttgttttctccn

SEQ ID NO: 672777 - DNA, 274 bp, Homo sapiens
gccaaatttggacaaacttttttttttttcaattttggaaacttcctggaaagccgttttccctaaggatcccctagtctctatatatgtgggtaggagtcatggaaatgacccataaaggacgcccaaagtttgatgggacgtgttaaaaactgttttgggcttttatggatgtcaaacttggcaaaacatgtgtaaggttctaaaatatgaaatgatggtaaaaaaattttacctttgaattccctttggataaaggtattttttgatgtga

SEQ ID NO: 672778 - DNA, 541 bp, Homo sapiens
gacataatacctgaggggttgctcaattgtctgggggagtagaaataccgccagtacctaactgtgcctccaggttactgcacagatttcctgttgtgcgccagcagctctggtgctgtgcttcccgtgaggacccagtaccccttcctgccatacccaccaaggtttcccccacagggccaggctgcctctagcgtccactactcgagaccttgcccagagggttgtgctggtgttgcgggaagtcctggcatttcttccgggacggccgggtgctgctgggctcgagggccctgagggagcggcacctaggcctgatgggctaccagctcctgccgctacccttcgaggaactggagtcccagagagtcctgccccagctcaagagctacctgaggcagaagctccagccctgggcctgcgctgggggcctgaagggggctgaggggttgatgtggggatcaggaatgcgccgatgggggaaggatgatttgcactttggttccctgtgttttgatttctcattaaagttcctttcctt

SEQ ID NO: 672779 - DNA, 395 bp, Homo sapiens
  misc_feature (25)..(25): n is a, c, g, or t
  misc_feature (64)..(64): n is a, c, g, or t
  misc_feature (277)..(277): n is a, c, g, or t
  misc_feature (298)..(298): n is a, c, g, or t
  misc_feature (315)..(315): n is a, c, g, or t
  misc_feature (339)..(339): n is a, c, g, or t
attttatcataactatattacccgncaatgcttcaccagttacagtaatttttttggagacagngtttcgctcttgtcgcctaggctggagtgcaatggtgtgatcttggctcactgcaacctccaactcctggtttcaagcgattctcctgcctcagcctcctgagtagctgggattacaggcatgtgccaccatgcccagctaattttgtatttttaggagagatggggtttcatcatgttggtcaggctggtcttgaactcctgacctcaggtnttctgcccgcgttgggccttnccaaagtgttggggatntacagggcgtgacgataccacgcncgggctaaattttggtaatttttttagggagagattgggggtttttaaccatggtt

SEQ ID NO: 672780 - DNA, 377 bp, Homo sapiens
  misc_feature (108)..(110): n is a, c, g, or t
gtctgtctgctctggtaaaggtgatatacagaggagacatgctactgcatgaagcagaaatcagtgaggcttggtctataaagttacaattacaacatgcttgcttannngagccactctttttgaaaacagtaactgtttcttattactgttatgaggaataaaagagatgacatatatcaaggattctgaaaactagtttgccaaatgggtgattgttctaacacataaaatcctttcaccttaaattagctggacattcaagttagagctttctcttctctccatttctaagctcacattggatcatggtatcttatccagtgagttgtaacgttgctaccagtctattccgatcattgacacagatctaccaa

SEQ ID NO: 672781 - DNA, 165 bp, Homo sapiens
taaagctgattggcttactgggcgaaatattatgctttgttgttatggatcatctggcggatggggattattgctagagatgaggatggatagtaatagggcaaggacgcctcctagtttgttacgggacggatcggacaattgtcgtaggcgacataggaccat

SEQ ID NO: 672782 - DNA, 124 bp, Homo sapiens
  misc_feature (52)..(52): n is a, c, g, or t
gcccgcttgcacctcggcgatccccgacttccttctttatggcgtcgctccngttcttttgggccgaagcttgccgccttcggaattcgtttcttagcgccttggggagttatcaagttgataa

SEQ ID NO: 672783 - DNA, 828 bp, Homo sapiens
  misc_feature (12)..(12): n is a, c, g, or t
  misc_feature (22)..(22): n is a, c, g, or t
  misc_feature (32)..(32): n is a, c, g, or t
ggttttaaaaanaaaagaaagnaaggtaaggnaaagaagaaaagagttgaagatatgaaatccaccacacaggttacctttcactcaagaggttgtggcatcctattcattgtcaactactggactttttcctccccgtcgtggaaaattggcgcaacattgccacatggagcatcccttcttcactcttgacccttccttcatcaatggtggagcatactcctgaagctggagaacagaaatataaagctctgtgttttacaatgaaaggaccattctcctcaaaatcctaagccctaaaataaatcttagcttttggatataaaagataccatgaagctttagctactttcatcatggtccccccgatccatactccagtatatctcgtgtacatgctatcattatccccaacatctcaaattatattattcccacacctttgtgaccgccgcccctccccacacacccccaccgccccacaaccccgtacccactccccacttcgatcctcactaatcaacttatctactctatatacgaccatctgaccgttccgactccaccctgtatcccatttccgtcctaatgacaagccccaccccccacgacatcactgtacccacctcctcgcgtctcaccccctcccccgaccatgaccgatcccccacgctctcagccgctatgtcgccccggcgccagtcaccgacgccgacccacaaatgcaccatccacaccacacaacaacaatcaatagccccccgcaccatacaacgccttgcattcgcgtacatctttcccgcttcactccaatttatatctcactct

SEQ ID NO: 672784 - DNA, 310 bp, Homo sapiens
ctgtgctggtcccgcggtcgtatggccctttgcgccgtggccacgaactgaccgtgatgtgaagaacatatactggaggctagagcaagagggctgaaagaggctgctggaacagccccggggcagggttttaaaaggcctacaacagagacagggagagcagggagagcaaggaagaggaggtgaggtgtgtaacacgagtggagggacatgaaggtcactcggaggggcaaggaaaaccttgggtttctaaggtccctaaccaaaatgacttgaagaaggtgggggcaaagaccacagccctccttga

SEQ ID NO: 672785 - DNA, 396 bp, Homo sapiens
taatgtactagcaaggtttggtcttgaaaggattcataatcactccaaatgaaatgctcctcccttggcccccaatgtgaagggaaggtagaaacctgaggctaaatttctggcacaaggagaaactgttcggagcacgtatccagtccataaaagggatggagagagggggtgaatatccacccttgagaagaaccttcatgggccatttcccaaggatcaactccgattggatatttggcacaaacatcagccgtgtctattgggccacacacgtgattaaacccgtggagcaccgccggggccaccggaccctatccaaaatttgaaagcgccgcctttgggtaatttggaggaactctttttgtaaaggaaaaaaaaattctcttcgcctgg

SEQ ID NO: 672786 - DNA, 876 bp, Homo sapiens
  misc_feature (727)..(727): n is a, c, g, or t
gcacgaggtttttttctattccttttttaccccctcaacctattcctgcgttatgggaatcatgttccgacagacacactggtacaaccacagaaaaggggagaagttctgatcccgtcagcgaagggcgagggggtgcgaagggaaggaaaagagacctcacaggccccggcccacgaaccaactccagcaattcagtagttaagttcggccccgctgggggttccggagcgcggcgccccgcctccgccggctctccattggcctacgcgaatgcctgcgctagcgctctatttgctcctgcggatgcccatcatgtcaagcccccccaccacccgagcccgcagctccaaactgcgccacagagtttacggaggaaagggcctggaggcagcaagctgccgtaatttgggtatgacgaaggcgtcaggcgcagcgccctggactgcagccggccaaggagcatggcgcagcccaccccaaacctggcgtttggtgaccctgggctccgaatccgctcgctctgggccagcagtactccccccgacggcctctgccaccctcggtccttgcctttgctgttcatggtggttgcgggtccggtttgtctcggcgtcgcggacggttatttttttcgtcctcttcctgttcggagctacttccgtgtcacatgatggtccgtccgcctacgtcacccgacgcccgagtggcgtgccgccggaaactncgcccctgctccggcctccagtcggccgcgggagggtccgtcggtcccgcccactcgccttggccccaccccctgctcgtttctgtcctccacctccctagcggtgtccctcagctggagaaaaaccaaatgcaggtattgtctggaaa

SEQ ID NO: 672787 - DNA, 752 bp, Homo sapiens
  misc_feature (49)..(49): n is a, c, g, or t
  misc_feature (120)..(120): n is a, c, g, or t
  misc_feature (144)..(144): n is a, c, g, or t
  misc_feature (148)..(148): n is a, c, g, or t
  misc_feature (159)..(159): n is a, c, g, or t
  misc_feature (173)..(173): n is a, c, g, or t
  misc_feature (193)..(193): n is a, c, g, or t
  misc_feature (197)..(197): n is a, c, g, or t
  misc_feature (260)..(260): n is a, c, g, or t
  misc_feature (295)..(295): n is a, c, g, or t
  misc_feature (311)..(311): n is a, c, g, or t
  misc_feature (314)..(315): n is a, c, g, or t
  misc_feature (319)..(319): n is a, c, g, or t
  misc_feature (404)..(404): n is a, c, g, or t
  misc_feature (424)..(424): n is a, c, g, or t
  misc_feature (430)..(430): n is a, c, g, or t
  misc_feature (464)..(464): n is a, c, g, or t
tatgacgtgcaggttggaaatcagaagtctgtgagagcgcgggagtgcntggcggctctgggtccctagacctggcccgaccccctctgcttctacctcccggctctgctgctcctctcnctcttgggttgagctccctttggngccnccggcgcgganccctgtggtcctcnggccggtgtcccttgtgtcngccnggcgccctcttttcctgtgtccccgcctgccctcgggctctgctcccctctggtgcccctccnccgctgcccctgccctccgtttcccctcctgctcnggccactgcccccttntcnngccncaaaaaaaaaaaaaaaaaaaaaataccaccagactagttagagttccccactcaccaagcaagacatgcagtttcatgcctctgngccttcgctcatgctgtttnttccgnctggaatgccttcccctgctcctcctgccttgtntgcctggcaagttcatttctcacgatcccctcaaagggcccctcctccaggaaggcaacccctgtgcccctccccttccgggtacccttggccctttggcaatgcttttcttggggcccttatccccctggattttacttgtttacatgtttgtctccccttttagactgtgaatccttaagggcatgggctggattttatgcatctctggatttttgggcctagcccggggcctagcccccagtaggggctcaataaatgttgaatgaatgaatggtttaatccaga

SEQ ID NO: 672788 - DNA, 216 bp, Homo sapiens
attgcactccagccggggtgacagagcaagactccatctcaaaacaaacaaacaaacaaaaaaagaaatgaggtgagtccagctggggaaatgtggaatgtcagatgcctttggcctattcagagggagatggccgaagcacagaggagagttcagggcagggttaaattatttgtagcgctcacatgtcccagattcggccagggggagttcccc

SEQ ID NO: 672789 - DNA, 840 bp, Homo sapiens
tacttgaaggcaccttttttaccagaaaatatttggaggaatctgtgtccacaaacggggaccacggggaccccccttcctgcgaagttgctgctcaaaggggattgggggttgaaattccttcaactccgcccgaatcttcatacccgagacgggcaaagggctcttgcagggccgattgtgtggcccccaggttccaggggactacatgggaccccatatttccatccgtgtggcccggactatttgagactgctgttaggcgcggaagaatacccacacgctctcccgttggccacccttgtgggcgccaaacatctcctgtgagagacagccaaacattaagcgcacggacaatagtgagtagaagcgattcacaatcactcgagatctatgccatttaaaccctttcatatccccacaccgcaagtttctcacaaccgggtgacacagaagctgagctatcccctttactcccaacaacaagagaactcgagggtgaacattgtggcgaccaaaacaagcggttggttccactgagacagacgaggatctcgccacaccacgatactattcgcgccacaacaacacaccccaaaaaatatagccatcattcacgctcattcactttctaacaacgacccacaccccgattgaaagaaggtcaccaccgaaaggagccttactaattagcacccccgttgtaatcatcattacaccccctatactaattaataaccatatctccccgcccaattatttacacaacgagggttcgcccccaaacatattcgttactcacaaacagtactccagaatcatttccacaaaaaataattc

SEQ ID NO: 672790 - DNA, 113 bp, Homo sapiens
gccatttcagcccttcctaaaatcgcaagtaaaagtgaagcaatgaggacctttttgggcttgtgccctttgatgaattacggggtgccagcagcaaaggtctacggcgcgtt

SEQ ID NO: 672791 - DNA, 716 bp, Homo sapiens
agcgggggggctggcgtagttctcctgagggaagaggagtggagtaggggggacgcggcggcggcgttgacaatgagttttcttggaggcttttttggtccaatttgtgagatcgatatcgttcttcaatgatggggaaacctaggaaaatggcagaaatgaaacactgtatatgatggcaaagtagaaaaacactatctcttctatgacggagaatccgtttcaggcaaaggtaaacctagcctttaagcaacctggacagagcgctagaacaccaaggaatttagaattgacacttctgtaggtcaaattgaacttttcaatgaccaagagtaatactcatgaatttgtaaacctagtgaaagaactagccttacctggagaactgactcaagagcagacagttatgattctcggaatcttatgcaaagttgacaaagccatcatgcaatcttacatcggtgccaatgtccgcttgcacgtattttcttacaatgacaatagtgcaggacagactgacagatttggtcaaagagtatgatcttattgttcaacagcttgccacctatcctgcatgtcaaacaaactctatttaagatggaagtgggcattgcaacgaattgtcttacatatagaactcgaaatctaactacattcaagtatcatctcacagcatgcgcacgcgccaccactccaccttcttctcaccaacacca

SEQ ID NO: 672792 - DNA, 321 bp, Homo sapiens
ccccctttgggggttttgggttccaccaggggcaagtggacgccccttttttccggttttcccttgggggttttttggcccccaaaaaatttgggccctttttgttgggcaaagtgggggctttttttcccctgggttgcccaacccctgggcccatggggccccgtttggtttgggtttttttggggggggggtgggggcccccccttcccatgcccgggtttttccctgccccccctgggccccgggttttggtttggggggtctttccccccggggggggtttggggccggccttttaaaaatttggggcctccccca

SEQ ID NO: 672793 - DNA, 1192 bp, Homo sapiens
  misc_feature (290)..(290): n is a, c, g, or t
  misc_feature (336)..(336): n is a, c, g, or t
  misc_feature (1192)..(1192): n is a, c, g, or t
tataaaaacttcctctttaatcaggggtttataacatgaacagattctctggaattaaaagggaaagttctccagtacacggaaacataaatccgcaagttcaccacactttacaacaccgggcgaggaaaaacacaaaaacagcaagtttacagtgactcccgtggtaacagccagtggctctcaaacctcagagtgctctccctcacattcgtggccaaggtggtgttctcgtggatatacaagagccaccatctcggtggcttctctgtggggctccacacttcagntatatagggcgtgtgtgggctcacacagaagccacctcatctcgtnggctgtgggacatagatgggtgggagtggggtggacctcattaacctcgagagaagaggcaaaagaggcgagtttatcaccgagcccgactatttctcaaacacgagtgtgtgttttgtgcaaacatcttcttttttataaatctatttccaagagtgtggagaaaacacagagacagaggtgcaaccatataatttagagtgggtttactcgagagaagagagagtgttttgaggaaaagtattagagggcacacagtctgtggttgtttacagaggcttgtgaaaggcctgtgaaaaagagtatgagctgtgtgcgcaagagctatatcaaaatatatctatgtggggaggtattctgtgtgggagattaagagtgcggcgcggcctgtgaaaacagacgcaaaagaaatgtgtggagggatttcagggagagttcacaggtggggacttccactatatagagaggaggggcaaccccgtactcccgccgtggagattctctgttgtcgttgaaaaaaccgcccgaagagaaaatgtcccgctgcgcaaagtatcagagaataatctcgaagaggaaccaatccccaaaagcaataggtgggggggagttataaacaaggagggaggaagccccaacgacggttgtggggacaataaagtcgcttcaccagtgggggggcggccaacgacaatcgtgacaccgatgtggtccgcagaaaataaactactacaaaaaacaactcacctacttacgggcctccgggtgccggcatacatttgtagctccccaagaaaattattcggactaaacaactatgtgaggctatgagggaggccgaaaacaatgtggaccn

SEQ ID NO: 672794 - DNA, 102 bp, Homo sapiens
aggctggagcagagcacaggagcattatcctctgcctggagggttgggagagccttctagggaggaggtaatagcctaagcccctgtactatagagggatat

SEQ ID NO: 672795 - DNA, 226 bp, Homo sapiens
gagcttagtgtgctgacggtgggacgaatcacttcacgccaggaggttgaccgctgcagtgagcatgatcagcgccactgtactccagcctggtgagcagagtgaaaccctactccaaaagaaacaaaacctagagtttgatcacataagtattgctaataataatttcaataacaataatagtagtagcagcaagtggcaagtgcttacacttaggtagcctact

SEQ ID NO: 672796 - DNA, 678 bp, Homo sapiens
ccccgtggatatgaggtcttctgggcctgcgctcttactatgagacccgcaagatgtaagtcctcaagtgttgcctggcaaggtaccaagaaggatccccaggatgggcagctcagtatccgagaggcgatggaagcggatttgaaggctgcaagctgaggctgcagctgaagccacaggctagggccgagattagagctcgaatgggcattgggctcggctcggagaatgctcgcgggcccatgcaactgggacgaagctgatatcggaccctgggcccaagcccggatcccggcgggagccagaagctataagcccaagccccagagagtggccagtgcccagcactggtgcccagtacccagtagcccataccacgtggccacgtgccacgtgccagcaccacgtggtggcttcacgtgctggtgccacgcctgagccgccactctcacactttgggctcttcgctggccttggtggagactggtgccacgcaccacgtggcacgctctggtgcctgtggtttctcctaccagtgagattttagatattgttaatcctgccagtctttctcttcaagccacgggtgcatcctcaggaacctactcgacacagcactttaggcagcccctatccatccattgaagttgacactctgcattaaatctagtttgccca

SEQ ID NO: 672797 - DNA, 727 bp, Homo sapiens
ggagagagagagagagagaactagtctcgagttttccattgtaatctttttattattatgtattattatactttaagttttagggtacatgtgcacaacgtgcaggttgttacatatgtatacatgtgccatgttggtgtgctgcacccgttgaacatcagtcatttaggcgtcaggtatatcggtcctaatgctatccctccccccctccccgtcagatgcacattcgttaagccatcattgccagacgcttctgtctcaaaaaaaaaaagacaagagaaaagcatacaagaccaagttattaaaactttgggtagggcacaggggctcacaccctgtaactccaaaaacttggggaggctgaggcagggaggaacgctggagtcgggtctctacctccagggctcaagtgacccccacccatcctgggtgtcccaagagcacggggattatagggtgtgagccaccctgctcagccaaagagtctagtggtgacgtctggacgtgtatcagggtcttcagccctaatttcagagaacctatggggtggctgggatctactgtgtacagtgtaccacatcctacagttttattatacctagtgatcaagcttcgggcaacggcgacactccagtttccagtagcatcattggcagtcattatgacttgggtcaaacttttaccagtgcattcttctgatcacctagactcgctacaactctgactt

SEQ ID NO: 672798 - DNA, 450 bp, Homo sapiens
  misc_feature (21)..(21): n is a, c, g, or t
gcagaatgtttctctagctcntaggttctatagcatggtgtccagcagcagccagtggcccagcagctccctggcatcctctcaggtgactgactttgtagcaagtttcaaggtgcgatgacattctgtggacaacagctttccccagcaccccagatggcagattcccagcaagtcccatcagcaaggcactttagtgacgtctccaccaaacactaagccagggctgagccctccccatcaaggtctgcatcccagccctggggtggctctgcttcctccctgggttctctagcatccgtctctagcacaggcccagggtagcagctgctccctgtatctgccattcctgcattctttggagttttctttactcttaccatcaattctgttactccaatcccctgttaataagtctttacagtaaactttaactttctctgttcaaaa

SEQ ID NO: 672799 - DNA, 250 bp, Homo sapiens
agcatgaggctctagaataagcagaaacaatttagcaaaagaacatgagaggggcatatcatcagtgtacctgattccaaagcttattatagtagctatagtaatcagaagcaatatatcatcagctgcgggacactacacacgatcactgagatcagtagcagaaaatgcaaaaacagatgaacagatatgtccaagtgattctggagagaggtgcaaaaaaaattcaatggagaaaaaataggctttt

SEQ ID NO: 672800 - DNA, 160 bp, Homo sapiens
atggcagggctggcagcttgggagctccccctgcttatcaagtcaggctgccagtttcttgtctccgtgaaccctactctctcctttattgctgtcctcgagatttattatcaagtgcttttcgtctgggggacatgcagtcgtctgaggcaccagggta

SEQ ID NO: 672801 - DNA, 712 bp, Homo sapiens
  misc_feature (33)..(33): n is a, c, g, or t
  misc_feature (75)..(76): n is a, c, g, or t
  misc_feature (83)..(83): n is a, c, g, or t
  misc_feature (111)..(111): n is a, c, g, or t
  misc_feature (113)..(113): n is a, c, g, or t
  misc_feature (128)..(128): n is a, c, g, or t
  misc_feature (133)..(134): n is a, c, g, or t
  misc_feature (151)..(151): n is a, c, g, or t
  misc_feature (153)..(153): n is a, c, g, or t
  misc_feature (163)..(163): n is a, c, g, or t
  misc_feature (212)..(212): n is a, c, g, or t
  misc_feature (214)..(214): n is a, c, g, or t
  misc_feature (222)..(222): n is a, c, g, or t
  misc_feature (224)..(224): n is a, c, g, or t
  misc_feature (228)..(228): n is a, c, g, or t
  misc_feature (257)..(257): n is a, c, g, or t
  misc_feature (265)..(265): n is a, c, g, or t
  misc_feature (271)..(271): n is a, c, g, or t
  misc_feature (278)..(278): n is a, c, g, or t
  misc_feature (281)..(281): n is a, c, g, or t
  misc_feature (333)..(333): n is a, c, g, or t
  misc_feature (349)..(350): n is a, c, g, or t
  misc_feature (358)..(358): n is a, c, g, or t
  misc_feature (363)..(363): n is a, c, g, or t
  misc_feature (366)..(366): n is a, c, g, or t
  misc_feature (382)..(382): n is a, c, g, or t
  misc_feature (384)..(384): n is a, c, g, or t
  misc_feature (387)..(387): n is a, c, g, or t
  misc_feature (389)..(389): n is a, c, g, or t
  misc_feature (402)..(402): n is a, c, g, or t
  misc_feature (453)..(454): n is a, c, g, or t
  misc_feature (478)..(478): n is a, c, g, or t
  misc_feature (482)..(482): n is a, c, g, or t
  misc_feature (490)..(490): n is a, c, g, or t
  misc_feature (524)..(524): n is a, c, g, or t
  misc_feature (528)..(528): n is a, c, g, or t
  misc_feature (530)..(530): n is a, c, g, or t
  misc_feature (552)..(552): n is a, c, g, or t
  misc_feature (564)..(564): n is a, c, g, or t
  misc_feature (568)..(568): n is a, c, g, or t
  misc_feature (578)..(578): n is a, c, g, or t
  misc_feature (580)..(580): n is a, c, g, or t
  misc_feature (582)..(582): n is a, c, g, or t
  misc_feature (584)..(584): n is a, c, g, or t
  misc_feature (612)..(612): n is a, c, g, or t
  misc_feature (674)..(674): n is a, c, g, or t
gaggcgtttccagtgctgtttttgcagctgtancaaagatgttcccccccagtattttcagcacctggatcaaannggcaaangtgtggatgcttatgaccgccctgagcnanaccctgggctcttangaaanncttggccactgtagatnanagcaaaaaanaaaaaaatccccagccctcctgcctttatcttcatgattgacgtctccnanatgccatnangacnggtcttgttaggctcctctgtgaggagcncaaaacanagtaanaaattcnacnaagggagggtggggcagaaaagtcagcaatccgcgttggctttgtcaccaanaaaaaagagctccacnncaaaaaanagaanaanacattggcccagccananaananggttgtgtctgangtggctgacatgtttgtgccactgctggatggcttcctggtcaacgtcaannagtctcgggcagtaatcaccagcntatngagatcanattccagaaaagattgcagacacaagggaaacanaaananaaaaagaaccagaaaaccaggnaggaaaggaggnacanaaggctgctnantntncagggaagctctttctattccatacatncctgcccattgcagaggccccagggaaactgaagaacagagatgacaggaagctgactaacncagacaaggagaagactctgttccagcctcagacaggt

SEQ ID NO: 672802 - DNA, 307 bp, Homo sapiens
ctgactctagagcaaccccgcgactcacaatttacgacagacttggtatatagattatatgaagctatccagaatgcagcccagagcgaggtgcgggtaatgacacagacatgttgaaaaagttactgttgctatcactggcaacagacactcataaaacatgtaatacacaatcttacttactcacaatcaactatagaatcttcatctagattagatctatctatccagaatgcatcccagagagaggttctggtaaggacacataattcattaaaaagttcgagaggtgggttccagaataaga

SEQ ID NO: 672803 - DNA, 844 bp, Homo sapiens
agccgccggtcgccgccgccgtcgcccgccatggtacgtccgcctgtacccctcggcgcccgcggtgggcgcgctggcccgggtgccgagccgtgtcggcctggcgcacctggactattaccacggctggcaagtttgatggtgacagtgcctacgatggggatgagtgacggaaacccagagctcctgtcaagccagtccagacctacaatcggccagagcgagaacatacgagagactatgagagtccccccgataacgagctcgccaagctcccggagccatccctcctgcacctgggggaccacgaaaggccagctaagcactcgtctgtgccacgggctcagcccacaagggtctggtacccttggccttatttccttatcaggcctatggacctcccagccatcatgagtgtccaagcatgctagcacaggacagccaactgacagtcgggacagactgcccacagatccagggagatggtccactcaggaagtggtcatgcctatgactcggagccgtgcccgggcccctgcatgggtctgcccgagcaagtgctaggaccaacccacatagagatgcccatcagccaagatccagctgcatctcgcagaatgggcaatccaagagacaggaactcgcccacaagatcccacatacatcggccggagcacgcaaagtcaggcgaacaccccctctcccagtccagcattccaactccaagcgacaagaggagtcggacaagtgccattgaacacagaatactcgggcagaaccaagacgacccttcaagccgcgaccccaagaacaagaagggcccaggagacccgaagaacacacg

SEQ ID NO: 672804 - DNA, 373 bp, Homo sapiens
  misc_feature (25)..(25): n is a, c, g, or t
  misc_feature (136)..(137): n is a, c, g, or t
  misc_feature (189)..(189): n is a, c, g, or t
  misc_feature (231)..(231): n is a, c, g, or t
  misc_feature (260)..(261): n is a, c, g, or t
  misc_feature (308)..(308): n is a, c, g, or t
  misc_feature (350)..(350): n is a, c, g, or t
  misc_feature (370)..(370): n is a, c, g, or t
agatccatcgcagacagagctctancggactagacgctgggcttctgactcttcctcatcacctctcccaggagatggagactcttcagagtcctgtggattgatagggaccagacttagaagcagttggatcaanngcagattctggtggatataattgccaagcagtttcttaaaaagtcccagggncaggggagagttggatactgtgagcatcatgggagagggaanaggcggattctgaaccacagctcggtgtnngggggcagtctatgggctctgagggcttcagagaaaaaagaaactangaggcaaataggacaggttgggtgggctttctaattgagacnagaggaggctcttggtcgtngca

SEQ ID NO: 672805 - DNA, 163 bp, Homo sapiens
cgtgaaatagccgaggggacaagtaatctggtggtactctccaggacccacaaatgataataggctaatttcccgcttagtcaaaacctctacgcatattttagcaaactcattcatagcagttaaataactttcagtatatacgagcttgtattacaaatta

SEQ ID NO: 672806 - DNA, 387 bp, Homo sapiens
  misc_feature (173)..(173): n is a, c, g, or t
gaaccgaggtggtacccctagttttagaagtttcaatagcatgcagatttgagaggatgacttcaattttgaagaatgttccactgtgggtaaaaggctatccaacagcaacacatgctacagataaatctttcggaaaggaagagtcagttgatgttgcagccttccttgtngtctcatttaaagaaatctctagagccacactaaccttcagcaaccaccacaccgatcattcagcagccatcaacagtgaggcaagactgtcttccagcaacaaagactcactgaagacttagattatcgttagcatcttttagcaataaaatatttttaaattaaagtatgtacattgtcagatataatgctattgaaacttctaaaactagg

SEQ ID NO: 672807 - DNA, 318 bp, Homo sapiens
aagggcaaactttggccagtcttccgggggccggaaaagttggatttttcagcttccaatactgaagcaaaaaaaattatagttccccaaagtagggcctttaagggtgttgagccttttcaagaccccacaaattatttttgtgatcacagtagtttaacaagggttaaatgttcccgcggttgcgctgctttatttaatgccctggggaacaaaaaataagggtactgttggggggtgattataaaaacttcaggcttttagctctccccaaagtttgaggttaaaaaaatgttaaaaaatgtgggttaaagttta

SEQ ID NO: 672808 - DNA, 373 bp, Homo sapiens
gtgttatcagtattattgaacttgactaaactattgatcagatcacaaagaggtagtacaggtactttgtccagatcctagaactaataaaagctttgggaatgtacatcacaaacgtagtggttcagtgactgatatggtttggctctgtgtccccacccaaatctcatctcgatttgtaatccccacgtgtcaagggagggacctgtaatccccatgtatcgagggagggaggggattggaccatggagtcagtttcccccatgctgttctcgtgatagtgagttctcatgagatctgatggttttataagtgtttggtagcccctccttcattcttctctttcgttccactttctgacccccacccagcc

SEQ ID NO: 672809 - DNA, 795 bp, Homo sapiens
gggggccttgtttgacctgatgggagggcgaggagcgagtttgtgcgcgcgctgcgcgttgactggaaactaatcgggactgcctaacctgatcggcgattctgtcagagtttactttcgctggtggaatggctggacaaagaggtagtcaaaatgcagatcttcgttgaaaacccttacgcggcaagatcatcacccttgaggtggagcccagtgacgaccatcgaaaatgtgaaggccaagatccaggataaggcaaggcattccccccgaccagctagaggctcatctttgcaggccacagccagcttggcacagatggccgtactcttatctgcactacaaacgatccgagaaggagtcgacccttgcacctggtcctgcgtctgagtaggtgggtatgcagaatcttcgatgaagtagcccttgagccggaaaggagcatcagccgtggactgtggacgcccatgtgacaccatcgagaaattgtgaagggccaagaatcgagggataacagcacagggcatctcctccctgatcagcagagggctcatcttttgcaggccaagcaggctggacacatggccgcacctctttattgactaaatgattcccagaacgacgtcgaccctggacccttggtccttgtgtccttgaacagggtggtattgccagaatcttccgttgaatgacccttgactacgtccgacgaccatcgcagtccagaatcgttggatgcctattgacctcatcgccgctttgctgagtgcagagatccatgattcccaccggctc

SEQ ID NO: 672810 - DNA, 703 bp, Homo sapiens
tggggcttgtggaagctgtgagtggggcttgctgtggtatgggtagggcttggcatactgtggcgtggagcttgtgggtagtctgcactgggcctatgatattgagggttagggcctgtactgatcaagggtatagattatgggcttgtgggtggagcctgtagtatgtgagtgagggggcttggatcactgtgggtagtggtaatggcgctataggtaaaggcctgtattggtgtgacgttggggcctgtgcagttctgaaagggccagattctgtggacttatcgaactgacgtctatcgtcggtgcagatgcgggctacgggtcttgtatatgtggggacacgagcctgtgtagtcacctgacggggtagagctttgtggctactagtcggccagcgtccagggccaggagcgaacaggcactgggcgtgctctccatgtggtgggagtctgggtgtgtcggtgggctatgtccctcaggctagagcgttcctgggcgcatcgggtctccacctgaatcctcagtctctgccgctctacacctatcctcgctgattgtgcgctcatagtcctgactgtgcggtgcatgcccgtttgccagcgactgcggcacggaccgttcctcatcctgtggccagtagctgggggtctcacgcctgcggaaggtgacttggattgggaaggggtcgggttggtggccg

SEQ ID NO: 672811 - DNA, 520 bp, Homo sapiens
cccctacataatgtgtgccatgggcatggatgtgtggtatgcacgatagttactgtgtgcattagacatatccttcccctgggctaggcttattgtcttagggccatgtatggaaacagtgaccttggtccagaggcgtgaaaggcgggatcaacctagtagggaccgcagtgcacggctcaggggctcacaggccgagaaaaaaaagtggagaaaacgccccctcccctctctgtggggacctgggcatggcggggttctgtggattggttttgtatgtggttttctctcccgtgtcctgttggtactccagttagaatgtagggatcaggcaggtctagcttgatgtgaacttgtctattgcaaaagtggccaacagtggaacaggtatgtattagggcaatcgattccttgagttgacccatcttggatgaagaaattccacttcccagccagctgtctgtccatttgttcacctgcccatccatccttttatcccatcacagctacagaatttctc

SEQ ID NO: 672812 - DNA, 116 bp, Homo sapiens
cgtgcgacgctagaggccatcgcgctctgctctagcctgctggagtacacccgatcctcaaggctctccccactagaggcctgtgcgcgcagttcatcacggaagctgagcgcaca

SEQ ID NO: 672813 - DNA, 103 bp, Homo sapiens
caacacttcatcgggcagtccagcacagcctaatagagtgaacaccctgtctccactaaaaatacaaaaaccagggatgcctggtgcacatgcctgtaatctc

SEQ ID NO: 672814 - DNA, 323 bp, Homo sapiens
ctgaagacattcacgaggttctgaagactgctctcatacacgatggtctatctcgtggaattcgcgaagctgccaaagccttagactagcgccaagcccatctttgattgcttgcatccaactgtgatgagcctatgtatgtcaagttggtggaggccctttgtgctgaacaccaaatcaacctaattaaggctgatgacaacaagaaactaggagaatgggtaggcctttgtaaaattgacagagaggggaaactccgtaaagtggtcggttgcagttgtgtagtagttaaggactatggcaaggagtctcaggccaaggat

SEQ ID NO: 672815 - DNA, 334 bp, Homo sapiens
cgtcctaacgaaaatccgatgatgtcaccatccattagttcctcaagggctttctcaagagacacgtcatagtcctgaattctctctgttaactacggcttaacttccatcatagaggctacggctagtctcttgaataaaatcctgctcagacacacataaataggagcaagtcacgtaatcttcccggatatcggtgtgtagatatgaccacagacaattcaagcaacgaagataatagggatcatacatcttcagcaaatacataacatcatagatctaaatacaaacttgggtaaggacgatccactagccagccagctcgggaatcaaa

SEQ ID NO: 672816 - DNA, 143 bp, Homo sapiens
cacccttcaaagacatcgcggtcttgcacttggcgcgcgctctcagacatcatcacatcatcacatagacacacacacagcccatctccagcccctgccactgtccagttctcagtcactatgcgggacactcctcaattcct

SEQ ID NO: 672817 - DNA, 707 bp, Homo sapiens
tttccggcccccaaatgccggttaaaaaacgccaccatttgttttgaaaataaatccaaaaagccgtatagtggtgaatttttctaaaaggaatccaaggaggttgaataaggcctgcttctccatggggttgcaaatgttgggctgtgaagggaaatgacagcctccctttcgtgtgatttttttaccgatggcacacacttcagggttgggcctgtttcctggaccctgctgtggcatcttcttttgtcactctggattcaagtgtgacgacttctcctttatagggtgcacgctccacaggggtaggtgtgcaagtccgctctccctactttattcgtttgtaaatatattcaccaaatggttttcgaggaataaacttcccatctcctgccgtgacactgaacactccgtcttcatataccactttgcctcttgaaatagtcacaaggggcacaccgtggcaaaccatgccttcgaaaatgttgaagttaacagcctgatgatgagtttttgctgagatagtccttgtgccgttcgggtgtcatactgcaaggtcggcgtcggacccaccagctgtttttccttttcttggatagagattaaaaattttggctgcatttgtgctggtaactgcaacaaatctgttttcatccattttaccgctatgcacgcctttttaccatttgcgctggattcgaactcct

SEQ ID NO: 672818 - DNA, 247 bp, Homo sapiens
cggccatacaatttatggcatctggcctgttcttcctctgactgcctctccccctgtgtgctttgctcatcccacactggcctcctcgctgtcctgtgaacatgcccaaccctgcaacttcctcaaagactttgtgcctctcttccgtctgcctggaatattcctcctcctagatatcagcacaactccttccctcttcatttccttcaggtctccactcacatgtctctgcggacacgaatgttca

SEQ ID NO: 672819 - DNA, 1060 bp, Homo sapiens
  misc_feature (66)..(66): n is a, c, g, or t
  misc_feature (282)..(282): n is a, c, g, or t
gctacgaagcacagatctgaagactagcatgtacacatgccagttccccaggagatggctctccanttcccagtgctctagctgcacggatccgaggcctagcatgttgtgagctgaggatgtgcagaatgctggatagcctggctgccattgtgagcgcagatgagataccacgaggacggttcttcgttacatacgcgcggtgactttgcctaccgtaagtttgcttgcaagcaactagttggctccgacgtacatgcacgtgtatgtgccctagtctgncgaacccttgtgagcgtactacgcgcgccatcgacatgtgccagtccgctgtgcgcacttgactggcaagtggcgtgcgctagtcgactctgttgctcgcgctcgttgccaccgtctaagtcacgcctagcgtggggtagatccagtggcctgtggcgagcaaccggcagacgtgtgggcaagggcgaactgaagtcttgccacatcagttccatgatagactaacatttcacgcagcggagcgcctctcaacgttactcacggcacagtgctcggtagatgggaagatcagcctatttacactaaggactcatcctactagcgagacccccagtcttgcctatcacacgaacactcttaccgaggttgaacggtggaacgcaagaacattcgcgtgccactcggatgccgcgcgcatctagaccttgagggacacgttttcatagcgactaggggacgtgcgttcactccttggacccttgggtccaagacacaattcttcagaccctgggttgtgggatggacacatgttccaatcattccttggaacctgcatatcaaagggtcgcatgcggatccttggccccttgggtcccatccagtggtaccatgtcggagcagaatagggtggcacatgggctcgaccgtgggcagtattgggtccacttgcttgggggaacgaatccctggcgtgcatcatttgatcccagtgtgccttggtggccccaaaagccttgcttcttggactggaggtgcaatcgcttggagggccagacct

SEQ ID NO: 672820 - DNA, 377 bp, Homo sapiens
  misc_feature (348)..(348): n is a, c, g, or t
  misc_feature (354)..(354): n is a, c, g, or t
gcaatacaagcttgccagtttttgccccaacagataatccaatgaaggctgtgaaccaaaattttggctaaagcagtctccatggcagtttgatttttaaaggccaaacctcccacgacttcaaagcagggtgtcacatgttaaccaggccccctgcttagagctgcagcacaaaagcctgggatacatgcaactctattccactttccaattcaacagtaaacttcagattccaaacaatgttgggggccaaacagcattgcaactgcgggagaggaaaattctaagggaggggttaggaccttcaggaacctcttgccaagaggcttcctctttgggagttggctnggggtnccgcaccaaccaaggaaggccat

SEQ ID NO: 672821 - DNA, 121 bp, Homo sapiens
aagatcctttcaggagagagaactggtgcctggaagctgctggactccagacccatccagccaggggacgcaggcattgttgaactcctctatactcctgggcactggttgacagtactga

SEQ ID NO: 672822 - DNA, 486 bp, Homo sapiens
  misc_feature (100)..(100): n is a, c, g, or t
  misc_feature (103)..(104): n is a, c, g, or t
  misc_feature (136)..(140): n is a, c, g, or t
  misc_feature (329)..(329): n is a, c, g, or t
tcttcgacgagttgtccgagttactctggtcactgtaatactggttctccattaaaatgtagatgctttgtctaattccacttcaagatcacttaattgngcnnttgtaactatcaactatcaaattctagtttcnnnnnctcactgtacctatatcatatctgttctcaactttgtttgattctccactcattttcaatcagagttgaagccttctttgcctttcttctttgtcttatttctgccttcatctcccacttctcacccaactctgccactgttcaggagcagttgactaaacttttatccttcctgtaacttaatctttntatccttctgtttttagttcttacagtggtaatcacatcagtttggcaatctaagatgtctctatcaagggtcagcccttttctatttggagctgaatcttttctttctgtagaaatctacatgtatttacaagacatgtatttttatctgcaggat

SEQ ID NO: 672823 - DNA, 131 bp, Homo sapiens
cgtctctaggatgacgaagtatgaagcttcagcttcagtatcagtccttccaagggatattcagagtagatttccttggcggatggacgtggtttgatcatctttgctgtccaagggactttcaagagtct

SEQ ID NO: 672824 - DNA, 591 bp, Homo sapiens
  misc_feature (159)..(159): n is a, c, g, or t
gcttgagcgtgggcttcatcggcgctggccagcctggcttttgccctggccatgggcttcgcatgcagcaggcgtcttgtgctgcccacaggataatggctagctccccagacatggacctggccacagtttctgctctcaggacgatgggggtgaagntggactaccccgacaactagggatgacggtgcagcacagtgatgtgctcattctctgcgcttgtgaacgcctacgacatcattccctcttctatcctggtagtgagcactaggcgccgacattgaggacagagcacattgtggtgtcctgcgcggccggcgtcaccatcagctccattgagaagctgtcgagcgtttcggccagcccccagggtcatccgctgcatgacccatcactccagtcgtggtgcgggagggggccgccgtgtatgccacaggcacgcacgcccagtgtggacgtgacggtgaggctcatggatgcagctgctgagcagctgtgtgtgcttctgccctggaggtgcgagaggacctgattgtatgccgtcacggggctcagtggcagcggtcccggctacgcattcacagccctggg

SEQ ID NO: 672825 - DNA, 702 bp, Homo sapiens
  misc_feature (447)..(447): n is a, c, g, or t
  misc_feature (695)..(695): n is a, c, g, or t
agccacgagaccctatttccaaggaacataagaaataccgtatgcacaaataaagtatttgccagtgaaattgagacccgattcaaacaccctacagccgtgaggacacgctgcagaactttaacctcgcgctgtttcgcatgtacttgccgctaatccttccgcataaggagtaccctcgcaataactttagaaggatagccaacagtaatagcgtcggcaccacacaaggctccttataagaggctaataaaggcaaacatcggagtattacaacagctcaaagagagattgggagatggcataaacccatctggcctgctgataacgtgtagcttccgaaagtgacggacaggaccgctcgaagtggacgcactactccccaaatacccgctgatatactactgctagaacgacaaggagcaggtctatacatacctgcgcaanactctggtcgctgagtacaggaggaacacccctactaggtgtccaagcggtaaccatgtgacacagcgcgatgcgttccatcggcccttaagggacacctgtcaacctgcttctcctcccagaatggccccgctatgtacctatacacaagaggaaggatgtttatattacacgatggacatataacccgcgtaagcgtgcgttagacaatgagacttggcttgctatatgcaggcttggatttaccnccgggcc

SEQ ID NO: 672826 - DNA, 921 bp, Homo sapiens
tcgtatatcagaataactgttgctgtcgttatgtagtacacttacccggccttacgggatggtctccccccaccggtaaaaacacggggcgcccatatatccctggaggtttttatccggcgcccgggatatattctcggcccaaacaaaaacggttcaaaacttccccagggaaacggcaacctctttcctgaaatgtcagcaaaaatatggtttccagccacaagacccaaattcagttcagaccaggtagcggtacaagacagtccccatactcctggccgataaatcacagggtttttctccccggtgatttactactaggccaatattacaacgccgcggcccatcccaaacatgttcaaaaagtaggggtgaagatggaaaaaaaagcacaaccaaaagggttgttaatttcgggagtaagcccccccccaaccgtgattgtataccctggccgcccaaagcacgtgtaaaaaatagattgcagcaagcactccagtgtggacgcagaaattaggcgcactctactcctccaaaagcatccgtgtcaaagcatcgtgagttgaaccgcaccgaaagggtccaaggaggcgttcactctagcgtattgaaagaactctgctgacagctgcattaaggttgatctaagaattggcattctccgtttcattcaagagaacaaataggtatccaagaaagaccaagataacaacccgaccgcgggcgaaccatgtgtctgatcaactcccacagatgatgacttcaaaaggcggttgggccccctgctgataaccctttgaggagagtttggtggaattactgagaaacactcctggttatgtcaccaggaccccttctggatcgtgcatgaatgccccccccttggatcatttagaccccccccccccaacatataca

SEQ ID NO: 672827 - DNA, 329 bp, Homo sapiens
tatgggtttggcactatggtggtgcataggcaagacaattttgtgataaggcacagatcctgaactaacctgtaagacttgtctggtttttggacaggtaaaatgggggaatgtaaggagagtttataggctttagaaggccatgctatagcaggcgagtgataacaggctttaatccttttaaagtgtgctgtgggatccttttaaagtgtgctgtgggatgggatattggcattgagtggggtaagggtgattaggttttgatgggatggtaggggtgcatgatcggttgccaaggagggaatagaggtgtcctcactacatgccat

SEQ ID NO: 672828 - DNA, 817 bp, Homo sapiens
tacgagaaagagcagcagacagtgaccaaactgcatcaattgtggagaatcaaaagaactcttctgtacccctggcagagcattgcagattaaagaagcattgagaaagaagtggaatcataaaagccagctgagagaaaaggaagaagaaagccaaaacaaaatggaagaagtctccaaacttcagtcggaggttcagaatactaaacaagcattaaaaaaattagagactagagaggtagtgactgtctaaatataaagcaacaaaaagtgattggagacacagatttctagcttaaatgaaacaatgggccaatctggaatcagaccagtcatgaggcaagctcatgtgaggaagctttgcatgccacacaagaaaggaaatatctgccaccagatgcagcaaggaattactgcattccagcaattgcagcaagaccacttaaggcatccagaaaggaccgactgtgataagtccttaacaacaatcaacagcagttacaaaagaagaatacaagaatctgctaaacaaatagaagcaaagataataacgataactgaactgttaatgatgtggcaaagattaaacagggcactcaagtggctttcccaactcacctacacaaagtgggaaccccatcaagaggcagagcgagttgatggacactctgcagcaccaagtgaaatctctggagcaacaagtggcgatgctgacagacagcacaagacgtactgcatttatcggaccccttcttagtgtgacggtccctggtgagtgtcaggaggctgtcaatccaaaatgcggggttgtgcaatg

SEQ ID NO: 672829 - DNA, 719 bp, Homo sapiens
  misc_feature (626)..(626): n is a, c, g, or t
gttttccacatcaggtgcattgcactgttagatgggtcatcataaaggtcatcaatctagtggcattcattcaatttgcacatcctaactgtttcagcactatctgatttagcatgaaaatctgccagggcagtcccttgatattcaggttcagctttccatgtatgggcttcaatcttataagaatttgttatttatttttcacctttactcaagatagcttggaacttataccaatttgtgatggcaacaggatagtagcaagttcatccacttgagtctgtttttaataggggctccactagaagtgagaaaccctctttgtttccataacatgccaaaattgtggactgcaaaggcatgtatatatacatagcatgtctgctatgtatatagcattttctgatttccctttagctatatgataagctcaagtgagagcaaaagttctgcagtttgagctgactgaaactgggaagagtccgctttttattaactcattttgggttttaatgacatattttgccaaagaataatttcaaatgggggccgggcgctgtggctcacgccgggcgtggtggcgggcacctgtggtcccagctacttgggaggctgaggcaggagantggcgtgaacccgggagcggacttgcagtgagccgggatcgcgccactgcactccagcctgggcaacagagcgagactctgtctcaaaaaaaa

SEQ ID NO: 672830 - DNA, 730 bp, Homo sapiens
  misc_feature (583)..(583): n is a, c, g, or t
gttttccacatcaggtgcattgcactgttagatgggtcatcataaaggtcatcaatctagtggcattcattcaatttgcacatcctaactgtttcagcactatctgatttagcatgaaaatctgccagggcagtcccttgatattcaggttcagctttccatgtatgggcttcaatcttataagaatttgttatttatttttcacctttactcaagatagcttggaacttataccaatttgtgatggcaacaggatagtagcaagttcatccacttgagtctgtttttaataggggctccactagaagtgagaaaccctctttgtttccataacatgccaaaattgtggactgcaaaggcatgtatatatacatagcatgtctgctatgtatatagcattttctgatttccctttagctatatgataagctcaagtgagagcaaaagttctgcagtttgagctgactgaaactgggaagagtccgctttttattaactcattttgggttttaatgacatattttgccaaagaataatttcaaatgggggccgggcgctgtggctcacgcccagcttatttttngtatttagtagagatggggtttcaccgtgttcgtcagggctggtctcgatctcctgacctcaggtgatccacccgcctcggcctcccaaagtgctgggtcaactatgttcttgagtaagaactcctgatgcctgattgtaatgttta

SEQ ID NO: 672831 - DNA, 106 bp, Homo sapiens
ggcattctagagaatgagttatttgaaaagggttttgaagtataaagcgttggggaattgggggtaaataagaccatattgcccatttgctaacgaggagtcgtat

SEQ ID NO: 672832 - DNA, 962 bp, Homo sapiens
  misc_feature (529)..(529): n is a, c, g, or t
  misc_feature (600)..(601): n is a, c, g, or t
  misc_feature (610)..(610): n is a, c, g, or t
  misc_feature (613)..(613): n is a, c, g, or t
  misc_feature (617)..(617): n is a, c, g, or t
  misc_feature (624)..(624): n is a, c, g, or t
  misc_feature (629)..(629): n is a, c, g, or t
  misc_feature (707)..(707): n is a, c, g, or t
  misc_feature (713)..(713): n is a, c, g, or t
  misc_feature (732)..(732): n is a, c, g, or t
  misc_feature (738)..(738): n is a, c, g, or t
  misc_feature (757)..(757): n is a, c, g, or t
  misc_feature (770)..(770): n is a, c, g, or t
  misc_feature (783)..(783): n is a, c, g, or t
  misc_feature (801)..(801): n is a, c, g, or t
  misc_feature (818)..(818): n is a, c, g, or t
  misc_feature (841)..(841): n is a, c, g, or t
  misc_feature (953)..(953): n is a, c, g, or t
gggagggcacgtcgccccgccccggtccgcccgccagctgcggcggcgcgtcgggaagtgcttggggcggcgagcatggcggcagcggctgcaggcctgggcggcggcggcgccggcccgggacccgaggccggggacttcctggcccgctaccggctggtatcgaacaagctgaagaagcggttcctgcggaagccgaacgtggcggaggccggcgagcagttcggacagctgggccgggagctgcgcgcccaggagtgtctgccctacgcggcctggtgccagctggcggtggcgcgctgccagcaggcgctcttccacgggcccggggaggcgctggccctcaccgaggccgcccgcctcttcctgcggcaggagcgcgaacgctgcgccagcgcctggtctgccccgccgcctacggggagccgctgcaggccgccgccagcgccctgggcgccgcggtgcgtctgcacctcgagctgggccagccggccgccgccgccgccctctgcctcgagctggccgccgncctgcgcgacctgggccagccggccgccgccgccggtcacttccagcgcgccgcccagctccagctgcccnnagctgcccnctnggcngcgctgnaggcntttgggcgagggccgcctccttgccaagctgctgggcgcgcgaactacaccgcgcgccctgggcggtcttcaccgcgnatgcangcgcctgggcgcggggagnacgggnagccaccccggtgcaagtnactgccgcccgcncccgcccgccggnaccccaagcccgggcccnggggcaacgccgccccnacccggccgcgctgcttcctccnaactccggctcggcggcgccctctcccgccgccctgggcgccttctcggacgtgctggtccgctgcaaggtgtcccgcgtgctgctgctgctcctcctgaaacaaccggccngcaaagctg

SEQ ID NO: 672833 - DNA, 97 bp, Homo sapiens
gccagcgccgagatcctggcggcctaccagctcctcagtgcacccccactagcaccccaccccgcatctatcgcccaataaaggcatctttgccggg

SEQ ID NO: 672834 - DNA, 125 bp, Homo sapiens
acacaaagtacctgtgtacctgaccatgtcaacatgagttgagctcatcaagataattagaaggcgcttacagctcagtgctaatccggccttctccctgttcggtgaccggacacagcactgga

SEQ ID NO: 672835 - DNA, 860 bp, Homo sapiens
  misc_feature (675)..(675): n is a, c, g, or t
tgacatagagagggcgagccgactgtagatctcttctttcgtaggtaccagaccttcatcatctctgagcaaaaccggattatttctgaccattctatacagattcaaaccgtcgatccgtcccgccggatcagggttaatccaacgctgtaaccacggcacgtagtacctgaacccatagtaataaagccccgtcgcatcccgctccttgcccgaataacgcaacgtgcgataactctcttcgctcgaatcacccttctgcgtgaaggccgtcgtaccaaacggatgatacgtctcgcgagtgatgatcctcgcttcactgtccagttccagcgaacaagagcccagatgatcgctaagggtgtaacggtattgatcattcgccagttgctgcggcgccgcgccttcccaatgcaacacctgcaccgtggtgcggccggcctggacggtgacgacgtgcagtttctcgccatccccatcgcgcgtttccagccctggtagatatcgggtctcactgaccaaggtgcgggcgttggtttgcgtcgtgcgcaccttgcgctggcgcatgccgtcggcaccgtagacgtagcgctcggtgtcattgaggcgcaacgtgcgctccaccatatgcacatggctcagttggttacgtgcatcccaactcagtgttcggcncggtccacatcacaggttgccgttggcatcgaaggcttcggcaatctcagcttcggtcggtggcctcccgcccacctcgggcaggcagcgattactgtgcttgccgccgtctacacacgcccatgttgctgtggccgtggtggatcagctcgagcaatgccgccagctcgtagcatagtttgaca

SEQ ID NO: 672836 - DNA, 103 bp, Homo sapiens
agacactcctccttgtgttatttgcactcctcttctccatgctggcacttgaactcccacctgccactcctcttctccatgctggcacttgaactcccaccag

SEQ ID NO: 672837 - DNA, 604 bp, Homo sapiens
  misc_feature (524)..(524): n is a, c, g, or t
tcgcgtagtctggaggctgcgaagtccaaggtcaaggagtcagcaaacttggtgtctggtgagggctaactttcggattcatagagctctgttttctccctgtgtgctcacatggcagaaggggcaggcagctctccggggtccctcttataagggcactaatcccactcatgcaggctccaccctcatgacctaatcacctcccaaaggccctgctgcctgaaaccatcacatttagggttaggatttcagcctatgaattttgagggggaaaccagcattcagtccaggtccataacaatggtcaaatcccatctaaaattattataacacaaagaataaggggcagagtaatgtccctacaaacaggaaactactccaggaaggcacgcccagaacatagaaactggaccctaataatgcatcaatctgagaggaaggccaggtaggtcaggagttggtcatagctcacctgggtttagggtgtgggacttcattatactgttctagtctgccttttgctngtttacttttcaagtatttgcctgaaatcttaaatattaacaaggtatgaaacagggatcaatgaaacacatcatggtat

SEQ ID NO: 672838 - DNA, 853 bp, Homo sapiens
  misc_feature (664)..(664): n is a, c, g, or t
gagagacctgtctgctgatgtaccgtggattgctctcagtctgggactccgggatgcttcggcatatcccggccttgagctcgtctcctttttgaattgagaagaagaagaatgtagaagcaccatcttcactcatcattggccttagcaagtgtgcgtataggtttgaggctaacgacgagatacgtgttgagtccgtgggatgcgatcgttggcttatgtccaaagacatcggcgagcgtggcgttcctggctggaggactgagctacacgtcagtctagccggcctgggtgccttaaccagctgtatccaggatccaaggaacgtccggggttctcctagaccgctacatctgtaacttgggtaggtgttatgggaatgagatcttactactatggaaaattcatgcctgtaggtttaattgcaggtgccagttgctgatgggcgcaaagttggagtcgtatgtgatgacatctgattagcagaagtcatgtccagcttggactcatgaaggattaaaaatttgatctttccactattttcaaatcgttcacgagaaataaggtgcagcattttgtgccattctgaccaatttaccctaaacgacaaaacacacacccgcaatttttgggccggagtggttgcaacaactagggtggctancattgataacgctacaacaaggtggtagcttggtaccattgagtattgacaccctcatacaccaccgccttgggaacgtcgaggcatcccccggaccataggcaaccccgggtcactgtggtgtccctttgaaccgaacccaatccgtcagcagaaggatcaaccgcaacaaacactctgcctggccag

SEQ ID NO: 672839 - DNA, 171 bp, Homo sapiens
ataaccaatatatactctgctaaatataactagttgagaaagtccaccaaggggttggctgaacgatgactgagctggacgggtgtggtggctcatgcctctacaggcctatttttgaactctctattctattcctattatgtctatcattatgccaatgccacagggggg

SEQ ID NO: 672840 - DNA, 342 bp, Homo sapiens
actcttaatagtacctggctgaaaatatttgagaaagagaaaaaggaagagattggatcaaactctggacttcatggtttcttaaattcactctgcaagtttttgggttttttgttttttgagaccaagtctcacgctgtcaccacaggctggagtgcagtggcgtgatcttggctcactgcgaccgctgcctcctgggttcaagcaattctcctgcctcagcctactgagtagctgggactacaggcacatgctgccatgcctgactaatgttttgtattttagtagagacggggtttcgctgtgttgcccaggctggtcttgaactccggggatcctcta

SEQ ID NO: 672841 - DNA, 823 bp, Homo sapiens
ggccaacctcctactcctcattgtacccatttctaattcgcaatggcattcctaatgcttaccgaagcgaaaaattctaggctatatacaactacgcaaaggccccgaacgtgtgtaggcccctagcgggctagctatcaagcccttcgcgtgacagccatgaaaagctcttcaccaaggtagcccctaacatacccggcatatctatccatcaccctctacattcaccgaccccgtaccttagctctcaccatcgctcttctactatgaaaccccacctaccccataaacctatgctcgctctggtactaatctcaactctatggtctcctactttattcttacaccaaccgtctacctctgaaaccagtatgccacttcgaagtctctcgtggagtcaatgggtggaatcgatgctagtgctcgaaatcttacagcgccatgcatctggcagcgacatggcgaatgcgagatagcaccagaaagttgcgtgcaattatggagaggtctccacttagaccaaatcagtcttgtatctactgcaaagcaattacttagatccagatggattccctctattaacgctcgttcaccggcgttatatcacaaacctacatgaaccccagtcatgaattactccctgcccataatgacccctaggaccattaatactcgataaatactacaaaaataagcaagagaaccaaaccgaaacccctatcggaacttgcacgaagggggagtccggaacatagcttcttcaaggcctccaacagtcgaaattacgcggcaagggcgcatttcgaccttaattctgcaatag

SEQ ID NO: 672842 - DNA, 729 bp, Homo sapiens
gatgatgaacgagtttctgcagcagtaccggaacgcagcgaatggaacgagatgcggcagtaggcttcgacaaggggctcccaacttcaagcaggtttctatgacgatcgtccaggtggagaaagggattgttgtagacatgacttgagtaaagaacagaaaagcattgtcatcatggttcatatttatgaggatggcattccatggaccgaagccatagaatgtggttgcatgatctgccttgcctgcagagtacccaagctgtcaagttctgcaaaggtagaagagctcagttattgtgcgccagctagtcagtatcaccaggaatgctccttcctgcgccttgctagatactatgaaggggggtgaattggatcgtgcaatggctgatcgtggttgactgaccagctgggggatagatttgctttggcagtaggaccttgacagcttttgctaccaggaatttggattactcccagaaacggaagtctaggtgctgacatctgtgcgtaactctgccacgtgtcacagggaggctagcgagctggaaatagattgaactagatagtctagttgcatagattgctcagtcgtcagggttggacatagcacgtcatggtcatgaagttccttgtcttctggcttatcagctgtacttggtagaacccttctattatgccgttctcatcctgaacattccttagattcaatcagagacatgccagcaaa

SEQ ID NO: 672843 - DNA, 879 bp, Homo sapiens
  misc_feature (3)..(3): n is a, c, g, or t
tgnccaaagaaaaaagcaacgaaggaggaagaagaaaagacactctgttgtgtatctctcttgggccctgcttccagatctccgttaggcgacaacttttaattctctcaacacggcgttgatatccccggcctcaggctatgtaatcttacccgatccgtggtgtttggcccccttgccaaggcacatatatttcctttgtaagaacacagcaatcatccgttcgggcaaatagttccgcacattgccgcattattttgttgggtccgacccaggtgcccccatctatgtcctggctccaggggatctaatcttcccccctcccccttccgccaaatgaaaattttttccttattgcagtcgctaatatacaacctatctcccgcaaaattgctctcttcttttcaaccccagccatctcaacttatcgtcctgcaaccggtcatttcatatttcccccaatgggcaaaacaatttataacaggcctctattcaatttttttctcgaagaacaaaacaaccccgttgcaagtatcctatgtattctccaaccgcccccacttgtgtcaaattgaaagtacccccgcgatactatttttgcccccacaggacctcccggcctatttttcggaaaataacaacggcacccctcttcttctttccaacaaagaagagagggggcggacattttccccaatgcccctcatctattggaacagaatctatacaatctttcttttttcaaactaaaaaccgccgtcgttccacaatacaatctccccaaagagggcgttcccaaaatgcccccactcttatatccgggtaaaaaacggtaaaaagggcccccttgaaaaaacgggaaacccgccccacaaaaca

SEQ ID NO: 672844 - DNA, 353 bp, Homo sapiens
  misc_feature (281)..(281): n is a, c, g, or t
  misc_feature (295)..(295): n is a, c, g, or t
gggcatggcaacctgctctcctgggtggggctcggggaggagacctctctctgcggcctcctccctctgatagtgggacttttaaaacttgatcaaaaaaataataataaattaaaaaagaaaagaaaagacagcaaacaagcacaaaagagcaggcggggaaaaccctaggtaggaatcaatgaagcctttcaaccttcttccctgcaaaagtctgcatttctcttgtctttgggaacccgctgaatggctgggaaactgtttttaataaacaagagttnaaacgctgagtctncatagccaacagtcacgccttaaactctaaactttacatgaaaactctcccaggtcct

SEQ ID NO: 672845 - DNA, 122 bp, Homo sapiens
acacaatcagtacacacgaatgagcatgtaccttctcctattttcgacttccattatctaagcaccttgtactggtagaagggagtagctgaaaaaaatccatgcaattgtagtttgtccat

SEQ ID NO: 672846 - DNA, 192 bp, Homo sapiens
gcccagttccaaagatacaagactgactacatggaattctgaacgtgatatgttagtaaagccatttatttcttagctttaggaaaaactgtcctccagaaagttttcttgcttacttttcgcctcctgatactacattttaaaagactatatatgggccgggcgcgatggctcatgcctgtaatcccagct

SEQ ID NO: 672847 - DNA, 487 bp, Homo sapiens
aactacgcagctataccaagatacgagaacaccctgggagatgatcattcgtaagtaacctatccatatatatataatctatgtttaaaaaggtctattcacgctgtcctcctggtgaaatggtagaaaaatacgttcagcacttaaaagattccgtgaattagtagtagttgttgttgtgcaaagaataaaagaaatcatgaacaccgcttattcagccacacagtgctttgctgtcatttgacattaactcagaagggaattcagaagcctgcaaggacaggatgctgatatccgtgttgagggtggtcagcggcgtcctggacgcctggttctgcccgggtctctggtgatagcaggctgacaatagtgggatgcgagtccaggacgatctgcaggtccaagatgtagtcgatagacgtgcatgcaggatttccatcttgctcaccttcttgttctgggggatgctgagcaccagctccttgag

SEQ ID NO: 672848 - DNA, 972 bp, Homo sapiens
  misc_feature (548)..(548): n is a, c, g, or t
tatgacttgcaggccagatatctagtactgcaacggccagaaactgggtatggtagctgctgcccgcgtgactagcagcgtggacgtggatttggaataaaaagtgaaagctttaaggggtttccctacaaaacattttcctttaaaatactttggaaagggcgtataagcagttgactttcacccttggagagcatcaccacgtggtggtgcaaggttccaggtgattggtgtgaccctccccgagcccctccgggctctcttatagagtaatcggggggtgcggtggcgacttccctctcaaatcttcttgggccgcgctccatttccttattcctcgtggaaccccagtggagaagcgggaacaacctttaacggggagtgaaataaatttctcacacactgaggtggtacactctaaatccccatttattaagccagtgtttcgagggaaaatttcaaagagcacacattttgggctcctgcggaaacagtggcgtgcgcggggaaagacctataagtgggctgtctaaacagtgtctaagggnataatttggggtcaaacatataaacgcttgtggacacatgtgcgggtacacattgtggcagccccgtgtgttttgcgggctcacgaattgtgggggtctccacaacgttttctatacacctgtgggggtaagaggggtgtatacccatatataattctccatatgtatttataaattgtgtggaaaaacaactttaaccattataaggcaaaatatatacttttaaagttttcccccagtggagattattattccaaactatttttcgtggccccaatataagaaggggggactaatcatgagaattaccgcgggtaaaaatcatcggtgggaaaaagaaaccactttctttgtaattaacagggtctgtgggaaacctttccggggggagaatatagagggaccaggaatatacctatggggg

SEQ ID NO: 672849 - DNA, 103 bp, Homo sapiens
cgtctgatggtctaatgggatggaatctccctagggacctggggaaactcagataccgagatggtcatttggattgggccattgacgggtaacgtggcaattt

SEQ ID NO: 672850 - DNA, 144 bp, Homo sapiens
ttcatcttctgaatccatgttaatatgccacacctttacggtctaatcgtccacctcgaccgagttctgtggatatagttttccctgattggtgggaatgtcatagtttatgactaaagaaacctgctgcatatcaatgcctct

SEQ ID NO: 672851 - DNA, 289 bp, Homo sapiens
ccccttccccgggtatgaattttttcgttgaggccgtttaacttcatttagttgaagggattgattcagttcagggttggaacttctttttgaacctcaccctaataacctgtctaaacatcagggttaaaccttcttgctaacacagcagtattgcttgttaagactgcctcacagtccatggaaatgcttgcccagagaggccaaactgccttaactccttaacctgagctcattaaaaaaaattcaaaggactgattccttgccacagttctacccggggaggggg

SEQ ID NO: 672852 - DNA, 219 bp, Homo sapiens
ctcaccaaaaggccaattaagtaacttcctctctttcctcttcccactcatcctaaccctagtcctaaatcaataagctattcccccgtagaatctcaattacaatatatacaccaactaacaatgttcaaccagttactactactaatcaatgcccataatcatacaaatcccccgtagcacttaggatcctcccgatatcaaccctaaccagatgct

SEQ ID NO: 672853 - DNA, 303 bp, Homo sapiens
tgcagtattgtgtatttcatcatggggaagatcatcagaccaggagttaacggccttggttctttagatgtgggggagggaacatgcagcggtacactggtcaggtgcctgacttctgaagccagatggacacacgcggcttgtggaaatagtggtggcacggcagctcagttgccacctcccccttcacatattcgctacagcagatggggcagcacatctcctgaccaactgcgccatgatcttcagtgaccaggatctcgggaagagcgtcaatgctctccttgggagtcgccctttcgt

SEQ ID NO: 672854 - DNA, 178 bp, Homo sapiens
  misc_feature (28)..(28): n is a, c, g, or t
  misc_feature (30)..(30): n is a, c, g, or t
  misc_feature (38)..(38): n is a, c, g, or t
  misc_feature (41)..(42): n is a, c, g, or t
  misc_feature (50)..(52): n is a, c, g, or t
  misc_feature (54)..(54): n is a, c, g, or t
  misc_feature (56)..(57): n is a, c, g, or t
  misc_feature (95)..(96): n is a, c, g, or t
  misc_feature (178)..(178): n is a, c, g, or t
gcattatctggctatattaaaacctggntntctatttnccnnctatcagnnntnannaccaattatgttttttcaatgctctataagaatgaaannggaaattatatttcttttttctgtaaaagagttgcaactactttattatatttagaaatccaataaacttcttattacattn

SEQ ID NO: 672855 - DNA, 183 bp, Homo sapiens
taacatgtctggtgtgctttccgtgtttttaattgatatcccggtaatgccatgttagccaggctggtcttgaaatcctgacctcaggtgatctgcctgcctcggcctccgaaagttctgggattacaggtgtgagccactgtttctgtttaactcctctttttccttttggcccttatcgag

SEQ ID NO: 672856 - DNA, 305 bp, Homo sapiens
cgacgggtccttacgtggttcacaacgggactctgacacagctgtgttttgactagctattcctctcttggtcctgaacacaaacctttgatctgcagaggacattcttcttggggtgggtggtcgggtctatctgtctcagacacatcaaactacagaccacgaaaactgggaagcagaggattagaataaacacctttccctccggatccggagccctgatagactcgccctcttcaacaaacagggctctgtccaaggcactgggggccactcatggagactagggcattctcaggccccca

SEQ ID NO: 672857 - DNA, 764 bp, Homo sapiens
tcattaatgctagggaaaaaccagcagggatcatgtcaggttcagagcatgcacaggccccgccctaagggaggggggatgtgttgggggaggggctggttccaggtccatcccacagcgtggtccagtgggatctccttagtggcgaggcgtggctgtggtggcttttctctctccgtggggttctcttcctcctccagaataggggtcgtgcaggagtcttcgtgcttagcatgtgtgggtggccagaggacgtgggtggagtggggtggcgtggaagcagcgcacagtgcttccacgaggggaccgtggtcgtgtctccaggagactatcagtgatatgtggtctcaggagtggaaaaaacctcagtgggtctcaagaatcgtgatactctccgtgattcgggtcggccatcttcttacgaggggcacattctataagtgatttcacatccttccgcgatccggcctcgtgacacttttagcagggtgggtacacagacagtcgacacgggtcaaagcagacgctgtggggcccagcgggacaatggatgggagcaaccagcccagttcaagccatcgccagaaacatggtccagctgtgacctcgtgggtctccaacagggatgcggtaacacgaatggatggggggctcaacagccgggggaactccacaactcatcgaggtgatgacgccttgtgggcgggggtccggcaaggggccgagaggacccaaagggtcggagaccaatggcggcagaaacg

SEQ ID NO: 672858 - DNA, 322 bp, Homo sapiens
aaaaaaaaaaaaaaaaaaaaaaaaaaaaaaaaaaaaaaaaaaaaaaaaaaaaaaaaaaaaaaaaaaaaaaaaaaaaaaaaaaaaaaaaaaaaaaaaaaaaaaaaaatgggggcccctttggcccaagggtttttaaaatcgggaaagttttttggggggggccaaaatggggcccatttgggaaaatcccccttagggggggggtttaaaaaaaaagggggcgggttttaaaaaagggggggggggaaaaacccggggggtccccaattaaaagcctttggaaaaaaaccccttttgccaaggggggggggggccccccccc

SEQ ID NO: 672859 - DNA, 1170 bp, Homo sapiens
tccatgccctgctgcacctgctgctcatgctgcccacctgcctgggcttccctgcgcctggacccatgtacctctgtgctcccctgtgggcctggaccgaggcctgcaagcagcgccgcggggtgtggggctggacccaggagatgaaatgacaacgtcaaccctccagaaagccatttgatcttggtgacgaaaggccacatgagtgaggacaaaagccaaagaactaacgagtgaggctgctgcgtgctgtaaccaggccattgcgggtgagaagctacattcactcccaacgacataatccaagatactgcagggaccgcaacagacgacaccaaagtggccaaagggaagaagcaaattccgaagcccaaaaggttgccgttagaccagattaacccatttaagaaaacccgttgtgaccccggaatgaacacgccctttggacatcgtgagattttattttaaaacggacaatggcacattatgaacagcaaagaaccaactgagtgcaaaaatgacaactgagccccaaagggtacaaaaaaaaggcacggaaaaaccccaaaagcaaagtttggacacgcggggccaacaccgcgagggccacggaatgaacccaaaacggttggaccccaacagtacgaagcacacggtaggggaaactaagggtccaccgggatgaaagaaaagaaaaaaaagcggaaaataaagcgtggtaacaaaggaaaagcaaggtgagttgggaatatgagtgggattggcacctgggattcgaggtagggacacattgggggaaaggaacaggggcacacgaaatatacgaaatttaaacaagaggttggaagaaacaaccgggaaacaggaatggagaccccagagggagaacgaagacaaaaaagcacggagggaccccaaaaagtaggaaacggggcccgccataacaaaaaaaaagaaaaaaggccgtaagaaacaaataaagaagagcccaaaaaaatactaaagtaaattttaaccacgaatgcaaaacgattgagacttaaccaaaaccaaggtaggaccaatcaatgacggtaccaaacccacaccaccatagtgatacgacggaacggcgagacaaaacatccagtgtgctatggaataaccggggaacacaccccggcatatttg

SEQ ID NO: 672860 - DNA, 928 bp, Homo sapiens
  misc_feature (928)..(928): n is a, c, g, or t
gtctcgcgggtcaggctgctcccggctggaggtagtctggcgggacgggttgtgagttgcttggctgctctttacttatcgattctaggccaagattgccgcagagaactagacggtgggatgagatttcaggtctggcatgacgtataaaagattcagtttcgtgtgaccctatgtatgggctgtggtggatattgcagtttatggggcattctgtgtgcgaaagaattagtgttgtgaagagtaatcacaatgattcagtctgtgggcgtgtgtactatggaccgaggggtcaaagatgtatagactgttgagaaagttgcgatatgtgaaatttctggcgattaatgagtacgccaatgtctggctgacaatgtcatactctgtaatactgaaggtgaactggtatagatatggctgacttggtccgagagcttatgggttcgttaactatctatttggaattaatgatggagggtgttgggactcgaaatggtacgtataatgttaatgctaaggtggtactggtacagaagcctaggaggttgtctttggtaagtgagcttttaataatcttgaggagaggtagagagtgcgacctcgtccccaaggagaaagcctgcatgcatgtttgtgcactggagcacgaactgcgtctgtctcagaaactggcatgtgatgtgtgtgttagtgtaccttgtagttgtggctctgtgcaccttagggttgtaagtctacctgacatgtggcagtaaccagcttccgccattcgtccacctttttaagaacctcatgggcaccttgtgcggccttggttttgcgccccactgtggggggacgcacctcaatggtttgggttccccccttgttgttgtcgggcacaataggggcaataataggcaaaacatgtccaaatggggcgagtggn

SEQ ID NO: 672861 - DNA, 437 bp, Homo sapiens
  misc_feature (44)..(44): n is a, c, g, or t
  misc_feature (63)..(63): n is a, c, g, or t
  misc_feature (78)..(78): n is a, c, g, or t
  misc_feature (119)..(119): n is a, c, g, or t
  misc_feature (142)..(142): n is a, c, g, or t
  misc_feature (178)..(178): n is a, c, g, or t
  misc_feature (200)..(200): n is a, c, g, or t
  misc_feature (212)..(212): n is a, c, g, or t
  misc_feature (230)..(230): n is a, c, g, or t
  misc_feature (238)..(238): n is a, c, g, or t
  misc_feature (276)..(276): n is a, c, g, or t
  misc_feature (293)..(293): n is a, c, g, or t
  misc_feature (299)..(299): n is a, c, g, or t
  misc_feature (314)..(314): n is a, c, g, or t
gaagaaatccaaactattttttcttttaaaaagccccgtaatgnaacccctaatgaaatcccngccatttgcttcccnttgaagtgggaaaatatcccaaaggagcagcttccatttcnttgaggtgaaaggccctatgaanattgttcccctttgctgcctttgggagttatatggntatttgggaaccttaaaaaccnctgggttttaangccatcccgcataaaaanataatttnttctatgtgaaaaaataagacagggctttcccctaggnaccccccagacccatcntccttnactttttaagattgngttttattaaaaaaaaaaaacccttaaatgggggcagctatttttttatgttgaaaagactgaaagttttaaacatgaaaaaaatccatatttaaccttttttgttccccctgaaaaaaaaaa

SEQ ID NO: 672862 - DNA, 282 bp, Homo sapiens
atccgcagcaagtctaaaggtcacatcgagttcacagagtgcagaaaacaagatcaccctagtagggccctacagaggatgtctatctggcccaggaacagatataatgcatggtctaagatttgattaaccggactgactatatgtagatcaacatcgacctacagttccacaggcacctcattgggaagagcggtgccaacataaactgatatcaagaccattaccaggtgtccgtgcgcatccctcctgagcgtgatgagacctaaaacggggtaccga

SEQ ID NO: 672863 - DNA, 254 bp, Homo sapiens
cgttttagacgaaactccacgatgaggacatccgaggtgctgcactgctcagactgcaggcacagcttgtcccatgtcgagtgtgcatgttgccaagtctgatcttacggttgccctgcgtgacgtatgtatgtgatatgaaagtgtggctgtcaagaacctgcaggaggcaaaagactgttacaaatccaagtttgctgaattctctgaggttgccaaacggaacaatgatgccctgggccaggaccatcagg

SEQ ID NO: 672864 - DNA, 128 bp, Homo sapiens
cagcctgtgcaacagagtgatactctatctcaaaaaaaaagaaagaaagaaagaaaagaaaaaggagcttacaatcatggtggaaggcgaagaggatgagcaggcatatcacatggccaaaaagggag

SEQ ID NO: 672865 - DNA, 289 bp, Homo sapiens
tttttgccccccggggggccccccccccccttccccccaggttttttttttaggcgggggttcccctttcccccgattccccccctatgtttttgggggggggggctttttttttttcctcttgggggggcccccctttttggggccccccccccgttgtcctttttcagggggggggggccccccccctgaaggggggggggttttttttttcccttccagttaagcctcaagtatataatgccctccccaatgagtgcaatgtcaaaagaatgttagaaccatatta

SEQ ID NO: 672866 - DNA, 460 bp, Homo sapiens
gactgtcatccatctacctgctattttattattggctgattacaaaagcaaatcaagagtatatgaactctagtttgcctgcaagtaaactatttactgcattgagggtcgtagctttttccctattatccgattatccatggatcaaatagtgtatctcagtggtaattctagagggccattaaaaccctgatggtgctggaagagatggcagtgctgcatgtcagaaataggtaaactgtaattaagaagttacagatgattcgattacgctcttgtgtatttggtcctgttataatgtgagcagattaaaatcatgtagtgcttaaagctatgtcattatgcaaacatttatggcaacttctgcaaattaatttgaactgtaaaagttccctaatgagacgatgtcctccataactgagaaggacactgcagccattgctgcttaattcctgcattt

SEQ ID NO: 672867 - DNA, 935 bp, Homo sapiens
tgcgccccggtgagccgcgggtgcagcgtgagcgtgtgtcgaacacggttgccgaataggtgatgtgtgcagcaccctgtgtagcactggtgccgcgccccgtgagatgcccaggcgaaccaccggggtggcaccgccggccccgcggtgggggccgcacgagccgcgcgcctttgggccgcccctaagcgcttgttttgtatcgcgcgttcattgcacgccggtattgtggtaagcccccctccgcgcctaaaaaggtggtggaacgcccctcctcatacggcagggggcaagcagcccagcacgtaccgtcatgtggtagccccacccgcgcaatccgtgctcgcagttgcagccgtgggaacgagaaagatggtgtgtaaaaagtacatggtccgcaaaaacctggcttcaaccacttcggcgccccataaggtagtgttccgccgcaccacagcgggcgtcttattatatcagtcgcgccttattcttccaagctgccccccgccgaaaatatagtctagcgcctaagaggggttctccttctttaaaaaaacaggggccccccgcgtgctaatagaggagaatgcatacttctgtggggggaggcgccagtgtatcctattttccctccccacacgacaaatccatttagtggagagtctcttattactattaaaaagcgctcgccacaaaatgatcataatcagggttataatatgtttatacaaaacaccaacatgtagaactctcgtggaggtctgggaggttatataagggcgcagacaacatcattggagtctcggtaaaggtgggaccacgcaataagacctccatggttttttactgatacattggttcctctaggtaatgtagtttttgccccctccccacggccccgcagataacaaaatatgggttccgcccacatgaca

SEQ ID NO: 672868 - DNA, 529 bp, Homo sapiens
  misc_feature (529)..(529): n is a, c, g, or t
ggcaagatggcgcttgccgagtgattctcctcgaagtacctcctgccggctgcggagacaccggggcggggtgtctgccgcaactacctcccttcctcctctccgccaggggagtacctcatccgggactcatatcaccacggcagggagagtatgtgctcgagcatgttgccgggtggcgcatagtcagggcctttggagcgttcgatgagtcaagcgaacggatgtgataggtgacagggtcacggcggaggatgggtagcgacatgagacagatccaaggtgagcacttgatacatgaaagtctagagatagacggctgttaagacgcatcgatgagcacacaggctctctacgggatgacagaactacgtacactagctagcgagacatgatactgacgatagaggtcgtagaatgtatatcacatgtatagactaaggaaagaaatgaggagagacaaccaatacaattagcataaacatatggacacaccccgtggatggaacaaatccggtgaagcacgctn

SEQ ID NO: 672869 - DNA, 357 bp, Homo sapiens
  misc_feature (357)..(357): n is a, c, g, or t
agggagagtgtcactcatcatactgctcaccgatggcgaccccactgtgggggagactaaccccacaagcatccacaataacgtgcgggaagctgtaagtggccgcgacaggctcttctgtctgggcttcggtttcgacgtcagctatgccttcctggagaagactggcactggacaatggcgggctggcccggcgcatccatgagagactcagactctgtcctgtagctccaggacttctacacaagaagtggccaacccactggtgacagcagtgaccttcgagtacccaagcaatggcgtggaggagggcactcagaacaactttcggcttctctttagggctctcggggggcn

SEQ ID NO: 672870 - DNA, 148 bp, Homo sapiens
gccatgagcaagatatagttcaatacaacacatacatgaggcatactagtcaacaacaacagcagacacatcagtatcagcagcgtcgccagcaggaggcatatgcagcgccagaccgaggagtacccccgctccctgaggaggacct

SEQ ID NO: 672871 - DNA, 559 bp, Homo sapiens
ccgtaccgcgtaccgcattaggtgtgtgtctagtctgtctggaagggtttgtgaacagagaaagcattgttagtataagtgaagaccatctgaaccctggaaagccatctgtctccagaagcaagggggcttctccttttggtggtggtgttctgcctctttcctgtggtatttttctcttctgtgctgcttgctaaaagaaattcacatcatgttaaagacattggttctcggcggggtgcagtggctcacgcctgtaatcccagcactttgggaggccaatgcaggtggatcacctgaggtcagaagttcaagaccagcctgaccaacatggagaaaccccatttctgctaaaaatacaaaattagtctggcgtggtgactcatgcctgtaatcccagctactagggaggctgaggcagaagaattgcttgaacccagaaggcggaggttgtggtgagccgagattgcgccattgcactccggcctgggcaacaagaatgaaactctgtctcaaaaaaaaaaagatcagctgggcgtggtggcacatgcctgtggtc

SEQ ID NO: 672872 - DNA, 176 bp, Homo sapiens
  misc_feature (131)..(131): n is a, c, g, or t
gtctgctgctaaagccatctgtgacccagtaaggaccatctggtttggtaccccgaaggaagtatttagtgtacctagggtgttatctctgataggctaactccttaggtgttcctgatagtactgctctnctcttaccctcgttgttatacaagataagaactcggagttagttg

SEQ ID NO: 672873 - DNA, 1675 bp, Homo sapiens
  misc_feature (1573)..(1573): n is a, c, g, or t
  misc_feature (1579)..(1579): n is a, c, g, or t
  misc_feature (1675)..(1675): n is a, c, g, or t
ggctgacttagctccgtgagacctgggcgtgcgcgtcgctgatggcatcggctggattgccaggctgatatggttgcagctgggacatccacccgtactctccttacgatcaatgctcacacgtattcggagtgacttctccggaccagatggtaccattagtgccgacgtgaggacgacagtgtgtagggtccaacgcatcatgtgaaggccaggaatcacggagatgatccacgttgggcggcgaagagctgtgcgctgtaatcatgtgagggacaggaacatgcagtgatgtgacgccgagggtccatgtccgcaaagagggcagctggctttcattgaccacagcgctctttgcagtgcaggtcgcctggcctcccgtgagtcgccggaggcgcccagtagtcgcgcggatcttgtgctgggttcagcccaaggagcaggagattcgtgccccttgcagaagtctagcgggagctcttttctgccctcggccgctaacttggggagtcggcaccgcgccttgctttgcccctgctggccttgcgttgcaccatctgggggaccgctattgtcgcaagagttttaacctagtgggtggcacgcctttaacacgcagacagcttgggtacgtctgggcgtcgccccggtaggaaattgaacccctacacgtccgtggatctcgagcgcttttacaagggttaactcttagcccaaaccttaacgagacccagtccttgctctacgagagtggcataaacaactctctgggactagggcacgtaggaagggtcgagtaggtggcgaagggcgttgcacttcaacaagcacttttgcccatcaccagagaaggagtagcgccgacggcaccaagggcagcgaggaagccttaagagccttggtctagaagatccattttgtcctacgacttcaacttttatttccacgcgcgttgaattgcccttggtgaaggggggcttggcgtacaattacacagatgcccagtgctagtgtgccagcacttaaagtagggggcccgcaaagttcctcatcaaagaggacccgtgcagaaaggttgcctcttcacttggttcatcggttgaagggactccctttcttgacattgcggttcgggcatttcctcggggaaggccgtcgtccgggcagggttggttgtggcaggcgtggtcctcggttgttggcgagaaggtttagggttggggcccccgacttttgttgtcgccggttatgggctttgggcccaagtgtcttgattgcaattcggaggctcggcgttaccagcccactggttggtcccctttggcacctgtgtggactctttgttaggcagagagggcgaatttaagcagcgcattttccttcctatcttgatgcgaatggtcacccattgcgcaagttgggactgtgtctttggcgttgtagatccgagccaaatgtgctgaagcgccgcgatttgtttggggctctagttaggttatggttgggccacaccaagcatccggtgggcccccgcattttgtatcagatgtaaaccagccagtgattatgagancgtatntgaatatccgattgagagagcatgtgtctgtcatcacagaactgagaccacaagaagacgctctcgatggcgattatggcggagcacttgtatgan

SEQ ID NO: 672874 - DNA, 399 bp, Homo sapiens
atgtctcagtatctcacatgcattggaattcctgactatctcatccctaagttccctaccacttttttcacccttgtcagtattattttttgagacaagagtctcactctgtcacccaggctacagtgcagtggtgcaatctcagctcaccacaacctctgcctcctggtttcaagcgattctcacgcctcagcctccagagtatctgggactacaggtgtgcacctccacacacagctaatttttggatttctgttttttttttttagtagagatgcggttttgccatgttggccaggctggtctcgaactcctggcctcaagtgatctgcctgcctcagcctctaaaattgctgggatcataggcgtgagccactgcacctggccacagtatcttct

SEQ ID NO: 672875 - DNA, 199 bp, Homo sapiens
tacacgcgcaagtcagcacatgacgactcggacaacgactacaacagcgagcatgttggcgttgctggcgatgtataggtatgttgcgcagcggcgagatgatcatgtcggtgattacgtcatagaacagcttcacgtcgaccattccgccccagctcggcaaagaaaccgttgtagcctagttcgcgcgagcgcatca

SEQ ID NO: 672876 - DNA, 334 bp, Homo sapiens
ttgtaactttctggttaatctattctaaaattgagagtttatttaaattttggctgggcatggtggctcacgctggtaatcccagcactttgggaggccgaggtggtcgaatcacctgaggtcaggagttcgagaccagcctgaccaatatggtggaaccctgtctctactaaaaatacaaaaaatcagccaggcatggtggcttgcgcctgtagtcccagctactcgggaggctgtgacacaagaattgcttgaacccaggaggcggaggttgtagtgagccgagatcacgtcactgtactccagcctgggtgacagagcaaaactccgtctc

SEQ ID NO: 672877 - DNA, 411 bp, Homo sapiens
agaaatactgcattaaggtaaacttgagtactatttatggcacatatgcgtacaccaatggttatttctcacagatttcatgcgcatttgtgtattgtttactgtgattaggctctatgaatacaaccattatgctggtcacaattacgaatgctaatatttggtgaagctatgcagataatattttaaaatagtaaaagttagagtgctagtcttctgttgttgatgaatttttggagttttaaacaaattatggctgggcccagtggatcgcaccttttaattccccggccactttgggaggctgagatgtgagaattgcttgagcccaggagtttgagaccggcctgggcaaaacggtgagaacccaaattcacgcaattttttttttaataatttggcagaaatggt

SEQ ID NO: 672878 - DNA, 347 bp, Homo sapiens
tcctacccccaccctcccagggcacccctccccttgttttttttaccataagctacagtctggccgggtttggtggctcacacctgtaattccagcactttgggaaaccgaggcgggaggatcacttgagaccaggagttcaagaccagcctggcccacatggtgaaaccctgtctttactaggaatacaaaaattagccgggcatggtggtgtgcagctgtagtcccagctactggggagtttgaggcagaacaatcgcttgaaccggggaggcggaggttgcagtgagctgagatcgcgcccctgcactccagcctgagcgacagagtgagactctgtctcaaga

SEQ ID NO: 672879 - DNA, 208 bp, Homo sapiens
ttcgtctactagtccacaaccctgtcctagactcttcaagacactgctcgttacaattttactgggtctctatttaccctcctacaagcctcagagtacttcgagtctcccttcacattccgagagtctgacagctcaacattttttgtagcctcaggcttccacggacttacgtctttatggctccctttcctcactattacgcttt

SEQ ID NO: 672880 - DNA, 859 bp, Homo sapiens
ggctgagcgtgtgggctcatgcttgtaatcccagcacttgggcaggccgagaggaggtggatcacgaggtcaggagatcgatgaccatcctggctaccagttgaaaccccatctctactacaaagaaattagccgggcgtggtgctgggcacctgtctagtcccagctactcgggaggctgaggctggagaatggtgtcgacctgggaggtcatgagctagggtgagccagtgatcagccagtgcactccagcctgtggcaaagagcaggactctgtctcagcatacctaatagggtccattatgaactgagtattcctagaaattcaagttgtctaaggctgtaatagcttacgggtagttagtctacgatacgagtactttcttccctgataagtagtatcatcggagcccttaggtatagggagatgaggacgaagtttaactacgtgtactgtgggccgggcgtgtctggatcatgcctgtaatccgcagcactttgggaggccgaggggggcggatcacgaggtcgggagatcaagaagtatcctggtaacaaggtgagcccgccgtctgtactaatgattacttgcaataaacattagcaagagcggtggtgagcgaggcgcttgtagatcccagcatacctcgggagggctcagggacggacaatgtctgacccaagggaggcggaccttgcagtgacctgaatttgcacatggactcccagctgggcgaagagaagatccgttcacagaaaaaaggtttgcgggttcacagaccatcggcttcaaacttttaaagggcccgggtgggaaattcgcgacacactctttagagccacacgagaccctgctgca

SEQ ID NO: 672881 - DNA, 897 bp, Homo sapiens
taaatggaaaggggtcccttttgggttttcaaaaaaaatttccctggcctttttggaaaatctaccctaatttttcttgctacccaaaaatatccacggggggagagagggtccttttgtagaaacaaaatgtgtttccagttatgtaacccaagtgtttatctttggattggcaaaacgcagttggtgttctctgtataatgtatctggcaacaaatggtggtggtatattcctttcgtggccaaatcttatttggatctttgtgtttcacacacgcatctggtattggtggggatggagctgtgttacgaaccaatattatattattattaagggtgtttctctgtggttttaccccttttcagggactgtgatcgtgtggtatctctctcctgtttgtgtggtaaatttttcccccccgggtgtgtggggtgaataaacgtgtgtttgggccccagcatttccagcttactgtggtgtgtggcgccccaagatgtgttggcgttaaatatgtgcctcaatattttagaggcctatatattctgtggggtcccctttggcggaagtgcttcatacgcattttacacgctccctaagagggtggtttttctatttataaaacaaacagtggggtgggcgccccgtgttaagaggatttattattgagccaatcatactgagtataagacaattttggcgcgcacgttttttactcacccatataattttcgggttaacaacacaacaacagattcttttggcgttaacgtcccaatatttacactcccgggtgaaaaaacattttggcgaaatacgagacgccagtgcttccagggagaagtaaattacccgcggggagttgtttaccccctttgggtacgacacacaaaaaaggg

SEQ ID NO: 672882 - DNA, 553 bp, Homo sapiens
  misc_feature (523)..(523): n is a, c, g, or t
  misc_feature (533)..(533): n is a, c, g, or t
gggtcgatctaaggaccccttgggggctccattccagggggtataggctggaaaaatatcttagacttcagaacagaataccaatcaaatatggaaaattccttggtcaaaacacaaagatgttggttttaagggggagtttttttaaagttttctttttttaaaaaaaaaaagagaaagttaaggacaaagggcaaactcacacggccggaggcagggccgggtttctcttcctggaaggcctttaacagatgtcagctttcacgggcctccatgcacaacctcccattaccacccaatctggctgccacagcaaagtgcaggcacccggggcccccgggaggatgcgggcaggggctacagggcatccaggatgtggtcgatctgggtgaccagctccgggcgctttccggaagatgagttctcattctcaaggtacgtgtctttctggagctggccagccaccaggcgctcagcctccaccggcgatttcagcaccagttccttgacctgtgcatccagnttctgcattncggtcactctgtcgcaagat

SEQ ID NO: 672883 - DNA, 277 bp, Homo sapiens
ccgggggggcccgggcccccaaaaggggggggattttttttttaaaaatttaaatgggccccccccctcgggggggggttttttccccctcggaattttttttaaaggggggggggggggttttttttttgggggggggggttttttacccccttttttttttttttttgggggggggccccccccggttttttttggttggggggaaaaaaagccgggggggcccccccccggggttttttaaaaaaaaaaaaagccccttttggggggtggggga

SEQ ID NO: 672884 - DNA, 231 bp, Homo sapiens
gctcgaaggggcggaacctcctctggaaatgaacacttggggttgattcctcgtgccagatcattattcctaaatattcaggctgggagtcctcatgcaagatgcatcagtttctaaacttctctcctatagaagcccctagtgaaccagctgcatttgccgcccacccctccgagcagtcacggtagtgactcaggagggcagcactgagtcccaatcgctacgcctgca

SEQ ID NO: 672885 - DNA, 387 bp, Homo sapiens
  misc_feature (248)..(248): n is a, c, g, or t
  misc_feature (262)..(262): n is a, c, g, or t
  misc_feature (293)..(293): n is a, c, g, or t
  misc_feature (296)..(296): n is a, c, g, or t
  misc_feature (319)..(319): n is a, c, g, or t
  misc_feature (348)..(348): n is a, c, g, or t
  misc_feature (352)..(352): n is a, c, g, or t
  misc_feature (367)..(367): n is a, c, g, or t
tttgtatttttagtagagacgggggtttctccatgttggtcaggctggtctcgaactcccaacctcaggtgatccacctgctttggcctcccagagtgctggaattacaggcgtgagcctctgcgcccggtgtgcacctttgttcttaactgtagaatggggaaaccagtgatctcaagttgggttctccaggatgtggactctgaaatgggctgtgtacagaagatttattcagagtgacaccagtnaaaagtaaagggcngaagcagatggagatgtgggtctgacagtcnccnccaccagtgaaaagtaaagggcngaagcagatggagatgtgggtctgacagncgcngccaccagtgaaaanaaagggcggccgttgggtac

SEQ ID NO: 672886 - DNA, 178 bp, Homo sapiens
  misc_feature (62)..(62): n is a, c, g, or t
  misc_feature (83)..(84): n is a, c, g, or t
  misc_feature (91)..(91): n is a, c, g, or t
  misc_feature (98)..(98): n is a, c, g, or t
gcccctctaggggcaccgacattaactcggaggaagaatcggtttaaattaaacttaagacncttatccaaattaagttgggnngggccgnccccccncgccgggctcgtgttttttataagtcccctggaataatctgacgagcgcagcgagtagttagcgaggaagcggcgcatac

SEQ ID NO: 672887 - DNA, 195 bp, Homo sapiens
  misc_feature (56)..(56): n is a, c, g, or t
  misc_feature (70)..(70): n is a, c, g, or t
  misc_feature (101)..(101): n is a, c, g, or t
  misc_feature (104)..(104): n is a, c, g, or t
  misc_feature (127)..(127): n is a, c, g, or t
  misc_feature (156)..(156): n is a, c, g, or t
  misc_feature (160)..(160): n is a, c, g, or t
  misc_feature (175)..(175): n is a, c, g, or t
taaaagtaagggcagaagcagattgagatgtgtgtctgatatagttgccagcagtnaaaagtaaagggcngaagcagatggagatgtgggtctgacagtcnccnccaccagtgaaaagtaaagggcngaagcagatggagatgtgggtctgacagncgcngccaccagtgaaaanaaagggcggccgttgggtac

SEQ ID NO: 672888 - DNA, 822 bp, Homo sapiens
agcgaaagcctaagtttggggcccccatcgtgttagtaattggcctgccttgtgttcccccctgcgtgctgaggccagtttttgcttgcttggggcccccgagggcgaccctggtgaattgcgttcttccctcccaggcagtgttgaggacccaccctgtgtatgtcgccaccaagacggggggcccccactgggtcggctcccacgccacgggcacaaagagaaatttgtgggcttttgtgcccacccgagcaactactaatgcgggttgcttgggcgccgcaaaaaaagtagcggcctacattgtatgccgggcccacccccctgacaaggggactacgtgcgtatattgctccaccaggtctacaagggtgacaagcctttctggtccgtcgctacagccccttctcaagcgaagcattcttttggggacttgtcggggcgtcgagggcgggccacaccacggtgtcgtctccagtgaaaagatgttgagaaggccccttgttattaatttgtttaaatgttgttcgcccctagatgttgaacccacaaaagaccacttgttttgtttggccgcgtgccaaacacaacaacctaggttccttgacctactctattgccactaggcatttcgcggcagaaggcggccagaagtaccaaacaagttatctacgtaatccccctgcaacagttagcagaatctcgtagtcggttgtgtaagaagatcctcggcgggtaaatcatcggctccgcggtcctcccacacacgtccggggaaatggggcccccctgatgcaaaaagcggcaacaaaaaacaaaaca

SEQ ID NO: 672889 - DNA, 487 bp, Homo sapiens
tgagacggggtctcgctctgtcgcctaggctggagtgcagtgttgtgatcttggctcactgcaacctccacctcccaggttcaagcaattcccatgcctcagccacccgagtagctgaggaccatcgttgcaacgatggtcctcagctttcccaagcagctgggactacaggcatgcgccaccacatccagctagtttttgtatttttgtagagacggggtttcgctatgttggccaggctggtctcaaactcctgacctcgtgatccacccaccttggcctcccaaagtgctgggattactggcgtgagccaccactcctagccttaatgcatattcttaaatatacaaaggtagatttgttatgaaaattgctttggggctctaataacctaccttttaagaatgagaaactgctgggcttaagggagtacagtatgaatcaagatttgaccattcaaatgtggttgtgatttctgaatatatca

SEQ ID NO: 672890 - DNA, 226 bp, Homo sapiens
tcggtctgaactactcagctccctaaggccccacctcttcatattgtcaccttgtggaattgaggatggcaaacatgaattttgggacacataacaatactctgaccacaggactctgtcagaccacaggggaataaaacggggaatcaagtccaaatggaatcttcgaaaccatgctaatacatggaattttattaacctgcgcctgaatgagccggtgagtcca

SEQ ID NO: 672891 - DNA, 350 bp, Homo sapiens
aggggtgggagacgtgtgagggtgaactttcccctgcgagattctggtgaaagggtttaatatgcttcgagtcagtaaagctgcgcacgtgcacagtcaaggagagaggtttgggaagaaaggaggcttcagttaatgtgagaacattggaagtgaactattcagccgcgaacagggcccttttttcatcttccactggatggcctgccctttagccataatgcctataaggagcgtttgaagactagttttacctcaagggcctgattaagctacagtttaaggggagaagcagggaatcctgaattaatggttgaataagggttggggcctaatatttaaccttctag

SEQ ID NO: 672892 - DNA, 948 bp, Homo sapiens
  misc_feature (4)..(5): n is a, c, g, or t
  misc_feature (628)..(628): n is a, c, g, or t
  misc_feature (841)..(841): n is a, c, g, or t
tttnncgaggcggagaggccgcctcatcttctctctattcccgcttgtgcgcgccgggcgctgtggcctcgcgggcgattagtgggagacaagcgactagtgtgatagcatcctgcttcccggtcaaagacaactgggcacagaactctgcattaccacccgttaaaagaaaagttttttgttgggggggtgcccaccaagcggcccgcaaccgccagaattgagaagcccggccagagcttgtacgcgagatgccgcccgttccagacaggaaatagaaccagccgtacagacaaactcccggcacgagacagacaacaagaccacgtaggttcggctacatggcgtcaaagggcgccaaaacggcagcgcctgtctctagctctaatcgcgattcaatgcgcgcctttaaaaaccacgaggtgacgggccatgcgcaaggtcagagggtatggaccgcgccaataaaccacgcgaacaagtatccgatttcggcctaaattcggccaaaaatacgcgctaaaacctaataagagcaggaagaatgtgtgcctggcgaacaagtaacaccggcacagtacaagcgtcccgtccagtacagagaggggacgcgcccgctccacttganataactttcggaacaaatttaaaggcattcccagacgagcttggcaacgaaactacacagccacccccaagcctctagcggccacttcggttcagaggttagcactaaagcacctcttgtcacactctccaaggcgcacccctccgcacagacgccgcgcataaccctatgaactcgtacagtcaacgccacgcggaggcagcacaaaagagntgcaaacatactttgatcgccgcgaaataaagcggaagacgcatacaccgcaccactcatacttatctacagacaccacgtgaagcaacacaatagtgaaaccacag

SEQ ID NO: 672893 - DNA, 556 bp, Homo sapiens
  misc_feature (9)..(9): n is a, c, g, or t
  misc_feature (40)..(40): n is a, c, g, or t
cccaagaancaagaatagtatgcatgtttgggttcagaanaagatggtttgacttagaagtttaccattagaaataaaattattcctttacaaaaaaagaaatacttaaaagaatatgttggttttcaaaacagatatagtgatttttgcttagttgcttatacatcttgaaaccaaaactggagttcagctatttattgtgttcattttagcataagcattacaaagtccttctctagttaatcaggttcacactttgcaactaagaaaatagaagtgggccaggcacggtggctcacgcctgtaatcctagcactttgggaggccgaggcaggcggatcatgaggtcggaagatcgagaccatcctggctaacacctcatctctactaaaaatacaaaaaattagccgggcatggtggcaggcgcctatagtcccagctactcaggaggccgaggcaggagaattgcttgaacctgggaggcagaggttgcagtgagccgagatcgtgccactgcgctccagcctgggtggcagagagagactctgtctcaaac

SEQ ID NO: 672894 - DNA, 180 bp, Homo sapiens
tggcttctcccaccatcactgtggcgatgcctggtgtccctgcctttctccaaggcatgactgacttcttgcaggcaacacagacagcccctccaccaccgactcctccaccccaaaatgacccagagaagtgtataagcaggaaagggacacgggtgacgcctcctccctctccccctt

SEQ ID NO: 672895 - DNA, 1395 bp, Homo sapiens
cggacgcgtgggttttttttcgaggtcggagtttcgctgttgttgcccaggctggagtgcagtggctcaatctccactcactgcaacctccgcctcctgggttcaggctattcccctgcctcagcctcccgagtagctgggattacaggcatgtgccaccatgcaaggttggttttgttttgtttttttttttttataactttggcgacggagttttcgctcgtgtcgcccaggcgtggagtgtaggtggcgagactctggggtcacgtggagtgctcagcctccgtgggattcacaccacttcttctgcctcagcctccgtgagaatagcgtgggacctacagcgtgccgtgcatacccaccgtcgtggctacatttgggtgtgtgtgctgtgtgtgtgtgctgctgtgtagtggtgatgtggtcggcttacttattttatttttttccaaacaagaaagagcggggttttcacccgcggctaaccccagagagggccacacacgactccccgcggaccacgccggcagaacaccaccccctacaagaggcgccacaccacaaaaggagcgcggccatcactcgggcgcgagaaccaacgcgcggcccccgagcaagagggcggcgactcacacacgaaacgcggctggggcgccaacctacacaagcaacagcgagcaagaagacacagcaccagcaaagaactaaacagagagggaaacaaccccacaaacgcacaaaccaccccgccgcacacacccactcccacggacgtcgggccacgccccgttgaggcgatagagacacaccggcgtgactactaagacaagtgggcgacccccgaaacactagtggagaccaccaaccactcgcacgcccctcttttctatctcgcttgtggccggaaacagaagacgacgcaacatccgacgcaacgagactaacacaacaccccgcccacccccctaccccccccccccccgcccccgcgcagcccaccaacgcctactccatcataaactatccgaccctcacctaccccacccctcatcccccctcaccaactcacacaataataacacacaacacaaactccaccaccccacccccgtcacaccaccatcacatatcacgacgacaagtaaggacacgcagatcacgacatcgacgccaagcacgctccacccatcatcggctaccaccccacggagggaggccctatcagtgcttggcgcggtccgaccagcggcggacgccagccgaacgctcccagcacgccgcagcgcgcgagggggagggggctcagcgcctcttgccgtccgagccgcgccgcccgtcgcgcccgccgcgctgcagctgcgccgcgcgccaaccccccgccgcacccccccgccc

SEQ ID NO: 672896 - DNA, 680 bp, Homo sapiens
agaactgctgtcagtgtgctggtagccctctattcatccctcctcagagacccagcttccagaactgctatcactgtgctggtagccctctgtattcatccctcttcagagctcagcttctggttgtattctccatgagtttaataatgacatgaaaaaatgtggaagccgagagagtaaaatactctgccctgtaaaaacatggaagacatgcaaacagaaaaaaaataattgtattgttttagataatacttaagacaactgtgaaacaacaaaaacacaactattcctttgtgaccgatgaagataaaaagaaattctggtaaagacgggtatgcagttttttaaaatgggttaagaaattgttgcagaagaatttctaacatctgaaaatggttttatgtttaagaaggatggtctgaattgtgtactaatagcaaggtataagtttggtgtagagcctatccagtagcgtccactgtaccacttttaagtaagactcagtccacagaagctggaagattgccttcgctttaaatatcctttaccttctgcatttgacactcctcctgttactacatagattccggtccccagaagcaattttacactggtactagagcttaccagccccatttagtaatttttaatggctagatgaggtttaacaagaatatgaa

SEQ ID NO: 672897 - DNA, 197 bp, Homo sapiens
cttgagtatgactagcttacagctatagctttgatagaatagatagcactttacggactccacttatgattccctttaagcgcatgtggaagcccccatcgctgggtcaatagtacttgccgcagtactcttaaaactaggcggctatggtataatacgcctcacactcattctcaaccccctttggccttatcgag

SEQ ID NO: 672898 - DNA, 501 bp, Homo sapiens
gctcggtaccccacaccacctgagtcagcaacccaaccacctcattagcaaaccaaccacttttatctgcaacccaaccactttcatcagcaacaaaaacacaactattcctttgtgaccgatgaagataaaaagaaattctggtaaagacgggtatgcagttttttaaaatgggttaagaaattgttgcagaagaatttctaacatctgaaaatggttttatgtttaagaaggatggtctgaattgtgtactaatagcaaggtataagtttggtgtagagcctatccagtagcgtccactgtaccacttttaagtaagactcagtccacagaagctggaagattgccttcgctttaaatatcctttaccttctgcatttgacactcctcctgttactacatagattccggtccccagaagcaattttacactggtactagagcttaccagccccatttagtaatttttaatggctagatgaggtttaacaagaatatgaa

SEQ ID NO: 672899 - DNA, 320 bp, Homo sapiens
tttgttccgtggtggcacacaaatcttggcttgctgtaccatcattggcaaacctcatcatatcacagttgggtgtgtttgtatgtgtgtgagcactagtgtgtgtgtgtacatattcgtgtgtatgcacactttgtgtacctgctgtacatgtgattgtagatgtacctgttgtgcgtaaacctttgtaaaatgaaatttgctttccacttaatgcgctcctttgcagctctgcaatatttatcttaaggtctttactccttggctccaatgtctcccctacgtgttctccccattttcatgctatcttactagtccgt

SEQ ID NO: 672900 - DNA, 424 bp, Homo sapiens
ggactgtcggggccgtgctcgggcggcgcgggtctgcgctggggccatggctccgccgcgccgttcgtcctggagcttcccgactgcaccctggactcacttcgccctagtgcggccgagcccccggggacgcagagcccccgacacccccgctggcggaggctgctggggagccacacgggagcagcaaaatacctcagctgtgaggtgccaggttgatcccggaacgggcggtgcttgagaggggccttgggtacaggaggatggaggtgggttgcacacaaagagacatgatgacaacccaaggtttgcgcaaagcggaccatttcacagtgcggtagccaagcatgcgacccagggcttgctcgtcgaaaattgcccggtcgggaacaggagagagggggcacaggaaggattccctgtg

SEQ ID NO: 672901 - DNA, 117 bp, Homo sapiens
atgaggtcccggcggagaactggatatagctttctaggcctgctcagccaaggcgcggttgtgtcgaagtccgtccatcgaaaagagtacgctgccctcattgaggcgtatctgcct

SEQ ID NO: 672902 - DNA, 769 bp, Homo sapiens
tggaaatggagtctcgctctgttgcccaggtggagtgcaggggtgcgatctcagctcatgatcctctgcctcccgggttcaagcaattctctgcctcagcctcccaagtagtggggattacaggcacctgccaccatgccgggctaatttttggtattttaagtagagacaggggtttcactatgtgggctaggctggtcttgaactcctgacctcgtgatccacccgcctgggcctcccaaagtgctgggatcacaggcatgagccaccgacctggccttccctgttcctctctagaatccaattagggatgttggtactactcatatggattaaaacagttaacaaacttttttcttttcaaaggtgagatcaggaactcgggtttaaggataatctggaaacagggtcctggggagtcaataacatgggtcccattctgtaaagcacattcggttaggaatcacttatctcaaatggtaactcgggggctactatattgagatggtgaaaaaataccaatcgtgtggtttaactaaggtgagtgccaaaatattgggtttagtgtatataaacaggtctttaaaaaccttggagaacttttgtaactctatggtgaggggagatcctgcaattttacagataaatttttcgaaaaacaaaacaaaggggggcataaatcctgggacaagtatcatacagttttgaaagggccaaagggatgataaacagcggggtaaagtggggaaacagatgattgagaaccttg

SEQ ID NO: 672903 - DNA, 342 bp, Homo sapiens
ggaggccccaggaaaggaatagcaccattgacattcacacccagatcgaaaacatgatcatcaccaaggccaagaacgggcacctggactatgatcgccccacggctgaattctcggtgcataaggcgcccactggaccctcccaacgcccaatgctttgcattttctcctcctccccttcccagttaccaaagactcgaaattcacagaacagggacccagggacaccccgaagcccacctgaaatctcacaaatactgaacatccctctcttgagggagcagaaaagggccaagagctaccccaaggaatgaggcaggccgagccacagaaataggaaag

SEQ ID NO: 672904 - DNA, 175 bp, Homo sapiens
aattgttactcgaccataggaccaagaattatggttttgtgtagagtataaaaacgtgtgtattgctgtgtaatattactagcaaattctagtagatttggttccatgggtctataaaagtgggtggacgttaatgctattgcagcttctaaaactagggggtaccgggcgtcga

SEQ ID NO: 672905 - DNA, 118 bp, Homo sapiens
gccttccggcccgtgttctatccgccgcctccaccttccactccggcgccggctttcgcgcgcgacggctcgccgcgcttccactcgctcgcgcggcccttcgggcgcccgagcccgc

SEQ ID NO: 672906 - DNA, 774 bp, Homo sapiens
  misc_feature (595)..(595): n is a, c, g, or t
  misc_feature (680)..(680): n is a, c, g, or t
  misc_feature (721)..(721): n is a, c, g, or t
  misc_feature (724)..(724): n is a, c, g, or t
  misc_feature (733)..(733): n is a, c, g, or t
  misc_feature (736)..(736): n is a, c, g, or t
  misc_feature (744)..(744): n is a, c, g, or t
  misc_feature (747)..(747): n is a, c, g, or t
gagcggaacgggcccggcgcgggagggagcgaagcagcgcgggcagcgagcgagatgcagcaccgaggcttcctcctcctcaccctcctcgccctgctggcgctcacctccgcggtcgccaaaaagaaagataaggtgaagaagggcggcccggggagcgagtgcgctgagtgggcctgggggccctgcacccccagcagcaaggattgcggcgtgggtttccgcgagggcacctgcggggcccagacccagcgcatccggtgcagggtgccctgcaactggaagaaggagtttggagccgactgcaagtacaagtttgagaactggggtgcgtgtgatgggggcacaggcaccaaagtccgccaaggcaccctgaagaaggcgcgctacaatgctcagtgccaggagaccatccgcgtcaccaagccctgcacccccaagaccaaagcaaaggccaaagccaagaaagggaagggaaaggactagacgccaagcctggatgccaaggagcccctggtgtcacatggggcctggcccacgccctccctctcccaggcccgagatgtgacccaccagtgccttctgtctgctcgtnagctttaatcaatcatgccctgccttgtcctcatcactccccagccccaccccttagtgcccaaagtggggagggacaagggatnctgggaagcttgagctccccaaagcatgtgatccaagccgnttngtcttcccnaantccattantangaacacatcaaataactgactttcccc

SEQ ID NO: 672907 - DNA, 382 bp, Homo sapiens
acctgccaagaagattccttctaactgaaggtgcagttgaattcagtgggttcagaaccaagatgccaacatcggtgtggactacaggacaaggggcattgttgcttgttgggtaaaaatgaagcagaagccccaaagttcacattaactcaggcatttcatttatttctacaggacaaggggcattgttgcttgttgggtaaaaatgaagcagaagccccaaagttcacattaactcaggcatttcatttattttttccttttcttcttggctggttctttgttctgtcccccatgctctgatgcagtgccctagaaggggaaagaattaatgctctaacgtgataaacctgctccaaggcagtggaaataaaaagaagga

SEQ ID NO: 672908 - DNA, 135 bp, Homo sapiens
ggtcaaacaccttcaggtagcgcaccttgaggccagaatgcgccaatggcacctcaaagttcatggaactggggggtcgatcccatttcttcttttcgttagtatgccgaagctcaatctctgcgctgatctgcg

SEQ ID NO: 672909 - DNA, 381 bp, Homo sapiens
gacattcaggccggaccatggctaagcatgagcaaatgtaacagaaacctcccacactgtcgttgaaaccgacacaacctggctcaggccccgcctcagcggaatgcaaaagggtcgtgacgccagtgtacaaatggcccgctgctgtctggaaatcgtctacaaaagcggcctcgcgcccttcttgaacaacccttaaaaaccgtagccctataggtaagacgcgacatttaattataagatcgcgccttcccctatttcgtcgccccgtgcggctttcgccgcaggtctcgcccgttgtcacaagaaacaaggctttgagtatctgcggtctgttgcaaaaaggtagttaatgatgagcgcaaggcactttctctccct

SEQ ID NO: 672910 - DNA, 715 bp, Homo sapiens
cccctcccccaccaccatagtctagtacgaggctggctgtagaatcggccgagggtccttccgcaggaagctaaggctgcgttggggtgagtgccctcacttcatcctggcgactagcacctgctgtcctggcagcgccagccctacactcgcccgcgccatggcctctgtctccgagctcgcctgcatctactcgtgccctcattctgcacgactgatgaggtgacatgtcactggaggataagatcaatgccctcattaaagcagcctggtgtaaatgtttgagccttttttggcctggcttgttttgcaaatggccctggccaacgtcaacattgggatgcctcatctgcaatgtaggggcctggtggacctgctaccagcagctggtgctgcaccagcagtgatggtcctgccccctccactgctgctgctccagctgaggacgaagaaagtggaagcaaagaaatgaagaatcctgaggagtctgactgatgacatgggctatcgggtcatttcttgagcctaaaagcctcctttcttataacatgttcaatacaaagctggacacttttaagcacaccacacacacaaacaccacgagggcactcaacgagctgaggcgttgcgggaccacaatgcacgtgccacctgaaacggtggcccagtggcccatatccgtgtgttccctgtggacccagcttcctggccccag

SEQ ID NO: 672911 - DNA, 459 bp, Homo sapiens
gctggtccgcttttttttttttctatcgctttttttttttgtaccaattcaagtgttttctctttctccccatagaagtgtgtctatatatatgccgtgttaacctctctttttatctgatgaggaaaaacatatgatctgaggggctaagtgctgtagcctagtgccaggacttctggcccaattcagggttctccccaagcccatgtatcatccccttttctcacaatcggtacttcgacctctgaccctcaccaccacccaaagtacttgtaattctagaaaagaaacccagctgcacactggcacacctgaccttcatgcagtcagaagctttggatgattccccatccaaaatattagagatgaaatgaaagcaaagtaggcatctgacaaaagttgctttttcccttctgcattttaggacctcaagtaatgtttatccagaaaacggcatca

SEQ ID NO: 672912 - DNA, 716 bp, Homo sapiens
gtaggttaacacataatgaatgatgaagcactgctcgtcgaaaacatgccgcttgaacaaccatcgtgcgagcatacgtcatcgctgctactactagtgacataccaataaagagtgaagcaggcggatacttgtcatagcacttagcaggagaacagactcggtcactgatatatttcactatacactctggtagatctgtctcggatacctggacaccctgtattttatgtttaggatgtttggccacatatagctactgttgcgtttcaaatagacgcctagcatgttatattacataccatgcaggtcacgagaatgacaggcgcggctgtgtgcaaagtctcttacctgcacactcagaactctcagaggccaacaaacgtttaatcctgtggtcaccagttgaagaccatcctaccctacaccgtgtcactatatgtgcgaacagaatacatgctcctacctatgtgcagagttcaacgagccgacgttgtaccagtgcattctccatactgtcttacagagtatgaccctgtctcaagatatgaagatagacagactgtgtgtcatcacgtgcactgtcccaatggattatagctagacacaggggggatttatgcgcttatttgaagagatataactatctatagccactatatcgctgtgtacccaccaagcgtgcgagcgcgatgtgaacattgtaccttggctcc

SEQ ID NO: 672913 - DNA, 1003 bp, Homo sapiens
gccgggcgctggtggcgcgtgcctgtaatcccagcaatttgggaggccgaggcgggtggatcacaggatcaggaggtggagaccatcctggctaacacggtgaaatcccgtctttactaaaaatacgaaaggttggccgggtgtggtggcacgtgcctatattcccatcccagctacccgggaggctgaggcaggaggatcgcttgaacctgggaggcggaggttgcagtgacctgagatcgcaccactgcactccagcctgggcggcagagcgagactccgtctcaaaaattaaattaaaataaaaaaacataaataaaataaaataaaaataaacatagtggcaaaagtagaactctaaatttggaatgcagtaccaatacactatgagaaatagtctagcaatggtggagcgtggtcttaataagacataaacgtcttcaaaaaattctatcaataagctcccaagttaaggcagtcaaaggcaatgacttacaggtcggatgtgatgctcaagactccattaggtaagggactatactggggggctggtcggtcaggggcctctggaggatctcctgatgttggccagactactgggacctcatcttacccatttagcaatccataaagcacaaatctaatcttgggcaagggggccatgacaattaggccaaggggccagaaccccaaggaaccgggggataggcaacaagagccacatccccaaaaacagtaagacacaacggcgcgacggtgccaaggcacaacagagaacggcacacaaagaacagataaacgtaaacaatacagaagcaccaacaaaaccacacgacgcaacaaaccaacagcaagaccgagcgcaacgccagcaaaaaaaagacgtaaagagggccagaggtaaacacacacacagcagagacgcacccaaacaacacaacgagccaaaacaagaaacatacaaaagaaccagagacaagaaaaaaaaaaaacagaagccacc

SEQ ID NO: 672914 - DNA, 365 bp, Homo sapiens
atagagacatgttataacagtagtaaccatgttgtatgatagatcgtgctgaaattattacctatgtagactagagattttgtatccttggatggacatcctcccagcttgggttattagtccagtctcacattgctctaaagaactacctgagactgggtaatttatgaagaagacaggtttaattgacccacagttctgcagactgtacaggaggcatgccaggggagccctcaggaaacagcagatcatgtggaaaggcgaagggggagcaagcatatcaacacatagcaagcaggggagagacagagaacaagggggaggtgctacacactttcaaacaatcagatctcataagaactgta

SEQ ID NO: 672915 - DNA, 973 bp, Homo sapiens
ccaacgtccaaagtatctcagtcaagcaagccgagctaatcagccacccaacaagtgacgtaactcaagactaagcctcagaaacaacatgagtaagcgcagtaccacaacacctaaacggacgaaccctgcatcatcttatcactcagtatcacttaactcattcttctattgccacagactaaccctcactcggcacgtcctgaccgtcagctcactttacagccaacgcagcccaagctactctactaaaccctacgccatgggccagtaccccattatcgacgcgaggcgcagtgactcataccggctatcacgacatcctacagatggaaacaagtgcacctagacccacacttcgtctacccacaaggacaccaccctacacgcccgtgtatccccagtacctagcctagcttatcgcaaacccatcgagcgctacctcagttcaacgcaagtagcaccgtggcccgcacgacctacaccgctaacatcactgccaggcccacctacatcatgcccacctactcgcacagcgccagcctagcaaccatcaaccatccacacctaccctctcaccactactcaccctcacacagcaccccacagactacgtgactactcctacacacccgccgccgccctcaaaccccaagccccacgctaccacaacaccacccagataacgcccccagcacgcccgcaccacccccaacaaaccaacacagacaaccccacccaagcacaaccacacgcacgcgcgctagaccgcccacacaaaacagacccggacgaccaacccgcaacgacacagacgaacacaagcagcacgacaaaaaacacgcaatcagacgcgaacaacgagcaccccaccagaaccgcacgccacagaaaccacacacataacgccgcgcgcaaacgagcgaccagcacacacaaggagcaaacaaccaaccgcggacaatccagcaca

SEQ ID NO: 672916 - DNA, 494 bp, Homo sapiens
gacataatacacatatttacagccaactgtattttcaagtaaaggtaccaaaaacattcagtgctggggaaaagacagtctcttcaataatatgatgtttggaaaaccaagtatctgtaagcagaaaaatgaaactagacccttatctctcaatatattcaaaaatcaaatccaaatggattaaagactttctaatacctcaaatcatgaaattactagaagaaaccactgtggaaatgcttaaagcgttggtctgagtaaagatttttttgtgtacgacatcaaaagtacaagcaacaaaagcaaaaatagataaatggggttatatcagctagaaagcttttgtacagcaaagaaaacaatcaacagagtgaagagacaacctacagtatgagagaaaatatctgtaaactatccatgggacaaaggattaataactagaatacagaagaaactcaaacaagttaatagcagaaaataatccaatttgaaaa

SEQ ID NO: 672917 - DNA, 102 bp, Homo sapiens
ttcactttctacatctgcggggtcatcacgcagccatggttgtgcctgccgttcatggtggtctttcatgttacttggcgatcattgtagtagagcttgaat

SEQ ID NO: 672918 - DNA, 1132 bp, Homo sapiens
ggccgctgccgccaggaactcaggcccggctcctgttccttcaagagtgctggaggccaaacttgaaatacaagtttaatgttcctcgtcggcgcaaaagataagtgatccgatctcccccggcccggtgtgcagcagtgagctgacacaaccacctgaccctgggttaaaactcccagtggactcttctgcttgctgccacctctatgttctctccccctgttcccacatcgtggtgtctaccctcatgtggcctggtgaggcacatgcgtgtccctgacttgcttgagggggctggatgtactgcatcctgcaggttcccagcggacttgggggcgcccagctagagccccggcgcccgcagaacgactatggtgttttgcctcctggcagcactcaaccctggagggcagaagagggcctaccaccatgatcactggtagtgttcagcatgcgcttgtggaccccagtgggcgtccttgacctcgctggcgtactgcctgcaccagacggcggtggccctggacgagctgcgagaggccgatggacagtgtccggtcgaccgcgaacctgcctgaagttgaaatggtgcaggtcagtgtatacgacgacgggagatcgacagtcctctcaagccgcatcccgctgggaggaagcaggtagagttggaacacaccagactcattagaaggtcccaaccaaaactcagtttgattaagacaagtcaacaaatctagctgttggtccgaaaaacactatttctccttacgaactctcaaatagcattgagacgcaaccccttgaaggggtgtgggcaactgatatggaatggagcagatagaaccaatgatgcgcattagacgcaacatgttatggactttggtggaagaaagagacactgaagcaaaagaaaagctaatgagtagagaagcgacatatggcgacagattcatatgaacacaagctcttaaagacaccaaacagggaagagaatatagtacataacggtacacaaagatacccatattactgaatagtgttgagagaacccacatataggtatgaaagagaatgataatatatcgcaaggggtgatgaaagagaggatacagaacgaataatgcaaagatga

SEQ ID NO: 672919 - DNA, 563 bp, Homo sapiens
  misc_feature (26)..(26): n is a, c, g, or t
  misc_feature (63)..(63): n is a, c, g, or t
  misc_feature (86)..(86): n is a, c, g, or t
  misc_feature (90)..(90): n is a, c, g, or t
  misc_feature (104)..(104): n is a, c, g, or t
  misc_feature (115)..(115): n is a, c, g, or t
  misc_feature (133)..(133): n is a, c, g, or t
  misc_feature (140)..(140): n is a, c, g, or t
  misc_feature (152)..(152): n is a, c, g, or t
  misc_feature (158)..(158): n is a, c, g, or t
  misc_feature (187)..(188): n is a, c, g, or t
  misc_feature (194)..(194): n is a, c, g, or t
  misc_feature (203)..(203): n is a, c, g, or t
  misc_feature (206)..(206): n is a, c, g, or t
  misc_feature (224)..(224): n is a, c, g, or t
  misc_feature (233)..(233): n is a, c, g, or t
  misc_feature (235)..(235): n is a, c, g, or t
  misc_feature (255)..(255): n is a, c, g, or t
  misc_feature (270)..(270): n is a, c, g, or t
  misc_feature (279)..(279): n is a, c, g, or t
  misc_feature (284)..(284): n is a, c, g, or t
  misc_feature (291)..(291): n is a, c, g, or t
  misc_feature (299)..(299): n is a, c, g, or t
  misc_feature (305)..(305): n is a, c, g, or t
  misc_feature (310)..(310): n is a, c, g, or t
  misc_feature (332)..(332): n is a, c, g, or t
  misc_feature (372)..(372): n is a, c, g, or t
  misc_feature (377)..(377): n is a, c, g, or t
  misc_feature (425)..(425): n is a, c, g, or t
  misc_feature (453)..(453): n is a, c, g, or t
  misc_feature (474)..(474): n is a, c, g, or t
  misc_feature (562)..(562): n is a, c, g, or t
tgatgtaaatgaatttaatttgaganatgatggaaaaatattaaaggtaaaaatggaaaaganatgatcaccaagtgaaaaaaatntaancagaaagctttaangtctgtaagtnaagctgaagctgaaattntgggagnatgaaatgctgnagggcnaaaaggaatggataattagtattcctttnntttttnctaaccctntcnttaaaaagaatccaaacnaacctcctnanaatccttctaaaggggagcnatattttcacgggcntttgaaaantcgcnttcctcnatcccctnaaccangtaanagtgaaaaaagggacgcttggnataaataaggtaaaaattgtggtcaaggggagcccaggcntaagnaatgggtgtggtgttggtaagaatggaaaaaggtttttgtattttggnaaggttttaaaaagggaaaaaagtgggngggtggtagttgatggaaaanttgaagcaagtgggggaaaattaaaaaaatggatggtgggtttggttttgatggtggcaatggcagaattgaaatttttgggaaaaant

SEQ ID NO: 672920 - DNA, 399 bp, Homo sapiens
  misc_feature (46)..(46): n is a, c, g, or t
  misc_feature (285)..(285): n is a, c, g, or t
ggtggtgttggacggtgatgtagtagagatgaaagaaaagttcggnactttctttgctgttggatatctggagcctccaacatttagctgggatgaaagacagcaagacaattgtggcggggaatgagagacccagaagctccaattttccaagtggcagattacggaatagttgcagatttatttaaggtagttcctgaaatgactgagatattgaagaaaaaatgaatcaggatcatgccttaaaaagaaaacttttgttaaagtattccattgggggggganatatttgtgggtattataacaatcattggaaagcatggagagctacatttcatattttgagggaaaatttctaacagatgccagaatgcttggttatgggattgctgtgtttgc

SEQ ID NO: 672921 - DNA, 133 bp, Homo sapiens
tcgatgggatccttgctgtatcatcagaccctcccctgagcagactgtaggcacctcgatgtcagcaggttgcaagcatatccaccttgcgctgcacactgtctgcattgttcaggagcggaggctacttcat

SEQ ID NO: 672922 - DNA, 141 bp, Homo sapiens
aggaatggctgttccttggggcttcaggtctcctcagcacagaacagtgcctcttctcttccactggtctctgtttgtgatgctggtgaagagtatcctgggttaggagccacactggcgctgtgttcagaaccgtcactt

SEQ ID NO: 672923 - DNA, 424 bp, Homo sapiens
cagcatgcccagagaatctgtgccctccctaatctagtgcagtcccctgccttacacagtataggtggcagtcctgcgaggggaaaggactataaaagggcaattgatgtcacaggtctctctgtgagagcagaacagagtctggcatgacagttcgaagcctacggaagtatgtatgcaaaacatcaggacagagcagctcccagggggtcgatcttctcaaggttcagtctgttttctccagatcttgcttggtctgctgcctggcctcaggatgtttatcatagtgttctgtagtctgattccctcaaaccgagccggacgacatatttgggtatctatagtaccttctaagcttagtaggactgtctgtctctatcttgccctaaccagcttgtctttttcctcctttgtgcggctggat

SEQ ID NO: 672924 - DNA, 442 bp, Homo sapiens
gttgggttttgttgaaggctttgctggaaaagaatctgcttccaagttcactcagactgttggcagaatttgttcagacctccaggtctgagggcctgggatactgtctggctcaaggctggaagctactttcagttcttagaggctacctgtggtccttaaaggttactcataattccttgccatgtggaatttcccagtacagctgctgcttcctctagctagccaggggagtctctagagtgagtctattcccaagataaagtctcacgtaatgcatgtgtatataatggagtgtaatcataggtatgacatcccatcactgtgctatattcttttgattaggagcaagtcatgggtcctatccacactcaagatgtggaggactgcataaaagtgtggacactctaaagtggttcaccatagagtcaagggaaagata

SEQ ID NO: 672925 - DNA, 325 bp, Homo sapiens
gtatcacaataaggaagggtcccaggcttggggagagccccaagttgagaacaagtaatgaacaattgttgtactgaaccacttagttacgatgactcgcttatcataaacaacctgtgtgtaatatgttttcctcctacaaacgtagcacccttcagcaggaccctataaaactttcctccagcccttgcctctttgcaggtagccccttctctgctgagctgcccactgcaacatattttcacaatttctctaataaatctgcccttctttacctacaactatcttggtaaatggctttaccacctgcaaaactgaccctagg

SEQ ID NO: 672926 - DNA, 1063 bp, Homo sapiens
cagcccatggccctaacaggggcccatctcgagacctcctaatgacctccggcctagccatgtgatttcacttccactcacataacagctcctcatactaggcctactaaccaacacactaaccatataccaatgatggcgcgatgtaacacgagaaagcacataccaaggccaccagacaccagctgtccaaaaaggccttcgatacgggataatccgtatttattaccatcagaagtttaatcttcatgtcgcacggatattttctgagccttttaccaactccagacatagcccctacccaccgcaattaggagggcacatggtccccagagcaggcagtcacacccgctaaatccacctagagagtcgccacttcgtaagagcacatccgtattactcgcatcaggagtatcaatcacctgagcgtcaccatagtctagatagaataacaaccgaaaaccagaataggtcaagacactgcgtcaattacaagtgttactgggcactctatcttgacccatccgtacaaagcctcagcaggtacttcgacgtctccccttcaccatttccgagcggcatctacggctcaacatgatcttgtagccacaggcttcacacggacttcacgtccattatcgggctcaagtttactcactatctgctacatcccgcaactaatatatcacctaaacatcccaaagagtcaaaaatggaggcgacagccgccgacacgaatacggccacttgcaagacacggagccggccaaccacggcaggtctcccacgaatggacgagcgccctacccacacaccagacccccacacgaacaccacacgggcgccgccgaaacacactccccagagagcctcaaacacggccgacccaaagtcaggacaaagcggcacaccaaggaggtgcaaccacacagacgcagccgcaataaaaacacgggagcacacacagagagggacacccgacaccacaaccggggggaaaaggcgacccccgcgtcgcgcccgacaacagcgacgccacaacgccagccaaagcaaaaaacca

SEQ ID NO: 672927 - DNA, 109 bp, Homo sapiens
ctagatggatcccgctccgactggggtggggatggcaggcactggaactgtggcctgggtggctcttcggcttggccccttctagcccgtcgtgactggatggatgcgt

SEQ ID NO: 672928 - DNA, 650 bp, Homo sapiens
agctcccatgataatgttggttttgtgacccaagatgcgggtacttcggccaaggctgcaatcagtgattcagcgactcgctctttgagtccagatgttgatccagttcttgcttttcaacgagaaggatttggacgtcagagtatgtcagaaaaacgcacaaagcaattttcagatgccagtcaattggatttcgttcaaacacgaaaatcaaaaagcatggatttaggtatagctgacgagactaaactcaagacagtggatgaccagaaagcaggttctcccagcagatatgtgggtccttccatgggtctgaagaagtcaagctcgttggagagtgagcagacatcagtcgccaaggtgactttgtatggggatattcctttccatcgtccccgcccccggataatcaaaggcaggggatgcaatgacagctcctcagacaccagcgacaaatgatatgagatcccatcggtaattcacaataaccacggcctgagggcctgaccatcacactccgtgtcaagaacgcagcccgggctgtcgtctgtatgcccactgcagtaggcaaccctcccgctctgaagagaattttagagattcagaacgaaagccaggtgcccaccgcgatagtccagcccctcaccggg

SEQ ID NO: 672929 - DNA, 142 bp, Homo sapiens
ctcagctcacagtgttacagaccaagtatgtggaagccaaggtactgtctgaacgtgctgaacaagagcaacgaggggaaagaattactcgtcccactgacgagttctatgtatgtccctgggaagcaatggatgagtggaa

SEQ ID NO: 672930 - DNA, 284 bp, Homo sapiens
gtggtggaatatgtctgaataactaatcccagctttcgatagctcgtcgcctgttgaggccgctagttgtggatgcaccatagtatcagtctctcgcccctgtgcaatcccgtttccctctctcctactgtgtattgtgcccagagtgcttgccaataaaaacctcctgtatgtaactctcagagtcgcaggggctgtatccttggctatttgagctcgaagatacggaacttagctgcgtctcagtcacagtcctgagagccgtcagtgttagcaggcctctg

SEQ ID NO: 672931 - DNA, 170 bp, Homo sapiens
aacatcccgcttagacagagttgtgcaggataatgagggtggtacgcggtgagtaggccactgggcacgcggtccagcgcgttggttgtacacggtgcactgtgtgaaccgtattgagtccatgaaaaggccagtgagtggataccttgtaccagaatctggttgcttgt

SEQ ID NO: 672932 - DNA, 293 bp, Homo sapiens
caactcgagttttagtaaactacataaaaagacaacctaattattaaaaactgggcaaatgggctgaatagacatttctctcttttactttattactttctttcttttgagacagtcttactctgtcacccaggctggagtgcagtgagctatgatcataccagtgcactccagtgtgggccatagaatgaggccctatctctaaaaatcaatcaatcaattgtgctgggattacaggcgtgagccactgcacctgaccctgaaaagtatatcaatcaagaaggaacaatcag

SEQ ID NO: 672933 - DNA, 112 bp, Homo sapiens
gtgatgggatgacgccccgtgcgtactcaccatccatgtgtttggcccccactccacagctgttgcctcaccacctacctctttggccaggaccctcttcccagcccagtgt

SEQ ID NO: 672934 - DNA, 447 bp, Homo sapiens
  misc_feature (133)..(133): n is a, c, g, or t
ggggtttccgtctccccccccttgcgcgtgggggtttgtttgcccccaatcccggggtttttcaaattgtgtttccctccccccccctttcccaatgggcgggggggggggcgggggggggtgtttatacccnacctttttttgtgcccccccatttgcggggggacccccccccctggtttttgtcccccttaaaaaaccccggggccgctcccccccccggtttttttcctggggcggggggggggttctctttttcccccggggccccccttgccccttgggccctttttggggccccctttggcccggttttgcccaaaaacccgggggggcccggtccgggtttcccggggtttttttcccccccgggcccgtttcccccaaattttggggggggccgggggtttttgggggttccccccccaaagggggtttccctgggta

SEQ ID NO: 672935 - DNA, 416 bp, Homo sapiens
gaatctagacggggacggcagcattagcatcacctgggatagtggtagaataggttcttagtcccatccttgatcttctgtaactgcagaagtacacgtgcaggtttgttatacaggtaaacttgtgtcatgggggttgttgtacagattattttgtcacccaggtattaagcctagtacccatgagttattttttctggtcctctccctcctcccaccctccaccctctgatggagaccccagtgtctgtggttcccctctgtgtgtccatgtattctcatcatttagcccccactgatgagttagaacatgcggtatttggttttctgttcctgtattagtttactaagaataatgtcctccagctccatccatcttcctgcaaaggacatctttttttttttttttttttttt

SEQ ID NO: 672936 - DNA, 251 bp, Homo sapiens
  misc_feature (14)..(15): n is a, c, g, or t
  misc_feature (39)..(39): n is a, c, g, or t
  misc_feature (65)..(65): n is a, c, g, or t
  misc_feature (93)..(93): n is a, c, g, or t
  misc_feature (102)..(102): n is a, c, g, or t
  misc_feature (104)..(104): n is a, c, g, or t
  misc_feature (120)..(120): n is a, c, g, or t
  misc_feature (142)..(142): n is a, c, g, or t
  misc_feature (145)..(145): n is a, c, g, or t
ataggtaggtcganngtgacatcccactcatatgtattnaccaagagaaacgaaaacatatgttnatataaagactgtacttgaatgtttatnagctacatncntgagagccaaaatctntaaacaaaccaaatgttcatcngcntgtgaagagataaaaatattgtgttgtatccctacttaacaataaaaggaaaagggctactgattgacacacacagcagcatggatacctacctatttcacaatcg

SEQ ID NO: 672937 - DNA, 87 bp, Homo sapiens
catggatttgctggtgcagtacaactaggcttaatagggacatgtctgttgttcaagtaaataaaagttgccctgacttcgaaaaaa

SEQ ID NO: 672938 - DNA, 213 bp, Homo sapiens
tggtagagggtatgtcgttgcatggaaaggggttgcagttgtgcagatgcagtgagtcgttatttcagcacacaggtcacatgttatggtaatgaagctatagcatctcccagggtgaagatactagcatggtaatgaggaaagtacactgggatccatctgtaaattgctgaggtctgtcatgaactggtttaaaccagctagctggctgca

SEQ ID NO: 672939 - DNA, 298 bp, Homo sapiens
  misc_feature (2)..(2): n is a, c, g, or t
  misc_feature (53)..(53): n is a, c, g, or t
  misc_feature (122)..(122): n is a, c, g, or t
  misc_feature (151)..(151): n is a, c, g, or t
  misc_feature (154)..(154): n is a, c, g, or t
tncactgtaaaagttaccccttcctcatcaccccactttcctgtacctgtacnctttggaagaaagtcactatatgcaccccaaatttaaggagtgggaagttatgccccacccatttgtangcagaaaacctacataaattgtttggcantcntctgcataggaaaattatctcactctcccagttatttatttatttgatctttttttatatcagtatggactcatgggtatttcttttatactttgggttataatccaatactaacacaataaagaaatttttaatggagatgca

SEQ ID NO: 672940 - DNA, 384 bp, Homo sapiens
  misc_feature (31)..(31): n is a, c, g, or t
  misc_feature (74)..(74): n is a, c, g, or t
  misc_feature (85)..(85): n is a, c, g, or t
  misc_feature (88)..(88): n is a, c, g, or t
  misc_feature (112)..(112): n is a, c, g, or t
  misc_feature (125)..(125): n is a, c, g, or t
  misc_feature (134)..(134): n is a, c, g, or t
  misc_feature (137)..(137): n is a, c, g, or t
  misc_feature (151)..(151): n is a, c, g, or t
  misc_feature (177)..(177): n is a, c, g, or t
  misc_feature (180)..(180): n is a, c, g, or t
  misc_feature (206)..(206): n is a, c, g, or t
  misc_feature (221)..(221): n is a, c, g, or t
  misc_feature (224)..(224): n is a, c, g, or t
  misc_feature (228)..(228): n is a, c, g, or t
  misc_feature (244)..(244): n is a, c, g, or t
  misc_feature (265)..(265): n is a, c, g, or t
  misc_feature (294)..(294): n is a, c, g, or t
  misc_feature (321)..(321): n is a, c, g, or t
  misc_feature (327)..(327): n is a, c, g, or t
cccttctcccagccctcttctatttgatagnggtcggtcccgcagatcagcaatgtcttagcccctctcctctngtccattcctnccnggttgggactcattctcttctaanttttaataaacanttagcgtanaanacattacagtaagngctatttagagacaaacttaaaacanacnatatagtttaaggatctaagaatccnttagagaaggcacangantgangtgcctcagctgggcnggctgggagcgcagtggtgtngaagtgtaaaagtaagaatgccagcgcgnaacgctcacgccctgcagatagaaagncgtagnctgtgtgtattagagtgagccagccctgagatagatggcagcgtgaatccacacgtg

SEQ ID NO: 672941 - DNA, 923 bp, Homo sapiens
ggtgaccacgggggagacttttagtttcgctttcgctaaaggggccccagacccttgctgcggagcgaacggagagagactgtgccagtcccagccgccctaccgccgtggaacgatggcagatgatcagggctgtattgaagagcagggggttgaggattcagcaacatgaagatccagtggatgctaagccagaccggtcctcgtttgtaccgcccctcttcagtaacgacagaagaaaactgtcaccatgcgatccatcaagaccacccgggaccgagtgcctacatatcagtacaacatgaattttgaaaagctgggcaaatgcatcataataaacaacaagaactttgataaagtgaccggtatgggcgtcgaaacggaaacagaccaagatgccgagggcgctcttcaagtgctttccgaagccctgggtttgacgtgattgtctataatgactgctcttgtgccaagatgcaagatctgcttaaaaaagcttctgaagaggaccatacaaatgccgcctggttcgccgtgattcctcttaagccatgggagaacgaaatgttatttctggggcacagatggtggtccccccaataaaggatttgacacgccactttaggggggatagatgcaaacccctttaagagaaacccaaagtctctatcagctgccgaaggaccccgagcttgtgattggatccacgccgagtcgggccactatgccagatgctaactgaataaaacccgggaagtggatccttgcatcaaggcgggatacctggggaccgaagcctgttgacctcaccgggaggagaacgagatacaccccggaaatcgagttgtactgatcactctcaagacggggttccagcatacacagatcgaaaaattttgattaagagtcgtctttatttcata

SEQ ID NO: 672942 - DNA, 121 bp, Homo sapiens
ccagaatgatggcgtagcagatataactgctttggagcaatctcttctgtttagagcgatagaagtatgacatatgtaatacacatctgtgtacacagaaaccggcacctgccagaacaga

SEQ ID NO: 672943 - DNA, 1007 bp, Homo sapiens
gtatcctgttagcgccagtgatgtatacagcattaggtgaatagtactgtcgttgatacctatatatcatgtatcatgacgtcagcttgtggacgtaacaggatagtctgtcggctatgtgtttatttaaattattggtattgaaaagcaagattagtgcacaaaaggaatatcgagaagtgcgatcaggaagaacaatacactttggttcacgagtactcacagatatgctcagatgcttctctggttgctggggacgaagatctatatatatgcatacaatctcgattagtagtatgatgtgggggtctcagctcttagtctcacgttgcgtggtgtaatctattgaggagggctagtttcatgtcaagtaggtcgacgtcgttaaacaaggaagtaataattgaacatttgagtcacttgaatacattttagctgaactcgatttctacgcaatctattatgtgaacttataatcagatggtgatcgttgaaatactcggaaagcctactactctatgcacacattttatgaattgtactgggaactggggctatgttcatggagaattagtatcgggaaattctgaaagttgactcattggtgaagtaagggatggccggcctttgatcataatttacataatgagtaccatcggattctatagtgtaatatgggttttacactggtgttactgaatttataaacgtgtatactaacgtttgtctggctttcttaaaactatttgttgggtgactgtatcaaaaagattgaggaatggtctacggtgagagagttgtggaacaagaggctaagtaaagttgctggtaattcaacactccttatagttttgaaagagctcctctgtttaaaatgtgaaattacgtgaaaagtaaaattatatccatacgggcttctatcaggtatccatgtcgttccgttggtaatccttgaatggagttgaagggagcaggaaagtctagatatgtaatataatcattcatct

SEQ ID NO: 672944 - DNA, 139 bp, Homo sapiens
agaaaagaagaatcgcgatcggatataaaccattaacttccctctacagttatcatcttcacaattctaatgctactgactatcctagaaatcgcggtcgccttaatccaagcctacgttttcacacttctagtaagca

SEQ ID NO: 672945 - DNA, 1012 bp, Homo sapiens
  misc_feature (1)..(1): n is a, c, g, or t
  misc_feature (92)..(92): n is a, c, g, or t
  misc_feature (143)..(143): n is a, c, g, or t
  misc_feature (152)..(152): n is a, c, g, or t
  misc_feature (160)..(160): n is a, c, g, or t
  misc_feature (172)..(172): n is a, c, g, or t
  misc_feature (181)..(181): n is a, c, g, or t
  misc_feature (253)..(253): n is a, c, g, or t
  misc_feature (269)..(269): n is a, c, g, or t
  misc_feature (296)..(296): n is a, c, g, or t
  misc_feature (311)..(311): n is a, c, g, or t
  misc_feature (335)..(335): n is a, c, g, or t
  misc_feature (402)..(402): n is a, c, g, or t
  misc_feature (420)..(420): n is a, c, g, or t
  misc_feature (422)..(422): n is a, c, g, or t
  misc_feature (454)..(454): n is a, c, g, or t
  misc_feature (493)..(493): n is a, c, g, or t
  misc_feature (506)..(506): n is a, c, g, or t
  misc_feature (528)..(528): n is a, c, g, or t
  misc_feature (535)..(535): n is a, c, g, or t
  misc_feature (546)..(546): n is a, c, g, or t
  misc_feature (572)..(572): n is a, c, g, or t
  misc_feature (632)..(632): n is a, c, g, or t
  misc_feature (664)..(664): n is a, c, g, or t
  misc_feature (669)..(669): n is a, c, g, or t
  misc_feature (792)..(792): n is a, c, g, or t
  misc_feature (878)..(878): n is a, c, g, or t
  misc_feature (894)..(894): n is a, c, g, or t
  misc_feature (901)..(901): n is a, c, g, or t
  misc_feature (920)..(920): n is a, c, g, or t
  misc_feature (923)..(923): n is a, c, g, or t
  misc_feature (927)..(927): n is a, c, g, or t
  misc_feature (946)..(946): n is a, c, g, or t
  misc_feature (948)..(949): n is a, c, g, or t
  misc_feature (999)..(999): n is a, c, g, or t
ntttttattattttttataattattattaaattatgttatttttagttatttacaagtactacaatgttctatgcattttttcatcttaganattaatttaacacatccctttggtcttagatacttctctttggtctgtgtntgctccttnctgaatcncaatcttctgtnatgtgaggnaatttacgtgaacttttcacatatctatttttttccttgtgcacagttgagaatttcctcctttagattccntatttgctcaaaaggnaaatgctctaagaagttatctgcagcncatagcatttgtctnagagcagaaagaattagaacatcntttacagggtccagctcccactaagaggaataattgctaaccaccgagatgtgagaaagagcaaatncaagttttctttggactncntctagcttggacctcacaggctcacatctctntatttctataaggtcaccttttgtaatcaaatccatgcnatccacatgagtnagcaaagccacaggtaccacancagcgtntaccaactccnttcgaattcttttgatctttactatnatctgagaggagaagtactgaatagagctggcatcaaatacaaatgccacagaatgaatnctgtgcttcagcgatggggaatcaatgtagtnatgangatttaatttgattgactccatgggattaaactggtatctattacgaatgttaccgttcaagatatagaatatgttatccctgcacaggccgccttctttcttacttagccccagttagttanacagaataaacggcaggtatttgccatctttcccgtctctaatagagtatgttctatacttctcagatatcccagttgtattagtncccaccaaagcctgangcgttanatgcccttggataacaganctnattnagttgaaaaagctggactncnnagctccaattggacccagcagcagattcgtattttttgaacagggatcanatggttataagta

SEQ ID NO: 672946 - DNA, 150 bp, Homo sapiens
taccaacaggctgtatagtcaggtcgtacaacgcacaaagggaaacgtcaaaggcctccattaccaatgacaagctcccatcagtcaaacacaaagtcgatacaaagttgggaaaacctacctaccaacccattttctatccctaatcaa

SEQ ID NO: 672947 - DNA, 320 bp, Homo sapiens
  misc_feature (43)..(43): n is a, c, g, or t
  misc_feature (137)..(137): n is a, c, g, or t
  misc_feature (144)..(144): n is a, c, g, or t
  misc_feature (158)..(158): n is a, c, g, or t
  misc_feature (163)..(163): n is a, c, g, or t
  misc_feature (172)..(172): n is a, c, g, or t
  misc_feature (186)..(186): n is a, c, g, or t
gtaccgctgaccgcttaggaacacacccaacacgatacatttnccagtgcatcgtaattccactgagcaagcgaggaggggacgcatgtctaaatgttaacaaagatgcactctcgaggtgttccatcttatcagcnaaatccngactggaagactcnagtcnaacagcccnagtccttgagaacnaaaattgtaaagacgaaaaaaagatggagaaaaacccatacagttatactgaaagaggcttgccagacgtgggagcacacacctgtagtcccagctactcaggctgaggcaggaggatcacttaagcggatcag

SEQ ID NO: 672948 - DNA, 468 bp, Homo sapiens
gacactaaaggatcccctgggataagctgaatacggcgtaccctggccaggctatatagtctgtggttgtagcagtctgtcccacagtttaggcttacatcttttcttttttcttttctttgtcagcaaaagtcccacgcatttgtgatattatatccgaatctgtattagcatactgtcttcgcatgggtttcaccataaaatggaacatccttgtagctgtctcaaggcatttgtggatgagcccagttccttaaatatgacaaaggcctgccccctcatcttcatggtctttcaaagccacaatgtccaccacatgaccaaacctgagaaaacagggcatatagggatctcttcaattcttccttaataatttggtcattcatatggttgatataaatggtatgatatggtctgatatccatgttggtgtaaacttcttcaggagacagtaaaaaatcatacttg

SEQ ID NO: 672949 - DNA, 419 bp, Homo sapiens
  misc_feature (13)..(13): n is a, c, g, or t
  misc_feature (34)..(34): n is a, c, g, or t
acccctatgccancccttttacctgtaccttttnataaatatcctttataataacccagtaaatgtatttccccttagttttgtgagcccactcccagcaaattgaacctacagagggaattgtgggaacctcaacttgaagccagtcggtcagaagttccaaaggtcacccgggcgcggtggttcacgcctgtaatcccagcactttgggaggccgaggcgggtggatcaggagtttgagaccagcctagccaacatggtgaaaccctgtctttactgaaaatacgaaaaattagctgggcatcgtggtgggcgcctgtaatcccagctacttgggaggctgaagcaggagaattgcttgagcctgagaggcagaggctgcagtgagctgagatcgcgccactgcactccagcccggg

SEQ ID NO: 672950 - DNA, 212 bp, Homo sapiens
tctagaggatccctcagaagcggacccccaacgttcgggaattacatggctgtacgactgcgcccggcccatacaattttaatatgcagaaaagatgaaactgtgaaccccacagaccaaagctcttcccattcatgaacccgcaccgcgattcaggattctcccctaaagaccctccgttgttccctgcacaattctgggagagacacggc

SEQ ID NO: 672951 - DNA, 707 bp, Homo sapiens
gccttagtttactcattgataaaaagttgaaagattttactgccggatgcatacaatccatttttgttataggggttgctactatctgttcactgagaaaagacatttttttaaaataggagaaatcctacatggcttgtcatttagctctggtcatttgaatattacataccactcatgtacctgccaccagtcagaaaaatagccgtcattttgtgaaaccagtgtgtgtgtgtgtgtgtgtgtgtgtgtgtgtgtgtgttatagacaagtgcagtagtgagaagaggggaaaggaaactagtgtgtgaattagtcttcagaaaggatttgtggctgtgtgcaaagtatatcttagccctttttgttgctatctttaatatgaagtataagtattcccataggaagatgtctggtatatcacaaaaggcgggtgtatagagtatattgtgtaagtcgttgtaattagagagaaaaagtatgatgaccaagagttgctatcaatgcttcctagtgaagcaaaattcatgcgtgtcaattaagtgggggggtgtggggtttctattccattcatatcaatatctcttaatagtgagtcgctaggtggtgtggggtggttgtgaatcaaggtacagcagtgacgttatatatgggtccctgagagttaagcactactattgtcaaagattgtcaagttggaagaactc

SEQ ID NO: 672952 - DNA, 713 bp, Homo sapiens
ctgcggtcctgcagcactaattatggtaggcagagtttcttcttcctgtgccaaagaaatccttttgaagccgacctgcaagttacattttgttttcaagattttaccacccgtctaaggttagaaatattttgggcactgaagagaccactagggaaataaaaaatgggatcagcccatatgagcgtgtattgacatgagttgcccctatatcatatgtgatcatggctcacgcaagcccgatctggtaagcacaagaggttctctcacatcagccctccaagtagctgggtcactaggtgcatgtcaccatgcccactttctttatattttttgtagtcatgagatctcattgtgttctccatgctgattcaaacctgctggggtcaaccaatcctcccattttagcttcccagagggatgagatagcaggtatgtaccaccatagcttggctgaatgagatttttatatatgaatgattcaaatgttcagggatgaaagagtcgctaacataacagaagaatgggatcaggtcataaggatgaatccaagcatccttagatattcttgaaatcagaaatgtgccccctgcttatatgaaaggttgtttgattacatggagtaaagtggaaatgaagtattgcctgcacagccctcaagaagaatcactcaatgctctgaagagtaccagttaactgattatgatctgaat

SEQ ID NO: 672953 - DNA, 345 bp, Homo sapiens
aagttgtccaggtctctattattaatcaagctaaattttgaacagaagagtttcataacagtcaactcaaacacacagagttttatgtacaaagcttggagttcttattattagcttgaataaatatgacccttacagtgatatgcagctgtataaaataacagcacccatcttatatatatatagtgcactaaagttataatggcttttagcatatactattacaagctgccttgaggcagtagagacatttattcttgttgcacagatgtgactactaaggatcagagatgggaaatgaattatttaagatcacacagtgtgtctgtagcaaaatccactctg

SEQ ID NO: 672954 - DNA, 1159 bp, Homo sapiens
  misc_feature (551)..(551): n is a, c, g, or t
cgatgattgcggacttcggaggcgaccactgaggtgtgactacatggtctaacggatgcatattgctcccaggaaatcaggccctagagagacaacgtgcagggtctccttgaattgctgcgggggccgcgggatgatctgtgagactcgagacagaccgcttatgtgggaccagtgatggaatggagaaagtccagaacatgcagtgtaggagctgattgcatagcatgtgacggtaggggtggatagagggacaccttccgccgtgcgggatgtgaggctcggcgagtcagaagtgcaagactagccgcaggcatgtaaggcctacttcaagtacgaagattcgatattggatggcgaggagctgtgcgtcggaccctgtcctctcaagtgatacggataaacaagacgactggagaagactccacacgagagggacgtcggcgaaggtcacgtttccgtggacggggggacatttggggggtagccaatacgcattggttgccacaggcaattgaccctacgcgctccgcccccggtgtccacgaaanccctcaccttcaaaaccctcgaagggttagcgccttcgcgcgcatccgtgagacgtcagaaaggctccaccggttcaaaggcgcggggtcgatgctcgacgcaattgccaatggtcaggtcaagactgggaagagcctcggacattgagaatcacctgggtgaagctccccacatggaacttggtccttgggaaccaggtacgaacccaaggaaccaaggtggaacgggttcgttcgcggtgactaaaggacaaggaactggactttcccgttcgcggccgtgagggatcgccactttggttgaaaagttggccaaggtcgcgtttcgcagagatgaacggcattatccctagttaacattgttgaaacgattttttacatgtccccaggcttaaaagcgtagggctcgtccttgaacttaaatgcgttttttacaaggttaccacttgggtaattgggccccaggggtggatgaaaccttcgtcgtaccgttaagagtaagacacgttggggaactttttgtattcggagatcccttcgttccttgcctcttggagcccagaaccactccaccgtttctcgtgaggataggttatagagcacactga

SEQ ID NO: 672955 - DNA, 206 bp, Homo sapiens
ttatctcattccagcctttactaaaatgtacaaggacttacagaccccatacaagtcaaaaacccagcaggccagtcattgaatcctacagctccaaatcatcttctctgaatctacatctacacatctggagcacaggtgtgtgatgcctgggctcccaaggcattgggcagctctgcacctgtggctgtacagggtctatcccc

SEQ ID NO: 672956 - DNA, 511 bp, Homo sapiens
acaaaggagaccccgctctgagacaggctgcagaaaagggagctgggtctcagcagggctggggaaggctctggccccagccctccgcccaacccactgccctcctctcctggaggagatgctccccaaattagccatcatgagcgctggctctgggggttgggcgttggggagcagtttgctcagctggcaaatgggaataacagaacccgtccctgggactatgagatcaaggtgcttaacaaaagtggcgtctgctgaggggaaaagccaggcccaaaaggctgcatactatcattttgttcattggtgcaagtttttgagacagggtctcgaccagtcacgcaggctggagtacaagagcgcaatatgggctcaactgagcctccacctcctgggctgaagtgatcctgacgagtatctgtgactacatgctccccccagctggtgcgtaaagtaatttgtatattgagcgaaggcggagcttcaccgagttggccaggatggactc

SEQ ID NO: 672957 - DNA, 224 bp, Homo sapiens
gacaccggccggacccataggtcgcaggcatgcattgatcaagaatgctataattactatgcataaagtcaattctctgggctgtggggggtagaattggtgcttaagaagagcaatgcttctaccaatataaattaatactatgaagcaattgttttattcagataatctcataaataattttcaatgtacatgcttagcatactgtccctgcgaacctatga

SEQ ID NO: 672958 - DNA, 650 bp, Homo sapiens
  misc_feature (2)..(2): n is a, c, g, or t
  misc_feature (23)..(23): n is a, c, g, or t
cnttttcccaagctcaattaccntcatagggacaaagctggactccaccggtgcgccgtctagaactgtgatccccggaggaatgaaaggttatctcggaaagtatcaggatatgggcgtcaccatctacctgactccagatggtaagcacgctatctctggttacatgtacaacgagaaaggtgaaaacctgagtaacacacttatcgaaaaagaaatttacgcaccagccggacgcgaaatgtggcaacggatggaacaatcccactggctcctcgacggtaaaaaagatgcgccggtcattgtctacgtcttcgccgatccgttctgcccatattgtaaacagttctggcagcaggcgcgcccgtgggtagattctggcaaagtgcaattaagaacattgttggttggggttatcaagccagaaagcccggcgacagcagcggcaattcttgcctccaaagatcccgcaaaaacctggcaacaatatgaagcctctggtggcaagcttaagctaaacgtgcctgcaaacgtaagtacagagcaaatgaaagtgttaagtgacaatgagaaactgatggacgatctgggggcaaatgtcacgccggctatctattacatgagtaaggaaaatacgctacaacaggccg

SEQ ID NO: 672959 - DNA, 434 bp, Homo sapiens
  misc_feature (9)..(9): n is a, c, g, or t
  misc_feature (44)..(44): n is a, c, g, or t
  misc_feature (50)..(50): n is a, c, g, or t
  misc_feature (376)..(376): n is a, c, g, or t
  misc_feature (400)..(400): n is a, c, g, or t
  misc_feature (405)..(405): n is a, c, g, or t
  misc_feature (434)..(434): n is a, c, g, or t
ttggtgtgnctcggtttctcggctgctgggtcggtccgccacanctgggncgccctatgtcgagtggcgccatggaaagagggctcagctcgcatgtggaagactctcaccttcttcgtcgcgctcccggggtggcagtcacatgctgaatgtgtacctgaagtcgcaccacggagagcacgagagacccgagttcatcgcctaccccatctccgcatcaggaccaagcgtttcctggggagatggtaaccatactctattcataacctcatgtgaatcacttccaactggctacgaagatgaataagagaatctggaccactaccgggcaccagggaccacagcactggtttggaccgttactctgcacatggancagaaaaagtatattggacttaantcacnttctttacttgtatcaaatgatgctggtn

SEQ ID NO: 672960 - DNA, 2146 bp, Homo sapiens
ggtgcagcagagtgcgttcctcgtctgccagccggcttggctagcgcgcggcggccgtggctaaggctgctacgaagcgagcttgggaggagcagcggcctgcggggcagaggagcatcccgtctaccaggtcccaagcggcgtggcccgcgggtcatggccaaaggagaaggcgccgagagcggctccgcggcggggctgctacccaccagcatcctccaaagcactgaacgcccggcccaggtgaagaaagaaccgaaaaagaagaaacaacagttgtctgtttgcaacaagctttgctatgcacttgggggagccccctaccaggtgacgggctgtgccctgggtttcttccttcagatctacctattggatgtggctcaggtgggccctttctctgcctccatcatcctgtttgtgggccgagcctgggatgccatcacagaccccctggtgggcctctgcatcagcaaatccccctggacctgcctgggtcgccttatgccctggatcatcttctccacgcccctggccgtcattgcctacttcctcatctggttcgtgcccgacttcccacacggccagacctattggtacctgcttttctattgcctctttgaaacaatggtcacgtgtttccatgttccctactcggctctcaccatgttcatcagcaccgagcagactgagcgggattctgccaccgcctatcggatgactgtggaagtgctgggcacagtgctgggcacggcgatccagggacaaatcgtgggccaagcagacacgccttgtttccaggacctcaatagctctacagtagcttcacaaagtgccaaccatacacatggcaccacctcacacagggaaacgcaaaaggcatacctgctggcagcgggggtcattgtctgtatctatataatctgtgctgtcatcctgatcctgggcgtgcgggagcagagagaaccctatgaagcccagcagtctgagccaatcgcctacttccggggcctacggctggtcatgagccacggcccatacatcaaacttattactggcttcctcttcacctccttggctttcatgctggtggaggggaactttgtcttgttttgcacctacaccttgggcttccgcaatgaattccagaatctactcctggccatcatgctctcggccactttaaccattcccatctggcagtggttcttgacccggtttggcaagaagacagctgtatatgttgggatctcatcagcagtgccatttctcatcttggtggccctcatggagagtaacctcatcattacatatgcggtagctgtggcagctggcatcagtgtggcagctgccttcttactaccctggtccatgctgcctgatgtcattgacgacttccatctgaagcagccccacttccatggaaccgagcccatcttcttctccttctatgtcttcttcaccaagtttgcctctggagtgtcactgggcatttctaccctcagtctggactttgcagggtaccagacccgtggctgctcgcagccggaacgtgtcaagtttacactgaacatgctcgtgaccatggctcccatagttctcatcctgctgggcctgctgctcttcaaaatgtaccccattgatgaggagaggcggcggcagaataagaaggccctgcaggcactgagggacgaggccagcagctctggctgctcagaaacagactccacagagctggctagcatcctctagggcccgccacgttgcccgaagccaccatgcagaaggccacagaagggatcaggacctgtctgccggcttgctgagcagctggactgcaggtgctaggaagggaactgaagactcaaggaggtggcccaggacacttgctgtgctcactgtggggccggctgctctgtggcctcctgcctcccctctgcctgcctgtggggccaagccctggggctgccactgtgaatatgccaaggactgatcgggcctagcccggaacactaatgtagaaaccttttttttacagagcctaattaataacttaatgactgtgtacatagcaatgtgtgtgtatgtatatgtctgtgagctattaatgttattaattttcataaaagctggaaagcagctgcctgtt

SEQ ID NO: 672961 - DNA, 187 bp, Homo sapiens
caggagcgacttcgtacagcggcgagtgtatccaatctctccctcatgaaggccagccctttaccttatctaactaccagaccaacaaagccacgcatagataagctgacctatttctgatcctgactatggacaaggcccttcagccagaagactgacaaagtcatcctccgtctaggagcgtaat

SEQ ID NO: 672962 - DNA, 572 bp, Homo sapiens
gtgaggagctcactttataagagatcacacatgcaactgggatataggatggagagataaagagaacactgctgtcattagcccgtggcaaagctagagatctggcgaaaaatacccagggccaagacactgcagatcgtgacacggtcattcttgaagatgatttctaacataaacttttctggatatagatcaatcaaattcacatcaaagaaacagctgaagaacaagcacgcactcccggaggagtgtttcaagacagacacggtcaaattggtgctgcaattgttcgcattatgtggatgagaaacagacttataccaatctgcgttgttcctagaggcacaagccgattgaaatttcacgtaagccttgtggtcttataaagaggtatcctttatttgaccgggctccctcggaagggctcaaggaaattccaacaccggccaccatttttgatttaaccgtggcccttcgcaaatttggggctcttccaggaaccgcgggttaacctacccggtggatcctaattgagctctttttttctctcccttagaccattgggcggggtt

SEQ ID NO: 672963 - DNA, 1779 bp, Homo sapiens
ggtgcagcagagtgcgttcctcgtctgccagccggcttggctagcgcgcggcggccgtggctaaggctgctacgaagcgagcttgggaggagcagcggcctgcggggcagaggagcatcccgtctaccaggtcccaagcggcgtggcccgcgggtcatggccaaaggagaaggcgccgagagcggctccgcggcggggctgctacccaccagcatcctccaaagcactgaacgcccggcccaggtgaaggtgagggcccggcaccccgcgtggagggcgaggggagggaggaggcggaaatgggggatcaggggcgtcccggggtcggcctggtcaggggaccattgggatagccagggacaggaagcctacgagccagagaggacctgggggtgccctgggacagggggtgacggagaaaagctgtgggcgccctcgcccccctttgctcacccgcactccacgctctgcggagaggctctgccggcagccccatgtgattccccgctctgcctagccggtttccattcttccgtgttgagcggctggggcttgccgccccaaaccccagagatgaccccagaaatctgggaaactccccttggttccccatctctcatcccctacctcccactccacccacctactcttgcgcctcaactctgctgttagggccgctcaagttcattcataagaacaagagctctgctcttaaaggagccgcgtccctcaggcatttgtctgaatgtggatgttcgcgcgggaacggtgctttgcgcatcgagaccatcgaccacatccccagccctggggacttattgaaggaccaaataaaatgaggcggccccctaggaaaggatctcaggcaatagataccttcgtgggaggtgactgccttttccttttaattttattaactgatctttggaaggagctgggtgagcaattatgctgttactatgtatgagtaatatctactttccctgggcaacccaacctccctagtgccccacccggagagggatcaggcctgaacctggaggcctttcctcccgtctccaaggtcctctaggagctcaggggtggagggcgatgggtcgggaagctggagagtaggacagttcctgggtccgcctgaagctctggctgcctatagtggtcagggatgctctgggataggtggaacagctgcgcctgcagccagctgggccgggcccccgtagctctctagagctctcaccaggagtaggcaggtggatcctgtctctgaggcagggtgggagcctgggctgggctcaggcagctcttggcagcaagcggattttcaggttgtggcagctggtgccgggtggggacaggtcggctgctggagcatgctccccctgaaacctggaaaggagcagtgcctgaggccttgggaggagttctttagggatggtgggctgataagtttccttagaatctccaggagggaggtggcttaggggctactttcacacaagtatggattccccttttccatgttcctaagaatggagaacacctttcttttgtataaagtgggatctcggagatcgagaccatgctggctaacatggtgaaaccccgtctctacttaaaatacaaaaaattagctgggtgtggtagtgggtgcctgtagtcccagctacttgggaggctgaggcaggagaatggcgtgaacccaggaggcggagcttgcagtgagccgagatggcaccactgcactccagcctgggcaacagagcaagactctgtctc

SEQ ID NO: 672964 - DNA, 363 bp, Homo sapiens
gtgactcgtagaagatcccgtgcactgcttcggatgctaccaggtgacgggctgtgccctgggtttcttccttcagatctacctattggatgtggctcaggtgggccctttctctgcctccatcatcctgtttgtgggccgagcctgggatgccatcacagaccccctggtgggcctctgcatcagcaaatccccctggacctgcctgggtcgccttatgccctggtgagtagaatatgccccttcgaggtggcacaaggcaggacttccagcatatctgctccttggtccttctctctgtcttgtcacaggcagaagggtgaggagaaggaaggagttaaaagcccaagggtgttgaaaccc

SEQ ID NO: 672965 - DNA, 605 bp, Homo sapiens
  misc_feature (157)..(157): n is a, c, g, or t
  misc_feature (159)..(160): n is a, c, g, or t
  misc_feature (169)..(169): n is a, c, g, or t
  misc_feature (174)..(174): n is a, c, g, or t
  misc_feature (235)..(235): n is a, c, g, or t
aggatcttatttactggcatttggagggatgggaggtaggggtggggcttacttgtagtagcttttttttttttaacagacttcacagagaaatgcagttgtcttgacttcaggtctgtctgtcctgtgggcaagtaaatgcagtactgttctgatncnnctgctatanaatgnttgtgaaacgactggagtatattaaaagttgtgttccccaatgcttggagtagtgattgtngaaggaaaaaatccagctgagtgataaaggctgagtgttgaggaaatttctgcagttttaagcagtcgtatttgtgattgaagctgagtacattttgctggtgtatttttaggtaaaatgctttttgttcatttctggtggtgggaggggactgaagcctttagtcttttccagatgcaaccttaaaatcagtgacaagaaacattccaaacaagcaacagtcttcaagaaattaaactggcaagtggaaatgtttaaacagttcagtgatctttagtgcattgtttatgtgtgggtttctgcagtagatacagtggttctctttgggacatacaggcccatcgggtattctatagactccctgcacgca

SEQ ID NO: 672966 - DNA, 1065 bp, Homo sapiens
ggtttagcgcaagcaataatagagaacttcaaaaactaccatccttaaaaggtaatttttatttgtcttttaaaagttacattgtggctgttggacgtgaaggagcaatgttttgatagtgtgctaatttattcctttgctgtgtttgtattttgtggggtcatcttttctgtattgaggggattctttctgtgtatttctaagggtggacatctgtcatcaacttacgttacctcaactgaacattttaaatttccaagagctattcaagatacaaagctttaacaacacagtataggcattaataccctaaggacacaccggaaaaacgctgaacactctttttatatctatagtggcttattaagctacgccaggttttcccttttaacatttaattttcacatgtgtgttgcgctcttcaaaacgtgttcagcaaatctccgagagggcaatttacttcccagagtttccgcgtacagtgtgtaacacaacttatctagtagaaaagtttcccccatagtgtttctctaaagcgtcttaggcgcaccgtgttacgcctaatgagtcaccactagagtgcgaccttgtgccttgaggtctactgaagctacatagagagaggagaatttaaccctttcttaaacctccaaaggccattatccccttcagtttggtgaacaccactgtgtcggcgaaacaactgagggtggccctccgtataacacctgtggtgaaaaagtttttgcccgccccccaaagaggtgcaccacaaaagacgcgacttgctatacgatttttttacaccacaaacttccttacgaacgaggtgtgcgtattaaaactccgccgcattaaaaaaaaagatgtcctctctcccgttctataacgaacgttttgtgtgggcacagaactcttgcgaaggaggcgttggcctctttataaacaagccccgtttttcatactcacacaagggagcaacaacacacgccacgcgcggttataagcgggggagacccgcgcattcaaaacagtgctaccacaagtggtgtgttgccaaacacc

SEQ ID NO: 672967 - DNA, 429 bp, Homo sapiens
gtacaaacagagctcttgacatgttcagtttgttactctctggtataagtgactagttagcatggtgtccatgtgagtacgtgaacatcaggtctctcggggatgttggacgatactatcattgctacaggtaagaatctctcgtgctggctttgccttctctagctcacagggactctatgggcaccctagacgatccctttgatccaattggtgaagtcagattagtacagattatcactctgaatctgcatggggatccctggagtgcaccatattcaaggcatcgggccggagagtgtagtggtggtatgactgtctgtagttggcgtaggtggcgaactcctgagatttctttgcagctgtcacactgagcatatccagaggtgtgtggtacttgggcttgctgggttcatagcccttctagta

SEQ ID NO: 672968 - DNA, 463 bp, Homo sapiens
  misc_feature (306)..(306): n is a, c, g, or t
  misc_feature (309)..(310): n is a, c, g, or t
  misc_feature (312)..(312): n is a, c, g, or t
  misc_feature (322)..(322): n is a, c, g, or t
  misc_feature (333)..(333): n is a, c, g, or t
  misc_feature (342)..(342): n is a, c, g, or t
  misc_feature (345)..(345): n is a, c, g, or t
  misc_feature (359)..(360): n is a, c, g, or t
  misc_feature (366)..(366): n is a, c, g, or t
  misc_feature (370)..(370): n is a, c, g, or t
  misc_feature (374)..(374): n is a, c, g, or t
ataactactgactagtaaggactggataatccactttaatactgcttgtctggctggatgatccactttaatactgcttgtctggctggatgatccactttaatactgcttgtctggctggatgatccactttaacttaatgcacagtgtatacattttatctttagatccttctgtgacacggtcttagctctgtcactcatactgcttgtctggctggatgatccactttaatactgcttgtctggctggatgatccactttaatactgcttgtctggctggatgatccactttaatactgctngtnngnctggatgatncacttttatantgcttgtcnggntggatgatccactnnaatacngctngtcnggctggatgatggagaccgccacgcatcttccttgcaatgccaggatcatacagtgttgactgaataaagggcgccacggtctcccgtc

SEQ ID NO: 672969 - DNA, 291 bp, Homo sapiens
acttggcaaaagccccgaggacattcatctgaattggagatagctcttgcgttttgtcatgagtgctctgaggtaacaggtagaaagaggatgatgctatgtccgggtccttttatttacactgacctgtgaaaacaatagaaaccttgtgtgatgcaaaacaacataagctaaattattggacatggacgggttgaacggaaatctttgtatgcacatacagttatcagacagctaaccttcataatgttttaaagacctcataggagaaaatcagaaaagcacaaatcc

SEQ ID NO: 672970 - DNA, 383 bp, Homo sapiens
tctgggtgacagagcaagcctcaacaacaaaaaattgttcaagagcattactggcacaatgagtgctgaagagctgaagagccgaagactcatgggaagcccccctcagtgaactgagcaactttgatggaaatcatcagtaatggcttggttgaccccatctaaagaatgagcctaaattattgattggcatctctcaccaaataaactttagatatctagcatgaaacatcaatccatcagtcttttcgctgtctgtttcatgtcatactgtgagtagctccagtgatggcaatgtctttgaatgtgtgtcagcagtagatacagtggttctctttgggacatacaggcccatcgggtattctatagactccctgcacgca

SEQ ID NO: 672971 - DNA, 219 bp, Homo sapiens
ggttttccctttttttttttccccggccctcccccgaaactgccagggtgggggggggttttgtttgtccagttaaactgggggaagaaagtttattgttgggaacctgggctttttttgtggggtttaggcttggggggggcctttttggtttgtttttccggctttttgggggggggggtttgccctttttttgcctttatttctggggaaccctta

SEQ ID NO: 672972 - DNA, 1901 bp, Homo sapiens
tgactaccggggctcctgcaccagctgtcttctctgtagcatctaacttggcaagcatcgccatcttagttgtatccatttacagagggggaacactgaactccagaaggaacaaaaaacttcagcagctaatttttgagtgggccctttctctgcctccatcatcctgtttgtgggccgagcctgggatgccatcacagaccccctggtgggcctctgcatcagcaaatccccctggacctgcctgggtcgccttatgccctggatcatcttctccacgcccctggccgtcattgcctacttcctcatctggttcgtgcccgacttcccacacggccagacctattggtacctgcttttctattgcctctttgaaacaatggtcacgtgtttccatgttccctactcggctctcaccatgttcatcagcaccgagcagactgagcgggattctgccaccgcctatcggatgactgtggaagtgctgggcacagtgctgggcacggcgatccagggacaaatcgtgggccaagcagacacgccttgtttccaggacctcaatagctctacagtagcttcacaaagtgccaaccatacacatggcaccacctcacacagggaaacgcaaaaggcatacctgctggcagcgggggtcattgtctgtatctatataatctgtgctgtcatcctgatcctgggcgtgcgggagcagagagaaccctatgaagcccagcagtctgagccaatcgcctacttccggggcctacggctggtcatgagccacggcccatacatcaaacttattactggcttcctcttcacctccttggctttcatgctggtggaggggaactttgtcttgttttgcacctacaccttgggcttccgcaatgaattccagaatctactcctggccatcatgctctcggccactttaaccattcccatctggcagtggttcttgacccggtttggcaagaagacagctgtatatgttgggatctcatcagcagtgccatttctcatcttggtggccctcatggagagtaacctcatcattacatatgcggtagctgtggcagctggcatcagtgtggcagctgccttcttactaccctggtccatgctgcctgatgtcattgacgacttccatctgaagcagccccacttccatggaaccgagcccatcttcttctccttctatgtcttcttcaccaagtttgcctctggagtgtcactgggcatttctaccctcagtctggactttgcagggtaccagacccgtggctgctcgcagccggaacgtgtcaagtttacactgaacatgctcgtgaccatggctcccatagttctcatcctgctgggcctgctgctcttcaaaatgtaccccattgatgaggagaggcggcggcagaataagaaggccctgcaggcactgagggacgaggccagcagctctggctgctcagaaacagactccacagagctggctagcatcctctagggcccgccacgttgcccgaagccaccatgcagaaggccacagaagggatcaggacctgtctgccggcttgctgagcagctggactgcaggtgctaggaagggaactgaagactcaaggaggtggcccaggacacttgctgtgctcactgtggggccggctgctctgtggcctcctgcctcccctctgcctgcctgtggggccaagccctggggctgccactgtgaatatgccaaggactgatcgggcctagcccggaacactaatgtagaaaccttttttttacagagcctaattaataacttaatgactgtgtacatagcaatgtgtgtgtatgtatatgtctgtgagctattaatgttattaattttcataaaagctggaaagcagctgcctgtt

SEQ ID NO: 672973 - DNA, 172 bp, Homo sapiens
tctcagctataaaaggaaggaaattctgatacatgctgcaacatagataaccctgaggactatgctaagtgaaataagccagtcacaaaataaatactgtattatttcacttaaatgaggttatctagtctaatgcacagagacagaaagcagaatgatgattacttttgtc

SEQ ID NO: 672974 - DNA, 2229 bp, Homo sapiens
ggtgcagcagagtgcgttcctcgtctgccagccggcttggctagcgcgcggcggccgtggctaaggctgctacgaagcgagcttgggaggagcagcggcctgcggggcagaggagcatcccgtctaccaggtcccaagcggcgtggcccgcgggtcatggccaaaggagaaggcgccgagagcggctccgcggcggggctgctacccaccagcatcctccaaagcactgaacgcccggcccaggtgaagaaagaaccgaaaaagaagaaacaacagttgtctgtttgcaacaagctttgctatgcacttgggggagccccctaccaggtgacgggctgtgccctgggtttcttccttcagatctacctattggatgtggctcaggtgggccctttctctgcctccatcatcctgtttgtgggccgagcctgggatgccatcacagaccccctggtgggcctctgcatcagcaaatccccctggacctgcctgggtcgccttatgccctggatcatcttctccacgcccctggccgtcattgcctacttcctcatctggttcgtgcccgacttcccacacggccagacctattggtacctgcttttctattgcctctttgaaacaatggtcacgtgtttccatgttccctactcggctctcaccatgttcatcagcaccgagcagactgagcgggattctgccaccgcctatcggatgactgtggaagtgctgggcacagtgctgggcacggcgatccagggacaaatcgtgggccaagcagacacgccttgtttccaggacctcaatagctctacagtagcttcacaaagtgccaaccatacacatggcaccacctcacacagggaaacgcaaaaggcatacctgctggcagcgggggtcattgtctgtatctatataatctgtgctgtcatcctgatcctgggcgtgcgggagcagagagaaccctatgaagcccagcagtctgagccaatcgcctacttccggggcctacggctggtcatgagccacggcccatacatcaaacttattactggcttcctcttcacctccttggctttcatgctggtggaggggaactttgtcttgttttgcacctacaccttgggcttccgcaatgaattccagaatctactcctggccatcatgctctcggccactttaaccattcccatctggcagtggttcttgacccggtttggcaagaagacagctgtatatgttgggatctcatcagcagtgccatttctcatcttggtggccctcatggagagtaacctcatcattacatatgcggtagctgtggcagctggcatcagtgtggcagctgccttcttactaccctggtccatgctgcctgatgtcattgacgacttccatctgaagcagccccacttccatggaaccgagcccatcttcttctccttctatgtcttcttcaccaagtttgcctctggagtgtcactgggcatttctaccctcagtctggactttgcagggtaccagacccgtggctgctcgcagccggaacgtgtcaagtttacactgaacatgctcgtgaccatggctcccatagttctcatcctgctgggcctgctgctcttcaaaatgtaccccattgatgaggagaggcggcggcagaataagaaggccctgcaggcactgagggacgaggccagcagctctggctgctcagaaacagactccacagagctggctagcatcctctagggcccgccacgttgcccgaagccaccatgcagaaggccacagaagggatcaggacctgtctgccggcttgctgagcagctggactgcaggtgctaggaagggaactgaagactcaaggaggtggcccaggacacttgctgtgctcactgtggggccggctgctctgtggcctcctgcctcccctctgcctgcctgtggggccaagccctggggctgccactgtgaatatgccaaggactgatcgggcctagcccggaacactaatgtagaaaccttttttttacagagcctaattaataacttaatgactgtgtacatagcaatgtgtgtgtatgtatatgtctgtgagctattaatgttattaattttcataaaagctggaaagcagctgcctgtttctgtctgtgtcctcagacaggtcctgatcccttctgtggccttctgcatggtggcttcgggcaacgtggcgggccctagagg

SEQ ID NO: 672975 - DNA, 2238 bp, Homo sapiens
ggtgcagcagagtgcgttcctcgtctgccagccggcttggctagcgcgcggcggccgtggctaaggctgctacgaagcgagcttgggaggagcagcggcctgcggggcagaggagcatcccgtctaccaggtcccaagcggcgtggcccgcgggtcatggccaaaggagaaggcgccgagagcggctccgcggcggggctgctacccaccagcatcctccaaagcactgaacgcccggcccaggtgaagaaagaaccgaaaaagaagaaacaacagttgtctgtttgcaacaagctttgctatgcacttgggggagccccctaccaggtgacgggctgtgccctgggtttcttccttcagatctacctattggatgtggctcaggtgggccctttctctgcctccatcatcctgtttgtgggccgagcctgggatgccatcacagaccccctggtgggcctctgcatcagcaaatccccctggacctgcctgggtcgccttatgccctggatcatcttctccacgcccctggccgtcattgcctacttcctcatctggttcgtgcccgacttcccacacggccagacctattggtacctgcttttctattgcctctttgaaacaatggtcacgtgtttccatgttccctactcggctctcaccatgttcatcagcaccgagcagactgagcgggattctgccaccgcctatcggatgactgtggaagtgctgggcacagtgctgggcacggcgatccagggacaaatcgtgggccaagcagacacgccttgtttccaggacctcaatagctctacagtagcttcacaaagtgccaaccatacacatggcaccacctcacacagggaaacgcaaaaggcatacctgctggcagcgggggtcattgtctgtatctatataatctgtgctgtcatcctgatcctgggcgtgcgggagcagagagaaccctatgaagcccagcagtctgagccaatcgcctacttccggggcctacggctggtcatgagccacggcccatacatcaaacttattactggcttcctcttcacctccttggctttcatgctggtggaggggaactttgtcttgttttgcacctacaccttgggcttccgcaatgaattccagaatctactcctggccatcatgctctcggccactttaaccattcccatctggcagtggttcttgacccggtttggcaagaagacagctgtatatgttgggatctcagtgagtggggttgaagagcagagcctgggttgagttgggatgtctggtgggaacctcccagctgattcatcttcctgcacccccttccctagtcagcagtgccatttctcatcttggtggccctcatggagagtaacctcatcattacatatgcggtagctgtggcagctggcatcagtgtggcagctgccttcttactaccctggtccatgctgcctgatgtcattgacgacttccatctgaagcagccccacttccatggaaccgagcccatcttcttctccttctatgtcttcttcaccaagtttgcctctggagtgtcactgggcatttctaccctcagtctggactttgcagggtaccagacccgtggctgctcgcagccggaacgtgtcaagtttacactgaacatgctcgtgaccatggctcccatagttctcatcctgctgggcctgctgctcttcaaaatgtaccccattgatgaggagaggcggcggcagaataagaaggccctgcaggcactgagggacgaggccagcagctctggctgctcagaaacagactccacagagctggctagcatcctctagggcccgccacgttgcccgaagccaccatgcagaaggccacagaagggatcaggacctgtctgccggcttgctgagcagctggactgcaggtgctaggaagggaactgaagactcaaggaggtggcccaggacacttgctgtgctcactgtggggccggctgctctgtggcctcctgcctcccctctgcctgcctgtggggccaagccctggggctgccactgtgaatatgccaaggactgatcgggcctagcccggaacactaatgtagaaaccttttttttacagagcctaattaataacttaatgactgtgtacatagcaatgtgtgtgtatgtatatgtctgtgagctattaatgttattaattttcataaaagctggaaagcagctgcctgtt

SEQ ID NO: 672976 - DNA, 2563 bp, Homo sapiens
  misc_feature (1608)..(1608): n is a, c, g, or t
ggtgcagcagagtgcgttcctcgtctgccagccggcttggctagcgcgcggcggccgtggctaaggctgctacgaagcgagcttgggaggagcagcggcctgcggggcagaggagcatcccgtctaccaggtcccaagcggcgtggcccgcgggtcatggccaaaggagaaggcgccgagagcggctccgcggcggggctgctacccaccagcatcctccaaagcactgaacgcccggcccaggtgaagaaagaaccgaaaaagaagaaacaacagttgtctgtttgcaacaagctttgctatgcacttgggggagccccctaccaggtgacgggctgtgccctgggtttcttccttcagatctacctattggatgtggctcaggtgggccctttctctgcctccatcatcctgtttgtgggccgagcctgggatgccatcacagaccccctggtgggcctctgcatcagcaaatccccctggacctgcctgggtcgccttatgccctggatcatcttctccacgcccctggccgtcattgcctacttcctcatctggttcgtgcccgacttcccacacggccagacctattggtacctgcttttctattgcctctttgaaacaatggtcacgtgtttccatgttccctactcggctctcaccatgttcatcagcaccgagcagactgagcgggattctgccaccgcctatcggatgactgtggaagtgctgggcacagtgctgggcacggcgatccagggacaaatcgtgggccaagcagacacgccttgtttccaggacctcaatagctctacagtagcttcacaaagtgccaaccatacacatggcaccacctcacacagggaaacgcaaaaggcatacctgctggcagcgggggtcattgtctgtatctatataatctgtgctgtcatcctgatcctgggcgtgcgggagcagagagaaccctatgaagcccagcagtctgagccaatcgcctacttccggggcctacggctggtcatgagccacggcccatacatcaaacttattactggcttcctcttcacctccttggctttcatgctggtggaggggaactttgtcttgttttgcacctacaccttgggcttccgcaatgaattccagaatctactcctggccatcatgctctcggccactttaaccattcccatctggcagtggttcttgacccggtttggcaagaagacagctgtatatgttgggatctcatcagcagtgccatttctcatcttggtggccctcatggagagtaacctcatcattacatatgcggtagctgtggcagctggcatcagtgtggcagctgccttcttactaccctggtaggtatatacaggcccccctcctcgggtatctccagcccctagtccccagttttgaagctccttagggagagttctatgcagtgttctcccacaggccattctgtgggtccaggttaggagtgggggaggtctgtcctgtacagttgtacaggtagtgagctttgcaagaacacctagtcggagtgaaaaatgggggctgtaatctggcctgggctccacttgccacgctgagcacctccangcagggttacttcctcttagagcaagaggccttttcttattcatgtgaaggtcccatatcctcactgagctgtgtacccatggtactgcaagcttccagagggccacctcttctcattaacacagaggcccgttaggtgggtcagtcctcatggctgtcactactctgcgcaggtccatgctgcctgatgtcattgacgacttccatctgaagcagccccacttccatggaaccgagcccatcttcttctccttctatgtcttcttcaccaagtttgcctctggagtgtcactgggcatttctaccctcagtctggactttgcagggtaccagacccgtggctgctcgcagccggaacgtgtcaagtttacactgaacatgctcgtgaccatggctcccatagttctcatcctgctgggcctgctgctcttcaaaatgtaccccattgatgaggagaggcggcggcagaataagaaggccctgcaggcactgagggacgaggccagcagctctggctgctcagaaacagactccacagagctggctagcatcctctagggcccgccacgttgcccgaagccaccatgcagaaggccacagaagggatcaggacctgtctgccggcttgctgagcagctggactgcaggtgctaggaagggaactgaagactcaaggaggtggcccaggacacttgctgtgctcactgtggggccggctgctctgtggcctcctgcctcccctctgcctgcctgtggggccaagccctggggctgccactgtgaatatgccaaggactgatcgggcctagcccggaacactaatgtagaaaccttttttttacagagcctaattaataacttaatgactgtgtacatagcaatgtgtgtgtatgtatatgtctgtgagctattaatgttattaattttcataaaagctggaaagcagctgcctgtt

SEQ ID NO: 672977 - DNA, 111 bp, Homo sapiens
gcggtaccgccagaacagagcagagccacctcctatagacgccatggccctgctgctgtacacttcagcaggctgcacaagggagctcacttaggaaggagaaattgtgta

SEQ ID NO: 672978 - DNA, 144 bp, Homo sapiens
gatctacagacttccgtcccaatgtcactgatgtttttctttagtgtgattagtttaaaatatttaggaatctccatcttaatacggagattggtctgttctctaaaagttcagatttgttcacgcttcagtgtgtaataagct

SEQ ID NO: 672979 - DNA, 102 bp, Homo sapiens
ccttgtagctgatccaagcacagcgaattgcatgatcaaagaactgtcgggagccaatgggttgtgggtgatcttcttctcctcgtgaacccacgagacatt

SEQ ID NO: 672980 - DNA, 127 bp, Homo sapiens
ccctagaggatcccctcgaagtcgacggttctcaaaaactaaaaataaaactacatatgaaccagcaatctcactactgagtattcttccaaagaaaaggaaatcagtgggatcctgcaacccccat

SEQ ID NO: 672981 - DNA, 187 bp, Homo sapiens
tgttctagaggatcccgtgtgtgtgtgttgtgtgtgtatggtgttgttggctgtgagtgtaggagtcattatatattttagatattaactccttactagatatgtggttgctaatattttctcccattccgtaggtgcctttcactttatatttttttttccttggctgtactgagcttttcagctt

SEQ ID NO: 672982 - DNA, 853 bp, Homo sapiens
aaacgtttgcctccgagccccataacaacccccctcctaatactaactacctgactcctaccacctcacaatcatggcaatgccaaggccacttatccatgtgaaccactatcacggaaaaaaactctacctctctatactaatctccctacaaatcgtccttaatgataacattcacagccacagaaagtaatcatcatatatatatcttcatgtcgaagaccagacttatccccaccttggatatcatcacccgatgaggcaaccagccagaacgcctgaacgcaggcacatacttcctatgctacaccctagataggctcccttcccctactcatcgcactaattaacactcacaacaccctaggctcactaaacatactactactcactctcactgcccaaagaaactatcaaactcctgagcccaacaacttaatatgactagctgacagaaagtagccttaaatagtaacgatacctctgacggactccacttatgactcactaaagccatgtcgaagaccgcatcgctgggtcaagagtacttgcagcaggacttcttacaactaggacggcatatggtataatacgcctcacactcatacacaaacccactgacaaacacatagcctagccgtgccttgtactatcctaataaggcactaatcatcacaagacccatcgtgaccaacgaacaaagcagaccctacacaccgcacacggaacaaacggcaaagaagccaataagcctaggaagcacagccgatccacagcaagagcccctgaagactaccggggcagacagccaacgaaccgccacgggcacacatcgcagccacaacacgccgac

SEQ ID NO: 672983 - DNA, 241 bp, Homo sapiens
ctagaggatcccctataggcgcctatatataaggcgcactataatagatgtacatgtgaaccaacatagacccaaactggtcatatgaaagaaaaaaacagttgtctgcctgtaaaatgttgagtttcgatggacgccatgttgggatgatttaattacatattcatgaaggagtagtgctggtgtggttttcattcttcaagcaagtgtgattccaaacactgagcttatgaagtaatgg

SEQ ID NO: 672984 - DNA, 498 bp, Homo sapiens
  misc_feature (479)..(479): n is a, c, g, or t
ccaggaatttaaggaccgctgttttacctttctgagcctagttacacatcatccatacctctggcttgacagcatttatctgcagatgaagcatgagaacaattataaagcacatatgggcccagcctatgacgaacatttatataaatgtgaatccatcacaatttatggtgaattatcaacattcctgtccactgcaatttatgctatggtccccttactagaagagatggagagacaaatcagttatgtaaccttggtcaggcctatccgcgaagatgcagccatcatctaccatgtgtgccgtggcttgatgaaaagatcttttctactacttcacttggctggaacacccccagtgcctggcagcttgctctctttccaggtgacccatttcagcttctgaaaattctggatcccagaaggtctctctttaccctggggcgaaatctgtgtccctgtaacgtctacccaccganctccttcttatccactaac

SEQ ID NO: 672985 - DNA, 237 bp, Homo sapiens
ggagtgcagtaggcatggatacattgacttcactaacagcctaggcactttacaggctccaagcaatacctccccaccttcagcttggatcgaagtaagctacggacctaacaaggcaatgcaggcacccatgccctgacctaactaattgctaataatttagcaggtaaatacaaaggggctccgttacgttggccccagggccacgtctcaaggctccccagggcgcaaagtgaa

SEQ ID NO: 672986 - DNA, 269 bp, Homo sapiens
ggagcttggaggagcttgggggatccgagaggaatgtggcgtgttcggagtgcatcgcctcaggagagtggcccacgctggatgtaccccatgtgatcactctgggactcgtggggcttcagcaccggggtcaggagagtcctggtattttgactagtgatgggagtccctcccaacattcaattcacacaggggattgggtcttgtaaatcacgtctttactgaagacaatttgaaaaattatatgtttcaaatctgggaattggaca

SEQ ID NO: 672987 - DNA, 385 bp, Homo sapiens
  misc_feature (38)..(38): n is a, c, g, or t
ttcccagttctgttgtagttttcattcctgttgcaggngagagagatcctgggccaggcagtcatgaagggcacagaatcccagccccccagggaatcccagtcccgcctggaagccgcaaaggggcctgtggttctgtctctcctgcaggcccaggaggaggccccccgcggtgacacccacactcttgcccagtcgcctctgagggaagcccatgtccacatcagggggtttcctgcagtgactgctgctgtcccagaacaaaccagagtcacgtgtgtccttcccagacctacaggttctcttgaggcccctccatcaccataagcacagggctagcgaccacgggaaatgttttcccgacacgaacacttgcataaccact

SEQ ID NO: 672988 - DNA, 102 bp, Homo sapiens
ggagcaacggaacaacacggtaaaccacttgtagcagaaaccggaagtcgacgacacacaggaaaccacggaggctccgaacgatagccacgaaacactaag

SEQ ID NO: 672989 - DNA, 252 bp, Homo sapiens
tctctgcctcgctagtattccactaagcactgtttacagaactccgtgatggagatgtaaacacaacaatgaaaaaaataatagctgtctactttgggaggccaaggtgagtggatcatttgaggtcaggagttcaagaccagccaacatagtgaaaccccgtttctactaaaagtacaaaaatcagctgggcatggtggcacgtgcctgcagtcccagccactcagtgaagctaaggcaggagaatcgctc

SEQ ID NO: 672990 - DNA, 436 bp, Homo sapiens
  misc_feature (239)..(240): n is a, c, g, or t
ctgccagaccagcaagttggcgaggctggtgtgaatgttgttattctccaagctttttatcgaggtctatagagaacaagaaggattttgaatattcctggttgtacaagaaagactaagacccatggatctatgcccgtaaccagcacaaagagaagatctgttgctgaggataagcgtgctacatgctcaataacctattctttgttagcgaagctagctatggtatagctctgatnnattcgaggctcactggccaggatagccctctatacactccttagtcaaagtcttatcattcttggttaaaagcacagagcctaagttcttcactaccgtaaatgccaaagtttgaagatgctccagcttgtgccttaaaagcgtgatttggggcatcccaccttaccttctgtaaaagtaatgcttttgttaattc

SEQ ID NO: 672991 - DNA, 103 bp, Homo sapiens
acgaaggactagacggcatggagggtttcgtgctggagggcaagaagtttggcggtgccgggaagaggagtttggccacttctacacgcagggactgctacgt

SEQ ID NO: 672992 - DNA, 176 bp, Homo sapiens
tctatcacattatcttagttgcttagatatgctgtattgttttcattccaatttaagtgggggctgtgcgatgatgtgtgcgcatgtagtgtgtgcatggtcggtgctttgcgtttgcaacgctgtgtgcctgcgtgttagttgtgcctgtgacgcagctgcttcactgtatgatg

SEQ ID NO: 672993 - DNA, 1448 bp, Homo sapiens
  misc_feature (1448)..(1448): n is a, c, g, or t
ggcagggttgaccgggatccattggacaatccagctatacgctgtggaccaagagtggccaatgatactagtcgcggactaacgagctcgtactggtagagatactatgcgcgatggtagtcgacgactcgtgctcgtatccactaccatgttgtactagtattgccaagcttcgcggacggaagatgggccactaagagaacctctccttgtccgagccacgagactagttctttgggaccctggcttacccattgtcgattggacgcccttgggccttttcgttgcatacctagaaacaaatcccatttctacgattggaaccttatatgcttttgccaacggtttaaagctatcatgttaccattggtaactattagtgccaattccagtcagttaagacgcagaccttcggaactattatatcttctgtcaacacagaaaagcttgatgtcacctattgacgcacccgtggcttttgggacaccgccggacacaagcgcggaggaaaccgtacacttttgcattagggcgaaaaagttgggaacaacacggcgttatggaataccgccagttatgcagttttagtgcccctacgttgtcctagctaatatccccggtgggacaccaccactaatggaggccctttttggcaccggctgatcgccctaacctggatactgagacctttttggtacaccagcgaattgtactgacctattcacatgtgacacgccgaagtggataacagctccttggtgttaatattttacagtgtgctcgtgaggcctacacaactttaccttggtggggtagtgcaaagagaatcacggcgaatatcggaaaaactataccggtttgtggagaggatactcacaacggcggcccgtttttcgcggtttaacggactaagtcggaccggcctacaacagtgatgggccctttatagggcacagccacctcggaatataggaccccccctcacaagagtcagtagcgcgaccctaaaattgtgccaaaacccacaccaaccccagttcattaggtagcagccgtacccccggaataaaattcaccaccacacaggcattagcgcaaatcggtctataggcgagtgatctccgcattttgtgtgggccaaaataacttgaccatgattgtgcctataaagaggtcaccttgcccctgattcacccgagtttacacttgtaccggggttaactcgagagaagtgctccctattattaaacatacacttggggacgctatgagtaagggtcgagaccattttacagcgctttaaccagtagcgtgggtcaacacaacctataggtcaaagctaaagcgccgcaaaccacggcctaatattagaacggatacaatatgcgtgcataaaggctctcttataatagttgtcagacgtatcctaactccttagcggaggcgan

SEQ ID NO: 672994 - DNA, 123 bp, Homo sapiens
gtcatgtgtgtgctactggcatctagtggctgctatacattctacactgcatagtatagtccccactaccactccagctcaagaattatctgactcctgcggtcaattattgccaaaactgtg

SEQ ID NO: 672995 - DNA, 766 bp, Homo sapiens
tccaatgggcaacacagattaattggtggaaaaagacctgtggagaggggtgtaccagctagtgccaaagcccccttcccgctaacatggctggaccagttacatgcccctggtgcatggagagtgtcttggtgattgtgttgtgtgaaaattggtgtgtaggtgtggctgtgtgtagtattgtggcttgcttgaataattgaatggatattaagttgcacgccaagtggtgtatagtgcctggtggcaccttgccttgacagtgattgtttcttacacatgctcagtgcccttgggtgggaattattcccacctccttgacccagtgtttgtgtaaacatggtgtagtgtggtgtcttgcaaaaatatgttgcattgtttgggtggactaaccatttctatactttccttactctatagttattaaaacaggtgaaaacgtgtggcgtcgttgtgatacatctgggctggcatatccatggctgggtgaatatgggtggctgttgtgtcgactatagtgcgccctggaggatctctgggagaggcatctcacagaagtggggttctcctacgaaaggggctcccgtggtaataaagcactgtggtcccaagtgtgtttgaaattatatataatccagagggtggtaaatggggcaataggcttgcccttgggatcaaaacacaattcaggcctttgtgggaacattgaacgcgggaaaaaacaatgggctaaatatgtgttttggcccaatcatttagtacctgg

SEQ ID NO: 672996 - DNA, 972 bp, Homo sapiens
ttacccccgtgtcaaatttactttcccgtgtgcactaatcgtatgcagtcctactgactctacagggattcacccagtagctgctcacgaatgtctctggtccttttggcctagcgcgtgataatgggcgcttcccatcgagggccacatggcagtgtggttcccctagtgtagtattcagcactggattagagtaattaccaaccgtcccgacaggcccctcttttgatagcctttctttccttggtctcgcttgcgcttggcgtgcgaatcttggtctcatctcctagccgcctctcgggtctgccaggctgtttcgccttgttcttacgcgctcctctttgggggccctcagcatccatgccgcgccatgtccttccctttcttggttgggccaacccctggcgtgccccatacctactaatgctgcttgtccttgctttcttaatcctgcgacttttatggccctatcgcaacacaaggctgcgatacgaagtattgactccgttgtgactacatctcggtaggaggctcacccaatcatctcgctgcccactccatgagagtgttcccaccagagaacattcctctcgcctatgcgttccttcgctgctccgtttcccaccaccgtcactctacgctcacagccaaagctgttgcgcgtgacccttgcatgtgcacatcttgaccctcacctgatattcttgctcagtgcctctttctcccgcaggctgcagagaggaggcagaactatgaaaggacagtacctgatgacatgtttcgtagatggggtttgcagctgccaaatgagctgtagctgcgtaagtatcctccttgatgcctgtcggcacttctgaaaggcatcaaaggcgcacagaaactccttggccaggacatgcccaggctcatgcagccaatgcagaaaatgcgtcagctcctttgagaacccctccccacctaccccgataactc

SEQ ID NO: 672997 - DNA, 241 bp, Homo sapiens
gagacgccgtccgcctgatcgacgaaactcccggtattcacgacgtcgtcgtttcgcccgtctatatcaccgctccgatcgggggagtggagcaggatgacttcctcaacctcatcgtcgtagcgactagcgaccttcctccgtcagtcctgttggagcgcgcccatatcatcaaggcagcccacgggcgcgatcacaccatcccgaatggtcctcgcaccctcgacgttgatctcattcg

SEQ ID NO: 672998 - DNA, 236 bp, Homo sapiens
cccccccaaaaaaaaaaaaggattttggttaaaaggcccaaaaaaaggcctaaagaaaaacccccctccccccagggttttcagtttccttaaccgttttatttaaaggccccttttttttcccccaaaaattgggtttgggcccccaaacctggtttttgtttttttttttgggggggggtttaaaaaaaggcctgggcaaaaaaagggggccaaaaaaaaattttttttttcca

SEQ ID NO: 672999 - DNA, 352 bp, Homo sapiens
  misc_feature (159)..(159): n is a, c, g, or t
agtgtgagcaggggtataggaagcttaggatatacaggcagacttactgtacgactcagagtttacaggtgaaagttcctcagttatgagttcagaagaatttgaagcttcttccagacaaaatacttcaagtctttgtattgactgcctcctcccccnatcgttctttctggcggcaaagggatgcttgcgattaggtccaaagactcctgtgcagggagagaggggccatgatgtcacagacataacatgacggttgcaagatgctttacgtgagcagtgggtcacggtttgcatgcagactctcgatagtgctcacatcaatggccctccacttttacatgcccactcc

SEQ ID NO: 673000 - DNA, 185 bp, Homo sapiens
gattgccgtgctgaccacctcctctacacttaggaagtcagaggctaagtgtggagccacatctcctttgcacagactgttgagtctcttgagaaggtgagtgtccagtgtaagaaagacatatgaagtaaactcagtagcgtcacacgtctgtctctctctttacttcccactactgctgcact

SEQ ID NO: 673001 - DNA, 868 bp, Homo sapiens
  misc_feature (41)..(41): n is a, c, g, or t
  misc_feature (143)..(143): n is a, c, g, or t
  misc_feature (151)..(151): n is a, c, g, or t
  misc_feature (159)..(159): n is a, c, g, or t
  misc_feature (167)..(167): n is a, c, g, or t
  misc_feature (218)..(219): n is a, c, g, or t
  misc_feature (234)..(235): n is a, c, g, or t
  misc_feature (240)..(240): n is a, c, g, or t
  misc_feature (254)..(254): n is a, c, g, or t
  misc_feature (261)..(261): n is a, c, g, or t
  misc_feature (292)..(293): n is a, c, g, or t
  misc_feature (295)..(295): n is a, c, g, or t
  misc_feature (299)..(299): n is a, c, g, or t
  misc_feature (323)..(323): n is a, c, g, or t
  misc_feature (334)..(334): n is a, c, g, or t
  misc_feature (344)..(344): n is a, c, g, or t
  misc_feature (352)..(352): n is a, c, g, or t
  misc_feature (363)..(363): n is a, c, g, or t
  misc_feature (412)..(412): n is a, c, g, or t
  misc_feature (422)..(422): n is a, c, g, or t
  misc_feature (424)..(424): n is a, c, g, or t
  misc_feature (429)..(429): n is a, c, g, or t
  misc_feature (454)..(455): n is a, c, g, or t
  misc_feature (457)..(457): n is a, c, g, or t
  misc_feature (465)..(466): n is a, c, g, or t
  misc_feature (468)..(468): n is a, c, g, or t
  misc_feature (471)..(472): n is a, c, g, or t
  misc_feature (485)..(485): n is a, c, g, or t
  misc_feature (492)..(492): n is a, c, g, or t
  misc_feature (499)..(499): n is a, c, g, or t
  misc_feature (501)..(501): n is a, c, g, or t
  misc_feature (529)..(529): n is a, c, g, or t
  misc_feature (537)..(537): n is a, c, g, or t
  misc_feature (545)..(545): n is a, c, g, or t
  misc_feature (549)..(549): n is a, c, g, or t
  misc_feature (563)..(563): n is a, c, g, or t
  misc_feature (567)..(567): n is a, c, g, or t
  misc_feature (575)..(575): n is a, c, g, or t
  misc_feature (596)..(596): n is a, c, g, or t
  misc_feature (664)..(664): n is a, c, g, or t
  misc_feature (835)..(835): n is a, c, g, or t
cctccaagtgggccctcccagtgaagtccagggttccaggngcctctggcttaaagcagaagcagtgggtgagcaggcttgcagactgtgaggcattggatatgtggaatcctcagggctgctctggagctgggatcgggctngggttggnagggggtnggggccgnggctggatgtctctggtgcgcatataggacagcagctgctccgggatctcnnccagcacatccttgnncagtngggccatgctcaanacctggntccccgaccggtcaacataatctcggaatgnnangaantgaacgatgtcccgctctgcgtangtcccctagangacacgcgcncatcatcnccgtccaactnttccattgcctcaaacatggctggtcctacaccgacgataatgataganatgggcaatntngaggngctgacgatggcctccttggtctgnntnatgttagnntngannccatcagtgttgntgtgcanaacatantnctgggtgccatcagagatcttgggtgcngcccgggncacttggntgangacaggggcaaagnaggngggcccanagagctgcactgtgcgcaggntctggaaatagctctccagcacaccctcgatgcccgcacagttggggtcctcatcattgttgtttttngggaactggtgggagatccgtccctctgggggcagcttggccccaaagccataagctgggaagagcttatcactgtcatagtcctggatgatctctcccactgccttgagggccatggcatagggcgctgagctggtagggactcatgtagtgttgggaggtaggctgcanaggattcccatttggaagccgtgaagtcaatgg

SEQ ID NO: 673002 - DNA, 559 bp, Homo sapiens
  misc_feature (175)..(175): n is a, c, g, or t
gatcggtccttcgatatcctaaaaaatccaagccgccctccgacattgcttgttgcaggccggctttcacacatgctgaatggaggtgatgaagtctcccccacctgtatggggattgatcaggttggggatttggatatcagctatattaatatagagggaatccctgcccctnccagccctgaatccaaaggttgccctttgtggcctcagagcagcaaacccccccttccttcagaaaccagtcccagggggggcccccttagtgaaaatgttgaaggggcagcccccccttaagcccaccagtccttcatgtccccaccaagttgggggggttcccccctgaatcttttttttggggggggggggtttgaaaaggaacaaagtcctttaaaaaaaaaaagttttaccctttatcccttgggcccccccagtgaaggggaagggcatttttagccctcccccctttgtttccctccagggtttcaaagccccccaaaaactgggattcctagtggggatgaattgggctttttttagactacccctggcccggata

SEQ ID NO: 673003 - DNA, 232 bp, Homo sapiens
ccctgtggaatgctacaggagaagtaacatatgatgactgagaacttctccgcccttacctcaactttaagggaacaccttcaggaacaggaaagaaggcccaactccacaagaatgttagctctatgaaagcagatgtcatgccttgctgtatccccagacctctatcacattacagggcgttaataacatgtttatcccgttaaataacacttctactacttagcttctg

SEQ ID NO: 673004 - DNA, 376 bp, Homo sapiens
  misc_feature (119)..(119): n is a, c, g, or t
ggtctaccacccactacccactgatggtgaaaggacaagacttccctggcatccccccatcagcaaaagtcctcacccacagccctcccaataacaactacagtctggcccaagtgtgngttgtcacgccctgtaatcccagcactttgagaggctgaggccggtagatcacgaggtcaggagttcgagagcatccctggcccaacgtggtgaaaccctgtctctactaaaaatacaaaaattagctgcacatggttgcacatgcctatagtcccagctactcaggaggctgaggcaggagaattgcttgaacctgggaggcagaggttgtagtgagctgagattgcaccactgcactccagcctggtgacagagc

SEQ ID NO: 673005 - DNA, 186 bp, Homo sapiens
ggacgagtaggcgggcggggcactctgccgtcgggcccggtctgcacgggtttacactgctcgcgggtcacatcccccgctggtcgactccgtctacgactcccccgctggtcgactccgtctacgactcccccgctaccagacgaggcacacgccgccagctccccgcggcggagtagtcgacgc

SEQ ID NO: 673006 - DNA, 263 bp, Homo sapiens
gggcccccccccccccgcgttttttcccccgggggggggtgggggttttaaaaaggggggggttaaaagggccccccccccgcccggtggggggggggggccttttccccccgaaattcctttcataaaccccaccgggggggggggttttaaaaattttaaaaaaccccccctttcggggggccttttaaggggggcccgggcccccccggggcctaagggttttggttggttttttttttttaaaacccccctttttttta

SEQ ID NO: 673007 - DNA, 417 bp, Homo sapiens
cgaagcagttgtccgagttaaaagaactcctagtaaagtaagagggagagagagaaaaaaaggaaaagaggagattagaaaagaaaagaacccccaccaggaggaagggaggaaattgtgtcctatttatctttgtctttccagcaccaacccagtgctggccctcaataagtgcttggggaatgaaagatcactcgatcacttggccagtaaagcatcagaaccatggtttgatgccagaccctcctatgccaaatcccaagtccaggccattccctactcttttgcaaacagggggtgactgtagaggggtagcaattgtagaaaccccaatctgactcaacaatatttgaatctgaactgaattacaaaattactgaattacatggcacagtgaaagaacaatacttttttaat

SEQ ID NO: 673008 - DNA, 492 bp, Homo sapiens
tccaccgcatacattcaccaggtgtcggtacagaaagaagctctctcctttgaggatggtcagcctgtgcagctgtaagatggcagcatggcttacatactccgctcacccagagaagtctatgaccccagcaccctggaagccgtccaactggaagttggatccacttcctacattcacatccctgtgctgtgccatcggtgttcaccatcctgtccgtacatacagagttgggcttggaggacctgacaccacagtcaattaattcctcagggcctgtgtctggagaataggtgcccagccccctcctctcctcttctgccccccatacctctctatgtcagagaggcagggagtggccctttacatagactgctggggattgggtttgatttgttttgtttttttaaattccattttgataatttttttcctgctctgggtggtggtggcacatggatgaatgagtatttaataaaagttccaaatttc

SEQ ID NO: 673009 - DNA, 526 bp, Homo sapiens
  misc_feature (250)..(250): n is a, c, g, or t
  misc_feature (390)..(390): n is a, c, g, or t
  misc_feature (428)..(428): n is a, c, g, or t
  misc_feature (432)..(433): n is a, c, g, or t
  misc_feature (447)..(447): n is a, c, g, or t
  misc_feature (485)..(485): n is a, c, g, or t
  misc_feature (489)..(489): n is a, c, g, or t
  misc_feature (508)..(508): n is a, c, g, or t
tgaggaaaaaaagtttttcagtagtaggcaagaaaaagctaggaagagagagaaataggtaaaaagctgctaaaatgtcagaatagttagactgaaggaaagaagagaagaaatttaccaattcagtttaacgaatattaacagaagctctaataataaaaaagggaagtaaaataaacccacccaagggatgatttcagggggagaggtggagggcagatttcttgggcaaaccgggcccctttgcccncacccctcacttgatccttttgccaaacttgtcaaactcaggggaactggcttcccagttgcccctttgccatattccaagtccccctcagactttatgtttttgttcatcagccctgtcccaggattttggaaaggganaacccctggccccaggggaaaaaggggggggtttcccntttnntgtgcctgccccanccctgcccccattgggtttgcccccccctgggggtaantgcnttcccccccctaataaagngccttttgtacaggtcca

SEQ ID NO: 673010 - DNA, 117 bp, Homo sapiens
acccccagccgggggaaaaaatggaaaaaacacccccgggaaaaattgtttacccccccccccgcaaaaaaataaaaaacgcacgcctttgaaaaaaaaataaaaacccccccccgg

SEQ ID NO: 673011 - DNA, 469 bp, Homo sapiens
  misc_feature (250)..(250): n is a, c, g, or t
tgaggaaaaaaagtttttcagtagtaggcaagaaaaagctaggaagagagagaaataggtaaaaagctgctaaaatgtcagaatagttagactgaaggaaagaagagaagaaatttaccaattcagtttaacgaatattaacagaagctctaataataaaaaagggaagtaaaataaacccacccaagggatgatttcagggggagaggtggagggcagatttcttgggcaaaccgggcccctttgcccncacccctcacttgatccttttgccaaacttgtcaaactcaggggaactggcttcccagttgcccctttgccatattccaagtccccctcagactttatgtttttgttcatcagccctgtccagatcactgagaggagaccctgcccagggaagagggggtctccgttcctgtgcctgcacagcctgcccccatgcgtcagacacctgacagggatctta

SEQ ID NO: 673012 - DNA, 482 bp, Homo sapiens
gtcgtggttatgtagacgagagctccacggtccagagagaagagacggtcaagtctctaatcagaacctaaaaggtgccagacgtctggataaatctctcctggaatcaggaagagaccatagactcttagaagcaaccaggtcacaccttagaaacatctgcttagaaatgtcttccacagatgccctaagtcatcactcttaaggtcaaacttccacagatccctagggcatgaacacaatgcagccaagtggtttcttaggatttaacaagcgtgacctttaccccagttcccaataagttcctcatttccatctgagatttcatcagcctggctttcacagtccatatgtctatcagcatttgggtgacaaccatttaatagtctctaagaaattccaaactttccctcatcttcctgtcttcttctgagtcctccaaattcttctaacctctctgcctgttacctgattccaaagct

SEQ ID NO: 673013 - DNA, 112 bp, Homo sapiens
cacggcgactgacgactgttaggaacggacgactctgacgactgttgaaacggcgcgactgacgactagttggaacgtgggtgactgacgactgattaggacaacgacgacc

SEQ ID NO: 673014 - DNA, 275 bp, Homo sapiens
  misc_feature (91)..(91): n is a, c, g, or t
  misc_feature (109)..(109): n is a, c, g, or t
  misc_feature (139)..(139): n is a, c, g, or t
  misc_feature (155)..(155): n is a, c, g, or t
  misc_feature (158)..(158): n is a, c, g, or t
  misc_feature (160)..(160): n is a, c, g, or t
  misc_feature (169)..(169): n is a, c, g, or t
  misc_feature (183)..(183): n is a, c, g, or t
  misc_feature (193)..(193): n is a, c, g, or t
tctggaaaggaggaggacccagatatggcctccgttctcaggttcgtaatactaatagctgggagagtgtttattaggtgcggttcagggntcagtgcccgatgcatgngaactggtggaatcctcactgcaggcttcngaaatgggctctagcntcngngtcgccatncgcctcgtcgtcantattgcgacncgccatctgggcaaacaggtcccgacaactgaactagctcgccctgccacataacctgcattcggctgcgtcggacccaagc

SEQ ID NO: 673015 - DNA, 219 bp, Homo sapiens
gttcggaacgggctgtgcgtcattggtcgtgtcgccgttcttgaagcggtcggtcattgccatgtagatgagcgcgtcgcgccactcgaacgtggacccttcgatccagaacaccaatcggagcggctcggtcgcgcgacctttgcggtccttggcagcgacgaagagcgtgtatttgccgtcggcgaggccggtcaaatcgacgttgatcgtctcggc

SEQ ID NO: 673016 - DNA, 309 bp, Homo sapiens
gtactgaaggtctgcattgggacagtgagtggagcgaggcacatgagctcacacagggcctctggggaggaccacagcccatcctccatgcaggtcagagaggctgttgttgcctttcaatatgtgcagggtgactggcactggaacgtgaacattgactgccaaagtgtggtgccctcagtggcaggacgaaggaggcagcatagaacttagatggtgatactgggatgctgcagatcgactgtgctcacagtgccacctgacttatatccactatgccctactgtaacagtgtcacttgtgacgcta

SEQ ID NO: 673017 - DNA, 492 bp, Homo sapiens
  misc_feature (123)..(123): n is a, c, g, or t
  misc_feature (135)..(135): n is a, c, g, or t
  misc_feature (299)..(299): n is a, c, g, or t
tttgtggaatggatcccaacaatgtcaagacacccgtttggacatcccccctcgtggcctcaaaatggcagtcaccttcattggcaatagcccagccatccaggagctcttcaagggcatttnggagcagttcantgccatgttccgccggaaggccttcctcccttggtacacaggggagggcatggacaaaatggagttccccgaggttgaaagcaacatgaacgccctcgtttttgagtatcaccagtaccaggatgcccccccaaaaaaggaggaggatttcggttaggaggccnaaaaggaggcctaaggcaaagcccccatcccctcagggttttcagttcccttaaccgttttaatcaaaggcccctttcctttcccccaaaaattgggtttgcggccccaatcttgttttttgtttttttttttggggggggtttaaaacagggcctggcacaaagtaggcgcccaaaaaaaacttgtttgtta

SEQ ID NO: 673018 - DNA, 282 bp, Homo sapiens
gtgggtacagcatgtgcttttagaagactgaaccagattatactctcagaatctgttgtttaaaaccttcccgtagtctgtgcttatgtgtgtgtgtctgctgtgggttcttgttggtttgtgcgtttgtttgttaggtgagatggagtctccctctgtcacccaggcgggaatacagtggtgtgatctcggctcactgcaacttccacctccctggttcaagcagttctcctgcctcagcctttcaggtagctgggattacagtcacatggccactcaata

SEQ ID NO: 673019 - DNA, 922 bp, Homo sapiens
  misc_feature (48)..(48): n is a, c, g, or t
  misc_feature (69)..(69): n is a, c, g, or t
  misc_feature (74)..(74): n is a, c, g, or t
  misc_feature (89)..(89): n is a, c, g, or t
  misc_feature (91)..(91): n is a, c, g, or t
  misc_feature (185)..(187): n is a, c, g, or t
  misc_feature (208)..(208): n is a, c, g, or t
  misc_feature (258)..(258): n is a, c, g, or t
  misc_feature (262)..(262): n is a, c, g, or t
  misc_feature (270)..(270): n is a, c, g, or t
  misc_feature (281)..(281): n is a, c, g, or t
  misc_feature (306)..(306): n is a, c, g, or t
  misc_feature (316)..(316): n is a, c, g, or t
  misc_feature (321)..(322): n is a, c, g, or t
  misc_feature (390)..(390): n is a, c, g, or t
  misc_feature (405)..(405): n is a, c, g, or t
  misc_feature (418)..(418): n is a, c, g, or t
  misc_feature (449)..(449): n is a, c, g, or t
  misc_feature (460)..(460): n is a, c, g, or t
  misc_feature (473)..(473): n is a, c, g, or t
  misc_feature (484)..(484): n is a, c, g, or t
  misc_feature (502)..(502): n is a, c, g, or t
  misc_feature (519)..(519): n is a, c, g, or t
  misc_feature (521)..(521): n is a, c, g, or t
  misc_feature (822)..(822): n is a, c, g, or t
  misc_feature (836)..(836): n is a, c, g, or t
  misc_feature (842)..(842): n is a, c, g, or t
  misc_feature (845)..(845): n is a, c, g, or t
  misc_feature (884)..(884): n is a, c, g, or t
ggtgctatccacccctgcctgttactggctctgaagggcactcctcancttccccaagaaagaggacgngtctntgacactgtgatgantnggagcgggggttcaaacagaaagtgtttgggccctccttctaagtcttgttaccaaaaaaaggaaaaagaaaaggtcttctcagttacaaattnnnggaagggagactatacctggntcttgccctaagtgagaggtcttccctcccgcaccaaaaaatagaaaggntttntatttcantggcccaggtngggggaaggagagtaactttgagtntgtgggcttnatttnncaggtgctttcaatgctcatcaaaaccaggcatggggaaggccctggcaaactgctccacccgttgcntgaggttggccagangctgacttgtttntgagttcttaagcaggaaggatttgaaatcntggagcttggnagttttgctcttnacctctaagcnaatgttgaccccttcatntataaagtccacaactntncggaagttatcctcacggaactgtcgagaagttaaggctggggcccaagccgcagcgcccggtgtgatggcacttcggtctccaggacaggtgttcttgttggcagtgatggatacaagctctagcacccgctcagcccgagctccatccaggcccttgggcgcaggtccaccagcaccaggtggttgtcagtaccacctgataccagtgagtagcctcgctctagcagggcatctgccatggcccgagcattcttcagaacctgcagggagtactcccggaacatgggggtgcaggcctnctttagggccacanctactncancaatggcatgattgtgggggccccctgcagggatggganacggcaaagttgattcggtcctcaaatgtgtaagggat

SEQ ID NO: 673020 - DNA, 554 bp, Homo sapiens
  misc_feature (21)..(21): n is a, c, g, or t
aaacctcttgaccttgcccanggtgctgaaatgaaacacattcttgttggtaataaggtcatctacaaagcattgaaacgatatgagggccctctctggaagagttcaagattttttggctggagattattctgggtagtgttagagcatggagtcctttcctggttttaggaaacagcctgatgcagttcataatatttatcgccagggatgcaaacacctgaatccagccgtttgccccggtaaatcccatggttggctggccttcttcctttttttaatgtgcttggttgacacctctctcttggcttccggggttcccttaagaattagcctttcgagcagtctcaacgacgaggacttggcttggaagcaatagaagaacattctggcttacagcactcactactgttcccaggaccagctgactgatgaggaggaggaagatacggtttctgctgcagacctgaagaaatcattagagaaagcacagtcatgccaacagcgactagatcgggaaatttccaactttctcaaaatgattaaggagtgtg

SEQ ID NO: 673021 - DNA, 872 bp, Homo sapiens
  misc_feature (1)..(1): n is a, c, g, or t
  misc_feature (61)..(61): n is a, c, g, or t
  misc_feature (76)..(76): n is a, c, g, or t
  misc_feature (91)..(91): n is a, c, g, or t
  misc_feature (93)..(93): n is a, c, g, or t
  misc_feature (97)..(97): n is a, c, g, or t
  misc_feature (136)..(136): n is a, c, g, or t
  misc_feature (146)..(146): n is a, c, g, or t
  misc_feature (148)..(148): n is a, c, g, or t
  misc_feature (165)..(165): n is a, c, g, or t
  misc_feature (180)..(180): n is a, c, g, or t
  misc_feature (186)..(186): n is a, c, g, or t
  misc_feature (189)..(189): n is a, c, g, or t
  misc_feature (201)..(201): n is a, c, g, or t
  misc_feature (203)..(203): n is a, c, g, or t
  misc_feature (213)..(213): n is a, c, g, or t
  misc_feature (218)..(218): n is a, c, g, or t
  misc_feature (230)..(230): n is a, c, g, or t
  misc_feature (238)..(238): n is a, c, g, or t
  misc_feature (241)..(241): n is a, c, g, or t
  misc_feature (269)..(269): n is a, c, g, or t
  misc_feature (274)..(274): n is a, c, g, or t
  misc_feature (278)..(278): n is a, c, g, or t
  misc_feature (284)..(284): n is a, c, g, or t
  misc_feature (288)..(288): n is a, c, g, or t
  misc_feature (329)..(329): n is a, c, g, or t
  misc_feature (350)..(350): n is a, c, g, or t
  misc_feature (353)..(353): n is a, c, g, or t
  misc_feature (368)..(368): n is a, c, g, or t
  misc_feature (373)..(373): n is a, c, g, or t
  misc_feature (434)..(434): n is a, c, g, or t
  misc_feature (457)..(457): n is a, c, g, or t
  misc_feature (480)..(480): n is a, c, g, or t
  misc_feature (532)..(532): n is a, c, g, or t
  misc_feature (539)..(539): n is a, c, g, or t
  misc_feature (570)..(570): n is a, c, g, or t
  misc_feature (600)..(600): n is a, c, g, or t
  misc_feature (825)..(825): n is a, c, g, or t
naaatcttcacatcagggggagagtttgaatgattaaaaagaagcagctttttcaagaaanggggggaggagaaanaattctaaacctgtnanaacngaccaacccattaactaaaaagtatctatagattaaaanaagaaaaaangngagggtgaagaaaaggnggaacatgctaaaanccttanganaatcatccaaangngagggaagancaacngattcaccaacnccactttntcnattttacaactttctacatctcactctngattngggncttccnggcngaaacagcctggcagtccctagagcccctgagaagagcccnggttctccaaaagacagaggnggngaagccctgcaggangcgcngaccacttcccagagaactgacagtccgtgctcccaaaagtttgaaccaacagcctaatgngaaaagaaactgcactgaaaggnaaagggggaaatggtgatgaacngggcttatgtgagaatgtctatattttcataacacagccccagaatctttcnctcagtnacagcctcaggcaaaccacgttctggttggngggttctgcagggatctctcccaccactgngcctctagtcccaaaaccatccttgacaacatcgtgtgtctgtaacttccctttgcccacctccaggccacctggggaagcccacaggcagccaagaccctgaaatgaaatgaacacaaagtctgactcggtaagtattagtttcaaacagaacactaaagagaaaagttgaagctgcaatgtgtgtttaaggcagagcccagcagatccgtgtccacccatgtnccaataagacaatgggcaaagctacaaatggcaagaaaaaaatggga

SEQ ID NO: 673022 - DNA, 213 bp, Homo sapiens
tatcaacttccttacttagccccctaagtagtttgggtaaagcactcaccaccatgccaggctaacttttctactttttgtagagatggggtcttactgtgttacctaggctggtcttgaactcttgggctcaagcaatccacccacctctgcctcccaaagtgctgggattacagtcatgagccaacatgcctgggcagtacaggaaggttg

SEQ ID NO: 673023 - DNA, 219 bp, Homo sapiens
ttagaagttcaatagcaggcccagcacaggcgtgggcagggtgagatagggaggggtggaggaagtaatctggtccagggcgctcagagctgtgagatgatatggggtagcaggctgcaggtgaggcctgtgcctatcgcggttccacattcagtggccttcactaatgcacatccgtgtaccacccagtggagacacctcttgcagacgttcgattcc

SEQ ID NO: 673024 - DNA, 896 bp, Homo sapiens
ctggcggagttagaaagaaaaagaggtgaaactgcgggaccggtgctgctgagtcgctaggcttcgcctcaaactttgctgttgcatgcggagcggccccgaccctcctctcccctacgaggcccacgcagtctgcggatgacggcttgtcccctagctcggtgagcggtgttgggcagcaagcagctggcggcgagtagtcataaagcaggcttccgctaagcgcaaaaggctggcgtgtggcgagatttgtgcggcgcacaggaggcagaaggcacctaagtgcttgttcaggggcccaaggagagcttggaccacgaaggaaaagatttctcagaaccaattggtctcaatttgcaactaggaaatactcaattgaacccggggaacaggctgagagcacccttcccttaaagaacactgtggggtataccaattactccagctagaacagagcctgagggttctagtaccccgagcattcaggtcactgcgattttgcatgccttgactacgtgaatccttctgagaactttcactgcaatggtggacctctaaaggggaactgctttactaattggcgttgctgttggtccaaacagaacgacctacgtaattgggcattgtgcctaggtacgccgtcatgcgagggattgacccgacagggttgggtgatccccgggtattttttccctgccggtatttggttgcgcccagtgtccttggtgcgcttgttttccctcaagaaggttattgccgggctagccctggtgttggaaccacccagttgacatgactcactggggcgtcccctggatgtttgcgtggagcccggactcatagcccgtgtctttctcgttggctcactctttcagtggagcctcttgccttgcggc

SEQ ID NO: 673025 - DNA, 279 bp, Homo sapiens
agcccatgagagacactgatgtgtgtctcggggcttctgtgagaagagcttggttacccaccgggtcaggcaccacgtcggtgctgtgaggcatggagggtgctcacagctgtgcagtcagctacagaggcctttcccagcatccacatctgaccgggcagtcacaccaggatgagctcccaggaagagggctcccagcaagggagggcgcacctgggtgtgagcttggaggagggcagaggcacctgtcaccgctgaccctgggtgcagatgggcatg

SEQ ID NO: 673026 - DNA, 166 bp, Homo sapiens
gttggttacttacaatgctacctgcctctcttgaacaagacacagagatgtccatgaacccagtctaactatggtataatcctccagtcctgtatgtactccctttaagcctcctccttccactgagcctaaggcaactctatatcgcacccggggtggacccggc

SEQ ID NO: 673027 - DNA, 636 bp, Homo sapiens
  misc_feature (513)..(513): n is a, c, g, or t
aggtacacgggtgcagcttatgtctattttcagcacagagctgcttcaggttcaagaatccaggtccctggctagctgggacttctgatgcatgctcaaggtcccatatggaaatcacggtccctaaaaataacgggacttccttccctactggctagtccttgggatgatgtcttaaaaatccggtaataaatctccctcctcagaccctcttgaaggcaaatcagtttacacaaagggtacttcagcggctcacagtaaaatccctacaatgtgcattaggtggtaaaatttaagaaaaggaacctaatttttactaattaccattaatctaggctacaaggccaaaatattatttggtacttcggtaattccttacatgtcaatggtgacataaccacacaaagctgggttcaaataggtaagcgtttcatcatggcagtgtacggcgggtgaggttgcagcacacatcacatacggaaggggggggtgctcggtttcaccatccatggnaaggcggaatctcccggcttgaaatggggcaatgccaagacatcacggaaaagcaaaaaatcagcactgaccttactaggggttgaactatgtgctagagcatatcatcctgaacgaccaatc

SEQ ID NO: 673028 - DNA, 120 bp, Homo sapiens
atgggtatatatcagctaaggtggattgttgggtcgaacggtagctctgtttttgttttgttttttgagatggagtttcgctcttgttatccaggcttgagtgcaatggcacgaccttgg

SEQ ID NO: 673029 - DNA, 172 bp, Homo sapiens
tcccatttcccgtgtctcctcggtccccccgtttttgggcttgaccattttccactttttgcatgcgcccggggcagacttttttcaggggcttgggttttgttttccgttgccacccgcccaccccccttttgggatggaattttattaaccccccccttgggggccccca

SEQ ID NO: 673030 - DNA, 397 bp, Homo sapiens
  misc_feature (316)..(316): n is a, c, g, or t
  misc_feature (330)..(330): n is a, c, g, or t
  misc_feature (380)..(380): n is a, c, g, or t
cgtggcgtagtgcatggtactggaactgctggacatgtactgctgacctgcagaagcaagccagaactgaagcagcagttgacaggacattcaaagcgtgtggctggttccgtcactgagctcatccaggctgctgaagccatgacagggaacagatatgcgtgtagacccagaggaccccacgagtcagttgctagagaatgagtctcctggaagagctgcagtccgccgattgagggctgcatgccgaaaaagctagtagcagcgtgaagccgccgggccaagacccaagtgaggcgagatgagtccttgaacntttagaggagcagnatactagatagctgccaatgctccattgcagtcagccaccgagtgcactnggtaaacggctagcgtc

SEQ ID NO: 673031 - DNA, 1138 bp, Homo sapiens
ggacatgttagctggccaataaggtgccagctgctgcccgtgctggctgccattgccccatgtgaagtcactgtgccatgcccagaacactggtctcgggcccgacaagacctcctttttccaggctttaggtatcaccactaaaatctccagtgggcaccattgaatctccttgggtgtccgcaatgttgccacgtgtctgtctgcagattggctacccgaacgtgttgcgatcatgtaccccattctatcgatcaacctggtgtacgaaacagagtcctggctcttgtcctgtggagatctggattactacccgttcccacttgtctgaaacaggtcaagggccttcttggcttgattccatctgcctttgtggctgttgctcccttgtggctgctgactaccacagctgctcctgctgctgtctgctatgcccctagactagaggttagaccgcctaagtgaagacgtcggtagtgcatgtcggacgacggatagtgggagttgttggtcatctttgacctaatcatccaaagaatgcaaccaactgtatgccccgttggtatgtatgcgaaaacgagcggatagagtaatacggcgttacgttcctttatcaaacaatggatatgacagatagcaaaagagcgctataatcggacctccaagcggtgagtccccagctcaaataatattcgcgcccgggagggtgccgagcatcagaacccagcctcccgaatgtttacggaactgagccggggaccctcatgttcagaggggactctcattgacacgccgaatagaccctggcaccgacatgttgccaatgcgcatccatttgggaaaacttctggtcctctgttccctgacatgctgtacaaaggccctgtcattacactgcattgtgggcgtggtcacacatcctagtcgtggagccaccaccaaccacctccaggggcaaagtctttatgcacaaccagtccctgagggggcaacaataacaggacctatgtctcatggtcgcgccaccacatcgtgtgttagaacccactcgcacccaggtatacatttgctgtcaggagagacccacacgccggttatacagattaccagacgacggtaatagtttcttcgtaacacc

SEQ ID NO: 673032 - DNA, 999 bp, Homo sapiens
  misc_feature (701)..(701): n is a, c, g, or t
gtatttttagagacgggcattcatcatgttggctaggccggtcttaaattcctaacctcaggtgatctgcccacctcagcctcccaaagtgctgggattacaggtgtgagctgccacgcccatccaagcactagttttcatattgcatattcataattttatgtttgatcatattgtggattttcttaattggctttaacttctgagttaggtttttaaagtgttataaaattttgtgtggttaattttcttctgccaccagttagggtccctaacagagactctcatgtttagaaagttagaaaccaaggccacgggaagaatctctggcagaaaagaagtacacctctcaagggcagggggacttagacagtgtgctctcccagttgaattttacccatactagtgaggaccttctgcaggcagaggtgacttgtcttgaagtttggaatctgtgagtgcaacgtgtaaaacagctgagccaagaactaatggaaaaatatgaagaactgaagaggatggaagcacataacaatgaatacaaagcagagattaagaagttgaaagaacagattttacagggtgaacaaagttacagttctgcactaaaggaatgaagatggaaatctcccatctaactcaggagttcatcagcgagatattactattgtttcaccaaaggttcttcctccggacatggnaaaagcgactcagagccgagatgccaaagggcgaagaccagcgtgagcctaacgagaatctgggtcactggaggcccccaaatttgaaaaacgttctctgaaggtgcggacacggacgggtgcacaagggctccgcagtaccccgggaatagcccactggggaggaggaggcgcccaccatgacggggcgccgaagcaaaaggaagagagccctgtgctgtctaacgcaacaacacagcgggtcagcacatgagcacgagcaatgtgtaccacaacacacggtagaccagctctatag

SEQ ID NO: 673033 - DNA, 326 bp, Homo sapiens
taaatcgagctcggccgaagtctacggatgggtatgaggatgactcctgtgattaatagtatatctgctcacacctcatatcctccctactatagcctagaatgaataatatatactgctgatacatatatagctactctacataacacctcaacacccactcacctcttagacaatattgtgcctattgacatactagtctttgcctggctgcgaagcagcagtgggccccgccctactagtactcaatctccaactcttatgtgcctatacctactgtacataaactacaactactccaatgctacaactaatcgtcccaactg

SEQ ID NO: 673034 - DNA, 282 bp, Homo sapiens
aacatttccatctctcctttcccagagtaaatcagcccctgggcctggccagggcctcacacaagtttgcctggtggaaatcttcctcagctcaattggtttccttaaaggttggaaccctccttccgggttgaaggtgtcctaacttctagttggaggtttccctaagcgcactttctaaagccgggccagtttccagacacaccacaccctcggtagagacacagatttcccaagagcctatatgtcccccacggagagacacacccagaggtctgcaca

SEQ ID NO: 673035 - DNA, 297 bp, Homo sapiens
gcactgacattgtcaccccactgacgaggcccgattccatagggagtatccttgccaggcgctcctgatcctccctgcggggtcttccttcgtgagctggtcgtgcttcccatcctccaagtgcctcaccagacccccagactgggtgaaggtacagctggctcctttcgggggggcagcttcaactctctcggcgggagggcggggccatccccacccatagggctgtctcacatccagtcactctcaacagcggccagcacacagataaaagacccttgggcacacattatggag

SEQ ID NO: 673036 - DNA, 242 bp, Homo sapiens
gctgcctggagccccaagatcaccccttcctactacaccacttctgacggttgtcatttccacttgagaccgtcttcattgtggagatctccctgacatgcaagaccagggtccaggacatgtgctctctattctgacgtcggtgagaaacaattccctgtcactcgagggccacggatgtcgggcgctatcagagtgtcccgtagcctgtgagcacaggagcgcccacgcagagacctctc

SEQ ID NO: 673037 - DNA, 2444 bp, Homo sapiens
  misc_feature (793)..(793): n is a, c, g, or t
caccgcacgctggccggccgcgcggtacagcagcaccgccagcgccgcctgcgccaggctggccagcagcagcagcgcgcccaaggcgcacccggcccagcgccgcgcgggctccggacgccgcgccgccgcacgctccgcctccgagccgctctcgcgcagcacctgcacctcggcaggcgccagcgccagcgcgctcagctgcaggcctcgcgccagcgctgccagcgccagcagcccggccgcccccaggcccagagcccagggcggcgccgcctcctcagccgccccgccacccggctccacgcgcaccgccagcagcgccgagtgcgggcgcacggcctcggcccgcaggcgcaagcgcagcagcgcgcgccactcgcccgcgggggaggccgcctcctcccggcagcccgccccctccggggccacccaggaccaagagctgttggcgaagcccgggccgaagaggcgcaggaggaaggtggcgtccggcgtgtcccgcgccgcccctccgcgtacccaacccgcgcccgccgctccatcctcctccaggcagaagcccagcactcgcgggcccggcgcggcctcccccgcggcgttgcccaggcagagcgcggcgaacaaccagcctaaccgacccgccgcagctaccgccgccgccatcgcctgctgccccctctcggcctctcgcgcagcctaccccgctcgccccgcgcctccccgggccaatcgttacggctcttcgcgcctcctcggccaataggcggtgggcgggggcgggccccagggncggactaggctgcgccggggagtaaacaagtggcggccagggcgggccgggggcgtggggctccgggccccgccgagtctgctgcggctccggatgcgcggggtggcagtggccgggaggacgcggggcggcgggcagggcctcccaagcccggctgtcctcggcccgtgcgcggcgcccggagtcccactcctcccgatgctgtcccccgcgcccggaggccgagccaattctctgggaagttcccggcttgggagcggagcggccggtcggaagaacctcgggtgctggcgcgcctgaagttgcagaccagactgaaatgtgcgagacatgtgcctttttcttaggaaaggccccaggtaccagaaaggttttcagcgcgccgacctacggggctaagagggctgaaataagaaccagtgactgagcgccgggaggtttaaggtttatggaagatgttcatcgcgccgtaccctactagaggtttggggacgtgggacacagcccctgcgttcccgccgcggaccccgtgataaatacacagacacacaaaatcactaccgccttgaatctggacagctacctcaggtggttaatatctaacaggagcagagtggagctcagaaagactcagcgtgggtgctgggttccggcgcgaccagcctgatacctaggtcagcatctcagccacacaagcaggcggcagttctgtcaggaattactacatctggtgattccacttctcatagctcaccgctgggagaataattcctcaggattaacaagatctattccagaggatcctcactgctgaagcgattttagaagacagtgtggtctgttgacagtatggaatattctttacccatcagatatgatctgtatgtgattggaaggaaataaaccaactgctaacaacacttctctatagatgttcagattcagtaatttcggtatttcttctctacacttatgtacttttcaaatttcctagcacaagaagacttcgacttactgcacatgtcattttacaatgacctttcatccagactctatagaacacactttgctatgtcatgacccgtaacactcacacacaccccccacacgacaccccccccttgacccaccgacacagccacatcaacaaagcttcacaacccacacgacgtagcacaacaccccccccgaaaggaacgacacaacagggaccaacagcgacatcccaagagaacacgtgcacctcgaacacaaggccgcgcaatcacccccaatcaacaaaaccgcggggacacacagacacgccaggaacaaaaccacagacgagcaacagaggacacacggggcgcaatacaacagcccaacgcacccgacaccaactgccgtccacgcggacaagcacgaccgcgagagaacacagacgcagacgacaacacgagaggaggacacacagacacacgcaccacgcaggcagcctacagcacaccacagcaacccaacacgagaccaacccgcccccagtcccgaccacacaccccacccccccagcagcacagacgagcagggagaccaaaacacgcgccaggcgcacagcacaagacagccaccaccccccgcagacacccacgcaagccgcacgcacgcagtatgg

SEQ ID NO: 673038 - DNA, 478 bp, Homo sapiens
  misc_feature (17)..(17): n is a, c, g, or t
  misc_feature (29)..(29): n is a, c, g, or t
  misc_feature (113)..(113): n is a, c, g, or t
  misc_feature (187)..(187): n is a, c, g, or t
  misc_feature (273)..(273): n is a, c, g, or t
aggtggccccggggaanccgatgtgcccncggggcctggccggggggaagaaccccccaaacggtggccagaaaaccagagcctccagggcctggcctaaaaattacctaagncgggaaatattttaaaaagtgtccagaataaatgtgaatgtaacaaagagaagtaatgcccgatgcatttccantgtttttgccattatcctgtatccagtatttccccattgcctagccccgaataatcaagacccagactgtttccttgtcactggantcctggaagccttgccctttcaactggatttatgtttgtttctgctgctgtgaaaccccaaagtaatgcagtaggttttatgtttgtttctgctgctgtgaaaccccaaagtaatgcagtaggttttaattgaaaattgtttaattctattattgataattatttattgtaataaaagtaaaagagtaatttttaaatcctttta

SEQ ID NO: 673039 - DNA, 451 bp, Homo sapiens
ctggttgcagcccgctgaggcagatcttagaggcgacagtattttactgtcacacatttgcaaggatctctcagacagaattgcttcctaaataccatcacaaagcaatgcttaatgtcagcgttgcaaagcatttctgacagtgtggtttgaaaatccggagcagactctcggctcttcagggatgttctggcaacatagctgtgtgttcccagggcctctgaaggttccggctgggcctctgcagcgacgcctcaacggccctgaggaggaactctcgccgctaacagcatgcaggattcatttcctgtgcacagctacacacactgaagaagtgtaattaataaattatacctaggacgggaacagatcaggggacaagcagaggctcttcacaccttagatcacgcgtggtaaacttctataaaatgtcagacagtaaataattagg

SEQ ID NO: 673040 - DNA, 359 bp, Homo sapiens
aaggccagtttttttcccttcaattcctcaagtctggagggtaacaaggtaggggctaggtactgtcctcccacaggtttttaggaattaacgtgtttctcataaaccccaaatgttcggggaaaacggggaacacccactcacaagctaatttatctgcttaaatggaaagtgtgggagcctctaccctctcttttgatctgccaaggatttcctctcagagctgttgcacacacacacattggccttggtaagatacccaacaagccacatacggatctaaatttctaatgtgttcgatgggtttccattccgaaaaaaggaaatgaataaagatttctaatgaatgtaaaaaaaaa

SEQ ID NO: 673041 - DNA, 142 bp, Homo sapiens
cggagggggttaggtgggaggcgtttccctgctttcagggttcaggtaaaatgttgctggtttttaagctcccctgttgtggagtgttttaatcagttttggctttttgagtttttgtggaattaaagggccgctgctgcga

SEQ ID NO: 673042 - DNA, 524 bp, Homo sapiens
cacatttattttcatagtttatgacattgacatacctgtgcataactctgtctcagcattttaaggccctggtggtgcacaggaagccgtgactaaaatgataggtacactgttcctaatacgggatataaaagactcaacaccacacctgacaaaagaagctgttgtcttaaagatgcatcttcctttaaagtaaatgaataacaaaggtaggccataaggagcttcttatctactttaagctcttggctggcttttccaggaagtttgaggagataaatcatgactcattttctgcagggtcagtggggaaactggagaggtggctgtccctgttcctgccggtgcctgaagctttcagtgttgttccatcacactctggctccatacctttcctcctgtcctccctccctgttggctggagtctaatgtgacacttcttccaaaacacagaaccgcctacattgtgtaagaagactctcaaaaaccattgattgaaatgctgctgatgccaaaaaaaaaaa

SEQ ID NO: 673043 - DNA, 469 bp, Homo sapiens
cccacctgtaccatatgtaatagtttatactaactgtggaaactctgtatataactgtgaggtggagtacatttcatttagaacaaatatgcccaggaaaaaaaggcaaataagaagttaatgatgggaaaactgttatgtagctattatgaggaatactgtattatgaaaaatgttaagatgcttaaaatagatgtttttgtatgtctgttatcaaagaatttattttcatcagggcagtttaaggtacacagcaaaataaagaggaaagtacagagatctctcacatagcccctgacacacacagacatagtctaccacataatcagtatatgttgattgtcaggcgcagtgactcgtgcctataatcccagcagattgggagccccaaggcaggcagactgactgagacccaggagtatagagaccagccctggagaacatgacgaaaccccatcatctattaaaa

SEQ ID NO: 673044 - DNA, 866 bp, Homo sapiens
  misc_feature (793)..(793): n is a, c, g, or t
ggagagaaggcatacacactagtggacctcagcacccaaggaataacacggtggtgagttccatgggttttcttttatgcctaatatatcccaggcttggaactgaagaagctggcagcctggaaacagcaatgggtacagactgaaaaaccctgttctctttaactgaaggacgaggaacaagacagcctagcaagccagaaaacttttagaccataactgctgtgctctaaccaaacaccacagaaagaaaaggccttacatcaacttgtgcctgccagtgctgagtggggagcctagattctctgttccttcaccacctcccaggggtaaagaggcgagcccctcctgcttgtgtcagtgttggggtgtagtactgagatactcctgccctttacagccaaggttatatcagcagaggcctactgaatacccagaattcctttccctgcgcagcactaacaaggagcttcctccattcagatgtccacataggccaagtgggaaacctggacttctaatgccatctggcactaatatggcagagccctttccccagatggtacagtgtcaaaggaggcatttaaactagaaggtttaaatatggtccagaatctcataacaccccaaatgtccaggtttcaattaaaaaatcacaaatctcagtttgagttaaaaaagaaaaccagtagacataaacactgaaatgacaaagatgttagaattatttgataaatattttaaagcagccatcatagaaacacttcagtgagcagtcctaagcacactgaanacaatgaaaattttagggaatcagttagagatacaaagaaatgaaatttgggacctgaaaactgcaataagca

SEQ ID NO: 673045 - DNA, 395 bp, Homo sapiens
tgacctagaggatcccccggagccttaacctagctggttgggcgcggtggctcacacctgcatcccagcaccttgggaggctgaggcgggcggatcatgaggtcaggagttcgagaccagcctggcaggatggtgaaaaccccatctccactaaaaaatacaaaaaaattagccaggcgcagtggtggacgcctgcatcccagccactcgggaagctgaggcaggagaatcctttaaacctggaggcagaggttgcagtgaaccaagatcatgccactgcactccagcctgggcgacagagcaagactccgtctcaaaaaaacaaacaaaacaaacaaacaaaaaaaacccctagctatataccctcacaccgtacacacaaaccaagcaccttg

SEQ ID NO: 673046 - DNA, 413 bp, Homo sapiens
agcagattgtatttctttctggggtacaagagatgttttgatgtaggcctgcgtgtgaaataattatatcatggagaatcatatcatggagaatcatatctatggaaattgaggggtgatcatcatcacccctcaaccatttatcccttgttacaatccaattacattcttttatatgtaaatgtaccattattcattgagtatagtcacccccgttgtgctatcaacatagatccttttatatgtacccccagacacacactgaaattacccaaagccaaatgtattctcaggtacaggatttcaagtgactaacttttcaatgtgatgatggactatatttctcccctctaattctgtccgaggataggacagcaaagatttttgcctcaagtagccttagaggtaccaag

SEQ ID NO: 673047 - DNA, 872 bp, Homo sapiens
ggaagaaggcccctcggctcagcagagcgctatcctccactgttacccgggttccccggctggctaccgggctgctccgtgcatctttccccccaggcgtcaggaactgcgcctcatggcggaggtgacaggtgaaggtgcagccgctgacgcgaatccggtcgaaatagaaacacagcgtaccccagtgaggctccggtttggactccatcaggcgcccagtcatttggggcagtggaccccttctccgggatccccttgggagtggccgggaaccggggttaggattcatagaattatgtcaccagttccctcatggaatcacagacccaagtactttcagaatgaatggcctcattattagaagcccagcaggcgggcagttagccattcaataggttgtgtctatggggtcagttctggatctcttaaggagcaatacgggccttttatataggactacaagggactcttcagaaatggctgcgtacaaaatgaagggatccgataaaccaagaaaaactagttataatcaaatacattagaggatgcgggagaactcaaaggaattattggagcagagattatcgttataaaagtaattgtgccatttacgaggaattcacaaaattcttgaaagaatctggcacagtaaaaggttaatcaaagctggtaagtctggtagccagctcacaaacagcaggggtatatgctctatttaactgggagcagaaccggtcttggactgggtggcgcctggtacacgcgccccgcattttgaatcctgatctgggacagtgccttacccacaggtgtgtaactttccaacagtccaggcgcaaacgtccggatcgcacagagccctgttccgc

SEQ ID NO: 673048 - DNA, 765 bp, Homo sapiens
  misc_feature (54)..(54): n is a, c, g, or t
  misc_feature (103)..(103): n is a, c, g, or t
  misc_feature (110)..(111): n is a, c, g, or t
  misc_feature (117)..(117): n is a, c, g, or t
  misc_feature (132)..(132): n is a, c, g, or t
  misc_feature (151)..(151): n is a, c, g, or t
  misc_feature (157)..(157): n is a, c, g, or t
  misc_feature (173)..(173): n is a, c, g, or t
  misc_feature (186)..(186): n is a, c, g, or t
  misc_feature (195)..(195): n is a, c, g, or t
  misc_feature (206)..(206): n is a, c, g, or t
  misc_feature (214)..(214): n is a, c, g, or t
  misc_feature (225)..(225): n is a, c, g, or t
  misc_feature (233)..(234): n is a, c, g, or t
  misc_feature (237)..(237): n is a, c, g, or t
  misc_feature (267)..(267): n is a, c, g, or t
  misc_feature (284)..(284): n is a, c, g, or t
  misc_feature (288)..(288): n is a, c, g, or t
  misc_feature (328)..(328): n is a, c, g, or t
  misc_feature (336)..(336): n is a, c, g, or t
  misc_feature (348)..(348): n is a, c, g, or t
  misc_feature (365)..(366): n is a, c, g, or t
  misc_feature (369)..(369): n is a, c, g, or t
  misc_feature (375)..(375): n is a, c, g, or t
  misc_feature (381)..(381): n is a, c, g, or t
  misc_feature (387)..(387): n is a, c, g, or t
  misc_feature (411)..(411): n is a, c, g, or t
  misc_feature (420)..(420): n is a, c, g, or t
  misc_feature (468)..(468): n is a, c, g, or t
  misc_feature (484)..(484): n is a, c, g, or t
  misc_feature (528)..(528): n is a, c, g, or t
  misc_feature (548)..(548): n is a, c, g, or t
  misc_feature (554)..(554): n is a, c, g, or t
  misc_feature (566)..(566): n is a, c, g, or t
  misc_feature (611)..(611): n is a, c, g, or t
  misc_feature (619)..(619): n is a, c, g, or t
  misc_feature (622)..(622): n is a, c, g, or t
  misc_feature (642)..(642): n is a, c, g, or t
  misc_feature (653)..(653): n is a, c, g, or t
  misc_feature (668)..(668): n is a, c, g, or t
  misc_feature (691)..(691): n is a, c, g, or t
  misc_feature (756)..(756): n is a, c, g, or t
tgacatgctgcttccagaatggaactctgtctttaagttctatactagttaggnggctaatctatcagcttgctttaataatgtaatggatgtcctattttanctggggnncctggncaagtcttccttganttcggcttcatcccaaggnccatgnatgttttctttaaaangctgcaagcgaantgaggtagnatgaacacagncatgaganagacatcagcngaagggcnnagngtacggctcccacagcactaatggacagtnggcctcccacggctganaatncaaaacgcagtgtgacccccacatagctccggggggtccntgcctttngtttcttctgcnacatgggccacagggcnnaantctggntggcanatgtcnccttgttggaggcatgcggggggnggggggggngtgatgccaagcatacagaagctaagttggccatgttcaaggttagtntgctggttatattggnagcattggaccatagtcaaaagatgagatggcctaacagcatgntgactgacatggcatagatngtgttngtgctgacagantctgtaagggtcttcagcactggtgaaaacccataagtgaaagtnatgaagantanggcactcttcaggtcagccnacgggtctgcncactcttcttccgcncttcacctccatcaatgagatcnaacaaaacatacccaatcagtgaagaagccaggccagtccctaaaagccaatggggggccagaanacctcattc

SEQ ID NO: 673049 - DNA, 651 bp, Homo sapiens
  misc_feature (17)..(17): n is a, c, g, or t
  misc_feature (25)..(25): n is a, c, g, or t
  misc_feature (37)..(37): n is a, c, g, or t
  misc_feature (184)..(184): n is a, c, g, or t
  misc_feature (206)..(206): n is a, c, g, or t
  misc_feature (395)..(395): n is a, c, g, or t
taagcatgcaatttttnatggtttnctaaatctattngtacacttaatatgctagtattaatttcacaaacagtataaagaatgtactccaatgatattacgcggcaactactcacctgaaaaagaaaacatggtctctgaaataattcctaattatacatttcggcaaataagcactataacngttaaaaggttaagacttcagngtataatctcaataacatcctgcctttttaaaattggcttaaacacatttggttagaagatctatgcaaagataacacacggttcttaccacgtgcgtagattaccacctcaaactatcagaggcgaagtgaacaccacaaaatgagcacactatttagccacaatgacgggccccagtaaataacttnaatcacgcattattattaaaaaccacacgtgagtgataaacatcgacaattgtaaccactgaatctagataatacgcgcatctggcgatctcaccatctaccgtcctaacggtgcactgggggtaaaccaccgagaattcattctacataaatgagctatgttaacaacgataacaatatttcatggcttgatgaccgggtcacatttctagtccacacagtacttcactgtgaccattctcttaactcggctaaa

SEQ ID NO: 673050 - DNA, 589 bp, Homo sapiens
gacgaggcgggcgcggaggtgcgctgcggggggcacccgtcggtggagctgccggggtacgcgccctcggaccccgacctcaacgcctcctacccctactgctgccggccgccctgcgagacgccgcggccctgggagacccatcgggcctgctgatcccgcgggccggacccccatcccgcggaccgcgcttgcgttccacccaccccgccccgctcaggacccccgcggcaagggaggacgggcagcggggcggggtccaggccaggcctcaggggcgccgcctcttccacgtggctttgcagcctccggcctggccccctctgcgggctccgtgaccacaggagggggcccctgatgtgaccatttctgtatctgggaggtttctcttcttatttgtgtcgttcatatctggattccattttcaagtttacaataaatgtttgggcttggctagcccgactgcactttttttggcaagtccaaaccctggggctgctctgcctggtgttccgaggcgagggggacagagcgagcgccccaggacggcgactttccacggaggaagagcagacagagacgcagagca

SEQ ID NO: 673051 - DNA, 422 bp, Homo sapiens
  misc_feature (26)..(26): n is a, c, g, or t
  misc_feature (63)..(63): n is a, c, g, or t
  misc_feature (82)..(82): n is a, c, g, or t
  misc_feature (160)..(160): n is a, c, g, or t
  misc_feature (165)..(166): n is a, c, g, or t
  misc_feature (180)..(180): n is a, c, g, or t
  misc_feature (229)..(229): n is a, c, g, or t
  misc_feature (263)..(263): n is a, c, g, or t
  misc_feature (265)..(265): n is a, c, g, or t
  misc_feature (278)..(278): n is a, c, g, or t
  misc_feature (299)..(299): n is a, c, g, or t
  misc_feature (332)..(332): n is a, c, g, or t
  misc_feature (346)..(347): n is a, c, g, or t
  misc_feature (354)..(354): n is a, c, g, or t
  misc_feature (356)..(356): n is a, c, g, or t
  misc_feature (415)..(415): n is a, c, g, or t
ccgcggcgccgcgatggacctcgagnagtcggaagagtttaaagaacgctgtactcagtgtgnagctatctcatggggtctnactgatgaaggacaaatatatatagcacttcttgccacaatgttacagagaaatatcaggaagttacaaacactagancttanncctaatacccaaanaaaagccctcaaccgggggcttaaaaaaaaaaacaatactgaaaaaagntgggattggtatagtgatgtagaaggtatccaananattcaatatcaanaagcagaagcacttaaaaaancttgagagtaggcccagagattaaaaaacgatnttttacaaaatttnnggaagcncnaccttcagaagaacaagcaggacatattgtaagaacccagtttataccactgagaaganaacctac

SEQ ID NO: 673052 - DNA, 221 bp, Homo sapiens
  misc_feature (215)..(215): n is a, c, g, or t
  misc_feature (221)..(221): n is a, c, g, or t
cagccgagtggaatgccgagcgaggacagtcgtgcaccgtggcgggcctacgcgttataaaggatcagttggccgattgagtttttgggggcgagtgaggttatttatacacaggactgaagtgggaccgagagatagtctatgaagcaagaccgatcgagacggtctgtttgagacttttgagaagtgatgaggttaagaaataatttagcaanaaaaan

SEQ ID NO: 673053 - DNA, 933 bp, Homo sapiens
  misc_feature (459)..(460): n is a, c, g, or t
  misc_feature (705)..(705): n is a, c, g, or t
agcggatctgcatatatccacttgtgacagagcgctcacagtgcatcaatatggcttgtccccgtggatctctagctgaaaagggccttcccagagattcaaaccaatcggttatatgatcgctccatggatgagagtggtggaaggtctcagtacgttaatgtttgaaacagctaaagcagaacgaaaaggacatgtcgtatctatacaaagagttacatgataatcatgagttagtgtaggacttggagactatacatgtaatgattgagtgtactgaaagactgtttaacatcttcagggctcacccgtgcaagtcaaatacttcgcgttgccatgcttgttcaatgtatgatactcatgaggctgtactgaacagagggctgtggacatgatacctactagagcaagagaaatggggttaccatacccatcgggaggccgcatagggggtctaannggtcctggtcgccggacggagcatccggagttggttcgctggctgcggcgagctgacctgtggtccaccgtctggcgattcctcatgcgttgctagactgctccttgcactctctagcgcaccctccaccccatttctcgcgcgtcgggcggcttaggctttgattcgtgatcaatggtccgcggaacaaaacgagacgatttgtctctgcttatccgcacggagtcgggagtagactctccaantccgagtgtcgaggccattgaaggcaggcttgcggcaatgatgaagtgcaatggaccccatgacagcccactctgacgccattgcggactaggtctctcgcgtcccaatggaaacccgggttgtgggggtctggggctgcgtcgtagaggcgaggaccctaatcctttacgcgatataaggcgactggtggttgaacaggactctccggcggatatgaaggaggaaga

SEQ ID NO: 673054 - DNA, 382 bp, Homo sapiens
attcccagcaatggtggaacatgaattgcctgtaatttctacaatttaatactgtgagttataattttctggctttaatctgtggtaatctgatagtaatctattatcttaatttgcatttttcatgggtacaagccattgtatttattttcctaaatattgataatttataacctttgattatctagtgagttgttggccatttcttattttaaagtatttcagtgtataataattaaatatataattttttcatgtgttttgcaaatttttttatgtgctttgcaaatattttttcccatctcttcatttgtcgtttgattctgtttatgctgttcctccccccactccagcctgggaaacacagaaagaccttgtctca

SEQ ID NO: 673055 - DNA, 586 bp, Homo sapiens
  misc_feature (293)..(293): n is a, c, g, or t
  misc_feature (406)..(406): n is a, c, g, or t
  misc_feature (449)..(449): n is a, c, g, or t
  misc_feature (479)..(479): n is a, c, g, or t
  misc_feature (497)..(497): n is a, c, g, or t
gaggctgaggcaggagactcctttgaagccgggagacagaggttgcagtgaaccgagatcacgccactgcactccagcctgggcaacagagcaagactctgtcttaaaaaaataaataaagaaaaattacgaaaaaatgtgcttggatgggcttggcaaactttagccattagctcacgtaccacttcggaagggcataccttcagtcacttcaccctttaatccctctgctcaagactaaagttctgagaggaagtctaatcggctgagttgtgtccatgtgggcagtgcangaaagggtgcagcgggaggcggctccagggacgtctttggcttccatcatgggagagcaggcgcctggattatccaccctaacaaatctgggcaaaggaaaacgaggttctcngaggaaggagacatagagcccaaggagctaaccaagagacaantagtcatcctgtcttgtcattttcttttanacatgtgtgtacattatnttacacttatcactttgttttctttctctcctttaattgcaccctgctgccaaaagttaacaataaaatgaaagtacttgagatagctc

SEQ ID NO: 673056 - DNA, 266 bp, Homo sapiens
  misc_feature (58)..(58): n is a, c, g, or t
  misc_feature (142)..(142): n is a, c, g, or t
  misc_feature (224)..(224): n is a, c, g, or t
  misc_feature (232)..(232): n is a, c, g, or t
  misc_feature (250)..(250): n is a, c, g, or t
ctcaaacgaatcacccaccttgacctcctaaagtgctgggattacaggcgtgagcatncgtgctgggcccaaattttaaaatacagtataacaaatatttgtatagcatttatattattaggtattataagtaatctagagnttatttaaagtatacaggatgacgtgaatttaagttacatggaaatactacacccttttatgtcagggacttgaacatctangggttttnagttagggggagccggtnctagaaccaatcccct

SEQ ID NO: 673057 - DNA, 174 bp, Homo sapiens
attggaacgaacacaggaaacacagattctttgtccttttcccaacagcccaggctgttgatacctcagagccttcatctttactctccaaagatgaaagggaagcccccgatctctctacactgcatgtcatcacggggtgagcctgccatttccatatcttcacaccgtgcc

SEQ ID NO: 673058 - DNA, 128 bp, Homo sapiens
tgctaagtgagttgaaaagcgaaagtgctgaatcccaccagcatcgctggatgtgtcatccactgagcccttcatctcccatgaaacttgaacttttaaccaatttgcctagaattctgacaaatttg

SEQ ID NO: 673059 - DNA, 150 bp, Homo sapiens
cgtctcaaaagagaatagcgaactgcctttatgtacaaaagccgcagaagaaaagttcagtgctgtggcctgtctctgatgccctccatattccgctgcatctgaatccagcacaataatgaatttccctcatccggttatccgaatgac

SEQ ID NO: 673060 - DNA, 158 bp, Homo sapiens
caggatatgactgctttctttaaattatttggtaggtttaaaatattgtaatagtggtaattataaagtactaaaaacctagaatgtaaacatctaaatgtttttattctgatcaaagaggatatcattatttttgtattaaatttcccatctccaac

SEQ ID NO: 673061 - DNA, 1096 bp, Homo sapiens
gtgagccccgagtgccactgggccgggtagatgggccttatagtcggcggtggaggctcgagagctgcgccgggagagctgtgccgagagtcttcgtctcttttttggctcctgcacttgttgtgtctccctggaggctcgtgcgccatcgtccggccgtgtacccggctagatcgcgagtgtggcacagcgtggccttcgcctgcgtggggacatccgtttcgtacgtggctagttgtctcctctccggtgcatgccgtaggcattcatctgtacctggcccatgctacggtgactactgcgggctactatgagctgggaattcacttggcatggtttccaggagacacttggtcctcagctctctgtgggatgatgtaggaataggaatcactcgctcttgccgtaggcggaaggaatcttagacagcaggaaccagctgtccggtgaagatgtagcagacagccgggtgtagaggcagtcgcaccgctgcctcgttaccttgagtgttcgatccacagggcctactgcgccctcgcagtggactctgtccccattccttcaatgccccgaggttaccactcggccgaaccttgcaccacggaggctggaagcttgggcccgttggttgaattggggcaaaagctggcttgcctgtaggcaatgttcccccgtagggcttgacgggtcctatgggacctacagttgtggcggcttaatggcccttgttgccttggtaattatgcacccgccacgtggagacgtgtgtcagggaccgcgaggtgccacggacagcaaggtgggctgcccttgtggacctcttggcggaaagaagcttccacgggtgttccttggcccagggtcaaggcgcgttcggtgcccaatgggagaaaaattcccttaccccttcagcaaagcttgaaggctcttggctccaagggtccacgggggaaccttcaggacacgggagggtgagcacatccttccattgattttttccccatcccttaacgttagccagctatgttctaaggaacattaccttgggaaaaaggagattttactctttgattgggacggcccagggcgggttgga

SEQ ID NO: 673062 - DNA, 136 bp, Homo sapiens
tcgaatgcggtgcacggccgacaggccacagttgtgggcgatgtctgtggccttgctggccacggcgagatcgtgcccaggcgcgggatcaccagccagcgccaggctcttggccggcgcctcgccggtggcgggg

SEQ ID NO: 673063 - DNA, 224 bp, Homo sapiens
gtttgggaccaccctgtccaacatatcaaaccccctctctattataaattcacaaaaaaaaaaaaaaaaaaaaaaaaaaggcccgttgtgggggggtgcatttgtaatcccacctcctgggaaggctgaggcaaaaaaatcacttgaacccgggagacaaaggttaccgggagctgagatcacgtcactgtactccaacctgagggccctgaccctgtaaactg

SEQ ID NO: 673064 - DNA, 100 bp, Homo sapiens
gtccttacgactttggaggtgttcttactaatagtaaccgagacattataaatggagatgcaatccacaaacgaaatcaatcccacagggaaatgcactg

SEQ ID NO: 673065 - DNA, 149 bp, Homo sapiens
tcttctgtgcgtcgattcctatggatgctgccatccttcctggacgagacgggacggtgaaagctggatgtgagcccagatgggttcccagcccacatcacccaggagctggctggtgactggacctgggagagggagcactgttgccc

SEQ ID NO: 673066 - DNA, 694 bp, Homo sapiens
gcttaaggctcaccactgagttcgtcacagaggcctgggggtcagcacggagggggactggagctggagagtgactgtagagcctcaggactcaggtacttctgccctcccttaggtctccctgttcttctatgtggtgacagatggcacggcagtcctactaccagaggttggggccaaggggcagttgaacgtttatcagtgggcagaccagtgaacttggtgagttccgctttacagcttttgccaccaaccaggtccaggggatacagcccccaagtatggcaggtacaatgtcttctggagctccaacccaggacatgccctggatgacagagatggtaaagagtcgcctaaatagctggtgtcagcaatcgagccccaggggccccccctgaacgctagctcggctggccagggatccctgcaagtgggcaggacagaggtccaagtgggcaagggcatgggcagattcttggatacagcaggtgaccctgaacaattcccatttccatagacgttggggtaggaatcaggcagtgaccaggcaggaggcaactcaagccctgacaagactggccggcagtctactgtacccagggccctggagaagccatggctggagggctataagaagagcggctatggagaacagacccttccagcgtgaagggaggacggggccatgagcctc

SEQ ID NO: 673067 - DNA, 219 bp, Homo sapiens
gagcaggaaagagagaaagaaagagatagaagtagtacagaaaaaaacagtgtaccctcatgcctttaacaagcctggagtaaactttaaacaccatacaattgttcaattggcaggtctatctccagtgaccctgataacactccacataccaccttgttagtcacgcgtaaacagggagcgtagccatgaaagcactgagagccactgcacaacctg

SEQ ID NO: 673068 - DNA, 121 bp, Homo sapiens
  misc_feature (64)..(64): n is a, c, g, or t
  misc_feature (66)..(67): n is a, c, g, or t
  misc_feature (73)..(73): n is a, c, g, or t
  misc_feature (92)..(92): n is a, c, g, or t
tgatgactcagaggaggagaaggcagcagcacccccaagaagactgtacctaaaaagcaagttntnnccaagnccaaggcccagtgaaagcngctaccacccctacccggagtgtactagt

SEQ ID NO: 673069 - DNA, 173 bp, Homo sapiens
ctttttaaacttgaaaaaactgggataatgttaacttttaaaaaaaacctttggcccccctaggaattgatttttgtttccagattgttttgtttacaaattgttagtctttgtttctatgaaaaacttttagggggcctttttaaatgtcttagaaattaaaagttggccca

SEQ ID NO: 673070 - DNA, 319 bp, Homo sapiens
gttgtgtcatccccttcgtgtgggggcgtcttgttgggcggttgggtacttgcgcatgcggtgggtttgatgagctgggactggtagctggtattgagggcttcaggtcctgggagccgactgagtggcaaagggcttaatagtagacagaggggttagcgaagggtgctgggtgcggctctccaggccctggaagggtttctggtcttggggttgccagtgccaaaatcccccttcttgttgtggaaacagggtaagtcgggggatccatgggaaccttggaagccaaccctttggtggcaggggtagggcagggagg

SEQ ID NO: 673071 - DNA, 366 bp, Homo sapiens
  misc_feature (83)..(84): n is a, c, g, or t
  misc_feature (102)..(102): n is a, c, g, or t
  misc_feature (156)..(156): n is a, c, g, or t
ggcccagccagtgaaagggggctgtgtctgaaacaaagaccgcggtcgctgcatcgtcttagagctgcaagagggaggcatcnngttgcggccgcctttagngacaccatgtgaccgtttcggctcactgacacgcagctttggttaaagagcggncgcacaggaggggaggagaccgcgcgcgggacggggaggaatggcctgtccgcgttaaaccatcacaagccatggttgcggaagggccacgcgtcccccagtaggagaatgactccgattcgtgaccctcagcgcccggtccatgttgatagtcaaggaaatttttgagctatttacagcttggcccaataatgtaaagtatactacttc

SEQ ID NO: 673072 - DNA, 382 bp, Homo sapiens
  misc_feature (305)..(305): n is a, c, g, or t
  misc_feature (314)..(314): n is a, c, g, or t
  misc_feature (321)..(321): n is a, c, g, or t
  misc_feature (326)..(326): n is a, c, g, or t
  misc_feature (328)..(328): n is a, c, g, or t
  misc_feature (331)..(331): n is a, c, g, or t
  misc_feature (336)..(336): n is a, c, g, or t
gtttacacggttgtggacaaaatgtttctggctggcgaaattcgaaagaccagccagacgaaggtgcttaaacagctgctgatgcttcagtccctggagtgagggcaggcgagcccccccccggccccggccccttctggaattgcctgcttgctttccctttccagggccgtgggcaacccaacagtcctttcctcagctgcctaggaggaagggacccagctgggtttgggccccaagggaggagactgcccccccctgcctttgggccctggctgtgggcaaaggcccccgtgtgtgttccnagtaaccgngccgttnttgtntnatnccatnagggtttgtgggtggagtcccccataaacctgtggtcctgcctgga

SEQ ID NO: 673073 - DNA, 180 bp, Homo sapiens
  misc_feature (24)..(24): n is a, c, g, or t
agctccaacaagaaggatggctanatccaaaccagatagtggtatctcacataagaaattttaacttaatatggcacataaaatactagtatgctttaggacttcccagagaatggttataatgtcaaatcgccaaagagaaatgaatatacaatgtagaggaaaacacatgggctgtgt

SEQ ID NO: 673074 - DNA, 353 bp, Homo sapiens
tgatcatctaagacgctttggaggtccagtgctgagatgtggtggcgcatggtgaaatcgacgactatcgtcgggataggctcgaaatgcgattacgcggtcgagataacgtttacctccgatcgaacctgattgctccggcctgctcaccaatgaagatctcctaataccacagaccggtagcgatgcgaaagagatcgtgtctgtctggcgacaggagtcagtgccgtggcgaacaggtcgactggttggctgttccaagacgaagcgtggccgaagacgttatctttgtcggcaacgatggccgacgcatccgcaggctccccgccaagctgcccattcggcgcatagcg

SEQ ID NO: 673075 - DNA, 305 bp, Homo sapiens
atgatatggacttctaacgagtgcacggaatggaatggaatggaaccaacccgagtgcaatggaatggaatcgaaattaatggaatggaatggaatggaatcgacccgagggaatggaacggaatgcaatggaatggaatggaatgcaatggaatggaatggaacggaatggaatcaacccgagtggaatggaatagaatggaatggaaagcaatcaacccgagtggaatggaatggagtggaatggaatggaatggaatgcattggaatggaatggaatcgaatgcattgaaccggatagcttg

SEQ ID NO: 673076 - DNA, 1148 bp, Homo sapiens
  misc_feature (165)..(165): n is a, c, g, or t
  misc_feature (167)..(167): n is a, c, g, or t
  misc_feature (215)..(215): n is a, c, g, or t
  misc_feature (240)..(240): n is a, c, g, or t
  misc_feature (247)..(247): n is a, c, g, or t
  misc_feature (249)..(249): n is a, c, g, or t
  misc_feature (265)..(265): n is a, c, g, or t
  misc_feature (267)..(267): n is a, c, g, or t
  misc_feature (275)..(275): n is a, c, g, or t
  misc_feature (283)..(283): n is a, c, g, or t
ccaaactctgggggaaatgactcccctctgccctcgccccgcgctctgctaccatttccttacgtctctgcttcgctcaggatgcaaaacgcgcgaggcgcacggagagggccgaagccgcggtactctccgggccaggccgcccctcggcgcgccgcgcagccngngattccccggccgctgtccagcgctggccgcctgagccaaggctgccngggagccagtacagtcggggccgcnggctggnangggcgagcttcctaangngcgggggngaagcccnggcgccggggccgggtacggacatggccgtgcgcggcaggggctcctggcccgtctggacatgtgaatccacgctggcttgacgcgctgtgggctggaacgtagcgggtgtgcgatgctgggtccttcttgctgcgcgcgtggcggcgcgtcgcgcgcggcttggcggtgcgtccaactttacggggtccccctggcctgatcgcgcgctgcgccggcctttcctaccgtcgtcgtcgacggggcctgacgccctcttacgaagcctcccccttttcaaacgtctggggccgcccacttgccgcttgcacattgttcggcacacacggtctcgaccctcgggtgaccccaatgtcaagttttttacaccgattccccttcaaatcgcttggctatatctctgactctacaggggggcgtttccaaaaacgcccacaacaccttgttgaacattccccggcccttccccccttctatacgaggtccccatgtaaatcttggtcttgtgcacccttccgtttcccccgggcggggcacggcgcgggtcgtgtccctgccctcttgcgctgtgcccggtgtcggccttgtgccgtgtgtgcacccttcctccccggcctactctggcgccgttcgcgcctccctcctttgcctggttctgcaacccgccctccagctcccgcttgtccgccctccttcccgtcttgtacgctcccccggggctggacgtccttcccttcggcatccgcgccttttccgtggggcctttcttgcaccgatgtggccccttgacttccttgcaaccgtacaacgctacgcgccgggcccaatttcgacacgcccgcactgataacccgcccgggggcccc

SEQ ID NO: 673077 - DNA, 148 bp, Homo sapiens
tttcccacaggcagctgctatgggtaggacgcaggttcacgaggggcatcacaacaaaccccagtacagtcagcccggcacagcggcctccttgtgttctgtggtcttccctgctgctgccacatccttaccctcctgatgcctctga

SEQ ID NO: 673078 - DNA, 554 bp, Homo sapiens
  misc_feature (165)..(165): n is a, c, g, or t
  misc_feature (167)..(167): n is a, c, g, or t
  misc_feature (215)..(215): n is a, c, g, or t
  misc_feature (240)..(240): n is a, c, g, or t
  misc_feature (247)..(247): n is a, c, g, or t
  misc_feature (249)..(249): n is a, c, g, or t
  misc_feature (265)..(265): n is a, c, g, or t
  misc_feature (267)..(267): n is a, c, g, or t
  misc_feature (275)..(275): n is a, c, g, or t
  misc_feature (283)..(283): n is a, c, g, or t
ccaaactctgggggaaatgactcccctctgccctcgccccgcgctctgctaccatttccttacgtctctgcttcgctcaggatgcaaaacgcgcgaggcgcacggagagggccgaagccgcggtactctccgggccaggccgcccctcggcgcgccgcgcagccngngattccccggccgctgtccagcgctggccgcctgagccaaggctgccngggagccagtacagtcggggccgcnggctggnangggcgagcttcctaangngcgggggngaagcccnggcgccggggccggaagaacccggccaattttcacccagtaaagcggggcccgggcctgcggaagcgtgggccgggcatgcgagctcccgctatgggcccgggttcctccggaggcaacgccaaggggcccccaacccgagggggctccggacgcagccgccggcgggagctaacgacccgtggtcacgaggtggccttatggattaacacaattacccaccttatggcaggaaaggctcggtcgggacaccggggcatccaagaaagagc

SEQ ID NO: 673079 - DNA, 752 bp, Homo sapiens
agcgggggcgtgcggcaggggcccagccctgccttccactgtgctctctgtcagctccaggtcaattcagagacccaactgaagcaggtgggagaagtgaggctgtgactggggttggagccagggagggggttggggggcaggcagcagagggagggaccctgaagagagcaggcagggcacagcagagcaggctggagaagcgaggccagcaggccagtgggccaattaagggcaaaggccaagactcacctccccttcccagggcctaccccagtgtgaggacccagtctgtgtgctttggatgtatgagctgtggatagaggaaggggaagagtagaggatgatggtcttggggtccttgggctttgtcatcttgttcccagtctgtctgtctgtccattagcacatgagcagcaggaggcacaaagaccgcctggccgggaagacccccaagccctccagccagcacagcaagctgcagaagcacgcagcgctggctgtgagtatcctcaagtctaaactggccttgcagaagcaactcaccaagacgttggcagcccgcttcctggccagcccgtcccctacggagcactggcatctgtgctctgccaggggcccctgtgcctccggcctggccctacagcagccactacctcttcctggtcccatcctgggcccagctctgtttcgaccccagaggagctgtccgcctgcacaggacctatcgtccttgcccttattagcctcat

SEQ ID NO: 673080 - DNA, 707 bp, Homo sapiens
gaggcatcgaggcatccagcgcaggggcttctgctgagtggggctggcggagctctgaggaaagcgcagataagttttctctctctttgaaagataggagattcaatagcaactagcttataacacatatatagtcaataggtgtactaagatattgcttagcgttaagtttttagcgtaatttgaatagcttaggatttgaagagaaacatatgaagacttagaagacgtacgcatgaggaaggaccaagatgaaaggttatctaaaacgatgacggaggttgagatcgaagctctcttcatggagtaacaaaatgtatttgcagaggacacattgagagagctggactgacagagctcgcgatatttaataccaatagaatgggtcaatgcgtgattagattcaatatcgctggtgacttaaatagttgtaaaggtcagtttaaaagttgtaggtgattaagataatttgaaggcgatcttttcaaaagagattaaagccgaaggtgacttacaagaccttgaaatccatgaccgcagggagagttgcgtcatgtaacgcctagtataacgcattgagtaaaggcagacgattgtggacagatgacttgggaagtggtaggatgagacaatctgtctgaagatagaagttagaagtgcaatactgccaatacacagaggtacgggaagggcgaacgacacgaata

SEQ ID NO: 673081 - DNA, 118 bp, Homo sapiens
gccaacatggtgaaacccgtctctacttaaaatacaaaattcagccaggcatagtgatgcttgctctgtgcagctactcggcagctgaggcagagatcgtttgacccggagcggagtt

SEQ ID NO: 673082 - DNA, 200 bp, Homo sapiens
tagaggatcccccttccccacccacgggtaccctccccagccgggaagttcatcactacgtaagggaaagctccttccgcccctccaaagccctcaccaggcctaacagaggcatgcatttttatatcacgattattcaacggacttctggtttaaaacgaggtttataatggtcacggtagacgagcctgggcaagggt

SEQ ID NO: 673083 - DNA, 366 bp, Homo sapiens
gcccccctgtccctaactgtaaaatcagggtcagggttcaactgcctacccccatcctcatatttttgtctgtcccagccccccaggagcattttcattgtggccggctaactccgcctggatgtgaacaggcaagcccagtgggaaatgagtcccggacttgtattgcccagtgggcccctctaaaggtcccttggtttaaagggatagggaaggaggagggatgagaccctccccccctccccgaagtaaatttaggatttgagttttctttatgcccctgagtccaactaataactgtttaggacggaggggtttgctgggttttttcgggggtttttttaaagcaataaactcctttttgcc

SEQ ID NO: 673084 - DNA, 535 bp, Homo sapiens
ccagaaagcaaggggctcaggaagtatgtggggaacagggcagagaaagagcgagtaataaatttaagagcaaataagtaaatggccagggcagactgtgtcatcttgccatctaagtgatagaaactctcagattctatatcattttgagttgtcttaaatcccagtaaactgttatgcttgaattcatgtctttatacctgaaatggcctcattactcatttagactcattttacacattataaaactgtgatccaaagaggtaaatttatttagtacaagtcaaatagcaggtaaatagcagaaccaggaccaaattcagaaattttgagaccaagttcagtactcttcccatttcaccttgaagtgctccacacacacttaaaaaattgaagtaaattgattcaactgaggttattatggtgaaagagaaatgacaagtttccaaagacccagcgatgtgttgcgagtacagtaccataaagaatatccctggtgaagtcatcatattaaactcttctttaacatgaaaaa

SEQ ID NO: 673085 - DNA, 559 bp, Homo sapiens
  misc_feature (13)..(13): n is a, c, g, or t
  misc_feature (29)..(29): n is a, c, g, or t
  misc_feature (57)..(57): n is a, c, g, or t
  misc_feature (111)..(111): n is a, c, g, or t
  misc_feature (126)..(126): n is a, c, g, or t
  misc_feature (551)..(551): n is a, c, g, or t
aacatcagccccnagtgccaagaccttcntattcattaattttaacgccctcagagnaaggccctcagggagggtcatcctcccatgttttgaagaagagactgaggttcnagagaggataagagncgtgacccaaggcccacagagctatgggtgtccagcacccaggatttgaagcccaggtgaatcccgagcccttttccccatatcatctgtttgttctgttgtctaaaagcacactgcaagccgggctcagtggctcatgcctgtagtcccagcactctgtggggccgaggcaggcagatcgcttgaggtcaggagtttgagaccagcctggccaacatggtgaaaccccgtctatactaaaaaattcaaaaattacccggacgtggtggcgcatgcctgtaatcccagctacttgggagcctgaggcgggagaattgcttgaacccgggaggcagaggttgcagtgagccgagatcgcatcactgcagtccagcctggatgacagagtgagactccatctcaaaaaataaataaataaataaatnatgaaatt

SEQ ID NO: 673086 - DNA, 265 bp, Homo sapiens
  misc_feature (116)..(116): n is a, c, g, or t
  misc_feature (127)..(127): n is a, c, g, or t
  misc_feature (148)..(148): n is a, c, g, or t
  misc_feature (198)..(198): n is a, c, g, or t
  misc_feature (235)..(235): n is a, c, g, or t
  misc_feature (262)..(262): n is a, c, g, or t
gggcagagcaggcccggaagccagtagtaagatccccaccactcccctgccagggaggaagatcaggtgatcttgtaggcaaatcccgtaggcggcttaccaaggcccacattggngacaaagggtntatctgttttttggcacagantcccctgcaagaaaggtgcagtcggtttctttttgcaggccctttcccantttgcccacttaaggtcaagtaacagggggagcttgnccagttaggaggggaaggttccagggnagg

SEQ ID NO: 673087 - DNA, 759 bp, Homo sapiens
tggtacatatggttagggtcagccattttataatgatctcggatagaccaaaccagccttcggagcgttctctggtcctacttcgtgacctttacctgtggtgggttgtgacccagtgtttcatatttaactctcaaagggagcaacacaacaaaccctgggtaaacaaaagagcaaaaagtgaacaaccagaacaaaccaactctatatttcgcggagcacattatccaggatacaccctattttgtggtgtctatgtgttaccccttacgcgcgtgtttcccatatatacacgtataacagtgtgtaggtatgtgcgtatctgacacaacgtggtgttctacacacagacggggccacacagcactacacagcgggtctcgtctctatctatatttctcacccccctttatcttgtgagtacaataatatagcaaacgtggaggcctgtgtgttctcatatgttctatctctgtgcggcgcgccggtgtgtgagagtaatgagtatatgagtgtgtctgcacacaccaactatgtggttgagctcccacaaaacaactatcaccacaccgagcgcaccacgttctcgacacttctatgatgggcccgaaggacgctgcagcgcccccttcacacacagagacagcaacacacccacaccacacacacgagaggggcggcgcggcggccccaccgacctcgcacaagcaggggatactccccccccccacaagcgggcgggcgcgcccccacaccgaa

SEQ ID NO: 673088 - DNA, 333 bp, Homo sapiens
  misc_feature (239)..(239): n is a, c, g, or t
  misc_feature (301)..(301): n is a, c, g, or t
aaaatttaaactataaataggccgggtctggtggcttatgcctggaatcccagcattttgggaggctgaggtgggaggctcactggaggccaggagttcaagaccagcctgagcaacatagggagacctcagctctacaactgaaaaaaaaatagccaggtgtgttcatggtggcacctgtctgtattccagccgcttgggaggctgaggcaggaggtttgcttgagtccaggagtttnaggttgcggtgagctacacaattgagctatggtggcactactacactccagcctgggccatnagagtaaggccctgtctctaactggaagtcca

SEQ ID NO: 673089 - DNA, 185 bp, Homo sapiens
ccacccggactcagaatctcctcagacgccgagatgcgggtcacggcgccccgaaccgtcctcctgctgctctggggggcagtggcctgcaccgagaacctgggccggctccactccatggggtatttctacacccccatgtcccggcccggcccgtgggagccccgtttacatcgcagtgggct

SEQ ID NO: 673090 - DNA, 389 bp, Homo sapiens
ggtagatctagaggatccgaggcgggcgtcgtcatgaaaagcatggttccctaaacacagactgtctggtccatctcggagtttccacagtcgtgactcacatgcaagcaatgtacaactatggcagggctgggctccttccctcccagacaggctcaaggttatgctccctgtgccgggatcagaatctggaatcaggacggccactccagtgacatgaaaggcacacgggtgacaggacggacaccccagagacaggaaggacgccccagagacaggacggacgcccccagagacaggacggacgcccccagagacaggacggacgccccagagacaggacggacaccccagagacaggacggacgccccagagacaggagggtacc

SEQ ID NO: 673091 - DNA, 346 bp, Homo sapiens
tttcctgacattcccttactgactgctttccctatggactttatatcagatgcagagacccagccttacagaagttgtttaaccaactttaataaccacataagccaattccctgtaacaagtttctttaaaaaagaaggaatgtgttcgacaaaaaaagcaggaccagtgtgaggtatacaaaggtactattcccagactgtgggcatattgcaaactgattccccttggttttttaggggtttatttcctagggttcacagtttccttacaattccttacattagtattttgctgaaaacatggggaggattaaaaaattttccagcattccccctcaacccta

SEQ ID NO: 673092 - DNA, 615 bp, Homo sapiens
  misc_feature (319)..(319): n is a, c, g, or t
  misc_feature (359)..(359): n is a, c, g, or t
  misc_feature (411)..(411): n is a, c, g, or t
  misc_feature (446)..(446): n is a, c, g, or t
  misc_feature (485)..(485): n is a, c, g, or t
  misc_feature (593)..(593): n is a, c, g, or t
cagctcactgcaacctctgcctcctgggttcaagcgattctcctgcctcactcagcctcccgagtagctgggattacaggtgtatgctcccatggccagctaatttttgtaattttggtagagatggggtttcaccattttggccaggctggtctcgaactccagacctcaggtgatatgcctgccttggcctctcaaagtgctgggattataggcatgaaccacggtgtccagcccagttttatcttttaatcagttacatatattcgtttatactagatgaacttctcatttttattaaaccttttgagagtttttntaatcacagtgacttttgtcagtatgaagcactatgagtnctttccatttttagtagatacttcagtgatcaaattttacgcatttgtgttngtcttcgtagcttccaaagtttagtcattaatttngtcaagatttttttctttaaaaactattgtggtgtattngaacttccctcagtcttttctttatagatgtatttaaatatagcagtcagtacttccagtattgatttatgtaagatgctactattgcagttgtaaaaatgctgtgantcctttcatgtgaatatgttag

SEQ ID NO: 673093 - DNA, 135 bp, Homo sapiens
  misc_feature (36)..(36): n is a, c, g, or t
  misc_feature (69)..(69): n is a, c, g, or t
  misc_feature (95)..(95): n is a, c, g, or t
gtaaatccaagggccagaccgtgacctcataaagcntgatctccttctttccagactgtggcaaaagtntccaagcggcattcaaattctgcccntactgtggaaattttttgcctgtagaggagcatgtagggt

SEQ ID NO: 673094 - DNA, 933 bp, Homo sapiens
ataaacaccctaaccctgatttccctagttccccccatccttaccatcctcgttaatcctaatagaaagaaattcataggcccccattcatgtaaacatccattgtcagccaatccagcttagattatcagtcctcataccccacatactaagtattcagtgtgccataggactccaccgaagtctattatcttctgacactgaccactgagccactaagccaaacaaccccagatctcccttaagcctctcaaactagacgaacgttctccataaatattcatcccctggtagcatgtgtatcgttacatggtccattcagtaagaactacctcacgtgtagagtataataaactcagagccaatacattgaatcagttcttcaagatatctactcatcttcctaagttacccactactagactccttagttaccgctaataagctattccaacctgttcatccggctgttgagggcgtagtgagatgatagtccttcgttgctcatcagttgatgataacgcccgagcagatgccaacacagcggccattcacggcaatcctgatacaaccgtatcggcgatgtcggttcatgctcggcttaaggatgattatcctacactccaagttcagtgagaaccgacaaaaatagccgttgtagacgctaatgcaaggctcaccccactactagctgcctcctagcaggaagcggcaatcaagcccatagggtgttcacccgggattccctgaacttagagggccaccagctaagccatatcattcacccttagtggcaggattttttactcggttccccctggaataccattcgattaattgtgaggtacacctgttgggcgggcctcaaaaagaaaatgggcgggcattacagcggcgaagcatcacgtagggaacgccccttgtagcggcacg

SEQ ID NO: 673095 - DNA, 952 bp, Homo sapiens
cctataagcagggaagcctatacacgtgtcctgggagaaactggtagagacataaccgcgtcttatcctagctctagaagtgaagggtgtcactgtccctgtgctctccgccactatccgtatttgcgacctctgggcgggaagaccatgaggtaccccatggagattccgctccgactgaactttctgctgggcggttccatgagcctcgagtgctgcgtgcggtgatggatgggtttactggtgttgttgttgcagggaaggatgggcggtagggctgggttatgtggacccgatggagtgagctgcggggggatttctcgctggagggctgcgagttcagtgatgggtgaatagagcggtgtcgtcttaggtgagtcccgataatttcgttgcaacacgagacatggaggcttggagtgttcccgcgatagctatggggcatctattgcctctataaaaaaatctagtgcgattcgtgaaatcgcaaaaaggtctagaccataggaggcccaatatgtgaagaggttgctaggaatggttgcgttccgaaataccgtaagcacaaatgcccatggatggaagacacctcaattgaagatgagggtgaacagtcaacaagaggaggtgagacagaccgaggtgagttggcatctatacacgccaggtactaaaggcctgtctgttaccggcagagctgagtccaatcagccacccgtgtggaggctgacgtggattaaatcagaccagaagtaccgaggtgattgcgggagaatgaacattgtgtgggaagacctggccaatggctggtcaaagggagtaaacccagctcaaagaggccaaagccccgccagaaaggcacagggcaaagaaagaaaggacaagttcggagaagaaaaaagagaacctgaaacaaaaggagggaaagtaaagaccaacaagagaaaaagac
